United States Patent Application Publication US 2005/0228172 A9 - sequence listing, part 126

SEQ ID NO: 588997 - DNA, 589 bp, Homo sapiens
tgagaacagtatggggaaaaccacccccatgattaacttacctcccactgagtccctccacgacacatgggaattatgggagctacaattcaagatgagatttgggtgggcacacagccaaaccatatcaaccactgtagacatgaccaagttcagacttggtcagtagtcaaatgagcctgtgagagaatggtgccacatctttcctgtaagagcacagcattttaacctgcgatggatttgtgagcagtcattccaactctgtattatgttttctacagttgctgtaacaaattaccacaagcttaatggcttaaaaccatgtaaatatattatcccacagttctgmagtcagaaatctgaaatagataggctaaaagcaaggggtgacaggctgcattcctttctggaggctctaggggagaatctgtttccttgccttttccaacttctagaggccgctggcattccttggctctttgccccttcccttcttcaaagccagcagcagtagttgagtcctccttaacacagcatcactttttttttttttttttgccttcttcttccacttttaaggactctgtga

SEQ ID NO: 588998 - DNA, 553 bp, Homo sapiens
atagtttatttctcaaatttattttttatttttttaaagctagtcctatttctaaaatttaggtgagcatgcaggcaaaatctctcagggcagtgcctgccacacagttactcactcctcaataatgttcatttccctttccttcacaattggttttaatttcttcttctatctgtagcaaatgaataaccacagaagcttctacagctcccttcagaagcatgtgatrgaccttcttttgtgcagctcccagaggacagcagctgggattggagacctatgctttccaagcaggtatcaccaacgtcacttctcacataacaagccccagtttgtataggtttgtaagagttcctatatgatactcttaaaaggcaaaatatgatcatttaactcccctacctatgtagaaaatgattatttcattaaccaactctgcactaattctgtgcttctgatatggtttggctgtgtccccacccaaatcttatcttgaagtgtatctcccttaattcccacatgttacgggaggacctagtggagagataattga

SEQ ID NO: 588999 - DNA, 605 bp, Homo sapiens
gctaagcacttccaacattattgagagggaagtattttaactttaaaaaattatagaattgtcaaaatacaataaagcttaaacatccatcatagttttatttgttctataatacaaaattcacttttttcatcaaaatgaaaaactgattattgtaccatcaaagtcattcctgactcttcaacatacatttgttttcaccatacaagttatatgtgggagccaggcacagtagctcacacctgtaattccagctgcttgggaggctgaggcaggaggatcacttgaggccaggacttccagaccagccgaaaggacatagtgagatcctatctcttaaaacaaattatatgtagtcaggatgaatatttcaaaggaaaaatagtaggaaaatacaagtataagcacactatctcactgccatttttcccacagtggtaacaaccatgaagarttgctttccaaatacaaagtattcagcaacttactttccttataagcatatacagattcatcatatatcagtctgtctcatttatagtggctgaattttttcattgtatacatgtgtcacaatttatttaagcagcctcccttatggtcaa

SEQ ID NO: 589000 - DNA, 605 bp, Homo sapiens
gctaagcacttccaacattattgagagggaagtattttaactttaaaaaattatagaattgtcaaaatacaataaagcttaaacatccatcatagttttatttgttctataatacaaaattcacttttttcatcaaaatgaaaaactgattattgtaccatcaaagtcattcctgactcttcaacatacatttgttttcaccatacaagttatatgtgggagccaggcacagtagctcacacctgtaattccagctgcttgggaggctgaggcaggaggatcacttgaggccaggacttccagaccagccgaaaggacatagtgagatcctatctcttaaaacaaattatatgtagtcaggatgaatatttcaaaggaaaaatagtaggaaaatacaagtataagcacactatctcactgccatttttcccacagtggtaacaaccatgaagagttgctttccaaatacaaagtattcagcaacttactttccttataagcatatacagattcatcatatatcagtctgtctcatttatagtggctgaattttttcattgtatacatgtstcacaatttatttaagcagcctcccttatggtcaa

SEQ ID NO: 589001 - DNA, 525 bp, Homo sapiens
aggaacaggataatcatgctataacacagtaacgaccatacatgacaaaccctcagctataatcatcctcaacaagaaaaagtgaaaacttttcctctaagacctggaacaggataaagatggccacttatgcctcctctattcaacatagaactcttaagtcttagccagggcaattaggcaagagaacgaaatgaaaggcatccaaataggaaagaagaaagtcaaaccatctctgcagatgaaatgatcatagaaaatcttaaagactccaccaaaagtctgttagaactgataaacaaattcactaaagtttcaggatacaaaatcaacatacaaaaatcagtagyatttctatacactaaaagcaaactatctgaaaaagaaataaagaaagtaatttcatttacaatagctataaaaacaaaatagttagaaataaatttaaccacggaagtgaaagatctctatcctgaaatctgtagaacattgatgaaagaaattgaagaagacacaaataaatga

SEQ ID NO: 589002 - DNA, 625 bp, Homo sapiens
atttagaatattttcaatttcccagaaggagtgccatctcctaacaatygtcttatttccctcagccctagacaaccactaatctactttctgtctgagtagatttgactattgcgatcattttatatatacagaattatataacgtgtgacttactgtgtctggcttctttcacttagcatatgttttcctgttttccatattgtagcatacatgattatttaattcctttttatggaagaataatattttctttattgatacagcacaatttgttcacccatttattagttgatggacatctgggttgtttctactttttgttcttgtgaatactactgttatgaacattcatgtagaagtatttgtttgaatatctattttcaattctcttggctatatacctaggaatggaattgcttgatcgtatggtaactctatgtttaactttttgaggaactgatagactgtttttcaaagtggctgcaacattttacatttctaccagtagtgtatgagagttctgatttctccatatccttggtaacacttgttattatctttttttattacaaccatcctagtgtgtgtgaagtggtatttctttctggcttagatttgcatt

SEQ ID NO: 589003 - DNA, 625 bp, Homo sapiens
atttagaatattttcaatttcccagaaggagtgccatctcctaacaatcgtcttatttccctcagccctagacaaccactaatctactttctgtctgagtagatttgactattgcgatcattttatatatacagaattayataacgtgtgacttactgtgtctggcttctttcacttagcatatgttttcctgttttccatattgtagcatacatgattatttaattcctttttatggaagaataatattttctttattgatacagcacaatttgttcacccatttattagttgatggacatctgggttgtttctactttttgttcttgtgaatactactgttatgaacattcatgtagaagtatttgtttgaatatctattttcaattctcttggctatatacctaggaatggaattgcttgatcgtatggtaactctatgtttaactttttgaggaactgatagactgtttttcaaagtggctgcaacattttacatttctaccagtagtgtatgagagttctgatttctccatatccttggtaacacttgttattatctttttttattacaaccatcctagtgtgtgtgaagtggtatttctttctggcttagatttgcatt

SEQ ID NO: 589004 - DNA, 625 bp, Homo sapiens
atttagaatattttcaatttcccagaaggagtgccatctcctaacaatcgtcttatttccctcagccctagacaaccactaatctactttctgtctgagtagatttgactattgcgatcattttatatatacagaattatataacgtgtgacttactgtgtctggcttctttcacttagcatatgttttcctgttttccatattgtagcatacatgattatttaattcctttttatggaagaataatattttctttattgatacrgcacaatttgttcacccatttattagttgatggacatctgggttgtttctactttttgttcttgtgaatactactgttatgaacattcatgtagaagtatttgtttgaatatctattttcaattctcttggctatatacctaggaatggaattgcttgatcgtatggtaactctatgtttaactttttgaggaactgatagactgtttttcaaagtggctgcaacattttacatttctaccagtagtgtatgagagttctgatttctccatatccttggtaacacttgttattatctttttttattacaaccatcctagtgtgtgtgaagtggtatttctttctggcttagatttgcatt

SEQ ID NO: 589005 - DNA, 556 bp, Homo sapiens
gggaattttatagctataaatgcctaaatcaaaaaagatggaaaacttcaaataaacaacataacaatgcacctcaaagaactagagaagccacaacaaaccaaaccaaaaatcagttgaataaataaataataaagatcagagcagatataaatgacattgaaatgaagaatacaaaatatcaatggaacaaaatgttagtttcttgcgaagttaaacaaaatgaacaaacatttaacaaaacaaagaaaataagagagataatccatataaataaaatccaaaataaaaaaagggagacattacaactgatactgcaaaaaatgaaagtatcattagtggctactttgaataactgtatgttaataaatttgaaaagatagaagaaatggacaagttactagatacatacaacctaccaagattgaacagggaagaaaaccaaaatatgaacagaccaacaagaagtaacaagttcaaagccataayaaaaattttccaagtaaaggaaagcatgggtcccaatggcttcactgctggattctgccaaatattt

SEQ ID NO: 589006 - DNA, 531 bp, Homo sapiens
atcaaatctgttcagaacttgtccaattcctgaatgtgaaaattttttttctttaatgacttacagaaaatttccagttattacctttagatattgcctcaataccatcttaaatgcacccaaagtatctaatataataataatttttgtccatcttgctctatattgataactttatttctctgtgatatatatttattatattaattttaatcatccatatctcataggtttttaaattcaattactatatttttatttttggatatcctttgccaaatctgctcttcatttctttttaaatgtctttagtgtttatgtatgttcattasatattattaattttataatttttttcaaattattcatctatttttacacatacttttaattctgctgttttacatctgctgactcttattgctggttttttttttttttttttgagacagagtctcactttgttgcccaagctgggttgcaatggtgcaatatcagcttgctgcaacttccgcctcccaggttcaagca

SEQ ID NO: 589007 - DNA, 582 bp, Homo sapiens
caaaaagcattttatttggagagtaatttagatctttaggaatatattggctatattcaagttcctatacttaagtgctatacaataataattaaaggtaccagatttagtaaagggattttgcaccatgaatttttttttcctgtaaagatacaaatatatctccttagtagaacagataacctcacagatttatgacactgttatatatcaatctatatttatttatttaaccaaacaatcttaatgttattttgctaaattgcttctaaatgtcccagtttctcagattccctttgtgtcatttaaaacatctatttgttatttattaattcaagttaatatctttaaaacctattcattttatatttgtctgaaagctatgattttaagcttctaaaaattatattttaatagaaatcagggactagttacctttaatctgggggagatactacatattttaaagcctgaagtcaatgtctagacaaaagtttctgcttaacatcaaagggtatgcaacatttgctgtggctctcaaatattaagaaaggaaaacayaactgggaatttgtcactagc

SEQ ID NO: 589008 - DNA, 582 bp, Homo sapiens
caaaaagcattttatttggagagtaatttagatctttaggaatatattggctatattcaagttcctatacttaagtgctatacaataataattaaaggtaccagatttagtaaagggattttgcaccatgaatttttttttcctgtaaagatacaaatatatctccttagtagaacagataacctcacagatttatgacactgttatatatcaatctatatttatttatttaaccaaacaatcttaatgttattttgctaaattgcttctaaatgtcccagtttctcagattccctttgtgtcatttaaaacatctatttgttatttattaattcaagttaatatctttaaaacctattcattttatatttgtctgaaagctatgattttaagcttctaaaaattatattttaatagaaatcagggactagttacctttaatctgggggagatactacrtattttaaagcctgaagtcaatgtctagacaaaagtttctgcttaacatcaaagggtatgcaacatttgctgtggctctcaaatattaagaaaggaaaacacaactgggaatttgtcactagc

SEQ ID NO: 589009 - DNA, 565 bp, Homo sapiens
agtgctagtgacaaattcccagttgtgttttcctttcttaatatttgagagccacagccaatgttgcataccctttgatgttaagcagaaacttttgtctagacattgacttcaggctttaaaatatgtagtatctcccccagattaaaggtaactagtccctgatttctattaaaatataatytttagaagcttaaaatcatagctctcagacaaatataaaatgaataggttttaaagatattaacttgaattaataaataacaaatagatgttttaaatgacacaaagggaatctgagaaactgggacatttagaagcaatttagcaaaataacattaagattgcttggttaaataaataaatatagattgatatataacagtgtcataaatctgtgaggttatctgttctactaaggagatatatttgtatctttacaggaaaaaaaagttcatggtgcaaaatccctttactaaatctggtacctttaattattattgtatagcacttaagtataggaacttgaatatagccaatatattcctaaagatctaaattactc

SEQ ID NO: 589010 - DNA, 498 bp, Homo sapiens
ctcttaaaaatattcttttaaaacttctaattattaggtttttttttatctcttcagtacattaaaatgtctggtggtaggaaaatactggactcatatatgactgtctacrtgatttgcagggcccagcgcaaaatgaagtggatgttgtacctcgttcaaagtgttaagcgtttcaagatggcaacaggagagcattaggccaagtatgaggtcattatgtacatgggtccttgtgtgaccacacaggtcacaggaacatgaagctagacctgagtgtatattcagataggtaaatcttacagatttttaaaactcaataaaagaaaaactacatttcatgtgtgaacacaaaaattggaattaaattggcaatagcattgggatttgtgctcagagtcacagtttacatctgaccacaatttctatatgaattttttaagataaaacagtaagaattttaaagaaggtttctgaaatttaaaaattataataaca

SEQ ID NO: 589011 - DNA, 498 bp, Homo sapiens
ctcttaaaaatattcttttaaaacttctaattattaggtttttttttatctcttcagtacattaaaatgtctggtggtaggaaaatactggactcatatatgactgtctacatgatttgcagggcccagygcaaaatgaagtggatgttgtacctcgttcaaagtgttaagcgtttcaagatggcaacaggagagcattaggccaagtatgaggtcattatgtacatgggtccttgtgtgaccacacaggtcacaggaacatgaagctagacctgagtgtatattcagataggtaaatcttacagatttttaaaactcaataaaagaaaaactacatttcatgtgtgaacacaaaaattggaattaaattggcaatagcattgggatttgtgctcagagtcacagtttacatctgaccacaatttctatatgaattttttaagataaaacagtaagaattttaaagaaggtttctgaaatttaaaaattataataaca

SEQ ID NO: 589012 - DNA, 493 bp, Homo sapiens
tattataatttttaaatttcagaaaccttctttaaaattcttactgttttatcttaaaaaattcatatagaaattgtggtcagatgtaaactgtgactctgagcacaaatcccaatgctattgccaattaaattccaatttttgtgttcacacatgaaatgtagtttttcttttattgagttttaaaaatctgtaagatttacctatctgaatatacactcaggtctagcttcatgttcctgtgacctctgtggtcacacaaggacccatgtacataatgacctcatacttggcctaatgctctgctgttgccatcttgaaacgcttaacactttgaacgaggtacaacatccacktcattttgcactgggccctgcaaatcacgtagacagtcatatatgagtccagtattttcctaccaccagacattttgatgtactgaagagataaaaaaaaaaacctaataattagaagttttaaaagaatttttttt

SEQ ID NO: 589013 - DNA, 498 bp, Homo sapiens
ctcttaaaaatattcttttaaaacttctaattattaggtttttttttatctcttcagtacattaaaatgtctggtggtaggaaaatactggactcatatatgactgtctacatgatttgcagggcccagcgcaaaatgaagtggatgttgtacctcgttcaaagtgttaagcgtttcaagatggcaacagsagagcattaggccaagtatgaggtcattatgtacatgggtccttgtgtgaccacacaggtcacaggaacatgaagctagacctgagtgtatattcagataggtaaatcttacagatttttaaaactcaataaaagaaaaactacatttcatgtgtgaacacaaaaattggaattaaattggcaatagcattgggatttgtgctcagagtcacagtttacatctgaccacaatttctatatgaattttttaagataaaacagtaagaattttaaagaaggtttctgaaatttaaaaattataataaca

SEQ ID NO: 589014 - DNA, 623 bp, Homo sapiens
agcttcttggaaaacctgacttgataaactatcctatttgaaatacagatatatatgcatttaacaatttttgacattattagcacaytgaatattaaatagtatctgaagagagatacctttaaaaatgaagacaccttcctattgggattttcttcaaaacaaatagattatttttaaaaagattacaactatagcaacttcagtctctcctgttttatctactagagtgatttgcttcctctgcctttcttaaagtgattggttaaaatgttttagcacttagcagtttcttcctagttttgcagatatggccctgaaatggcttatgagtaaggcaaatagaggatgttcttactgggctagtgcttttatttctctctttcgcttgttctattttttaagtgaaaatggcattagcatcttatttgtcaggctttcattttcgtgtttgagaattccacttgtagataaccaatagctataacctgttcaggtctttaaaaatatagcttattgaatgagcagtcacacacaagaaattccgttcttcccatagtccatcatgctttacccgtattcagcttctcacttctgtatctaaaaacactagattttatcat

SEQ ID NO: 589015 - DNA, 623 bp, Homo sapiens
agcttcttggaaaacctgacttgataaactatcctatttgaaatacagatatatatgcatttaacaatttttgacattattagcacattgaatattaaatagtatctgaagagagatacctttaaaaatgaaracaccttcctattgggattttcttcaaaacaaatagattatttttaaaaagattacaactatagcaacttcagtctctcctgttttatctactagagtgatttgcttcctctgcctttcttaaagtgattggttaaaatgttttagcacttagcagtttcttcctagttttgcagatatggccctgaaatggcttatgagtaaggcaaatagaggatgttcttactgggctagtgcttttatttctctctttcgcttgttctattttttaagtgaaaatggcattagcatcttatttgtcaggctttcattttcgtgtttgagaattccacttgtagataaccaatagctataacctgttcaggtctttaaaaatatagcttattgaatgagcagtcacacacaagaaattccgttcttcccatagtccatcatgctttacccgtattcagcttctcacttctgtatctaaaaacactagattttatcat

SEQ ID NO: 589016 - DNA, 623 bp, Homo sapiens
agcttcttggaaaacctgacttgataaactatcctatttgaaatacagatatatatgcatttaacaatttttgacattattagcacattgaatattaaatagtatctgaagagagatacctttaaaaatgaagacaccttcctattgggattttcttcaaaacaaatagattatttttaaaaagattacaactatagcaacttcagtctctcctgttttatctactagagtgrtttgcttcctctgcctttcttaaagtgattggttaaaatgttttagcacttagcagtttcttcctagttttgcagatatggccctgaaatggcttatgagtaaggcaaatagaggatgttcttactgggctagtgcttttatttctctctttcgcttgttctattttttaagtgaaaatggcattagcatcttatttgtcaggctttcattttcgtgtttgagaattccacttgtagataaccaatagctataacctgttcaggtctttaaaaatatagcttattgaatgagcagtcacacacaagaaattccgttcttcccatagtccatcatgctttacccgtattcagcttctcacttctgtatctaaaaacactagattttatcat

SEQ ID NO: 589017 - DNA, 623 bp, Homo sapiens
agcttcttggaaaacctgacttgataaactatcctatttgaaatacagatatatatgcatttaacaatttttgacattattagcacattgaatattaaatagtatctgaagagagatacctttaaaaatgaagacaccttcctattgggattttcttcaaaacaaatagattatttttaaaaagattacaactatagcaacttcagtctctcctgttttatctactagagtgatttgcttcctctgcctttcttaaagtgattggttaaaatgttttagcacttagcastttcttcctagttttgcagatatggccctgaaatggcttatgagtaaggcaaatagaggatgttcttactgggctagtgcttttatttctctctttcgcttgttctattttttaagtgaaaatggcattagcatcttatttgtcaggctttcattttcgtgtttgagaattccacttgtagataaccaatagctataacctgttcaggtctttaaaaatatagcttattgaatgagcagtcacacacaagaaattccgttcttcccatagtccatcatgctttacccgtattcagcttctcacttctgtatctaaaaacactagattttatcat

SEQ ID NO: 589018 - DNA, 419 bp, Homo sapiens
aagtatgcttctcattaaggtctaatatccagcatctgtaaggaatttaaacaaatctacaagcaaaaaatccaaaaaatccacctaaaaaatgggcaaaggacatgaacagacatttctcaaaaggtgwcgtaacaagcagacaagaaacattaaaaattgctaaacttcactaatcatcacataaattcaaatgcaaaaaccacaatgaaataccgtctcacaccagtcagaatggcaattattaaaacttacaaaaaacaacagatgttgagaagtctgtggagaaatgggaacgcttatacattgtaggtgggaatgcaaactagttcagccactgtggagagaagttttgagattcttcaaataacttaaaatagaactaccatttgacccagcaatcccactattgagtatat

SEQ ID NO: 589019 - DNA, 419 bp, Homo sapiens
aagtatgcttctcattaaggtctaatatccagcatctgtaaggaatttaaacaaatctacaagcaaaaaatccaaaaaatccacctaaaaaatgggcaaaggacatgaacagacatttctcaaaaggtgtcgtaacaagcagacaagaaacattaaaaattgctraacttcactaatcatcacataaattcaaatgcaaaaaccacaatgaaataccgtctcacaccagtcagaatggcaattattaaaacttacaaaaaacaacagatgttgagaagtctgtggagaaatgggaacgcttatacattgtaggtgggaatgcaaactagttcagccactgtggagagaagttttgagattcttcaaataacttaaaatagaactaccatttgacccagcaatcccactattgagtatat

SEQ ID NO: 589020 - DNA, 411 bp, Homo sapiens
acaccttatcttaacccatacactcctgtctattgattccggtctttagataaattattttagccagttgtcaaatgccagtcagaaaatcttcgaattcacctttaacctggaagccttcacccaccccacccccacctgctttgagttgtctcacctttcccaattttaccaatgtgtatcttaggtgtactkattgatgtcttatgtctccctcacatgtataaatccaagctgtagcccaacaaccttggcacatgttcttaggatctcctgggctgtgtgacaggccgaggtcactcatatttgcctcagaataaatctcttcaaatatttctcagagtttgactcttttcttcaacacgcattaccactgtagtagctctgaagtggttgagttggaggtaaccc

SEQ ID NO: 589021 - DNA, 479 bp, Homo sapiens
caggctatacttagagtaatcacatcatacctgaatctgaagacgagacagtaaacttagagaagtactgaagccttrgaagccttggatatattgaatatgttctattttagaaagaaaaggtgagataatgtatgctggcagtcaaccaacagcatatgctcctaatgaacaactggagagtcatttaagttcaatgttggggattttattagaaactgtaagatgaacacacaattcattttctctttccttgtaaatttggacaatatttgctatattcgcctatattttggcatagaaatttaggttctaagtatatagtagtgatgtagccttcttacagggtcacatagacccagaattaataatttttaacactctttttatcctctctgggtggctaacattaaaacaatccacagaaaacccccaagagctatgtattgaggatggcaaaaccacagatgggaaaataa

SEQ ID NO: 589022 - DNA, 391 bp, Homo sapiens
  misc_feature 351, 352, 353, 354, 355, 356, 357, 358, 359, 360, 361, 362,363, 364, 365, 366, 367, 368, 369, 370, 371, 372, 373, 374,375, 376, 377, 378, 379, 380, 381, 382, 383, 384, 385, 386,387, 388, 389, 390, 391: n = A,T,C or G
ctttgtcttctcaatatacatccctatatcttgcaaggcatttagcaaattaaagtacatttaccagcctctttgcactttgatgagtcaatgtaactaakttttggacgataacgtgtgaacagaagcaatatttgcagcatctaaaagaaatgtgtgtgaccttttacccctgttaccatgctttagaattcatagctgttttcagctattttatatataaaataagcatataaaagcgacaaaataaatcaacatcgtagagctatcgtgacatcactggacttctcctaaaacttttacatgaaaaatatgtgaattatttcaagctgctctacttgtttttcatannnnnnnnnnnnnnnnnnnnnnnnnnnnnnnnnnnnnnnnn

SEQ ID NO: 589023 - DNA, 391 bp, Homo sapiens
  misc_feature 351, 352, 353, 354, 355, 356, 357, 358, 359, 360, 361, 362,363, 364, 365, 366, 367, 368, 369, 370, 371, 372, 373, 374,375, 376, 377, 378, 379, 380, 381, 382, 383, 384, 385, 386,387, 388, 389, 390, 391: n = A,T,C or G
ctttgtcttctcaatatacatccctatatcttgcaaggcatttagcaaattaaagtacatttaccagcctctttgcactttgatgagtcaatgtaactaagttttggacgataacgtgtgaacagaagcaatatttgcagcatctaaaagaaatgtgtgtgaccttttacccctgttaccatgctttagaattcatagctgttttcagctattttrtatataaaataagcatataaaagcgacaaaataaatcaacatcgtagagctatcgtgacatcactggacttctcctaaaacttttacatgaaaaatatgtgaattatttcaagctgctctacttgtttttcatannnnnnnnnnnnnnnnnnnnnnnnnnnnnnnnnnnnnnnnn

SEQ ID NO: 589024 - DNA, 449 bp, Homo sapiens
tataacgttagttgcatttcaaaataaaatggctgccttaagtgatgcaaaattacatatttatacattctctgaattaagcaggattaattgaaaagtggwtatgaaggcatgactgcaagctacaaattgatcctatttttagtaacttgctctagctgagatgttatatgttcagatttgttgacacgaagctttattgagaagcattacttattcccaataactcaaggaggagcctgttttgggaggaaaaaccacatcaagtatgttttgttgaatcaagaggattttatttttagaaaactactaatgattttttctgaaaatgtgactattttgaaatctaagaaaaatcaaatatttgatacttaacgtaatttgcaacttgacataaaactactcagtttagttggtcataatatactcattcctaacttattccactt

SEQ ID NO: 589025 - DNA, 449 bp, Homo sapiens
tataacgttagttgcatttcaaaataaaatggctgccttaagtgatgcaaaattacatatttatacattctctgaattaagcaggattaattgaaaagtggatatgaaggcatgactgcaagctacaaattgatcctatttttagtaacttgctctagctgagatgttatatgttcagatttgttgacacgaagctttattgagaagcattacttattcccaataactcaaggaggagcctgttttgggaggaaaaaccacatcaagtatgttttgttgaatcaagaggattttatttttagaaaactactaatgattttttctgaaaaygtgactattttgaaatctaagaaaaatcaaatatttgatacttaacgtaatttgcaacttgacataaaactactcagtttagttggtcataatatactcattcctaacttattccactt

SEQ ID NO: 589026 - DNA, 449 bp, Homo sapiens
tataacgttagttgcatttcaaaataaaatggctgccttaagtgatgcaaaattacatatttatacattctctgaattaagcaggattaattgaaaagtggatatgaaggcatgactgcaagctacaaattgatcctatttttagtaacttgctctagctgagatgttatatgttcagatttgttgacacgaagctttattgagaagcattacttattcccaataactcaaggaggagcctgttttgggaggaaaaaccacatcaagtatgttttgttgaatcaagaggattttatttttagaaaactactaatgattttttctgaaaatgtgactattttgaaatctaagaaaaatcaaatatttgatacttaacrtaatttgcaacttgacataaaactactcagtttagttggtcataatatactcattcctaacttattccactt

SEQ ID NO: 589027 - DNA, 579 bp, Homo sapiens
cagtttttcattatgctgtgagtgatgtcctgaaacacattaacttgatattttatctattgtttaatatcattccccatgaattacwtataatggtaatagattaatatctttgggagtactgtaaataattatataattcagccaggaattaccttgttcatttgctaacattgttatattctttcaaaagcaaatagcaaaaataattttcaactgacatacatatggaatacttactcttcaactatctcaaaatgcccagattttctcaataactttcctattgatttaattataggcattagaaatgagtattctagtacaagaataaatagtgttgtctctccttcatcccccagtactcctaaatatttactaaaaatctcaatgctaatcaatagtggaagtatttggtgcctaatgatggcattccattccttccttgaagtccaacacacagagtaatagaaatctcatgaatgtgattgtgtgaggttgctcataatacttggatctatagagagaatcacttaacagacattagttgaatcagaaactacttctcatttcattgag

SEQ ID NO: 589028 - DNA, 579 bp, Homo sapiens
cagtttttcattatgctgtgagtgatgtcctgaaacacattaacttgatattttatctattgtttaatatcattccccatgaattacttataatggtaatagattaatatctttgggagtactgtaaataattatataattcagccaggaattaccttgttcatttgctaacattgttatattctttcaaaagcaaatagcaaaaataattttcaactgacatacatatggaatacttactcttcaactatctcaaaatgcccagattttctcmataactttcctattgatttaattataggcattagaaatgagtattctagtacaagaataaatagtgttgtctctccttcatcccccagtactcctaaatatttactaaaaatctcaatgctaatcaatagtggaagtatttggtgcctaatgatggcattccattccttccttgaagtccaacacacagagtaatagaaatctcatgaatgtgattgtgtgaggttgctcataatacttggatctatagagagaatcacttaacagacattagttgaatcagaaactacttctcatttcattgag

SEQ ID NO: 589029 - DNA, 579 bp, Homo sapiens
cagtttttcattatgctgtgagtgatgtcctgaaacacattaacttgatattttatctattgtttaatatcattccccatgaattacttataatggtaatagattaatatctttgggagtactgtaaataattatataattcagccaggaattaccttgttcatttgctaacattgttatattctttcaaaagcaaatagcaaaaataattttcaactgacatacatatggaatacttactcttcaactatctcaaaatgcccagattttctcaataactttcctattgatttaattataggcattagaaatgagtattctagtacaagaataaatagtgttgtctctccttcatcccccagtactcctaaatatttactaaaaatctcaatgctaatcaatagtggaagtatttggtgcctaatgatggcattccattccttccttgaagtccaacacacagagtaatagaaatctcatgaatgtgattgtgtgaggttgctcataatacttggatctatagagagaatcacttaacagacattagytgaatcagaaactacttctcatttcattgag

SEQ ID NO: 589030 - DNA, 612 bp, Homo sapiens
accactgtgttaaaagataaactaagacacaataaaattttaaatatgttatttacacaatgatttatgactcaggcagctccaaaccataaaagtggcttaagagcaccactgagggatcacagggggaggcttttagaggacaggcacagaagaaaactaaagatartatttgactatttatagttgtacagttatttgtaccttatttggtaccaaagttgtacgttattaggtctatcccactggaaagtcttcagttgtatgattatgtgtgttggctacttctgattggttgaacttaagttctgtttttctttaatatagaaattgataagaatagctcaagtttcccttatatctgtagatcaaacaaggtttagatcacttatgatgcctaactggttttgtctgctcagaaattcttcaggcctggactccattttaatttactttaatgattgttactttaaatttggattaaacagtggattcatatgtactgagtgaaaaaaaatggaaatagatgttataaaatttatttgaaatcattcagccaggatgttttaaacagcataaattagcagaattaccaaaaacacattttgaaaa

SEQ ID NO: 589031 - DNA, 541 bp, Homo sapiens
tgaaaagggcatgcttatacattgctggtgggaatgtaaattagtacmtcctttatgtaaagcattatggagatttttgaaataactaaaagtagatctagcattcagtccatcaatcccactactggttaactactcaaattaaaaaaagtcattgtatcaaaaatacatctgcatgtatatgtttattgcagtacaattcacaattacaaagatacagaaccaacctaagtgctcctcaaccaatgagtggataaagaaatgtggtaaacatacaccatgacatactactcagccctaaaaagaatgaaataatgtcatttgcagcaactccaactggagctggaggccattattctaagtgaagtaactcaggaatggaaaaccaaatatcatatattctcacttttaagtggtagctaagccatgggtatgcatacagagtggtataatggacattggagaccactaatggggagagtaggaggtgggtgagggataaaacactacatattgggtacaatgtacactacttgggtga

SEQ ID NO: 589032 - DNA, 534 bp, Homo sapiens
aagaaactttagtatacggcccaggaatctgtgtttgyacaagctctctgggttattctgatacacactacagtttgagtaccaaggaaatgggtaataagtacataatttcattaatacaggaatatataatggaaacgagttgggtgggggggaggtgaaatggtgaaccaaaccctctctaactaagatgaggccacatgtaggttcttcatgcacagaacctattggtttcctcttcttctggaacctagcccatctttagtgtcctgttgagtctggacagatagcagtactgtccccatctttgacatcattcttatggaagacaccaatgtattcaatgatgatcagctttctagtggagtttccaatagcccattgcagggaaacacagggactgccaaattgctcgagagctttctaaagccattcacaaggtatctcaaaccagctacataaaggaaaactttggcttcagtaactgtgataggcttcagaagatagttgtaggatgagtgatcacaatgaact

SEQ ID NO: 589033 - DNA, 534 bp, Homo sapiens
aagaaactttagtatacggcccaggaatctgtgtttgtacaagctctctgggttattctgatacacactacagtttgagtaccaaggaaatgggtaataagtacataatttcattaatacaggaatatataatggaaacgagttgggtgggggggaggtgaaatggtgaaccaaaccctctctaactaagatgaggccacatgtaggttcttcatgcacagaacctattggtttcctcttcttctggaacctagcccatctttagtgtcctgttgagtctggacagatagcartactgtccccatctttgacatcattcttatggaagacaccaatgtattcaatgatgatcagctttctagtggagtttccaatagcccattgcagggaaacacagggactgccaaattgctcgagagctttctaaagccattcacaaggtatctcaaaccagctacataaaggaaaactttggcttcagtaactgtgataggcttcagaagatagttgtaggatgagtgatcacaatgaact

SEQ ID NO: 589034 - DNA, 486 bp, Homo sapiens
agagtctcactctgttgcccaggctggagtgcagtggcaccagccgtcttagctcactgcaacttctccctcctgggttcaagcaattctcctgtctcatcctccagagtaggtgggactacatgcatgcaccaccatgcctggctaatttttgtatttttagtagagacaaggtttcaccatgttgattttgatgcttgcttttaagctttgttaggtaggtctagacaaccattagtctaggtctaattgggccccaataytgaaggaataccgttctgagaacttcaatgccacatgtattagatggtcttctcactctaaggagaatacaaactattttcagccttctctgaactctaaggcttgcttggcttgctcttttccaatagttctttcccagccttagtgaagtttcttcataagcatgtgatgatcaatactcagttgaagactagaaccttatacagatctccagagttctct

SEQ ID NO: 589035 - DNA, 599 bp, Homo sapiens
gctgcagtgatccgtgttggcaccactgcactccagcctgggcaacacagaaagaccctgtctcaaaaaaattaaaagactgaaaatttatgaataaatttaacaaaagaagtgcaaaacttgtacactgaaaactataaacacagttgggagaaattaaagaacacttaaataaatggaaagacatccacattcatggattgggagacttaatatggttaagacggcaatacttcttaaagatctctgggttcacagaatccatatcagaatcccaggtgaattctctgcagaaagttacaagctgttctgaaaattcatatgaaaattcaaggaacccaggatagttaaaaaaatcttcaaaaagaagaacaaagttggatgactcacaattcctgatttgaaaacttactacaaagctacaataatcaccaggtgtagtggctcacagctacaatcccagcactttgggaggccgaggcaggaggatcacttgagtccaggagttcaagaccagcctggtcaacatagggagaccctgtyactaaaactaatttaaaaagtagccaagtgtggtggtgtgcacctgtggtcccagc

SEQ ID NO: 589036 - DNA, 288 bp, Homo sapiens
acatccggagacccagagaaaccaagtaacattgcattcctggctgtgtttcttttttattttctgttttggggattttgtttttggagtttttttgagacaggatcttgctctgttacccaggctggagtgcagtgatatgaacatggctcactgcagccttgaaccctggcctcaagcaatcctcttgccctcagcctctcaaatagctaggactacaggagcacatcaatacacccagctaactagtattttgtgtasagctgggtctcactgtgttgcccaggc

SEQ ID NO: 589037 - DNA, 465 bp, Homo sapiens
gctgctcacttcctagacggggtggcgggcgggcagaggctgtaatcttagcactttgggaggccaaggcaggcggctgggaggtggaggttgtagtgagccgagatcacgccactgcactccagcctgggcaacattgagcaatgagtgagcgagactccatctgcaatcccagcacctcgggagaccgaggtgggcagatcacccgaggccaggagctggaaaccagcccggtcaacacagcgaaaccctgtctgcaccaaaaatacaaaaaccagtcaagagtggcggcgcgtgcctggaatcccaggcacttggcaggccgaggcaggagaatcacyggagcccaaggcagggaggttgcagcgagccgagatcatggcagtacagtccaggctctgcaagagagggagacggtagaaagagggagacggagagcgagagcgagagggagagagagggaga

SEQ ID NO: 589038 - DNA, 594 bp, Homo sapiens
tcaaacccctttgtatccctctcgtaaggacccttgagatgagatgacccatctgaataatctcaagatcctccactaatcacatctataatgtccctgctatcatgtaaagaaacatactcatagattccagggattcagacacagacatttggggggtygttattctatagaaaacaatgggacatttcccaagagttgaacatgtgtattgcgtacaacccaggagttgcaaattccagcctacgtttggggaactcttgcacctgggcaccaggagacaggtacccagtactccctgggtctattcctcataaccctctgatcttgcctccttttattcttggccacacttactcttctccagccacacaggctgctctggaatgaggaattgggacagcttttgtcctggtttctggaagggagcctctaaatccttggaatttccccagtgacaggaatgtctttgttattcctggtgggcacctcagaccacatctgaatttatgccaagatggctcagagtggggctggtcaggcctgaaagaccaaccccgtgattagagggtgggccttggagccacatgctat

SEQ ID NO: 589039 - DNA, 570 bp, Homo sapiens
tgaaaccctgcatgtaggggcagggggaggtgctgtatttccattgagtaccaaacaatagttggcataaatgaacaagagctacacccatcaacatgggtggatttcacaaacataatattgatgacacaaacaagtgacagtagaaagagtttgaaaccattcccaaaagttcaaaacccggcatacctatctaggggtggaagtttaaggggttagggaaataaacatcgggatagtggttacctctgggaggaggtggtggggagggcttgtgccccactgcttcaccccagtcatgggtttgctcctgagactgcacatctacatttcacagttcttcagtaygtaggacatatttcacaattaaaaaaaaaaagagagagacaggaacatagcaggatgacagagtagtgttgagttctctgttccacagaagaatttatcgtgaatttggcataatagcaggaccctatgatatcctctacagcaggagtccccccaccccaaggccacagactggcactggtctgtggtctcttaggaatggggtcgcacagtgggaggtga

SEQ ID NO: 589040 - DNA, 551 bp, Homo sapiens
caccttctctccgtctctcgcgccctccctcctcctcttctctccatttagccttatcaagtgcttcccaagttctctccaattactatgaatggcttcatcacagcataacacagtaygtgctcatcttctaaaaccaggacatgaggcatccctgctcccactaagactgtgcaaagttaaggctggagcagcagtggcccactcagggctcgcccctccctcggagcccttcacaggctcctggagaagagagactcagaggagaccctgcctgagagctcacacctgagatcacctggtgtgtaggggacaagggggggatgcttaggaccataggggggtctcagggccagcctggccttgtgggagggtctcagggccagcctaaccttgtgagggtcttaagaccaggctggccttgtagggggtcttaggaccagcgtggccttgtggggagtctcaggaccagtctaacattgtagggtatctcaggaccagcctggccttatagagggtcttgggaccaggctaaccttgcagggaatctt

SEQ ID NO: 589041 - DNA, 551 bp, Homo sapiens
caccttctctccgtctctcgcgccctccctcctcctcttctctccatttagccttatcaagtgcttcccaagttctctccaattactatgaatggcttcatcacagcataacacagtacgtgctcatcttctaaaaccaggacatgaggcatccctgctcccactaagactgtgcaaagttaaggctggagcagcagtggcccactcagggctcgcccctccctcrgagcccttcacaggctcctggagaagagagactcagaggagaccctgcctgagagctcacacctgagatcacctggtgtgtaggggacaagggggggatgcttaggaccataggggggtctcagggccagcctggccttgtgggagggtctcagggccagcctaaccttgtgagggtcttaagaccaggctggccttgtagggggtcttaggaccagcgtggccttgtggggagtctcaggaccagtctaacattgtagggtatctcaggaccagcctggccttatagagggtcttgggaccaggctaaccttgcagggaatctt

SEQ ID NO: 589042 - DNA, 380 bp, Homo sapiens
ctgaactgctctgacattctcctgaaaaacccctagtgccctttttattgcccccaaaagaaaagttaatgagatggtagatttcaagcaaaaaaacaggccctctttcttgcaaaatatgcttacagttgccattgaagttggatgttagccgtgaatgcacttgcctttaatgaaaccagtttaatcgttcacacttgatcaagtataacatgagcaaacaaaggaaataagccagcatatttctgtagagtgtaagtgttgatgttgggtcaccccctcccccyaccctgcccccctgtaaaagggagagagggttgaaggcaaagggaatttatggcgctgattggttttttgtgccccaggggtaggggacccca

SEQ ID NO: 589043 - DNA, 518 bp, Homo sapiens
gtatcttattaactgaaggaagccaatctgaaatggctatatagtgtatgattccaactataggataccctggaaaagacagcactatgaatacagtaaaatgatcagtggtcaccaggagttagagggagggaggaagggaaggatgaataggcatggtacagattttggggacagtgaaatgttctgcatgatgctataatagkggatatatgtaattatacatttgttaggacccataaatggacaacatcaagagtgaaccctactatggactacaggtgatgacaaagtgtcagtgtagcttcatcaagtctaacaaatgtaccactctggtgctgatgttcctagtgagggaggatacctggagtaagaaggggcatacatgggaactctctattttcctctccatttttctgtgaccctaaaactgctctaaaaaaaaaataaagtttgaaaatggcagataagaggaaggactgacttgccgctcccactcggacagacaaagcagcata

SEQ ID NO: 589044 - DNA, 588 bp, Homo sapiens
aagcttgtaaaggataaatgacttagtacctgcaaattacatggaccagtgcttggagacgtaagcactttgccaacttgctgtcagtgtggttggttattttcccccatctccccagttttgttttgttttgttttgttatttatttwtttttttttttgagacaagatcttgctctgtcgtccagggtgagtgccagcacagcttactacagcctcgacgtcctgggctcaagcagtcctcccacctcagcctcccaaatagctgagactgcaggcatatgccaccatgcccagctaatctttaaacttttggtagaggtcgggtctcactatgttgcccaagctggtgtcaaactcctggcctcaagtgatccttccaccttggcctcccaaagtgctgggattacaggtgtgagccaccacgctggccctcctcagcttttttttttttttttaaataaccattattattccatattttttctatgaaatcatttataaacataaaatatcttaagtctgtaattcagtttatgatacatattcagttatgatacattctttgcatttcactgtttcatgtttc

SEQ ID NO: 589045 - DNA, 588 bp, Homo sapiens
aagcttgtaaaggataaatgacttagtacctgcaaattacatggaccagtgcttggagacgtaagcactttgccaacttgctgtcagtgtggttggttattttcccccatctccccagttttgttttgttttgttttgttatttatttttttttttttttgagacaagatcttgctctgtcgtccagggtgagtgccagcacagcttactacagcctcgacgtcctgggctcaagcagtcctcccacctcagcctcccaaatagctgagactgcaggcatatgccacmatgcccagctaatctttaaacttttggtagaggtcgggtctcactatgttgcccaagctggtgtcaaactcctggcctcaagtgatccttccaccttggcctcccaaagtgctgggattacaggtgtgagccaccacgctggccctcctcagcttttttttttttttttaaataaccattattattccatattttttctatgaaatcatttataaacataaaatatcttaagtctgtaattcagtttatgatacatattcagttatgatacattctttgcatttcactgtttcatgtttc

SEQ ID NO: 589046 - DNA, 533 bp, Homo sapiens
tccttccaccttggcctcccaaagtgctgggattacaggtgtgagccaccacgctggccctcctcagcttttttttttttttttaaataaccattattattccatattttttctatgaaatcwtttataaacataaaatatcttaagtctgtaattcagtttatgatacatattcagttatgatacattctttgcatttcactgtttcatgtttcagccaaatcccatccccccaacctttttttttttttttttttttttgagccagggactctctgtcgcccagactgtagtacagtggcatgatctcggctcaccgcagcctcttcctattaaagtactgggattataggtgtgagccaccgtgtctggcccctatccctctattaagtgcctttcagcaattctgtttttagaggaaaattcctttttgcttctgcttgctccttttaccacccctgcccatgaaagggggagttacctgtccagagcaagtatagctttggccgtgatcttcaaggactattgcattg

SEQ ID NO: 589047 - DNA, 533 bp, Homo sapiens
tccttccaccttggcctcccaaagtgctgggattacaggtgtgagccaccacgctggccctcctcagcttttttttttttttttaaataaccattattattccatattttttctatgaaatcatttwtaaacataaaatatcttaagtctgtaattcagtttatgatacatattcagttatgatacattctttgcatttcactgtttcatgtttcagccaaatcccatccccccaacctttttttttttttttttttttttgagccagggactctctgtcgcccagactgtagtacagtggcatgatctcggctcaccgcagcctcttcctattaaagtactgggattataggtgtgagccaccgtgtctggcccctatccctctattaagtgcctttcagcaattctgtttttagaggaaaattcctttttgcttctgcttgctccttttaccacccctgcccatgaaagggggagttacctgtccagagcaagtatagctttggccgtgatcttcaaggactattgcattg

SEQ ID NO: 589048 - DNA, 638 bp, Homo sapiens
gtgttcatttttatatcagtttaagagtatgattttaccttttcctgaacattatcttttagcaaaaatccttccaaatcctgattgtttgtggaaagattcagccacttgtttttcctgtctttccaagatttggttacccagatcaattttctggagacttttaaactagagcttttaaacatcagtcatttaaaacaaaacacagctgaagttctttctaatgccattttctgaattgtcaggttaattaattggaaatcacaggactgtgtatctaagataacttcctgttttaccagtcctgcatcaaggatctgatagaagttcagggctggcagtgagacaggaaaagccaggaaagagaaagtggagaaggtgcttttaaatgctcagtgctagcatttcacagaaggaagggctcatgatcatgcttaatggaagactcagacctggaacccacttcttcagggacttctcagtcccatcctgcttctcagaaaaggaggagagatggaagcttttacttttatgacacaattgtcctcatccacagccaagatccccaaactgtayagtgcaatgcctgtatttctgatggtctcaggggaagatggagggcctgtaagtggctgaga

SEQ ID NO: 589049 - DNA, 540 bp, Homo sapiens
ggggtcccccagggctgctaagaggcagatagtaaagccattcagagcaaggctttgggatcacacagacctggcttctctatttcctagctgtggacctcggggaaaatggcctctgtgaacctcagtatgctcatccataagttgggaattgagtaaaacctacctcacagggttgttacaaggattcaataagttgatgcatgcaaagtgcctagtacacagcctggcttgttgaagaagccagtaaggtagttacaattgcacgagttatcattctacagaagtgtgtccaccacacgggcccttgctctggctggcagatcagaatcctcatgccctttggctgaagcattgagaaggggcaagrggaagggccagcacagccacagaatgaaggctgagatggctgggtgggtgggcttctgtccctgtgcccttccccagccctctagccatctcatcatagggcccatccactctcctccccagggcattcctgtttctggggagccccactggcctccaggaggggtagct

SEQ ID NO: 589050 - DNA, 223 bp, Homo sapiens
cagtattatgcatggcattggttttgcaaaactgtgtgtggcatgtgtgtgctttgtaaccccaaataacaaaactyggagtaggcctgtgccacccaggagtagggtgagcggggtcagcttgccttagggcaagaacagctgtaggggttgtttctcacattggtgtcgacacagaggatgtatcagagagaaagcaataaagcactggccacctgacaca

SEQ ID NO: 589051 - DNA, 368 bp, Homo sapiens
agctggaactacaggcacctgccaccactgtcagctaatttttgtatttttagtagagawggggtttcaccatgttggccaggctggtcttgaactagcctcaagtgatctgcccgccttggcctcccaaagtgctggtattacaggtgtgagccaccgcacctggtccagttgtattttcttaaccttagaatttctggttgttccattttataatttgtatcaatttattcatattgtctatacagtgagatattattctcatattttcctttagttctttacccatggattactttttttttgaacatatctaaaatagtgattttaatgtctttgtctagtaagtccaacatctggcttccaca

SEQ ID NO: 589052 - DNA, 368 bp, Homo sapiens
agctggaactacaggcacctgccaccactgtcagctaatttttgtatttttagtagagatggggtttcaccatgttggccaggctggtcttgaactagcctcaagtgatctgcccgccttggcctcccaaagtgctggtattacaggtgtgagccaccgcacctggtccagttgtattttcttaaccttagaatttctggttgttccattttataatttstatcaatttattcatattgtctatacagtgagatattattctcatattttcctttagttctttacccatggattactttttttttgaacatatctaaaatagtgattttaatgtctttgtctagtaagtccaacatctggcttccaca

SEQ ID NO: 589053 - DNA, 515 bp, Homo sapiens
tgttctccacacaatgtccacctggccctgtggacacctgaggccattggtgaatggctgcagctacaaggcaccaggaggggttgagctgttgccagagcttggcttggaagggctggaggatgacgtgggtattgggtcattgtyactgtgaccacctgctggtttgccaggttgacatctgctgtcacagcctactgactaccagggcccttcttaattgcaaagtgtcctggatagaacaagaaaatatggtcattctattcactgaagaagcaagcagcaaggtggtttgagtgtcatgacaaagggagatgtaaggtggttaatttccagccactgtcccttcaacaattttgctaagagggcttacttcagaccctcctgaaactacatagactgctgcctccgtctgtgtcagtttagtactggctggggcacctctgggcaccggactagatgtgtgaggctcctggttctgaggaccagcccaggcacccggcatggccacccag

SEQ ID NO: 589054 - DNA, 515 bp, Homo sapiens
tgttctccacacaatgtccacctggccctgtggacacctgaggccattggtgaatggctgcagctacaaggcaccaggaggggttgagctgttgccagagcttggcttggaagggctggaggatgacgtgggtattgggtcattgtcactgtgaccacctgctggtttgccaggttgacatctgctgtcacagcctactgactaccagggcccttcttaattgcaaagtgtcctggatagaacaagaaaatatggtcattctattcactgaagaagcaagcagcaaggtggtttgagtgtcatgacaaagggagatgtaaggtggttaatttccagccactgtcccttcaacaattttgctaagagggcttacttcagaccctcctgaaactacatagactgctgcctccgtctgtgtcagtttagtactggctgggrcacctctgggcaccggactagatgtgtgaggctcctggttctgaggaccagcccaggcacccggcatggccacccag

SEQ ID NO: 589055 - DNA, 564 bp, Homo sapiens
caccaagtgggcaggacaggggtaacaagggccacacgcattttggcagctgatcaggatgtggcccacccacgcttgtctatttcttttctctactacaggtcagaacctcagaaggaggtggaaacaaatccggctattttaccattggttaaaggtcacatgcagctatagtgcaasgtcaataggggctgtcctagcccgtgggaccagcaagcagagatgtccttccgtgccacgaagaaacagtctctgctgtggccctatggagtgccggctgctcacgggtaagccactcagcacaaggcggcctcagtttcctcctccataaaaccttggcaaggacagttgcttgatgtgaccgctaagggccttcccagccttctcattctcttatttgtctctcttcctaagcacagggaggaggacatgtagacagtccttctttgatgattaatcctggggtggggtgaggggcatgaagggacaggcaacctcatgagtattgcaggatggccctgacatgcctttggcaagaagacaagggttcctggcgaagcctta

SEQ ID NO: 589056 - DNA, 564 bp, Homo sapiens
caccaagtgggcaggacaggggtaacaagggccacacgcattttggcagctgatcaggatgtggcccacccacgcttgtctatttcttttctctactacaggtcagaacctcagaaggaggtggaaacaaatccggctattttaccattggttaaaggtcacatgcagctatagtgcaacgtcaataggggctgtcctagcccrtgggaccagcaagcagagatgtccttccgtgccacgaagaaacagtctctgctgtggccctatggagtgccggctgctcacgggtaagccactcagcacaaggcggcctcagtttcctcctccataaaaccttggcaaggacagttgcttgatgtgaccgctaagggccttcccagccttctcattctcttatttgtctctcttcctaagcacagggaggaggacatgtagacagtccttctttgatgattaatcctggggtggggtgaggggcatgaagggacaggcaacctcatgagtattgcaggatggccctgacatgcctttggcaagaagacaagggttcctggcgaagcctta

SEQ ID NO: 589057 - DNA, 632 bp, Homo sapiens
aaaaataaattattcaatacatggtgtttaaaccataggatagccatctgaagaaaaattaaattttatccctacttcacttaaacttatctacatttcacatggtttaaatatttaatcacacacacacacacacacacatacacacaaacacacatataagtaaaccataaatgtagtagaggaaaacatgagcaccatgttggagttcggatggcctttgtaaacataatccaaacactataacaaaaggaaaggtttgataactattggctacagtaaattctttaaaaatctatctgagaaacaaaatgccataaaatgataaaagaaaaactcgggaaaatatctgcaacttacaacacaaaaaacttattctcttattacatgaagatccctataaatcagtaagataaagaccaacaactcaaaataaaaacggacgaaaaatatgaatagacaattcatcaaaaaagaaagacaaatggcttataacatgccaaatctaattaataaaaagaaaattgcaaattaattgagttttgcaaatgttacaactgttatgtttaccarttgttaacattgtgttatgtaagcttgttagaaagctatatagatgtataaataaaatc

SEQ ID NO: 589058 - DNA, 646 bp, Homo sapiens
gaagcgcaaggaagaagcactgggaaaggatcaaggaagtctgcccaaaggaagtgatgtgtagttgatgagtaggacttaccccggcagagtgggaatgaagggtcttccaggaagaaggactgcctgtgtatggttcagaacagggagtatggcatatttgaggagctgaaggaaatacagtgttgactggagtgtacagtggagggtggggaaagaggaagcrttgagaaatgatgctgtggcagccagcaggattctgacagcgcagagcttgtaagagctgagtcagaattagaagaggcattgaaagttataggcttggcgtcccactaatactctacaaataatatctaatggtggaaataacagctggtgggagaagtagtgtcattagcagtattactatgaccactacctctactattactactcccttacaactattattattaagttgggaccaaactaaaggcctagctgtgttacactgtttatgtgtttattatctgtctctctaaacagcctgtaacttccacagggtaggagttgtgtgttttatccaattatttgcatattcagcataatatatttggtaagtgaataaaaaatgtttctgagccctaggcatgccagaggttggggt

SEQ ID NO: 589059 - DNA, 604 bp, Homo sapiens
tgtgagcccagccaatgtaggcaatgctgtctatggctctggaaagcctcttgtgctgcttctcattggtgctacttgtgcctcttgaccttctggagtgattctttctgtttctagtgcaaatggagaacctggagaattattgcctagtaagcaatcagaaaagaaaccagggttcagaaatagcttagtgcttccaaagatagtgggraaaaaaatcccagtcaggcaagtagctcaaggtcaggatgtgggcatctagcatttctcgctgcagggatggaggcctgtagagtcaggaaggttttgcatgctcagtggtggctttagtgatgctggtactgttaaagctgggacctttgctataggcttataaaaagcagatttcctggcttctgaaaatacacctgctgtaggatgtaggaacctaattcagtatagaaaagagcattctctgaaatcagcaaccagaagtcagaacactatggggacagggttttaggaacagtctaatatatgtcccccgaagtttgctggttttaatctagagccaatgcaaatgttgggaaggtgggaagccagttccaggagtctgcaccagcag

SEQ ID NO: 589060 - DNA, 267 bp, Homo sapiens
agtagaacaaggctttgaacacaaatagtttgastcaaatgcctacacctctaaccgatttctacagcagcagactttgttggttccccatttttacctttctaatagaacttcagttgtgttcgggtgtccatcttgttccagctccatgagtggatcctgactattgtagatcaaacctggtgttcccattcttcgtcctagtgattggtttagaatccaagataaactcaattcattcatgacatttcacttggtaactcttat

SEQ ID NO: 589061 - DNA, 352 bp, Homo sapiens
gtaggattttcattccttgtaaccaaaagtatgctgygttagagattacaatgctgccttctttgtagctacaacaataataaaagctaactagctttttaaaattttttaaattattttatatttttatttattcattttatttgaaaaataaaaattgtatatatttgtgatatacaacatgatattttgatatatatgtttgttgtggaatgaataaatcaagctaattaacatatctattacctcacatatttatcttgttttttgtactgagaacatttaaaatctactctcttagcagttttcaagtacagaatacactttaaccagtttttttgtttgtttgttt

SEQ ID NO: 589062 - DNA, 539 bp, Homo sapiens
aggttgaaccacacagtccaatatgaaaccagctcacagaaatacacagggctagagaagcaaagycaaaagactctacccaacattctctatagtcacattcccttggatgggggaagaaaacaacaaaggagaaaaacaataataatattggaaaggaaaggaaaggaaacaaaaggaaaggaaaggagaaaggagaaaggggagacagaggagaaaggagaaaggaaaggggaaaggaaaggaaaggggaaaggaaaggaaagggaaaaggaaaagggaagggaaaggaaaagggaaaggattctatccacatgaaaataattacaaaacttaaaagtgccaacatctccagatgagaaggaaccagcataaaaattctggcaccatgaaaaaatctgaatactgtgacactatttgttaatttgagatctttctagctctccagcaatggtcactaaccaaaatggaaattcagaaatgacaaataaagaattcacagcatgggtatcaaggaagctcgataaatttcaagacaa

SEQ ID NO: 589063 - DNA, 539 bp, Homo sapiens
aggttgaaccacacagtccaatatgaaaccagctcacagaaatacacagggctagagaagcaaagccaaaagrctctacccaacattctctatagtcacattcccttggatgggggaagaaaacaacaaaggagaaaaacaataataatattggaaaggaaaggaaaggaaacaaaaggaaaggaaaggagaaaggagaaaggggagacagaggagaaaggagaaaggaaaggggaaaggaaaggaaaggggaaaggaaaggaaagggaaaaggaaaagggaagggaaaggaaaagggaaaggattctatccacatgaaaataattacaaaacttaaaagtgccaacatctccagatgagaaggaaccagcataaaaattctggcaccatgaaaaaatctgaatactgtgacactatttgttaatttgagatctttctagctctccagcaatggtcactaaccaaaatggaaattcagaaatgacaaataaagaattcacagcatgggtatcaaggaagctcgataaatttcaagacaa

SEQ ID NO: 589064 - DNA, 549 bp, Homo sapiens
gctaccacaaaaacacacttaagtacatagtccacaaaccctataaagcaactacacaatagatactgcaaagcaaccagctaacaacttcacaataggatgaaaacctcacatagcaatgctaactttgaatgtaaatggtctaactgccccatsagaaaggcacacagtggcaagttaaattaaaaaagaaagcaagatccatccatcttctatcttcaaaaggcccatcttacacttaatgatatccatgggcacagaggaaaggattggagaaagatctattacaacaaacaggaaaaaaaaagaacatggtttgctattcttgtatcagatagacttgaaatcaacaacagtaaaaaaggacaaagaaaggcattacacagtgataaaaggtttaattcaacaaaaagatttaattatcctaaatatatatgcacttaatattggagtactcagattcataaaacaagtacttctagacctatgaaaaaacttagatatccacacattaatagtgagggacttcaacatcccactcaaagtgtt

SEQ ID NO: 589065 - DNA, 549 bp, Homo sapiens
gctaccacaaaaacacacttaagtacatagtccacaaaccctataaagcaactacacaatagatactgcaaagcaaccagctaacaacttcacaataggatgaaaacctcacatagcaatgctaactttgaatgtaaatggtctaactgccccatcagaaaggcacasagtggcaagttaaattaaaaaagaaagcaagatccatccatcttctatcttcaaaaggcccatcttacacttaatgatatccatgggcacagaggaaaggattggagaaagatctattacaacaaacaggaaaaaaaaagaacatggtttgctattcttgtatcagatagacttgaaatcaacaacagtaaaaaaggacaaagaaaggcattacacagtgataaaaggtttaattcaacaaaaagatttaattatcctaaatatatatgcacttaatattggagtactcagattcataaaacaagtacttctagacctatgaaaaaacttagatatccacacattaatagtgagggacttcaacatcccactcaaagtgtt

SEQ ID NO: 589066 - DNA, 215 bp, Homo sapiens
tgaaggaaattgtttcccaaaatttcatccaaggaattaccaaacctaagagtttgtcttttgaaaggataaacgagatcaatagaatgctagctagattaacaaagaaaaaagagagaagwtccaaataagcacaatcagaaacaacaaaggtgacattacaaccaatcccacagaaatgcaaaagatcccagagactattattaacacttcta

SEQ ID NO: 589067 - DNA, 578 bp, Homo sapiens
gaaaaaatgctcaacatcattagtcatcagagaaatacaaatcaaaaccacaatgagataccatttcacatcactcagaattactatttggagaaaaacaaatctggatccccaccttacaccatacacaaaagcgaacttcagatcagtgagtcctaagtatataaaagagtaaaatgatacagccagtagaagaaaatgaaaaagagagtctttgttcactcaggagttagagggaacataagcaagagctaaaatgtttacatyatagagacaaaaaaatcatatggatctgactttatcaaagttgagtatttctgtttgatgaagaacactacagataatattaccaggtgacaccctgggaaaagatatgtgcaatgattaaagaagccaagaggttaatatctaaatacatgaagaatacctgcaaataaatatggaatagaaaggaaacccagcagaaaaatagggacaaatgacaaatgagaaattcacataaaaggaaattggaacagttaccaaatcattgaagagatgttcaaccacattagtggtcagaagaatatatagtaaaa

SEQ ID NO: 589068 - DNA, 578 bp, Homo sapiens
gaaaaaatgctcaacatcattagtcatcagagaaatacaaatcaaaaccacaatgagataccatttcacatcactcagaattactatttggagaaaaacaaatctggatccccaccttacaccatacacaaaagcgaacttcagatcagtgagtcctaagtatataaaagagtaaaatgatacagccagtagaagaaaatgaaaaagagagtctttgttcactcaggagttagagggaacataagcaagagctaaaatgtttacatcataragacaaaaaaatcatatggatctgactttatcaaagttgagtatttctgtttgatgaagaacactacagataatattaccaggtgacaccctgggaaaagatatgtgcaatgattaaagaagccaagaggttaatatctaaatacatgaagaatacctgcaaataaatatggaatagaaaggaaacccagcagaaaaatagggacaaatgacaaatgagaaattcacataaaaggaaattggaacagttaccaaatcattgaagagatgttcaaccacattagtggtcagaagaatatatagtaaaa

SEQ ID NO: 589069 - DNA, 525 bp, Homo sapiens
attgctttgaattgtggaaatatgattatttaaaacaccaacttccttatatattctgatcacttttttataattgaaccacatttgcttggctttgaaacttcacaagcatggtagccaaaagtgtgtaataatttgtagacaaaaccatgaagagtgaaaccaactacttgtatttttggtataaagcaatcaaaccaagacagcattaataaccaaataatgtttaaacttaatactccccaacaaagtatattttatgctttcttaaaggatgtctgtgagatagaagcagtcatacaaatggccaaataaaactatttttaaagattttgttatttaaaaatgaagtaaatttcctatcttaaaaatcaacatagatctcttacaaggtgaggtcatattgattgcagactttttaggaccctaaggaggaattattttccatagacactgtgcatattttctttggatttcatgagaaaagattaagtattacaacmtgcacttaaagttttctttcag

SEQ ID NO: 589070 - DNA, 596 bp, Homo sapiens
ttaggcctggctatctgaattgcagtaaagtgaaatggccaatgagtgaaaatgatgggtgtatcttctgaacaagcaagagtctttgcttggtgttttacttgcagttcttttacttttcccacaaaatgagaaatattccagttatgggctacttcatcagtctagagcttgatataaagactcatggagcaaagccacagctgacccatgatgaaatggcaaagttgggtgagaaatcaacctctgctattgtaagaaactgagaatktttgagggtttattatgacagcataacctacctcaaactgactgatacgttctcatagatttcatttcatatgttttgtttggagactggtttgttcacttgaaaatggctaaggggcactgagttgtagtaattctctggtaggaatattgctaaaatatagttcgcctttggatctcattcctgtaaactggctattttagtgccttttttttttttgcttttattttcatgacaacagcaatggcaaggaggagaaagataggaatagacactgaggagataaactggtaaaccctgactcttagtggggaagacgagtgag

SEQ ID NO: 589071 - DNA, 387 bp, Homo sapiens
tttcttttggtccaggtgttaagccactgccataggcaaccctcagagctggaatagatcccacycacatccaaaatttaaatatcgagactgatgacacacgcaggcacgaagagggtatgaaaaatctgattagtcacacaatgaggcttcctgaaaatgctgagcaagctcccaagcaggtcccaaaatggcttgagataaaacaggcaagggagaatggcttgggttgtactggggttagagagtggtgctggggtaagagtttttccatacacaggcttggggttatgtgacttaaatttcctgccggcatcaaaggagaaagcatgcaggctttgttactgatttgcccaggtgtaaggcaaggaaggagggagggggaga

SEQ ID NO: 589072 - DNA, 561 bp, Homo sapiens
gagaaagatctatcatgcaaatggaaaacaaaaaagcaggagtcactattcttatttcagatacaacagacattaaacgaataaaaattaagaaggacactccataatgacaaagggtacaatccaacaagaatactcaactgtcctacacatatatgcacccaacattgaagcacctagattcatagaacaaattattcttggcatacaaaaagacttagacaaccacacaatagtaagaaacttaaatattcatactgacagcaatagacagatcaaggcagaaaattaacaaagaagctctgaaagtcaacttgatacttgaccaactgaacccaacagacatctacagaacactccacgcaacatatacaacatgtacattcttctcatctacatacagaacatagtctaagattaaccacatgctcagtcataraaaagtctcaatttttaaaaaaaatttaagtcgcacaatgcatcttctcagacaacaataaaaatagaaatcagtatcaagaatatcttttcaaattacacaaaagcatgggaattaaacaa

SEQ ID NO: 589073 - DNA, 394 bp, Homo sapiens
tgctattcttccttcaatgacttctgaatggatttgtatgcactttacatcacattctggttgcaaaaagcacaaataatcccatctcgaaggtgtctgcttgactaaaactgtcatccactttcccctagcctgtgtattatgtcatcttttgagctctctgaaggaagaacctgaattttttttttgaatggcattctcagaatgtgcttgtatyatatattacattaaatataagcttatagatattatataaatataaatataacatattaaagtatatccttctatataagcatacacagagactctaatctgttctgttacatctagagatccttgagaacagaaattatgcattctccctggatttctcaaagcactcagcaaatag

SEQ ID NO: 589074 - DNA, 349 bp, Homo sapiens
aattacaaagaataaaattcattgcttttgcttctagaattgtgcctccttaatatgtaactatcttaagatttgagccatgttagtctscaacttaattcaggtttcctatcatctgtcccttcatcagtctctttaatctgaaagagatttctgagaatggccttcatggtcattctactttattaattctgacaatttttcaaatggacagggttaatttcttgtcccctaaatttagccattttataaaccaaatttcttctttaattgtggcataaagttcatgttttctcaaaagtgtaatattgaataagaatcatagagaatagatgtttcaaatgtttaa

SEQ ID NO: 589075 - DNA, 542 bp, Homo sapiens
ctatcatctgtcccttcatcagtctctttaatctgaaagagatttctgagaatggccttcatggtcattctactttattaattctgacaatttttcaaatggacagggttaatttcttgtcccctaaatttagccattttataaaccaaatttcttctttaattgtggcataaagttcatgttttctcaaaagtgtaatattgaataagaatcatagagaatagatgtttcaaatgtttaaagtggcacgtggtataatgccatctatgttccagactagagagacattatatagtccctgacttaatggtttttactgtctattaagtaaaatgaggagcaattactaactacagaaatgagagatatgagtgatattaaaggacgcacggaacactatgggaagacacagaggggatttaatctagcttmgggagacactcctcatctccctgggaaggccttcaataagttgagtgagtaaatgagttagagtgctttattctcaaactagtactttcaggagaatgtctcttttcaca

SEQ ID NO: 589076 - DNA, 589 bp, Homo sapiens
gggagacatggatattaccactatgtgaccagaaacataacgggcactaatttcttatatgtatcttacaggctcaaatctagtattctccaggtcacactgcattcctaggttcaaattcaggttatgcctcccttttgtctccctgtgtcctacttcataggataagagggttgcatttttttaagagaaggtaataactgaagcaaaagggtaacatcgcagcgttcatcgcatttctttctgggaatccaacctgcaacagattctgagatggaaattagcagacagaaggtttattggggagtacttttgggatcctcmagtgtggaagggaagcaactggaactaagcagaaggagaagtcaagctacaatgccgtctgggtctaatatcacagccagccctgtgggaagatctaaagataaaattattctgcaaagctgcccagagctggaacaagaagattgggcctttttatattcctggacaataatttattggatgcagtctatccaggaaagaggcatgacttttaataagccacaattctgcctctctgggattcctcaagaaggctgacagcaga

SEQ ID NO: 589077 - DNA, 589 bp, Homo sapiens
gggagacatggatattaccactatgtgaccagaaacataacgggcactaatttcttatatgtatcttacaggctcaaatctagtattctccaggtcacactgcattcctaggttcaaattcaggttatgcctcccttttgtctccctgtgtcctacttcataggataagagggttgcatttttttaagagaaggtaataactgaagcaaaagggtaacatcgcagcgttcatcgcatttctttctgggaatccaacctgcaacagattctgagatggaaattagcagacagaaggtttattggggagtacttttgggatcctccagtgtggaagggaagcaactggaactaagcagaaggagaagtcaagctacaatgccgtctgggtctaatatcacagccagccctgtgggaagatctaaagataaaattattctgcaaagctgcccagagctggaacaagaagattgggcctttttatattcctggacaataatttattggatgcagtctatccaggaaagaggcatgacttttaataagccacaaytctgcctctctgggattcctcaagaaggctgacagcaga

SEQ ID NO: 589078 - DNA, 532 bp, Homo sapiens
gctgtggtgcctatgaagagaaactccctgcaaatgttgccaggacttggggatatataaggtcagaagaaagaaggggacaccttcttttctgtccttcatgtacccccaggtattcactggaaaaagaaagaaacaaagggttgccttttgctgtctttgcaaacgggtaaccaatcatcctctgcctgcactcctcttgagtgcatcctgaatcactggaacwtttttgaccgtcagacatacccaatctcttgaggaaggacttttctttgtctgttcccccttcacaggactccaggactccggggttgatggggctccatagctcaggggaagggaacccagaagcctgacatgaagtttttcccagtcggacttctggcttctctctgtgcaaactggttgtaggaatgataaaaattcactgtgttctctgcccctccataagttcaaaagccagaggtattggccatttggtatggctaaggttgggtaacaagagatttaaaaggactccttaaaaaagagt

SEQ ID NO: 589079 - DNA, 482 bp, Homo sapiens
aatgtgtttgggaaacacaagtccatgacctcaagggaaagaagaaagtgaaatgaggcccgggaacaggcgaatcattgtgttggctgctacttcaggacaggtcacagaaggctgctcatgaggcaggatctgttaggaaaatatgcagggagaaatcacacctgagcggggtcagactcagcagcaactgaggcggagggaaaggttctgagagatggcagcaccaagataatctgaggaggcacatgaaacccacgtcaattatacccaattgtcttatttgtccctataatgagacttggaagaaaattcgccaactaagcaaatctgtgcttctcacactctagcccccatccctaactgttcataatgtgtgactagattccctgggactattctcctaccactgctcctctctgacttgtactggcctctgctttcatygctgggataggatgatcttaatggtgactgtgata

SEQ ID NO: 589080 - DNA, 565 bp, Homo sapiens
aaataaaataccaaacgaatgaatgactagaaagctaaaacttatcaccaaaataaaaattaaaatcccttgcccagtttccagacttaagccagttttcaaacaaacctataacctgataactaaaatggcagccaggtcacaaggacaaaggaccttgaaacattatagcaaatgtatactgaaattattcccctggtcttttccaaaattgaacaatgctatttactcagataactgcacaatggggaaaagagaacattctgacaactcagaccttgtgtgtcctatggctctcagaaagtccttgatactcagagacctgaagcactgtcatagctcccatttagaatgagggaataaaragtataggtattaagtgaagtcctgacaaaagttcagcttatggtgaatccactggatccctgaacacattcagtggtcatttctctagttacctactgtgtaattggaattgtatacctagcagttgaagtaaccctcacttggtcttttgcttttccactattatagctgttcccccataagccaactggaagtttct

SEQ ID NO: 589081 - DNA, 565 bp, Homo sapiens
aaataaaataccaaacgaatgaatgactagaaagctaaaacttatcaccaaaataaaaattaaaatcccttgcccagtttccagacttaagccagttttcaaacaaacctataacctgataactaaaatggcagccaggtcacaaggacaaaggaccttgaaacattatagcaaatgtatactgaaattattcccctggtcttttccaaaattgaacaatgctatttactcagataactgcacaatggggaaaagagaacattctgacaactcagaccttgtgtgtcctatggctctcagaaagtccttgatactcagagacctgaagcactgtcatagctcccatttagaatgagggaataaagagtataggtaktaagtgaagtcctgacaaaagttcagcttatggtgaatccactggatccctgaacacattcagtggtcatttctctagttacctactgtgtaattggaattgtatacctagcagttgaagtaaccctcacttggtcttttgcttttccactattatagctgttcccccataagccaactggaagtttct

SEQ ID NO: 589082 - DNA, 443 bp, Homo sapiens
tggcatcttcttcatgtgccacacatatgctgaattggtgttgtccagctttataaaagcacattatctgcaagcacataagtgatggtaactgcttttcctcattgtatgccattgataaggcaatgcccaaaatgtctttaattttaaaaaatgtgcctatagcttgtcytttcactatgagctttatttgtcaacttcatgcgtggttttacaagtttcttagctctaatgggtattccacttttattttctgtcactattataactttgattgatacttgtgatgttttgatctctcttctgccttagtagcaattaatcaattttgtactgaaagcattgttttatgcttttctttaaaaaaaaaaaaggcatttgtttgctagaagagtcattgttctttgcttagaaaagcatgtaaaagctttgagttttatgag

SEQ ID NO: 589083 - DNA, 240 bp, Homo sapiens
agtgggataaactacagctcctgcagctagagatgatcttgacaatcccacggacagtcatcatctcactcttctaatactcatttttagaaattcctcacccttggttagcacgtcttttggtcgagatggyttactaaagggtgagattactaaatcttactaaggcttaataaaggtcaagatggcttactaaaggccctaattcatgggcaatagaagatggctttgttggttatt

SEQ ID NO: 589084 - DNA, 585 bp, Homo sapiens
gtactacactaaaagagctttaaaaatgagtatgagtacaagttagtctgtaatattctccatactacctgtgctattgaaagtgtggctgtaagaactgcttataatttttgttccaacaagtgtgaattctctagagcagcactatctaacagaactttctgcaataatggaagtgctctgtatttgtgctgtctaaaatggtagccactagccacatgtggctattaagtactagaaatgtggctactgtgactgaggaatttttaattttacttaattttaattaatttaaacrtaagtacccatatgtggctagtgcttcccatgttgggagcacatatctagagttattcaaatatggcctgtttcaatgccttgacattagactaaaggtgggagagacagacggatacctaggtggaaagtaatgggtatgaagggagaggcttaaacaagaagatattacatgcttgctaatgactcataatcattaccctgaaggcagtaatggttagtggagaatatttaacattattccttttgagattcctttagaaactttgagtattttatgtgtggata

SEQ ID NO: 589085 - DNA, 564 bp, Homo sapiens
ggatgaactcactggcttttgatcattgttgaaataactcaaaaaatatgcatacaacccaagaaaacactcaggctgagcatcttagtttaatgttgtgatgttttttagatgaacagtgacaagaagctacatataattaaaatgtccaattacttgctgsgaattattaaagagcaattggaaaattgaaatgttctgtaaaaagcttaataattacagcatctgattcttcacaagaatgacaaacaaatttacaaagagagtctcactttggaaatgccttttgcttattatagtatgaagaatgatgcctagctggcaagatggttaacattttccttgcagcagagatctctccaactaggtgaaggtgaatgctttcaggtatcattagtgagcttaggaggtgatgttaagatacatccagtctgtgttttttaaattaacttcctctgctttcaaaacagagctctaattttcctggattaaatttcctgaggacagaaagtgtggtttttgttatatctcagtgtgcaaaagtaaattttcatagatactcaa

SEQ ID NO: 589086 - DNA, 564 bp, Homo sapiens
ggatgaactcactggcttttgatcattgttgaaataactcaaaaaatatgcatacaacccaagaaaacactcaggctgagcatcttagtttaatgttgtgatgttttttagatgaacagtgacaagaagctacatataattaaaatgtccaattacttgctgggaattattaaagagcaattggaaaattgaaatgttctgtaaaaagcttaataattacagcatctgattcttcacaagaatgacaaasaaatttacaaagagagtctcactttggaaatgccttttgcttattatagtatgaagaatgatgcctagctggcaagatggttaacattttccttgcagcagagatctctccaactaggtgaaggtgaatgctttcaggtatcattagtgagcttaggaggtgatgttaagatacatccagtctgtgttttttaaattaacttcctctgctttcaaaacagagctctaattttcctggattaaatttcctgaggacagaaagtgtggtttttgttatatctcagtgtgcaaaagtaaattttcatagatactcaa

SEQ ID NO: 589087 - DNA, 556 bp, Homo sapiens
tttagaagcaatcctcaggcctctagccttggaaggagggtccattccaagaagctgacatgttatgaggtccattttaatcatgagtctatttgcaggaacctctttggaagaagaaagattgtgaacattttttttagtttctctgcttccgctaggctctcaggacatctctgtagtgtgatcttgaaggggacttaggaggaggctaatttgagtaagtgcaattaataattatttcctaggaggcagctggcaagggtcccatagtggcatcagagagaacaagaaaattagtctagacgatataggctggaagcatgtcgcctctcttccttttctgggtgataaactggcctgattttatgcataactaaaagagtttccatcatggggactgccatagaaaaccaggacagaattttacacatrtgaagaacttgtcacaggttgggatttatgacatacaggggaaaagtctcttttattttcctcacaaacggcattagggttacattctgaattagttttcagacatactgaagggacctaagag

SEQ ID NO: 589088 - DNA, 418 bp, Homo sapiens
ttttctgggacagaattccttttttttttttttttttttttttttgagacagagtctcactctgtcacccaggctggagagcagtgtcacaatctgagctcactgcaacctctgcctcccaggttcaagcarttcttgtgcctcagcctcccaagtagctggaattacaggtgtgtgccaccacacctggctaatttatgtatttttattaatagtacagatggggtttcaccatgttggccaggctgatctcgaaattctgacctccagtgatctgcccaccttggcctcccaaagtgctgagattacaggcatgagccaccatgcccagacagcattgctttttaaatctgtggaagggccagaaaaaatgtcaaaatttatatttagtttgattagtttggggtcaaagtatcag

SEQ ID NO: 589089 - DNA, 545 bp, Homo sapiens
atgtataatatattattttcatatgtctcctaaaatagaaggaaatagaaattattaattttatggtgagtgaaatagagcataagaccaaagggatatttggggaggtcacctgggactggtagagggaacacaaagcttaaggtaggtacagaggccagcagtcacattagtgtttctcagctttctttgcgcattttgttctcccaaccttttactttcctgccttcctcctgtctcctttcttggyatattttatttgctcagtgaggcctttcttaccctattaacatttacaatcacttccaccacttccaattctctctctttattgctctgttttcccccatagtacagaatacaattgatcttattatatagcttagttattctgtttattgcccatctgtctccactgaagtataagctctttgagggaaggaactgttgactgtattgctcaccatggtattcccagtggctaggatagggctaccatataggaggtactaaacaaattctttttgaatgaacaaatcaatggt

SEQ ID NO: 589090 - DNA, 609 bp, Homo sapiens
tagaaagaaactatcctgggtgaagcactggcattaaagtcttttcacctattaaatagagcatagctatgaccaaaaacaacaacaacaacaacaacaacaaaacaaaacaaacaaaaaaaaactaaacaaaatattcctaaaggaagragacacaacagagggtgtgaggtggagcttagggtaagtggtagggggtagggagtaagtgaaaaagaatgaattttctttctaatacccatccactcattttccaagtttggtttattttaaaattgtatctatagagaaactgtgatcataggtgttgctagtatagcagtccacttccaacaactcagaacattgtcttatgttcagagggcattaactgacaaaagattgggtaaatggtatttttaatggaagctacggccctcttagatttttcaaacgtctgcttaaacttgagtctattttctaaaatctcttctaatgaaataatctgcattttaaaaattttatcaacacagatactaagggcaaatataaaatgtgtatattaatacaaatacatgagattaccttaaaattagtattacaaagctgtaaaaattttaaagtagcata

SEQ ID NO: 589091 - DNA, 465 bp, Homo sapiens
accaacattcccgggtagcatgaatacatgygtttcattagcttaatgtagaagtcactaagacttctgggatttgctgctttcaaatgctttctggcagtactgaattaaggaagtcatttgagtaagttaactatgctgtgatctattagtctctgacatgagaagatttaatactgcagagagaagtaaattgttaaccatgtgtacatgaacagtgtctaggctctacagtgcccaaagcaatgcaaacattccttcactcatgcattgatgcacagactgcaatggagattcatttcttaacttcagcataaaacaatcccatttttaaaatgggaaagttgggggaaattgaagattttcattcaaagtgtagcttgggggtgtttggattaaacgctaaagtgcttgctaatttttatgtgaaaacaattagtatttacatttcaacatgttagaaga

SEQ ID NO: 589092 - DNA, 465 bp, Homo sapiens
accaacattcccgggtagcatgaatacatgcgtttcatyagcttaatgtagaagtcactaagacttctgggatttgctgctttcaaatgctttctggcagtactgaattaaggaagtcatttgagtaagttaactatgctgtgatctattagtctctgacatgagaagatttaatactgcagagagaagtaaattgttaaccatgtgtacatgaacagtgtctaggctctacagtgcccaaagcaatgcaaacattccttcactcatgcattgatgcacagactgcaatggagattcatttcttaacttcagcataaaacaatcccatttttaaaatgggaaagttgggggaaattgaagattttcattcaaagtgtagcttgggggtgtttggattaaacgctaaagtgcttgctaatttttatgtgaaaacaattagtatttacatttcaacatgttagaaga

SEQ ID NO: 589093 - DNA, 594 bp, Homo sapiens
tgccctcaatcgacaaagatcattgctaagtttatccacttgaagtaattatacttacatatatatatacaatcatgcatgtgcatgttgacatggaaatgatttcctttgattgaatttgaggaggaaaaataggtaccggcagttccttagtatctcagatactaaggacatatttgttgtatgccagtcatttgtgacctgtcttcagttcacacaagactgtctttagtaatctcaaaaatatcataggagggtaattttcagtcttagcaagagcagagcaaaggaattaagtagaaaggattaggaagagacttcattagcacttttgaattcgtgttcgytaaagcaaaggagttttctgaataacacctcccttgtatgcctcccaaccataaattcatcttctttttctgttcctcttccaccacctttccctttctactccttaacataaacaattatttatggtacattctaggaagtacttagtgctatagaaaaaaatttagaaggagatacagagaactgtctgcaaaggacatgaaccctcaaggtatttactagctagtggcagagagaggacacctt

SEQ ID NO: 589094 - DNA, 564 bp, Homo sapiens
ttttatatattttggtttgtttttcaacactgaaatgtatttaaagcattttaaagcctgtggctttttacraaatcatcatccttcactgtaggtttgaaagaaaaaaagtaattaggggaaaaaaatgttggcaagcttcatcaatagactgatgaagtcagctattactctccagcatgagtcctggcatgactgcttaaatgatcatttgattcgtggtatcaatgagtttttagatctggctctttttgtgtatgcagctttgggaattatgtatgacatgttgattatattctgcagcaggaaagtctgcagtgatctgctttgttctagctcagtctcattgccattagcaaaaaaatctctaagagccttcaaaagacaggctgccagccaaaacaccaaatcagaattaaattgtggcataaaaatatagaaaacccaattaaactgggattgttagttggggtaatttgtatgtcatgttaacaccctcttctctctggtcactctatttgtttatgagtgtgggctgacctagaaaatcatatagtccatagt

SEQ ID NO: 589095 - DNA, 578 bp, Homo sapiens
tatttttttatttttatttttcggtgtttattagctcagtttctccttttgaggcaaaaactttgtgtcacccagaagagatatttagcagaaagatttttcccctcaaactctttcagctctgagagcttgcattttatcatttagacatagaacatsagagaattctataatacaaggtaacaacataatgcaactaaatgacatgataacaactcccctaacatacatttttaggattacttatatctatgctcagttggcggaaaaaagtcactcaactcacacagagatttctcagcttacaaaatggcaacagacctgagcaaactaaaaatgcttaagaaatatttctaatcacaaaaataagaaattagcttattttgaaatataagtatttatactcatcaactagcatagagttaaatagggtgttagttattcttattattttcttcagcaggaaaatttttaccttgaaaagaccttgagaagatcggaaaatttacaatggagaaaaaaataaaagtaggacctaattaacttagcttctttcctttcgtgacaagctctgtgag

SEQ ID NO: 589096 - DNA, 561 bp, Homo sapiens
taataatgataaagtgttcagtactacaagwtgacttaactattctcaatatatatgcaccaaacattggagtacctagagagtcatacaagaaatacttctagacctgtgaaaaaatttacaaagatacacaataatagataatatggcagaacactaacagcactaactaaaaaaaaaattctggacttaaatttggcccttgatcaactgtatctaatagacatctacagaacagtccattcattaaccataggatatatatttttcttatctgcacatataacactctaagatcaagcacattcttcatcataaggcaatactcaataaatgcaaaaaatcaaggttataacaccatactttcaaccacagtagaataaaattacaaatgaataccaagaagatccctgaaaaccacacaattacatagaaattaaacaagttgctcctgacctatttttacatacaaaataaatttagggaataaattaaaatattctcagagtaaataaaaacacagacaaaacaaactcagatctctaagatacagccaaagca

SEQ ID NO: 589097 - DNA, 522 bp, Homo sapiens
ggtgacatcacaaatcagtaggaacatgaagccaaccagagctgcaaaaccagcaagttttgattaaggatttcaaaaggggagggggtgtacgaacagggagtaggtcacaaagatcacatgcttcaaagggcaaaagggagaacaaagatcacatgcttctgaggraagagggcaaggacaaaagcaaagatcacaaggcaaagggcaaaattagaattactgatgagcatctatgttcagctgtgcacgtattgtcttgataaacatcttaaacaacagaaagcagggctcgagggcagagaactggtaagacctcaaatttaccagggtgggatttcttccccaccctaataagcctgagggtactgcaggaggccagggtgtatttcagtccttatctcaactgcataagacagacactcccagagtggccatttatagacctccccccaggaatgcattcctttcccagggtcttagttattaatattcattgctaggaaaagaattcagcaatat

SEQ ID NO: 589098 - DNA, 488 bp, Homo sapiens
ttcagggtcccagatgcagcctagattttttcatattctgggcctcctctttgactctagaattagcagcagtggcttctccatattgaagaatatattaggtcttcaattttttttattatcctccaatagtttattgaggtacaggtggtatttggttacatgggtaagttctttagtggtgatttgtgagattttggtgcaccatcacctgagcagtatttgctgcaacctatttgtagtcttttatcccttgcccctttccyatccttccccttaagtccccaaagtccattgcgtcattgcatcattcttatgcttttgtgtcctcatagcttagctcccagacatcagtgagagcatacaatgtttcgttttccattcctgagttacttcacttagaataatagtctccaatctcatccaggtcactgcaaatgccattaattcattcatttttacgattgagtggtattccatcataaata

SEQ ID NO: 589099 - DNA, 535 bp, Homo sapiens
aagacctgaaactgtaaaaattctagaagataacattgaaaaaacccttctagacattggcttaggcaaggatttcatgaccaagaacccaaaagcaaatgcaataaaaataaagataaatagctgggacttaattaaactaaagarcttttgcacgacaaaaggaacagtcagcagagtaaacagacaacccagagtgggagaaaatcttcacaatctgtacatctaacaaaggactaatatccagaatctacaacgaattcaaacaaatcagtaagaaaaaaaaaaaatcccatcaaaaagtgggtaaggacatgaatagacaattctcaaaagaagatacacaaatggccaacaaatgtgaaaaaaatgctcaacatcactaatgatcaggaaaatgcaaatcaaaaccacaatgtgataccaccttactcctgcaagaatggccataatcaaaaaatcaaaaaacagtagatggaatactactcagacataaaaaggaatgaattaacagcatttgcagtgacctggatga

SEQ ID NO: 589100 - DNA, 482 bp, Homo sapiens
tccagcctgggcaacaagagtgaaactccgtctcaaaaaaaaaaaaaaacaamaaaaaaagtcacttcactggtagcttctcagccttttggctaagatcaagtgcctggtggtttctgtttttagtttttggttttgttttattcatttcacaactactattagaagaaatgcaatttttatctccttgttaaatttaagtattttcttttcaaaaggtaaggggaaggaaagatgagcagagtactttagagaaatacatgttttaaatatgcttttgctgtttacatttataattctgctcagattcatcttatttaataaaatatattcatttcttaatgtgtttccctcattgccattctaatttcacaatattctccaattttgtggagaattgtggagaaccagtattccactggtacctctgtagtttgaagtgaatatagggataatcctttttttctttcaaagaatgacat

SEQ ID NO: 589101 - DNA, 482 bp, Homo sapiens
tccagcctgggcaacaagagtgaaactccgtctcaaaaaaaaaaaaaaacaaaaaaaaaagtcacttcactggtagcttctcagccttttggctaagatcaagtgcctggtggtttctgtttttagtttttggttttgttttattcatttcacaactactattagaagaaatgcaatttttatctcctygttaaatttaagtattttcttttcaaaaggtaaggggaaggaaagatgagcagagtactttagagaaatacatgttttaaatatgcttttgctgtttacatttataattctgctcagattcatcttatttaataaaatatattcatttcttaatgtgtttccctcattgccattctaatttcacaatattctccaattttgtggagaattgtggagaaccagtattccactggtacctctgtagtttgaagtgaatatagggataatcctttttttctttcaaagaatgacat

SEQ ID NO: 589102 - DNA, 482 bp, Homo sapiens
tccagcctgggcaacaagagtgaaactccgtctcaaaaaaaaaaaaaaacaaaaaaaaaagtcacttcactggtagcttctcagccttttggctaagatcaagtgcctggtggtttctgtttttagtttttggttttgttttattcatttcacaactactattagaagaaatgcaatttttatctccttgttaaatttaagtattttcttttcaaaaggtaaggggaaggaaagaygagcagagtactttagagaaatacatgttttaaatatgcttttgctgtttacatttataattctgctcagattcatcttatttaataaaatatattcatttcttaatgtgtttccctcattgccattctaatttcacaatattctccaattttgtggagaattgtggagaaccagtattccactggtacctctgtagtttgaagtgaatatagggataatcctttttttctttcaaagaatgacat

SEQ ID NO: 589103 - DNA, 587 bp, Homo sapiens
gctcagttcagaaagcagaatgactcaaagtaactgggaggggatggtttccaggttattggtaggtttaaaaatttcctggttgacaattggttgagttaatctaaagacttgggatcaataatagaaaggaaatgtgtagggtaagatgagagattgtggagatcaaagttcttatgcagatgaaggcttcaggtaaagggttcagagggaatagattgtaaatgtttcttatcagacttaaggtctgtgttgatgttaatgctagagggtataactaggcatgtctgactccaacttcctgtcttggcctgatccagtctttagggttaaattttagggtgctctgacctaggaggaagtccatttagatggttgggaggccttagaattttatttttggtttacaaaatagacactatcagattttttaaaatccattaaagccaaaggtatcctattgaaaytaaaaatttcacacaatttagttttatactcaaactttttcaaacactttgattacatgatcatgtaggttaatacaaacacattaacttttgatgctcttttaaggttatttaaaaagt

SEQ ID NO: 589104 - DNA, 581 bp, Homo sapiens
aaaacccagtgaagtgtcacatgagttattttatttatctgagtttcttaacttttgcattctcaggtagttgcacttgtctattgtctttgagttaataggcttcagtgaatattctccaaggtcaaataatttgagaacctgattaggtgacaataatggaaattcaattctagagtaagggaaatacttagtttttgaattcacatgataatatggtgactagggtgtccagctcaatgttggggagtgtaactggtcttttatgaccatttattttgtttgtaaactacattatagtaattttgtagagcaatattcttcattttcactatgggacaagaattgctttatatgttattaatattttaaccatcacagtaagccaacattctgtgttacagaatgtataacattggagtttagaatgacaycatacattttattattttttaaacctaagttaacaccttatgctaatttccagcttgaaaagttcttcatttgctgataaaaatagtttattatgttttgctgatgtaagtggggacagaattatacaagaaaaaacagacatagga

SEQ ID NO: 589105 - DNA, 520 bp, Homo sapiens
gcaaactccatcagacctgcagaagaggggtctgactcttagaggaaaaactaactaacagaaagcagtaacatcagcagcaagcaaaaggacacccacacaaaaaccccatccaaaggccatcggcatcaaagatcaaaggtagataaatccacgaagatgaggaaaaaccaacacaaaagggctgaatattccaaaaaccagaatgcctcttctcctccaaatggttgcaactcctctccagcacaggcacaaaacaggacagagaatgaatttgacaaattgacagaagtasggttcagaaggtcggcaataacaaacttctctgagctaaagaagcatgttttaacccaatgcaaggaagctaagaaccttgataaatagttacaggaactgataactagaataaccaatatagagaggaacataaatgacctgatgcagctgaaaaacacagcacgagaacttcatgaagcatacacaggtatcaaactatatcatagagtgaagatcaacttaa

SEQ ID NO: 589106 - DNA, 520 bp, Homo sapiens
gcaaactccatcagacctgcagaagaggggtctgactcttagaggaaaaactaactaacagaaagcagtaacatcagcagcaagcaaaaggacacccacacaaaaaccccatccaaaggccatcggcatcaaagatcaaaggtagataaatccacgaagatgaggaaaaaccaacacaaaagggctgaatattccaaaaaccagaatgcctcttctcctccaaatggttgcaactcctctccagcacaggcacaaaacaggacagagaatgaatttgacaaattgacagaagtagrgttcagaaggtcggcaataacaaacttctctgagctaaagaagcatgttttaacccaatgcaaggaagctaagaaccttgataaatagttacaggaactgataactagaataaccaatatagagaggaacataaatgacctgatgcagctgaaaaacacagcacgagaacttcatgaagcatacacaggtatcaaactatatcatagagtgaagatcaacttaa

SEQ ID NO: 589107 - DNA, 566 bp, Homo sapiens
gctctcaaaaagggaaaaagaaaaatgaagggaaagaaaaaggatatcctttaagtcctctggatgtaactttagctggaagatgagacgcttgtaactaggtgcaaaaacaacagccattgccttgttgtctacatttctgtgataagaagcagccatgagctatcaggacacwgatccccagtatttggataacaaggtccttttgctcatgatggctcttccaagctgcatgcaagttgccccaggaatgaatgcatagcttcctgccatatggtatgggttgggagatgggtagttactactgggctaagcactgaaattgactgaaattaacctcaatttgcatccaagtttttctttgtaagttgcaagccttttataggctccagagttcccaaaatagttgcaatagacagattctgccactgcaattactgtctaggtgagaagacagaatactggtgcttcctactccgccttcctcccagaatcctcccctcagatcttaaataattttgtgtgctgtaactcctatgtagatgctgagcacatagtaagatttc

SEQ ID NO: 589108 - DNA, 492 bp, Homo sapiens
cttggaaaagtaacctttacctcttggaaaaaacagaaaatttgaataataccatgaatgggcttgatctaatggacgtttgtaaaacactactccacagaatcagataatatttgtggtaccttaaaaaacacaggaaatgttttctaaatggccactgtaaaagtcaaaartttaccatcctggctaacacagtgaaaccctgtctctactaaaaatatagaaaattagccgggtgtggtgtggcgcctgtagtcccagctactccggaggctgaggcagcagaatggcgtgaacccaggaggcagagcttgcagtgagccgagaatcgtgccactgcactccaggctggttgacgagatgtcactccgtctcaaaaagaaaaaaaaaagtcaaaagttgacaaattttaaaaatattataaaatttaaaataaagttaaatgaaaatgtaaaaagtgatggttaaatttgaaaataaaatacaataaat

SEQ ID NO: 589109 - DNA, 536 bp, Homo sapiens
cctgatgtcaattcttatgctcagattaaaatttttttaaaaaattactgtttttttttttttccagaaagtcagctggaagagctttgtgcctcatctccattgtctccttgtgattgagcacaagacctgaaataaaagccttgtctgggaaatctgcttggccttatgtcagtttctattacatggagaggtaaagagcctgtggtctgtaacagattctctcgtgaccgtggcaggaccacaggacatgggaagcattttcctcccccatgtcctaataaggggcaggcttatgagccagcagaactgccggacataaatgcyttgtagctgacagggagctacctaaatctttgattcagcctctcggcaactggagagttttcctctagcctcccagacactcctcacaaagccccaacatgaaaacaatgcatttcttttcctcctgtcccatatttgtttgtctttcttttttcttcttccttcctcctcccttttattcacttttcattaacttcaggctcagcctg

SEQ ID NO: 589110 - DNA, 611 bp, Homo sapiens
aaccatccctgcatccctggtatgaaacccacttgatcacgtcaaattatctttttgatatgctgttagattcagttaactagtattttcctgaggatttttgcctctatgttcatcagggatattggtctatagttttcagtttttgttatgtccttccctggttttggtattagagtattactggcttcatagaatgatttagggaaaattccctctttctttatcttttggaatagtgtcaataggtttgttaccaatttttctttgaatgtctgatagatgtcagcagtgaatctgtctggtcctggactttcttttgctggcaattttaaaaaacatcatttcaatctagctgtttgttattggtctgttcagagattttatatcttccaggtttaatgtaggagggttgtatatttccatgaatttatccatctcmtctaggttttctagttatgcccataaaggtgttcatagtagtctcgaataatctttcatatttctgtggtatcggttgtaacatctcccattttgtttctaattgagcttctctggatcttttccttttcttggttaatctcactaatggcctatcaattttatttatc

SEQ ID NO: 589111 - DNA, 507 bp, Homo sapiens
aattttatttatcttttcaaacaaccagattttkgtttcattaatcttttgtattttggtggttggttggttttcatttcatttagtttcattctgatctttatttcttttcttctgctggggtttggatttggattgttcttgtttctccagttctgtgaggtgtgaccttagattgtctatttgtgctctttcagactttttgatgtatgcatttaatgctataaacttttctcttagcactgcttttgctgtatcccagaggttttgataggttgtgtcactattattcagttcaaagaatttgtaaattttcattttgattttattgctgactcagcaatcattcaggagcaggttctttaatttccatgtatttgcatggttttgagagtttgttttggagttgatttccaattttattccgttgtggtctaagaaagtactggatataattttgatttttaaaaaatttactgagacttatttcgtggtctgtaatatggt

SEQ ID NO: 589112 - DNA, 507 bp, Homo sapiens
aattttatttatcttttcaaacaaccagattttggtttcattwatcttttgtattttggtggttggttggttttcatttcatttagtttcattctgatctttatttcttttcttctgctggggtttggatttggattgttcttgtttctccagttctgtgaggtgtgaccttagattgtctatttgtgctctttcagactttttgatgtatgcatttaatgctataaacttttctcttagcactgcttttgctgtatcccagaggttttgataggttgtgtcactattattcagttcaaagaatttgtaaattttcattttgattttattgctgactcagcaatcattcaggagcaggttctttaatttccatgtatttgcatggttttgagagtttgttttggagttgatttccaattttattccgttgtggtctaagaaagtactggatataattttgatttttaaaaaatttactgagacttatttcgtggtctgtaatatggt

SEQ ID NO: 589113 - DNA, 507 bp, Homo sapiens
aattttatttatcttttcaaacaaccagattttggtttcattaatcttttgtattttkgtggttggttggttttcatttcatttagtttcattctgatctttatttcttttcttctgctggggtttggatttggattgttcttgtttctccagttctgtgaggtgtgaccttagattgtctatttgtgctctttcagactttttgatgtatgcatttaatgctataaacttttctcttagcactgcttttgctgtatcccagaggttttgataggttgtgtcactattattcagttcaaagaatttgtaaattttcattttgattttattgctgactcagcaatcattcaggagcaggttctttaatttccatgtatttgcatggttttgagagtttgttttggagttgatttccaattttattccgttgtggtctaagaaagtactggatataattttgatttttaaaaaatttactgagacttatttcgtggtctgtaatatggt

SEQ ID NO: 589114 - DNA, 507 bp, Homo sapiens
aattttatttatcttttcaaacaaccagattttggtttcattaatcttttgtattttggtggttggttkgttttcatttcatttagtttcattctgatctttatttcttttcttctgctggggtttggatttggattgttcttgtttctccagttctgtgaggtgtgaccttagattgtctatttgtgctctttcagactttttgatgtatgcatttaatgctataaacttttctcttagcactgcttttgctgtatcccagaggttttgataggttgtgtcactattattcagttcaaagaatttgtaaattttcattttgattttattgctgactcagcaatcattcaggagcaggttctttaatttccatgtatttgcatggttttgagagtttgttttggagttgatttccaattttattccgttgtggtctaagaaagtactggatataattttgatttttaaaaaatttactgagacttatttcgtggtctgtaatatggt

SEQ ID NO: 589115 - DNA, 399 bp, Homo sapiens
ctggtagaccaggcaagtttttgtttgctgtaagaagtaaggcaagtaggagtcccagcactggatctgggatccaaggactgggcaagagtgccccctgrttcaacggatgtgagttcctgagcaccagtggtccttttatttctctgaccacaggatcagcccaagggcctgagggtgggcaaaggggccccagctggcgatttagaaagacataggagctgggagccagaggagtttttactttgtgcacaccatttctgctgaaatgctttgatttgctccctgatttatgttttgtatgtggaaaaaacccaaaatattggccttcctttccccaagtagaatatggttgcaaatgatgcccaaatataaatctgtgttagcctgctaaccaat

SEQ ID NO: 589116 - DNA, 329 bp, Homo sapiens
ctatggcatgtcaggtcctaggttttctcaagtaggaccctgagcttgacataacaaatctgcatttcttgggcaagtttagttacttggaccattaaaccctggccttaatccttgttctctgtccttgcactgcaggagataaggactttttatgttaccaaagaggtcctctggcttttgcttttccttctttttttttttttgagacggagttttgctgtgtcacccargctggagtgcagtgcgatctcggctcactgcaagtccgcctcccgggttcacaccattctcctgcctcagcctcccaagtagctaggactacaggt

SEQ ID NO: 589117 - DNA, 596 bp, Homo sapiens
taatagctactcctgcttttggtttccatttgtgtacagtattttttccacccctttattttaggtctataacaatttttacctgctaggtgggtcacgtgaaaactgcagatatttgtatgtgttttttattcattctaccaatctatcttttaagtggaacatgtagaccactcatattaaatgttgatattgatatgtgaggcattgttccagtcatgatgttttacctagttgcattgttttcttcattttgtcattgtttttgtaagccctgtgagttttatgctttcaagtgtttttatactggtgtttactgaccttttgtttagatagtttttatactggtatttatctacctttatcttttatcagttcttctaggccttgtctactggtgatgagttcctcagcatttgcttatctgggaaaaaytttatttctccttcatttatgaaacagttttgctgtatacaaaatacttggctgacagttattccacctgagggctctaaagataggacctcaatttcttctggcttgtcaagtttctgctgagaattctgctgttagtaacacaggttttcctttacaag

SEQ ID NO: 589118 - DNA, 650 bp, Homo sapiens
acaactaatagctcgtattttatatattcggctgctacactgtcaggtacttacagtccatgaccatcaggtcatctaaacatggcttgttaatattaccttgttaatatatttaacactaaatttcagtttgtttgatgttaatattttcactcacactttgtttgtgcttttctgggatttttctgtctatgtcttaatttttgctccaagattcaaggtaaaatttacatataatataactcacctttcttaaagtgtatactaattttgacgaacagtcayaacaatcaccacaatcaagatacagaacatttccttcaccaaaagtattccctcatgtccctttatacttagtccctccctcccccgatcctgacagccactgatgtgttgtctgccatataaatggaatcatacagtacattgcttttatgtctgacttttttcactcagcaaaatgcttctgatattcatctatgttgttgcatgaatcaatgttctttcttattgctgaatgatatgctccattgtgcggatatataataatctgtcaatcactcattgatgacaattctgttgtttccagtttggggctatcacaagtaaagctactactaacaattatgtacaagtatttgaatggacac

SEQ ID NO: 589119 - DNA, 608 bp, Homo sapiens
aacagtcataacaatcaccacaatcaagatacagaacatttccttcaccaaaagtattccctcatgtccctttatacttagtccctccctcccccgatcctgacagccactgatgtgttgtctgccatataaatggaatcatasagtacattgcttttatgtctgacttttttcactcagcaaaatgcttctgatattcatctatgttgttgcatgaatcaatgttctttcttattgctgaatgatatgctccattgtgcggatatataataatctgtcaatcactcattgatgacaattctgttgtttccagtttggggctatcacaagtaaagctactactaacaattatgtacaagtatttgaatggacacactttctcttaggtaagcacctaggagtggattagggattgtgaataaagctactaagaacactttcatataagttttgtctgcacatatgttataaattcctttggaagtgaaactgctgaaccatttggttaaaattatgtttaactttataaaaaaaactaccaaagtttctctaggtagctgtaccatcttgcacttccaccagtcatctatgagaattgcagttgttcc

SEQ ID NO: 589120 - DNA, 608 bp, Homo sapiens
aacagtcataacaatcaccacaatcaagatacagaacatttccttcaccaaaagtattccctcatgtccctttatacttagtccctccctcccccgatcctgacagccactgatgtgttgtctgccatataaatggaatcatacagtacattgcttttatgtctgacttttttcactcagcaaaatgcttctgatattcatctatgttgttgcatgaatcratgttctttcttattgctgaatgatatgctccattgtgcggatatataataatctgtcaatcactcattgatgacaattctgttgtttccagtttggggctatcacaagtaaagctactactaacaattatgtacaagtatttgaatggacacactttctcttaggtaagcacctaggagtggattagggattgtgaataaagctactaagaacactttcatataagttttgtctgcacatatgttataaattcctttggaagtgaaactgctgaaccatttggttaaaattatgtttaactttataaaaaaaactaccaaagtttctctaggtagctgtaccatcttgcacttccaccagtcatctatgagaattgcagttgttcc

SEQ ID NO: 589121 - DNA, 608 bp, Homo sapiens
aacagtcataacaatcaccacaatcaagatacagaacatttccttcaccaaaagtattccctcatgtccctttatacttagtccctccctcccccgatcctgacagccactgatgtgttgtctgccatataaatggaatcatacagtacattgcttttatgtctgacttttttcactcagcaaaatgcttctgatattcatctatgttgttgcatgaatcaatgttctttcttattgctgaatgatatrctccattgtgcggatatataataatctgtcaatcactcattgatgacaattctgttgtttccagtttggggctatcacaagtaaagctactactaacaattatgtacaagtatttgaatggacacactttctcttaggtaagcacctaggagtggattagggattgtgaataaagctactaagaacactttcatataagttttgtctgcacatatgttataaattcctttggaagtgaaactgctgaaccatttggttaaaattatgtttaactttataaaaaaaactaccaaagtttctctaggtagctgtaccatcttgcacttccaccagtcatctatgagaattgcagttgttcc

SEQ ID NO: 589122 - DNA, 608 bp, Homo sapiens
aacagtcataacaatcaccacaatcaagatacagaacatttccttcaccaaaagtattccctcatgtccctttatacttagtccctccctcccccgatcctgacagccactgatgtgttgtctgccatataaatggaatcatacagtacattgcttttatgtctgacttttttcactcagcaaaatgcttctgatattcatctatgttgttgcatgaatcaatgttctttcttattgctgaatgatatgctccattgtgcggatatataataatctgtcaatcactcattgatgacaattctgttgtttccagtttggggctatcacaagtaaagctactactaacaattatgtacaagtatttgaatggacacactttctcttaggtaagcacctaggagtggattagggattgtgaataaagctactaagaacactttcatataagttttgtctgcacatatgttataaattcctttggaagtgaaactgctgaaccatttggttaaaattatgtttaactttataaaaaaaactaccaaagtttctctaggtagctgtaccatcttgcacttccaccartcatctatgagaattgcagttgttcc

SEQ ID NO: 589123 - DNA, 587 bp, Homo sapiens
ttgttcatgttcttgtgagggaaataatattacagtcttaaaattttattactcatgggaaagaaagtacatatttcacactgacttttccttatactgtcttgacccctctaaacatctacttaaaattgagatcaaaattcggttttattcatcaaggctatagatttgacattttatatgtcaaaggccactgaaaataggccctcgcatcacctctgggctgcataaccagtactatttggatagcatctctaaaaatattgagggccatgcaatatccttgattgaatcttggaacagaagagggacatcagtggaaaaactggtgaagtatgagtaaagtctgtagtttaggtaattgtaatgtatcacagttaattttacttctgacaaatgtaccaggattctgcaaratgataaacttaggggaaactgggtgagagatgtacaggaactctctgcactatttttgtaacttatgtgtgtctaaaattatttcaaaatcaaaagttattttttaaaaatcactgaggggaaccaagtttcatatagctgaaggaaggatttacatatatgtaaatggg

SEQ ID NO: 589124 - DNA, 599 bp, Homo sapiens
gggtctttgtttagtcctgtcttcccaatgcctcatacatttttgacacatagtagataccaacatatacttcttgtttgtacaattaaaccttgcatactacccaagaaaatacaactagaaagaattctctaagtctacttccagtcctatggatctggtcttgatgggtttctccaggtgttgtcaggccctttagatgttcaagttgtcacagcatgacccatattccctctcaaggctcctatgattcaagttcatgtaagaattgtattccagctttcaattttagctcttataattcaagttcatcgaaaataaactgtataccagcagaaacaagaaaaatttccccaaggccaatattcaagggctcaatttagtgtctatttcaaaggaggtaggctttctgatctcttttgattacttattctagggcagaaaatagagaaagatgatagttaattttaggttttgttttctcatgcaaggcactgagaggaattcccttttaccaccattttgcactggaaacactaatagagtaagtatayataatttctaagcggagagaaaatcattttagatcattttaaaat

SEQ ID NO: 589125 - DNA, 243 bp, Homo sapiens
tatgcccccatgagaaatgttcttgcttcctggtgactcacagcctccttccaccaactaattttgaaagtgaaaacaaatgggaatgtgtcttgtgttttataaaacatatgagcataaataggaatccaaggagattacagtatttaagggagtccttgaaaaagacaggatagagaattaaaagaaggtgttsttgacttaaagctttcatttttacctttcatcctcatttgcctaagt

SEQ ID NO: 589126 - DNA, 589 bp, Homo sapiens
aagctttcatttttacctttcatcctcatttgcctaagtcaccttcctaggtatcttttaatagtatttagaagaagctgcccaccaaggattgatagctatggcaggagagactcagagaatcataggattttgaagtaaaaagagacattagagaccaaaaagtaatgagtaataaccaaaggaacatttcagaggagggcagcagttggtgactcaagatctgagtgagtttgagaaatgtgacctaaaggccacaccaaaagcctctactccctmagtggtccaaagagctatgaaggagagcttcagttagagctgggaaatggaactggaaagaatagcaagagtctgaaatatccacgcatctgtaactttcctagtttgtatataggttattttatttatttatatcttgtcttgttccaaaaaaaggtttaaggcagtttacaaagagtcatacaacatagcaagtttaaataaactttaaaaaggccgaggaaatgcaatggtaggaggcttatcgttttaactcagattctccagcacgccagggaaacacatatttatacattttcaacagtcagac

SEQ ID NO: 589127 - DNA, 603 bp, Homo sapiens
atgtgagaacagacttaaagagacactgaggttattactttggccctcttggattctacatagagactttcatgacacaaagaacctggaataaaataccatgtagacagagtgatgcaaccatctcagctgtcccagatgagcttaacttccaaccaacttacctcctgaatacaaatacatgtgtgaatttaggtgcaactagcrgaaaaaaatacgcattcaactcacagcctggtgacaaataacttgttttaagccactacatttttgtgtgatttgtaacagcaatacttgggaacatcattgtcagattattgaaaaagttaaggagaaaaaaatctcaaaaggaaggaaaaaactcacatacatattacatattggcagataatttgaggaaaagaattaattttcatcataaacaatagaggccagaagccaatgtcaagacaataaatagaaaaacactttagcagaagttatatataaacacatatacacatatttgcatttctctgtatatggcaggtatataccttcaaaggatttttaagtttttcaagtgtcaggcttattgaggtataatttacataaagtaaaatt

SEQ ID NO: 589128 - DNA, 603 bp, Homo sapiens
atgtgagaacagacttaaagagacactgaggttattactttggccctcttggattctacatagagactttcatgacacaaagaacctggaataaaataccatgtagacagagtgatgcaaccatctcagctgtcccagatgagcttaacttccaaccaacttacctcctgaatacaaatacatgtgtgaatttaggtgcaactagcagaaaaaaatacgcattcaactcacagcctggtgacaaataacttgttttaagccactacatttttgtgtgatttgtaacagcaatacttgggaacatcattgtcagattattgaaaaagttaaggagaaaaaaatctcaaaaggaaggaaaaaactcacatacatattacatattggcagataatttgaggaaaagaattaattttcatcataaacaatagaggccagaagccaatgtcaagacaataaatagaaaaacactttagcagaagttatatataaacacatatacacatatttgcatttctctgtatatggcaggtatataccttcaaaggatttttaagtttttyaagtgtcaggcttattgaggtataatttacataaagtaaaatt

SEQ ID NO: 589129 - DNA, 531 bp, Homo sapiens
gcccaacactgatgtgatttctattcctatggcctggcctttccaggatattacttacatgaaatcatatagtatctcagtctgttcaggctgttrtaacaaaacaccatagaccaggtggcttataaactaatttatttctcagttttggagactatgaagtctaagatcaaaacactggcagattccatgtctgctgaaagcccacttccctgttcacggatggccatctttttgctgtgttttcacatgatagaaggagcaagggagtccttttataagggcactaatcatattcatgaggttttattaaactacatgtcacctcctaaacagatatgccacacactgcttttacattcccacttctaccagaggccctgcttctcctaacctgcaatttcgctgggttaactcctacatgtcccaagatttagccttcctgccaattctcttccccatccacaaatcactctcttcaactcaattccaccaaatctcatgtcacccaaaaatgtgtttagagacaga

SEQ ID NO: 589130 - DNA, 531 bp, Homo sapiens
gcccaacactgatgtgatttctattcctatggcctggcctttccaggatattacttacatgaaatcatatagtatctcagtctgttcaggctgttgtaacaaaacaccatagaccaggtggcttataaactaatttatttctcagttttggagactatgaagtctaagatcaaaacactggcagattccatgtctgctgaaagcccacttccctgttcacggatggccatctttttgctgtgttttcacatgatagaagragcaagggagtccttttataagggcactaatcatattcatgaggttttattaaactacatgtcacctcctaaacagatatgccacacactgcttttacattcccacttctaccagaggccctgcttctcctaacctgcaatttcgctgggttaactcctacatgtcccaagatttagccttcctgccaattctcttccccatccacaaatcactctcttcaactcaattccaccaaatctcatgtcacccaaaaatgtgtttagagacaga

SEQ ID NO: 589131 - DNA, 531 bp, Homo sapiens
gcccaacactgatgtgatttctattcctatggcctggcctttccaggatattacttacatgaaatcatatagtatctcagtctgttcaggctgttgtaacaaaacaccatagaccaggtggcttataaactaatttatttctcagttttggagactatgaagtctaagatcaaaacactggcagattccatgtctgctgaaagcccacttccctgttcacggatggccatctttttgctgtgttttcacatgatagaaggagcaagggagtccttttataagggcamtaatcatattcatgaggttttattaaactacatgtcacctcctaaacagatatgccacacactgcttttacattcccacttctaccagaggccctgcttctcctaacctgcaatttcgctgggttaactcctacatgtcccaagatttagccttcctgccaattctcttccccatccacaaatcactctcttcaactcaattccaccaaatctcatgtcacccaaaaatgtgtttagagacaga

SEQ ID NO: 589132 - DNA, 591 bp, Homo sapiens
ttttttattttacaaaagaatttgataattaactattcatctataacaagtagattgacataagtgatattcaaagsttttcccatctcacacattaaaaatactctgtttctgtggtcagggtgggacctatgagacagatattaacaactgtaccacaaaataagaaagtctttgaataaggaagcagaaacatagactatactttgaaaacacctaagctgcaaattatatgcagcaaagctaaatgaatttataaacatcttattgaaagccaaaaaacttctagcaagcaagcaagcaagaataggaggacttgcacattaaccattatcactaaattaggatatgtgaagcaatattgttacttcttttgtttttgagacagagtctcgccttatcacccaggctggagtgcaatggtgcaatctcggctcactgcaacctccgcctcctgggttcaggtgattctcctatctcagtctcccgagtagccaggattacaggcgcgcaccaccatgctcagctaattttttgtatttttagtagagacggtgtttcaccatggtggccagcctggtcttgaactcc

SEQ ID NO: 589133 - DNA, 591 bp, Homo sapiens
ttttttattttacaaaagaatttgataattaactattcatctataacaagtagattgacataagtgatattcaaaggttttcccatctcamacattaaaaatactctgtttctgtggtcagggtgggacctatgagacagatattaacaactgtaccacaaaataagaaagtctttgaataaggaagcagaaacatagactatactttgaaaacacctaagctgcaaattatatgcagcaaagctaaatgaatttataaacatcttattgaaagccaaaaaacttctagcaagcaagcaagcaagaataggaggacttgcacattaaccattatcactaaattaggatatgtgaagcaatattgttacttcttttgtttttgagacagagtctcgccttatcacccaggctggagtgcaatggtgcaatctcggctcactgcaacctccgcctcctgggttcaggtgattctcctatctcagtctcccgagtagccaggattacaggcgcgcaccaccatgctcagctaattttttgtatttttagtagagacggtgtttcaccatggtggccagcctggtcttgaactcc

SEQ ID NO: 589134 - DNA, 511 bp, Homo sapiens
tcccatgttataggtaaagagggtaaaacatagaaagattgttcaaactaattacttactcttcagtggcagagccaagggtttgaacccaggtctgcttgacttcagagctcacactcttaaaagaacaagcttcacactcttgaaaagaacaagctgtcatctggactaaataccaaattctaattttgctactggttctgaaactctgggaaatcttttggctataaaagctacataaaacctgtctacctcaayatagggaaaagctgccattttccctcagacctcttgcctttggatcaaaatcattttactgtacacgtcctttgtcttagtatgagaagtaattgattttcgttcccacaccaccacgtaaagactcgctgtcaaagtaagagtttttcctgagatgcatgccttcaatggtagcccctcttatattcatcttagattttcctcaccagttatgtctcagctcataaaagaaactcaatcaccatctgcatcc

SEQ ID NO: 589135 - DNA, 511 bp, Homo sapiens
tcccatgttataggtaaagagggtaaaacatagaaagattgttcaaactaattacttactcttcagtggcagagccaagggtttgaacccaggtctgcttgacttcagagctcacactcttaaaagaacaagcttcacactcttgaaaagaacaagctgtcatctggactaaataccaaattctaattttgctactggttctgaaactctgggaaatcttttggctataaaagctacataaaacctgtctacctcaacatagggaaaagctgccattttccctyagacctcttgcctttggatcaaaatcattttactgtacacgtcctttgtcttagtatgagaagtaattgattttcgttcccacaccaccacgtaaagactcgctgtcaaagtaagagtttttcctgagatgcatgccttcaatggtagcccctcttatattcatcttagattttcctcaccagttatgtctcagctcataaaagaaactcaatcaccatctgcatcc

SEQ ID NO: 589136 - DNA, 511 bp, Homo sapiens
tcccatgttataggtaaagagggtaaaacatagaaagattgttcaaactaattacttactcttcagtggcagagccaagggtttgaacccaggtctgcttgacttcagagctcacactcttaaaagaacaagcttcacactcttgaaaagaacaagctgtcatctggactaaataccaaattctaattttgctactggttctgaaactctgggaaatcttttggctataaaagctacataaaacctgtctacctcaacatagggaaaagctgccattttccctcagacctcttgcctttggatcaaaatcattttactgtacaygtcctttgtcttagtatgagaagtaattgattttcgttcccacaccaccacgtaaagactcgctgtcaaagtaagagtttttcctgagatgcatgccttcaatggtagcccctcttatattcatcttagattttcctcaccagttatgtctcagctcataaaagaaactcaatcaccatctgcatcc

SEQ ID NO: 589137 - DNA, 511 bp, Homo sapiens
tcccatgttataggtaaagagggtaaaacatagaaagattgttcaaactaattacttactcttcagtggcagagccaagggtttgaacccaggtctgcttgacttcagagctcacactcttaaaagaacaagcttcacactcttgaaaagaacaagctgtcatctggactaaataccaaattctaattttgctactggttctgaaactctgggaaatcttttggctataaaagctacataaaacctgtctacctcaacatagggaaaagctgccattttccctcagacctcttgcctttggatcaaaatcattttactgtacacgtcctttgtcttagtatgagaagtaattgattttsgttcccacaccaccacgtaaagactcgctgtcaaagtaagagtttttcctgagatgcatgccttcaatggtagcccctcttatattcatcttagattttcctcaccagttatgtctcagctcataaaagaaactcaatcaccatctgcatcc

SEQ ID NO: 589138 - DNA, 620 bp, Homo sapiens
ctcaaaaaaataccagcaaatcaaattcaacaacacatttcaacaacagattaaaatgatcatacaccataatcaaatggcatttatctctgggatgcaaggatggatcaacatactcaaatctataaatgtgatcatcactctcacaaaatgagggataaaaattatgatcatctcaatagatcaggaaaatctttgacaaaattcaacactttttcatgatagaaactctcaattgattagatatagagggaaartacctcagcacaataaaagatcacatatgacaaagtcctggctaacattcttaaaggtgaaaagttgagaggctttcctctgaggctaacattcttaaaggtgaaaacttgagaggctttcctctgagatcaggaaccagacaaggatgcccggtatcatctcttctttttaacatagtactggaagtcctattcagagcaatcaggcaatagaaacaaagaaaatgcttccaaaacggaaatgaagtagttgaactatctccagttgctgataacatgatttgtatacagaaaactctaaagactgccaaaacaaaacctgttggaactgataaagtcaataagatacaaagtcaacaaaga

SEQ ID NO: 589139 - DNA, 620 bp, Homo sapiens
ctcaaaaaaataccagcaaatcaaattcaacaacacatttcaacaacagattaaaatgatcatacaccataatcaaatggcatttatctctgggatgcaaggatggatcaacatactcaaatctataaatgtgatcatcactctcacaaaatgagggataaaaattatgatcatctcaatagatcaggaaaatctttgacaaaattcaacactttttcatgatagaaactctcaattgattagatatagagggaaaatacctcagcacaataaaagatcacatatgacaaagtcctggctaacattcttaaaggtgaaaagttgagaggctttcctctgaggctaacattcttaaaggtgaaaacttgagaggctttcctctgagatcaggaaccagacaaggatgcccggtatcatctcttctttttaacatagtactggaagtcctattcagagcaatcaggcaatagaaacaaagaaaatgcttccaaaayggaaatgaagtagttgaactatctccagttgctgataacatgatttgtatacagaaaactctaaagactgccaaaacaaaacctgttggaactgataaagtcaataagatacaaagtcaacaaaga

SEQ ID NO: 589140 - DNA, 571 bp, Homo sapiens
aaagtcctggctaacattcttaaaggtgaaaagttgagaggctttcctctgaggctaacattcttaaaggtgaaaacttgagaggctttcctctgagatcaggaaccagacaaggatgcccggtatcatctcttctttttaacatagtactggaagtcctattcagagcaatcaggcaatagaaacaaagaaaatgcttccaaaacggaaatgaagtagttgaactatctccagttgctgataacatgatttgtatacagaaaactctaaagactgccaaaacaaaacctgttggaactgataaagtcaataagatacaaagtcaacaaagaaaaatcagtagcatttctatacactaacaaaaaactatctggagacaaaaaaaggaaatctcatttataaaagcctcagaacattcacaggagaaaatttaatcaggagggtaaagatctctatactaaaaactataaaatattgagcaaataaattgaagattacacaaatacatggaaacatattcttcayggattagaagaatcaatattattaaaatgtccatactggccaaagc

SEQ ID NO: 589141 - DNA, 571 bp, Homo sapiens
aaagtcctggctaacattcttaaaggtgaaaagttgagaggctttcctctgaggctaacattcttaaaggtgaaaacttgagaggctttcctctgagatcaggaaccagacaaggatgcccggtatcatctcttctttttaacatagtactggaagtcctattcagagcaatcaggcaatagaaacaaagaaaatgcttccaaaacggaaatgaagtagttgaactatctccagttgctgataacatgatttgtatacagaaaactctaaagactgccaaaacaaaacctgttggaactgataaagtcaataagatacaaagtcaacaaagaaaaatcagtagcatttctatacactaacaaaaaactatctggagacaaaaaaaggaaatctcatttataaaagcctcagaacattcacaggagaaaatttaatcaggagggtaaagatctctatactaaaaactataaaatattgagcaaataaattgaagattacacaaatacatggaaacatattcttcatggattagaagaatcaatattrttaaaatgtccatactggccaaagc

SEQ ID NO: 589142 - DNA, 562 bp, Homo sapiens
ctgtcttttctaccctcttcagtgcctctttcagtgatattaagttaaaaccagatgctgtgattcctcacctggtttttggttcatatgaaggtgcttttctttgtgtgaacaattggtagaggcttgtctttggccatcttgttctacctcctccttggtttctttttacgtaactgtcaagatcctcccatcctmtaagtctcactcatcacttcttacagtagtccattgatctcctagttggtttctctatctcaagcataatatctacatttcatctttcactttgttgccagagatatcattcttctctttaaaatcttttggagatacctagttgtctttagaataaaattcaaattactcagtgtaactatgttctagctcctacctacatttccagtattaaatccaggtttatcttcttgcactgtgctctcttacatgtatgcgccttttactcctgctgctcacctttgcctaccccttgcctcaccctcccaactccaactgttcagtcaaacctcactcatatgcttacccacccaaggaaaactag

SEQ ID NO: 589143 - DNA, 594 bp, Homo sapiens
atatctcatgcaaatagactccatttcagcctcttcactagtgttctctttaactgctcaaacttacctgtgccacaatagtggacaaggcctagggaaactagcaggtagtaatgggatatgataagctttggagttagagaacttctggtgcaaatatacactctacaatgtttttatctcagctttagttttcttacctgaaaaactggattaatagctaacttcacataattcagtcattttgggtaagttactttacctcttttggtctgcaattttctctactgtgaaatgtggtttatagggcccatagctgcatgagtatcaaataagatagtgaacaaatatctaaaaggattcttgacttatagtaagtcatccataagtgttttctccccaattcgttttatccttcagttgggtaggaatgtggtaggggtgatgtaataatagtaagttatggggtgactatgtactaggcactgtgctaaactctttatactccttatcttagtcttagcaagagcrgcccatcttgttattaaatgtcctctattttagatgagaaaactgaggccaagaagggacatg

SEQ ID NO: 589144 - DNA, 476 bp, Homo sapiens
cgttttatctcttcatcactaacattggatatcaacagtatttttctcatagatgataggataacatatttgtaaagcacttcacccagtgtgtagtaagttctcaaaaacaactattgttattcttgaatcatatgtcaatgtcacctgaggtaaccaggtgtcttaaaaatctagctaagactagcatgaacttccatttttacattagtaaaaagtctcatgacctccccaatatttgtgcaaactcctagaaaatcagggagtgcttacattcttgttacatctggctctaagmgctcctgaactactgtagcgtacagattgttttgctgtcctctgtacgctattcttatttctaattccaccttctagacatgagactcagttccttaaactgtttaacattcatcctctctctctcacacatacacacacacacacacacacacacacacagcatgcacctgcatcac

SEQ ID NO: 589145 - DNA, 476 bp, Homo sapiens
cgttttatctcttcatcactaacattggatatcaacagtatttttctcatagatgataggataacatatttgtaaagcacttcacccagtgtgtagtaagttctcaaaaacaactattgttattcttgaatcatatgtcaatgtcacctgaggtaaccaggtgtcttaaaaatctagctaagactagcatgaacttccatttttacattagtaaaaagtctcatgacctccccaatatttgtgcaaactcctagaaaatcagggagtgcttacattcttgttacatctggctctaagagctcctgaactactgtagcgtacagattgttttgctgtcctctgtacgctattcttatttctaattccaccttctagacatgagactcagytccttaaactgtttaacattcatcctctctctctcacacatacacacacacacacacacacacacacacagcatgcacctgcatcac

SEQ ID NO: 589146 - DNA, 544 bp, Homo sapiens
ttacttgtttgactattaaagttggtaggtattctaaagcactaatggtgcaaatggagtaagctctcactgggtaktaatgagaattctttttatagaagacaaaaagtcattttaagtaactcaagcacataggagaccacaaccgttcatgtcatcaaaccctaaaaacctaagtagtgttggctttaagatcagatggatccaaagactcacaatgtattagggctctccctctttccccctttcttcttctgcccttctcccctgacgcctcgcaccaccttctcagcatctgtgtgctggtctctttctctcaggcacagaacacagctgctgaccactctgaagtcacatactaggacctcacagtctaaagagtgaaatattcctcccaattcagcatgataagccccacaaaggactctaattagacaggcatgaagcatgagttcatggcttaaaagaggagggggttataggtttagtgtgattgaaaggacttaccagggatgacaattcctcaaaggaaagcatctttctg

SEQ ID NO: 589147 - DNA, 544 bp, Homo sapiens
ttacttgtttgactattaaagttggtaggtattctaaagcactaatggtgcaaatggagtaagctctcactgggtattaatgagaattctttttatagaagacaaaaagtcattttaagtaactcaagcacataggagaccacaaccgttcatgtcatcaaaccctaaaaacctaagtagtgttggctttaagatcagatggatccaaagactcacaatgtattagggctctccctctttccccctttcttcttctgcccttctcccctgacgcctcgcaccacctyctcagcatctgtgtgctggtctctttctctcaggcacagaacacagctgctgaccactctgaagtcacatactaggacctcacagtctaaagagtgaaatattcctcccaattcagcatgataagccccacaaaggactctaattagacaggcatgaagcatgagttcatggcttaaaagaggagggggttataggtttagtgtgattgaaaggacttaccagggatgacaattcctcaaaggaaagcatctttctg

SEQ ID NO: 589148 - DNA, 625 bp, Homo sapiens
ctttccacccattgtctggcagaaatagagaaagatggacaggtacagaaagcagagcttcctgaaatttgctaaatatcacacttamcttgagaaaagttcttcttacaaggaacatacaaacagactcacttagagcactaccttcctcagcactggaatatggctctcaataattcttgatctcaaaggctatttgccttcacctaacaatttctgtagttatctacttaatgatcagttattttgaaaacatgcttttcataaccctagttcttaacacataaacaactttgcatataatgtattgaaaggtcttataaccccttttaacaaggtatagcttaaagaaatagcaaaatagtgagctgtaataattatttctaacaccatgattttagggaataaaatatactaatattcctcataagaatgcaactctcagtcacgcacggtggctcatacctgaaatccccagcactttgggaggccaaggcgggcggatcacctgaggtcagaagtttgagaccagcctgaccaacacagagaaagcccgtctccactaaaaatacaaaattagctgggcgtggtggcgcatgcttgtaattccagctactcgggagga

SEQ ID NO: 589149 - DNA, 579 bp, Homo sapiens
tactgctgatgtttattcaaggcccaggggctctttagtcagcagatggtgaatcttgccaggacatggtctttctcttcaacacagcaggttttcttctggcccaggctgagtctagaaatgccatccaggagtgagggcctgggctcagaggcttcaggaatctgcttggtgctttatttttactgtggctgagctggtacccaggtggcaaaacaaagtcctctttacttttctctcttgtttccacragaggaaggagtctctctttgagctgcactgcctggagagttgggggatgggtgacacaagtactcccctggccaccacaactggtgtctcactgggtcttgtgcactccatttccactggctctgagcccaacatagtacccagatttgcccaaggactgcagtccttgtggcttgactgcctttcaagtttattcaggaccctagggcacttgtttagtcagctggtgctggagctagctggaactcaggttcctaccactggggcagaggattgccctctggcaagggccagcttaaatgctccctctgtgggtgctggcagaat

SEQ ID NO: 589150 - DNA, 618 bp, Homo sapiens
caatgtgaatagtatactatctttgtgtaaagggtatgtgtgcgtggggagaatatatatgaatttgcttgtgtttatatagactatttctagaaaattattgcttctagatagagacatcagtgcctaggcacaaggcttttttctatataccctttgtatctttgtgccatgaacttgtatttatgtgttaatatttttaaagtaacaaaaacttttaggggaaagaaaagtctggctgaaaraactattttcaccacagagggccccttacctaggagagcaatggggaggttgtgggctggtctccctttggggaatgtgttctccttctggttctagcaaagagaatcttctctttcccggtacagttcccatgagagcttcacagagatccagtctctggcagtatttcagtcggggcactttctgaggtaccgttaggaactgttaggaaccgcgttagatactggtggtacagcagtaaagctctatagacgcgtctctgccaccaaggagcttctattccagcagggggagacaaacaatactaagtgcgtacaccattagctatttctctgtcaagtgtgccaaatgctgtaaaaaagaagtttgagt

SEQ ID NO: 589151 - DNA, 507 bp, Homo sapiens
aagaaatcaaatcttgagtaatggtatttgtattgtgacacttatcttactgaaagtgtaaaacttcaaattattacccacaagttctataattgtgctagaaactttcatagttccataggtttgggaagtgtaccccaactaaatgttaatctacatatattaaatgttctgtcattttacatttagatgttatttttctctttttaaaagtattgtgaggtgagaagaaagtatatgataatgaagagcaaatgtcwctttatggatataagacattagaatatgataacagttggccttgataaattcagactgacatccaattaactttttcttgactgcctggttatgataacagaaatatttctgtcataaatatatatatatatatatatatatatatatatatatatatatatatatatatactggaataggtatcaggatatgggttttataccaactctgccaattaaccaagtttgcaactttagatagcacgtt

SEQ ID NO: 589152 - DNA, 360 bp, Homo sapiens
tgtgtaagctttcaaagtcagtgaagtatactatgtactgatcagatttaatattttcatccttatttgatagagtaagccaataaattagaaagttgattgcattaagagatgctccatcattgctgaaatatatamtgctatttaaattagataatttaaaaaatctgattggcatataattttaatgaagatttgaatatttgacatggtttgtcatccaatttttcagaataaaaatgttggatttttaaaaattttgattaactgtactcttaaaaacataacaacttggaataaaatggtttttgagtcaggtggcccagttttgatagatggatttttttgtcatattaatat

SEQ ID NO: 589153 - DNA, 563 bp, Homo sapiens
gttaatttgctaatctggttctttgatcatattattcctttgttaaaacacattgatgccgctgcaattatatatgggtaaaggcaaattctgtacctaaaatttaatgtcttcagcattttgatctctttcccttttcgtgtccatttttcccatttttctacttatctttcaactccagtgaaacatattaacttttttwaaaaaatgagcttcttgtcatctctctatttctaattcctgttcaaaagatttcttcccattctctctcactatatagatttgactcagtcattgaacagttttttcaaatagtgagtgttttcagggttggtcctggatcttttcacctcctaagctagcagaaagaagttaggtctccggaatctctttggaagagttgcagaaacaattcctaggacattacctagctggagaaaatcatgtccattgattctgctccatcctgtgatcactactccttttgacccactgctttgtggtgggccccaagctattttatagaatggcttcaaatctattcttaagttagccagtgatga

SEQ ID NO: 589154 - DNA, 556 bp, Homo sapiens
taaacacaatatagattgatggaagaaaaaaagaaacaaagacattgcttgagggttaagaaccagtttggggaatacatactgaatatgggtcatttgcacaatgatcaggaaaattacttttattacacacacacacacaaaaaaaaatgcgctgaaagccataagcaaaatgcatggcagtagcggttacaaaatagaaacagcattgtaaatatgtcagccaaagaccagaaaacaagatgatgatggtgattctacagcattagaatcctattaatgctgatgctggcccactctagacatgggcaagtttatttaaacaatggaaggaaataatctaggtgcatagatagggggtactcaagttaatagtagacataaataatccaaattataaattagaatcggaggactagrcataatttttatggggtctgagaaaattcttctgatgaaaacaatttgtgatgtctctaggagttactttaggagatggtgtgctagaccagaactagggattcttatatcgacaacacagaggaggcctctctcc

SEQ ID NO: 589155 - DNA, 644 bp, Homo sapiens
tgcactaaataacaacaaagtgtgatgacatagcacatagtattttctattataagtctcttaatgggtacaattataggtatctttgctgytttgtgagttgtgcctaaatgtagaactaaactaatactgctaggagggtattggccttatgtgtgatgaatatgaaagtaacccacattgctctggaaactctggttggagccatgactttcagccttcaccacattctaaaggtaatgcataaagcctcaatgtcttgacctacttctttccccccgcaccccaaactaaaggcagggggagtctctgtgtacttaagcatgtaaatgaggtcagagaaagggaatttgtctattgcttgtagctcttgctgattggacattttcccgacagaggtgttcaaaggaaaagtatgtcatctgttcattactgttaattaggaataaaatcaggctttgggggctccaaatcccatagagcatcagcagagaaatagagttgaaattttagccctattacgcagagtaaggttagacagctactcgtctaggctccagaactgtgttcatttgatctttaaaaaacaggtattgcaaagatatttcataaggtgggaagaaaaagttgtaaattctagctcc

SEQ ID NO: 589156 - DNA, 530 bp, Homo sapiens
gtctctgctcacttccattatttgaaaaatgtagatcttgtagaatctcttcatttggtgtratgaaaattaaaagtggttcaaaggaagtaataattctgttttcaaaatccgattggtaaatacttcagaggtatggctcaatgcctttaaatacagtatcctcattcaacttcaaaatcaaatatcttaaattgaacccttcttctcatactgtgttgctctttcaaagtagagcattaagtttgaaaaaacaataacaagtatcttaaaattataaacattaagatgtttataaacatttgagataattaactcatttgacactgaagtatttaatttaatttaattatttatttttgagatggagttctgctctgtcacccaggctggggtgccgtggtgggatcatagctcactgcagcctcaaactcctggcatccagcattcttcctgcctcagcctccctaagtgttaggattacagacatgagccactgtatcaggcccaaagtattttaaaaataactt

SEQ ID NO: 589157 - DNA, 530 bp, Homo sapiens
gtctctgctcacttccattatttgaaaaatgtagatcttgtagaatctcttcatttggtgtaatgaaaattaaaagtggttcaaaggaagtaataattctgttttcaaaatccgattggyaaatacttcagaggtatggctcaatgcctttaaatacagtatcctcattcaacttcaaaatcaaatatcttaaattgaacccttcttctcatactgtgttgctctttcaaagtagagcattaagtttgaaaaaacaataacaagtatcttaaaattataaacattaagatgtttataaacatttgagataattaactcatttgacactgaagtatttaatttaatttaattatttatttttgagatggagttctgctctgtcacccaggctggggtgccgtggtgggatcatagctcactgcagcctcaaactcctggcatccagcattcttcctgcctcagcctccctaagtgttaggattacagacatgagccactgtatcaggcccaaagtattttaaaaataactt

SEQ ID NO: 589158 - DNA, 471 bp, Homo sapiens
gaatgctaacttaatgggtgaaataatctgtggaattaaagtgttgatatcttttctaggcaaacccattttttttttttttttgcaaattcaaagcatatttttttcactaccatgaaactgcttatcttgttgattttctacttctgagagtttctgtgacatttataaagaagttagtagaatttaaaactgaaaaaagatgactcacaaactttgtttttcaattataaatttggaaaaatatacttcatattcagtgaatcccatgcttttaaattaaatcctgaggggacagttttaaggacaggaaactttaatagtgaatatatagtggatttagtttgccaataagcaaaaattttctgtctagtgtagctcttaagatgtattaggaattcatattgatttgctcccatgaatgagccaaaggaaatgcaagatttrtgtagagtacattacagcatattc

SEQ ID NO: 589159 - DNA, 512 bp, Homo sapiens
agactccagtatatatgaaaatatttgattattgaatcrtcacatttcttttgctgttataatggaaatcacaggcatattatatttgtcttattatcatttaatatgaaaattacaaggtttataattcaaattaatagtctgttgatataggaatttaatcatcttttagggactatgaatattttcatcttaagaagaaatagttgattattaagtactattttggattcttattttcaatgttctattaaatttaggatacagatactctaagcatgatatcaaaatgatataaatataacatatgtatatgtgtatatgtatgtgtgcatgtgtgtttttcactgaacccatctacccatttaaggggaggtttttcagcagttcctatggttaattcttatattgggctttcttacataaggtataagaggaacttccctcaacaagttttctcctaaaataaagtttcccttgaatctagtggccacttttaaatttttttcaag

SEQ ID NO: 589160 - DNA, 512 bp, Homo sapiens
agactccagtatatatgaaaatatttgattattgaatcgtcacatttcttttgctgttataatggaaatcacaggcatattatatttgtcttattatcatttaatatgaaaattacaaggtttataattcaaattaatagtctgttgatataggaatttaatcatcttttagggactatgaatattttcatcttaagaasaaatagttgattattaagtactattttggattcttattttcaatgttctattaaatttaggatacagatactctaagcatgatatcaaaatgatataaatataacatatgtatatgtgtatatgtatgtgtgcatgtgtgtttttcactgaacccatctacccatttaaggggaggtttttcagcagttcctatggttaattcttatattgggctttcttacataaggtataagaggaacttccctcaacaagttttctcctaaaataaagtttcccttgaatctagtggccacttttaaatttttttcaag

SEQ ID NO: 589161 - DNA, 512 bp, Homo sapiens
agactccagtatatatgaaaatatttgattattgaatcgtcacatttcttttgctgttataatggaaatcacaggcatattatatttgtcttattatcatttaatatgaaaattacaaggtttataattcaaattaatagtctgttgatataggaatttaatcatcttttagggactatgaatattttcatcttaagaagaaatagttgattattaagtactattttggattcttattttcaatgttctattaaatttaggatacagatactcwaagcatgatatcaaaatgatataaatataacatatgtatatgtgtatatgtatgtgtgcatgtgtgtttttcactgaacccatctacccatttaaggggaggtttttcagcagttcctatggttaattcttatattgggctttcttacataaggtataagaggaacttccctcaacaagttttctcctaaaataaagtttcccttgaatctagtggccacttttaaatttttttcaag

SEQ ID NO: 589162 - DNA, 538 bp, Homo sapiens
tcagtgattattcaaaattacagttcattttatgctaattataaaattgtacctgattttccaataatagctatgactcataaaacacttctaattaatacctgtgaatgtgggtgcaattaaatattaatgagatttaacttttagaataatgcaccaccaatccattcatctccaaaaatgccagtagattaaaattggattattctaattaggaagctgaaattaataactttagagttttttgaataaaccaaacacagtgcgatgatgagttgttatttttataatgaattcttaatattcaaatcttcattaaaacacttttaagattggatacaaggagaaaacaaaacaaggctattctttaggcaaaagtttatgcacraatttgtgattgggtctcattgcctgggcttgactggaccaattctgttttgattttcttcaaattcttattatttgcctgtaaatgataatatttacccaagtaattataattttggttttgaatggaaaatatactgttagagagttg

SEQ ID NO: 589163 - DNA, 588 bp, Homo sapiens
atgccatggatatggtagattttcaaaaactattttgaactgataaacttgaattttggccccaattatttccacctttacagttttgggctacttaattcctcaacctcagtcttctcgtttgtaaaatgaaggctccaatactacccacgtcatggagttagactgtaatcctgaaactaggcctgtgaagggcctagcatagtgctagtgcaccacaagtattgcataaatggtaactgttattattttatgttaatgccttgaattagactctctggcatttggccatatattaaatctctagtgtttataatgaacgctagagtccaagttaactcattctctcaacctgagagaagtgaaactcatgaacttcactagactttttgcaaaaatagtcactttatcaaagaartggagtactccaggggtgaaggctatagaaatacttaaattgttctttcagtgtttagagtagttcacaaccttgtgttcttggtcctttttaaagtgtggacatggattctcatacttttttgacttaaggcttgggctttcagagttcaaagagttgagaatgaagaa

SEQ ID NO: 589164 - DNA, 588 bp, Homo sapiens
atgccatggatatggtagattttcaaaaactattttgaactgataaacttgaattttggccccaattatttccacctttacagttttgggctacttaattcctcaacctcagtcttctcgtttgtaaaatgaaggctccaatactacccacgtcatggagttagactgtaatcctgaaactaggcctgtgaagggcctagcatagtgctagtgcaccacaagtattgcataaatggtaactgttattattttatgttaatgccttgaattagactctctggcatttggccatatattaaatctctagtgtttataatgaacgctagagtccaagttaactcattctctcaacctgagagaagtgaaactcatgaacttcactagactttttgcaaaaatagtcactttatcaaagaagtggagtactccaggggtgaaggctatagaaatacttaaattgttctttcagtgtttagagtagttcacaaccttgtgttcttggtcctttttaaagtgtggacatggattctcatacttttttgacttmaggcttgggctttcagagttcaaagagttgagaatgaagaa

SEQ ID NO: 589165 - DNA, 502 bp, Homo sapiens
ttcagtaatcatccactttacacattccatcagtttctacttttatagcacttacactcatgttctacagcacatatactcattttcattttkcagatgataaaactaaaatgcaaagtttttcatgagtgctcaaggccacatgatatattagtagcagaatttccatgcagatgaattgtctgattcttaatttcagtatgtctgggttctcatcaactctgtcacttatttgtgtgtgactctactaagatgcttaacctttctaagcataatttttcttgtctttgtgtgggactgatatccatgtatttatagtactgatattcacttcatatataggattagtgtttggtgtaaatggaatgattcatgttaaactttataaatttaacaagcataagtgtctaatagagattagtggctttagtaggaataacaccagaagtaatagtagtagtaatagtaataataactggaactaaaactcttgttttatgat

SEQ ID NO: 589166 - DNA, 558 bp, Homo sapiens
aagcatctctactactcatttcttatgagtttttatattagactataagttggagcaacattcagaaaggatggtaaattctttctagtttgagtctcttaactacattgttcttaaagattcttttgtttcttcaatttaacaccagaattgttgttgtttatttactggcatttcacacattccacttaaaataacattacaggaattctggaattcccttgtgacataaaggattactcttataattctcattgcgtctactaactatctgaccttgggcagttcctaagcctctgagccttggttttgcctggagtgaaatagggcctctgtaggactgttgtgaagacttgatattatgtaaacatctggcacaggaactgataaattgctgctgcccctcaagtgacagatgaacccctctccaacagtgggtcttttctgctctggaaaaaaaaaaaaaacagaaaggactgaggttagatataaggtagactcctctgagctttttaaaacacatttcattcttatcmttctagactgatttggtagatt

SEQ ID NO: 589167 - DNA, 561 bp, Homo sapiens
tacatttcttcctttaacttttaaaaataaagaacaatttgaataataaaaagttcagacaaaacaagggcttgatatttatactatgtttttaatatgtacttaatatgatttatttccttaaattttaatacaataaagatgacctactaaatgtaaactaagcagtgagaaaaaacacatgcagacttactaaacttttattatctaagagtgtaaaatacatcaattcttcagggggaaaaagacatttaaaaaataaatttagaagtcagtttwaaaaaaaaaaaaaaattggacaatgaccaggatatagcactatctttagcattactttattcagtaaatgagaactgcaaaagttctgctggagaggactggatgcatatatgggataaatgtattcttaaagcattatcattagagccaatatatagcagatgacagatttctagctgatatagaaattcagttctcctgccatatatagctttcctactttggaaacatattggaaaggaagagaggatgcaattgtataaagccagaagtgtgaaatct

SEQ ID NO: 589168 - DNA, 561 bp, Homo sapiens
tacatttcttcctttaacttttaaaaataaagaacaatttgaataataaaaagttcagacaaaacaagggcttgatatttatactatgtttttaatatgtacttaatatgatttatttccttaaattttaatacaataaagatgacctactaaatgtaaactaagcagtgagaaaaaacacatgcagacttactaaacttttattatctaagagtgtaaaatacatcaattcttcagggggaaaaagacatttaaaaaataaatttagaagtcagttttaaaaaaaaaaaaaaattggrcaatgaccaggatatagcactatctttagcattactttattcagtaaatgagaactgcaaaagttctgctggagaggactggatgcatatatgggataaatgtattcttaaagcattatcattagagccaatatatagcagatgacagatttctagctgatatagaaattcagttctcctgccatatatagctttcctactttggaaacatattggaaaggaagagaggatgcaattgtataaagccagaagtgtgaaatct

SEQ ID NO: 589169 - DNA, 632 bp, Homo sapiens
tgctgatcacaaaaagaggaaggtaaggaggatacaaaccctgagccacattggactatttgatccctgagcatgtcaagtgcccggattttgttttatctaatcctttgctcaggtcacccatgttgcccttatacatggttgaactcctatgcatcctttaaaacccattttaaaattatctctttggaaagacttcctcaacactaagaaaaaagttacatctctcttctctactcagctgcacattttatatcacctgtawggtcattacactttagagttttagagttttaattattttaatataaacagttatcccaggaactttgtcttgattaaattaccacccggtgtttctcttgagtctttacacttgagacttctgttgtgaaatattatggcagagtgaaaagagaatgcaaacgttgaaatagggcagagctgaattaactttagggtgaagtccatagtaatttcctatgacaaagtagtaaagctttttttgaacttggattctcaacctgttagctttgtacaagttacctataatctttatgagctttagttctgatgcttgtaaggtacaggcaataaaatatatttaaaggtagttctgtgaattaaaaaag

SEQ ID NO: 589170 - DNA, 632 bp, Homo sapiens
tgctgatcacaaaaagaggaaggtaaggaggatacaaaccctgagccacattggactatttgatccctgagcatgtcaagtgcccggattttgttttatctaatcctttgctcaggtcacccatgttgcccttatacatggttgaactcctatgcatcctttaaaacccattttaaaattatctctttggaaagacttcctcaacactaagaaaaaagttacatctctcttctctactcagctgcacattttatatcacctgtatggtcattacactttagagttttagagttttaattattttaatataaacagttatcccaggaactttgtcttgattaaattaccacccggtgtttctcttgagtctttacacttgagacttctgttgtgaaatattatggcagagtgaaaagagaatgcaaaygttgaaatagggcagagctgaattaactttagggtgaagtccatagtaatttcctatgacaaagtagtaaagctttttttgaacttggattctcaacctgttagctttgtacaagttacctataatctttatgagctttagttctgatgcttgtaaggtacaggcaataaaatatatttaaaggtagttctgtgaattaaaaaag

SEQ ID NO: 589171 - DNA, 493 bp, Homo sapiens
ttcagggattcctttgtgtagagagtcagatggataagtgacaaaggcttagaatactgtatgagcattgtagttctgtaattaaatgtaatcaatctataatttatctaaaatgattacttatcaagtaggcgtgaaacytaagcattccattcatctttatatagtcatagtgaatattaacattgtctgcctagaaatgccgtgcccacagaggaaattcacctagtctgcacatctggagtaatggcttttgtaaagcaatcattctatattttgcatatgctgataattaagacagatttaaaggtgctgctctattcaaaaaactttagggtgaattctagggaaattactgtaataaactggtgaagcttttacaggtaagtagtggtttgtcctctctcccaattgtctttcagtgcagtaaaaatttagaattttcccagttatttgtgaagtggtctgcattgcggttttgtgagaaattccc

SEQ ID NO: 589172 - DNA, 433 bp, Homo sapiens
cactgctgaacatctggccaccttgatttctcagcctggcaaagtatcgcctgttgaacatattcttacaaatctggcccaaatgccctttgatatctagtgtagagtgggtgcccaattaagcagttaaggataaaatcttaagcttaaactcttaactmgttttaaaatagttatgcgtatttcatttatgtacttggaggaagagaaatgctttaatagatgcatgcatctgggaaaaaaataaaccaggttatttgttgaaactgttcagttcctgaaagtgggaagcacgtgagccaatgtttcctaacatcagatttttccccttaattcagagccttttttttttttcaacttctgtggttcaactccaggagcaaaataaaaaatccctttccttccgacagtaagcatacactaacatgattac

SEQ ID NO: 589173 - DNA, 620 bp, Homo sapiens
ctttcttggccccatgttttgtccagaagagatctggacattttaccactgttgtttatttctttaaaaccaaattccatttctatgttggcctaaaccagcattctaactccaaagcaacaggtgattgggaacccacagaacagccccctccagtcctctctgctgtacagtgggagtgtggttccagtggcttggcctccttcatggagagcttgttgcctagctggctagagaacgtaggaaactagcactgtcttatttctcttcctccagacattattttctcagtttattaataagaaagaatactcaaatcacacaaatttaatgattacaataaagtgcaggcctggtgttatgcctatgactygtatcaaggaaccacaaataactttcaaaaatgtttggaaggaagtgtggcacttacacatttttattttcttcctcccttattatatacagaacaactcatgcaaagcaaacccaattgaataaattgcttttgtttagcagctggtgaaaaagagcttcttcaatttcaggcgaagtattgggtaaatgaaataattaagtgccacatgaatcttttcttttatgggaaagaaatactactcatt

SEQ ID NO: 589174 - DNA, 620 bp, Homo sapiens
ctttcttggccccatgttttgtccagaagagatctggacattttaccactgttgtttatttctttaaaaccaaattccatttctatgttggcctaaaccagcattctaactccaaagcaacaggtgattgggaacccacagaacagccccctccagtcctctctgctgtacagtgggagtgtggttccagtggcttggcctccttcatggagagcttgttgcctagctggctagagaacgtaggaaactagcactgtcttatttctcttcctccagacattattttctcagtttattaataagaaagaatactcaaatcacacaaatttaatgattacaataaagtgcaggcctggtgttatgcctatgacttgtatcaaggaaccacaaataactttcaaaaatgtttggaaggaagtgtggcacttacacatttttattttcttcctcycttattatatacagaacaactcatgcaaagcaaacccaattgaataaattgcttttgtttagcagctggtgaaaaagagcttcttcaatttcaggcgaagtattgggtaaatgaaataattaagtgccacatgaatcttttcttttatgggaaagaaatactactcatt

SEQ ID NO: 589175 - DNA, 482 bp, Homo sapiens
ttataaattcatgtatcaggaaataataggctagcaaacttcctaggttattaaagataaaaatttaatacatactaagtaatatttttgaatatcacctcttaaatgaattaagcgtgctgcaacatatgggaaattaaatcttcttatcagcaagcaactaacacttattttcatctgtttaaaatgtacttttaaatttaacaagtggtagactatgagaatcataaaatatggaaacagaaatcagaccattccattataatacatttgtaccctaatgaagactgcatcctagagtcaggtgrtagaaagcaaacatcttgagagacgtgctatttttagtcatcttccctctgttgcactttccatcttagggaaataagacttgctaatattcagacaatgtgatctctgggcagtgtaaagaagagaacatacctttaaatatatctaaaaaacaaaagcattaaaatggaaat

SEQ ID NO: 589176 - DNA, 559 bp, Homo sapiens
agggaaataagacttgctaatattcagacaatgtgatctctgggcagtgtaaagaagagaacatacctttaaatatatctaaaaaacaaaagcattaaaatggaaattatatgaacatttggaagacaacaatgtcaatttttagtctcctatccatttgtggttaccttcccctgtaatatttttcatgctttccagcactaatggcatgttaaaatccataaagaaggattaaacatttttgtcctattattttgagaagaagaatgtagaaagagaagacactgtctgattaattttcaatccaggaaattataggaaatgatattaaatgtgagacctaggtacacaaaacatgtaaagcactgaacstaagtagctttagcacatagttccctggattattattttttatatacttgttgaaaaaatattaagctcagttaagtcatgtagggaagtaatttgcaagcctgtacttattgatgatcatgatgtttacaatattaaaaattacaaagcaccttcaacaaaatataagttctattcatcaataatt

SEQ ID NO: 589177 - DNA, 528 bp, Homo sapiens
tgcagtagaaaaggaaaaacttggataagctaagagaaataatcactgatatataggagacctgatatcgttctatttgaggagtagtataatgaatactaattaacgattgtgtcaatgcgttcttcatttggatatcttttataatagatatccaaagctaagttcagcttctttgttcaaattcaagccttaacattctgtaccagacaaggaagttattgattcattttggcatatgtattttgtgttttaaacaagaaagatatttagaaaggcagcagattcaatttttaaagaactcctcattatttcttaagcatttgcataaaaatacttttaacacataaatgcatcttcagagatggtagttttaaattttgttgaagaaagattattgtctttttagtacatcttaaaaagttggaggctaataacagaataggtgaaacaaaaacaatagcactaatgcttgtatsatacttctaaggtttacagaacaatttcacattcttatttcatttggta

SEQ ID NO: 589178 - DNA, 587 bp, Homo sapiens
atgggagcttgacaatcaacaatgaagaaggcatacagtgttccttcacagagcttacaagtctcaaaaataaaaggagataggtgaaatatcttattgttcccattatacagataaattattcatgactcaaagagtttaagcaagtatccatggtaaaagagatctatgttcttaacttgtgccaaagattttaatttgattactctttgacttcaaagtgagattagagttgataatattgttaattgatacatattgccaacactcaaagcacatrgatatctgtttgcctcgactactcaaaattattttgctgctccaattagtcaacaaattgtggaaaaaaattttaacttggattttctttggaattgagtcatattttcaaagaattcatctgatttcccattatgaaaggaagtataatataaaaatagaaatacttgaagtcaacagtatgacccaaactataccatttatgtcaaacttaattataatagtccctcagaattttggggggattagttctaggacctctttcttcatcatcatacccaaatcagtgcatattcaagtttcactgt

SEQ ID NO: 589179 - DNA, 587 bp, Homo sapiens
atgggagcttgacaatcaacaatgaagaaggcatacagtgttccttcacagagcttacaagtctcaaaaataaaaggagataggtgaaatatcttattgttcccattatacagataaattattcatgactcaaagagtttaagcaagtatccatggtaaaagagatctatgttcttaacttgtgccaaagattttaatttgattactctttgacttcaaagtgagattagagttgataatattgttaattgatacatattgccaacactcaaagcacatggatatctgtttgcctcgactactcaaaattattttgctgctccaattagtcaacaaattgtggaaaaaaattttaacttggattttctttggaattgagtcatattttcaaagaattcatctgatttcccattatgaaaggaagtataatataaaaatagaaatacttgaagtcaacagtatgacccaaactataccatttatgtcaaactkaattataatagtccctcagaattttggggggattagttctaggacctctttcttcatcatcatacccaaatcagtgcatattcaagtttcactgt

SEQ ID NO: 589180 - DNA, 613 bp, Homo sapiens
attagtcaacaaattgtggaaaaaaattttaacttggattttctttggaattgagtcatattttcaaagaattcatctgatttcccattatgaaaggaagtataatataaaaatagaaatacttgaagtcaacagtatgacccaaactataccatttatgtcaaacttaattataatagtccctcagaattttggggggattagttctaggacctctttcttcatcatcrtacccaaatcagtgcatattcaagtttcactgttggtcccgtggaacccaggtatacgagaagtgttccctccatacactcagattttatatcctgtgaatattgtattttccaacagaatttggttgaaaaagatttgtatttaagtggacctgcacaattccaacttgtattgctcaagggtcaactgtaatatcttagtttgaggctgtgattaatgtcttaaaaatactctacattgctgactgagtgacctgcctaaaattaaatagaactacatctctccttggcttaaaactgtttggtagatcctcatcacttaagtggtaaatttcaaaatccttagcatggcatataaagctctttatgatacaggctctacc

SEQ ID NO: 589181 - DNA, 480 bp, Homo sapiens
ccattatgaaaggaagtataatataaaaatagaaatacttgaagtcaacagtatgacccaaactataccatttatgtcaaacttaattataatagtccctcagaattttggggggattagttctaggacctctttcttcatcatcatacccaaatcagtgcatattcaagtttcactgttggtcccgtggaacccaggtatacgagaagtgktccctccatacactcagattttatatcctgtgaatattgtattttccaacagaatttggttgaaaaagatttgtatttaagtggacctgcacaattccaacttgtattgctcaagggtcaactgtaatatcttagtttgaggctgtgattaatgtcttaaaaatactctacattgctgactgagtgacctgcctaaaattaaatagaactacatctctccttggcttaaaactgtttggtagatcctcatcacttaagtggtaaattt

SEQ ID NO: 589182 - DNA, 660 bp, Homo sapiens
catgatcataaggtgtgcacaaattaaataattaattccctaggtagctatgctatctgtacacagagatgaagttgagttttagttttatccattttctataataaagaagaataactaatgttttctatacttrtttatccaagtaattttgacataggtgaatggagttatgctccctttatgctttcttaaataccaaacgtatctttttgtgtcactaaactagaaaccatccttcttcacagcggagtcattaatgccagggaagagtctgttaggcaaagcagtatcgaggaaagacaaaagctggaaagtagacagggtcagagtttgccttggccagtgttattgacaactaacttgctgcttccttctttctggccacacactcttattaccattttcaaacgcaactttaccttagttcttctagaaagaaaatatgtgtgtgtgtgtgtgtgtgtgtgtgtgtgtgtgtgtatttatatacatatataaatatattttatatgtaactaaatatataaaaattatatatattatagagttatatcataatatataattataataaaatataatgcatatataaaaatttataaacattatatatacatttatagtatataatatatatttagttaagtggcattcaca

SEQ ID NO: 589183 - DNA, 660 bp, Homo sapiens
catgatcataaggtgtgcacaaattaaataattaattccctaggtagctatgctatctgtacacagagatgaagttgagttttagttttatccattttctataataaagaagaataactaatgttttctatacttgtttatccaagtaattttgacataggtgaatggagttatgctccctttatgctttcttaaataccaaacgtatctttttgtgtcactaaactagaaaccatccttcttcacagcggagtcattaatgccagggaagagtctgttaggcaaagcagtatcgaggaaagacaaaagctggaaagtagacagggtcagagtttgccttggccagtgttattgacaactaacttgctgcttccttctttctggccacacactcttattaccattttcaaacgcaactttaccttagttcttctagaaagaaaatatgtgtgtgtgtgtgtgtgtgtgtgtgtgtgtgtgtrtatttatatacatatataaatatattttatatgtaactaaatatataaaaattatatatattatagagttatatcataatatataattataataaaatataatgcatatataaaaatttataaacattatatatacatttatagtatataatatatatttagttaagtggcattcaca

SEQ ID NO: 589184 - DNA, 564 bp, Homo sapiens
tttttagtataacagtagtaattatagatttaaaaagagaagacctcagtaattacataactaggttctaataaacctggaactggttttagactactatttctatggattttgtattatattgattttgggtggagttgctagaacagccatgtagggtatatgattttagaaaattaaaaagttaactgctagcagtgcttatcccatacactattcaattcttctgtatttatgtcttaattttaatcatagaaagaattgctaggcaaaataaaatgtcctctactgtgttgtttcacagccataaaatacagaaaacattctgtgcaattttgttgaaagtcaaataagaatgaaataaatataaaccaaagaagtcattgcatgttgtctgctgaattgcctcactgataaatttaactttctacttcatgctcagtgtactctggaatcaagttcaaggttaacgccrgctttggtggagtgacattttaaactcagaatagagctggagatgcccatataaattacctggaaaaactcctttattttcagaagaag

SEQ ID NO: 589185 - DNA, 627 bp, Homo sapiens
tagtataaacaacctttatatgcactgggaaaccaaaaaaaaaattgtgcagatactttatcaataaaaaatttaaattttttgttttatattttaattttatcatttgaaaaaccataaaactagctactagatttgtttttggatagtctcttttctcagtactcygtagcactttaacgatactctttaaattatctttctttgctgatgtacagattttaatacattacacttttctttattatccaacttcccattaattagtcctttattatatgtatagtacagaaaaaattactcgttggcacttccagaggttaggctcttaccctttcagatactggtagacagagcactgtcttccttgatgattacatttcaaatagatgactcctaggcccttgagaaagacattttcaagccgtaaatctggcaaaaagctgggagaagatttaaatctcaaaaggtggagaaagtatttaaaagttttctaaagtaaatgctgtctattcaagctgaggggcttgtgtgggtcagttattttaactttgtttcatattacaagcaatatcctttactgtgttttgcaaattttgttttcttaaggagcaaagaattgcagaa

SEQ ID NO: 589186 - DNA, 607 bp, Homo sapiens
actgtcttccttgatgattacatttcaaatagatgactcctaggcccttgagaaagacattttcaagccgtaaatctggcaaaaagctgggagaagatttaaatctcaaaaggtggagaaagtatttaaaagttttctaaagtaaatgctgtctattcaagctgaggggcttgtgtgggtcagttattttaactttgtttcatattacaagcaatatcctttactgtgttttgcaaattttgttttcttaaggagcaaagaattgcagaatggggaaatccataaatacatgtgacctcccatagaattattcagggtaggtaacctcagtttactattaaaaaggtaatagattatcrgtagcctcctgtggaaggttttgacagaaaaagttttacattactttgtgaccatggacaaataattttagctctttgaatattaatctcttttaaatccataaaatggagataataatagcttctctatcaaatttacttgcctcataaggttaaaaaaatacatggaaatgttaggtcatttttttcaaagcctggataaacaccctttgctgtcaatatgagacccagaaatactcatctctcaa

SEQ ID NO: 589187 - DNA, 600 bp, Homo sapiens
gtcagtgttccaagttcttccctcttctacaatctttcatttcactggggctccccttttccagtcttccagcagaactctggggctttactaacaccactctgcagagtacttcccatgactgtgcccacatcaggcagggccaagcaacagaacggcagagggagaaaaaaagcagtggggattttcccaactctcttcagaccacagttcctcccatctgagaagaaggatcctctccctctattttaggctcttgcctgcccccattgaggccactgcagccactgtcaaggactgtttgaggcccgggtataagagaataaagaaaagaaaaaaagagagaaagatgtaggatttccatgctttctctgggcattaggagacccctttcctcctccttgagtcagaactagaagacttctctcgacgcattttctgtccatgtcaatgctcacttccaagttgcaggatacattaagttcaggctggggtatactggaagaaaaaaatggtaaacycactgctggttcaatggtactttgaattttggtcttcttccccagtctgtctcctacaatttacttttcagagtcctca

SEQ ID NO: 589188 - DNA, 618 bp, Homo sapiens
tatcactagtcatcagggaaatgcaaataaaaaccacaatgagatattgtatcaccccagtaaaaatggctatcatcaaaaagacaaaaaaataacaaatgctggcaaggatgcagagaaaagagaactctcaaatacagtgttkgtgggtgtaacggtttggctgtgtccccacccaaatctcatcttgaattcccacatgttgtgggagggacccagtgggaggtaactgaatcatgggggcaggtctttctcatgctgttctcgtgatagtgagtaagtctcatgagatctgatggttattataagggggagttttcctgcacaagctctctttgcctgctgccatccatgtaagatgtgacttgctcctccttgccttccaccatgattgtgaggcctccccagccatgtggaactgtaagtccaattaaacctctttcttttgtaaattgctcagtcttgggtatgtctttatcagcagtatgagaacagagtaatacagtgggaatgtaaactagtacagttactactatggagaaaagtatgtaggttcctcaaaaaactacaaatagaactaccatacaattcagcaatcccactactgggaagatcagt

SEQ ID NO: 589189 - DNA, 618 bp, Homo sapiens
tatcactagtcatcagggaaatgcaaataaaaaccacaatgagatattgtatcaccccagtaaaaatggctatcatcaaaaagacaaaaaaataacaaatgctggcaaggatgcagagaaaagagaactctcaaatacagtgtttgtgggtgtaayggtttggctgtgtccccacccaaatctcatcttgaattcccacatgttgtgggagggacccagtgggaggtaactgaatcatgggggcaggtctttctcatgctgttctcgtgatagtgagtaagtctcatgagatctgatggttattataagggggagttttcctgcacaagctctctttgcctgctgccatccatgtaagatgtgacttgctcctccttgccttccaccatgattgtgaggcctccccagccatgtggaactgtaagtccaattaaacctctttcttttgtaaattgctcagtcttgggtatgtctttatcagcagtatgagaacagagtaatacagtgggaatgtaaactagtacagttactactatggagaaaagtatgtaggttcctcaaaaaactacaaatagaactaccatacaattcagcaatcccactactgggaagatcagt

SEQ ID NO: 589190 - DNA, 618 bp, Homo sapiens
tatcactagtcatcagggaaatgcaaataaaaaccacaatgagatattgtatcaccccagtaaaaatggctatcatcaaaaagacaaaaaaataacaaatgctggcaaggatgcagagaaaagagaactctcaaatacagtgtttgtgggtgtaacggtttggctgtgtccccacccaaatctcatcttgaattcccacatgttgtgggagggacccagtgggaggtaactgaatcatgggggcaggtctttctcatgctgttctcgtgatagtgagtaagtctcatgagatctgatggttattataagggggagttttcctgcacaagctctctttgcctgctgccatccatgtaagatgtgacttgctcctccttgccttccaccatgattgtgaggcctccccagccatgtggaactgtaagtccaattaaacctctttcttttgtaaattgctcagtcttgggtatgtctttatcagcagtatgaraacagagtaatacagtgggaatgtaaactagtacagttactactatggagaaaagtatgtaggttcctcaaaaaactacaaatagaactaccatacaattcagcaatcccactactgggaagatcagt

SEQ ID NO: 589191 - DNA, 457 bp, Homo sapiens
atctcatattaatcgttgtgtgcctgttttgtctgttgttagtctgcaggtgtacccaacagctccgaagagacagtgacatcgagaacgggccatgatgacgatggcggttttgtcgaaaagaaaagggggaaatgtggggaaaagcaagagagatgagattgttactgtgtctgtatagaaagaagtagacataggagactccattttgttmtgtactaagaaaaattcttctgccttgagatgctgttaatctatgaccttacccccaaccccgtgctctctgaaacatgtgctgtgtcaaactcagggttaaatggattaagggtggtgcaagatgtgctttgttaaacagatgcttgaaggcagcatgctcattaagagtcatcaccactccctaatctcaagtacccagggacacaaacactgcgaaaggccgcagggacctctgcctagg

SEQ ID NO: 589192 - DNA, 457 bp, Homo sapiens
atctcatattaatcgttgtgtgcctgttttgtctgttgttagtctgcaggtgtacccaacagctccgaagagacagtgacatcgagaacgggccatgatgacgatggcggttttgtcgaaaagaaaagggggaaatgtggggaaaagcaagagagatgagattgttactgtgtctgtatagaaagaagtagacataggagactccattttgttctgtactaagaaaaattcttctgccttgagatgctgttaatctatgaccttacccccaaccccgtgctctctgaaacatgtgctgtgtcaaactcagggttaaatggattaagggtggtgcaagatgtgctttgttaaacagatgcttgaaggcagcatgctcattaagagtcatcaccactccctaatctcaagtacccagggacacaaamactgcgaaaggccgcagggacctctgcctagg

SEQ ID NO: 589193 - DNA, 555 bp, Homo sapiens
ttgttactgtgtctgtgtagaaagaagtagacataggagactccattttgttctgtactaagaaaggttcttctgccttgggatgctgttaatctataaccttacccccaaccccatgctctctgaaacatgtgctgtgtccactaagggttaaatggattaaaggtggtgcaagatgtgctttgttaaacagatgcttgaaggcagcatactcgttaagagtcatcaccactccctaatctcaagtacccagggacacaaacactgcggaaggcggcagggccctctgcctaggaaaaccagagaactttgttcacgtgtttatctgctgaccttccctccactattgtcctatgaccctgccaaatccccctctcagagaaacacccaagaatgatcaataaacactaaaaaaaaataaaaaaawaaaaaagaaagattcaacattagggctccctctttcccagccctttctcccgtcaccctctcccataatgaccatggttgggaaaacacaggacaaagaagattacatcaggatgtcaagtttcttcc

SEQ ID NO: 589194 - DNA, 586 bp, Homo sapiens
atcttatggaaagcatgagaaagaatctgagcagccccagaagcaaagcccagcccctggccagccaccagcaaggaagcctgccttagtccttcaactgccaggagctgaatacagccaacaacctgaacaagcttggaaagaattcttccctagagcgttcagtaaggaatgcagtccctacagcaccttgatttgggccttcaatcaccctgagcaaggactctgtcaggtccatcagactcctgacctataaacctgtgagacaatacatgtatcttgtgttaatccactaaattcatggtaattttttatcgcagcaatagaaaagtaatgcaagctatcacagggaagtccatcccggccaacaggattttaagttttccatttagctctatttactttgtcctattctgtttttactgcagtatcaaaaacaccagccaytgacagtatacatattgctttcttaagtgtcttatttgtaattaaagcccattacaatgtattaataaagtgtattttaatttttagaagcgtgttttcatttcacacaaaagtcacataatttcttgcctttcatcaa

SEQ ID NO: 589195 - DNA, 509 bp, Homo sapiens
gtttctatggttagtcttagaaatataatttaagttaaatacatatacacaaccacaaaaataacattgactaaaatgctacaggatgtaacacattaatctagccactggaaatgatttattgagtatttactatatgttcaatactatgctttgtaccatcaaagatataaaaagaatatgagaccgatttccagaggcagaaycatggttgaggcaacaaattcctattcagaaagacaaagatataaatgatttatttatgcattgagcgattaagaacttattcatttattcaacaaacatttatcacatgcatactctatgtcaagcactgcataaaaacaaggtttaccacataggataagacctagttctgcgctttcaaaaagctaatcatgcagtgagatacaaaagacaggactaccttagagagagaagaaccaacagacatacatgcagcaataaatgagaataatatacttttccagctggagtacagggggcat

SEQ ID NO: 589196 - DNA, 415 bp, Homo sapiens
gctagtgtctttgggcttggaaatgaagactagggtcttcaatatagtaaagaatttgagatactaccagtacatctttttcttcatgaaattttacttctttcttcaaatgtacaaaggcactggtctttgtggatgggcaaagtccaacgcgggatrgacattggagttcaagcatcatagatatttactctagaagaatcttgggaagaagattgacataattaaagtaatgttgtaggactgagcaaaagaatgagtagattgttcttactggacatgggtaacagcagcagaaatgatttaaagaaagaaatagcaaaattcttaaactaatcccacttcctgtttaggttccattttcccatattttgctccctctactctattgggaggaggaagaaattaacatgta

SEQ ID NO: 589197 - DNA, 599 bp, Homo sapiens
gagtctgaaagattccaaaatctaacaatgttttacttagyattgcaattattctcctctcttcaacctctgaattttgttcaaaaaaaagagcaaataacttgagaatgtaaagcaaaaaggactcacatagttcaatgttcttaaagctgcagccaagatccccaataaactcaaaattcagtagaaatctgaaagatcaccagtttactttatctgtttataaggaataagctcacatactttgcaaaatgtaaaagcaaagtggtagtctacttcaatctccactatttttctattaatatacacaaaatactacatacaatcaaatctaattagacaaacaaagaatacaaatatgttgagaaaagaaaaaatgcaaaagaaaaatcacaaaacctaatctataaagatcccaggtattgaaattagcaggcatggatttaaaataactgtataactattttaaatatactcaagaatttataaggaaagatggttacttggtttttttttcaaatatgactctagtaatatctcacatcatgcttttctacgatatgactttgaccttcttcccatccagaaataggaactat

SEQ ID NO: 589198 - DNA, 599 bp, Homo sapiens
gagtctgaaagattccaaaatctaacaatgttttacttagtattgcaattattctcctctcttcaacctctgaattttgttcaaaaaaaagagcaaataacttgagaatgtaaagcaaaaaggactcacatagttcaatgttcttaaagctgcagccaagatccccaataaactcaaaattcagtagaaatctgaaagatcaccagtttactttatctgtttataaggaataagctcacatactttgcaaaatgtaaaagcaaagtggtagtctacttcaatctccactatttttctattaatatacacaaaatactacatacaatcaaatctaattagacaaacaaagaatacaaatatgttgagaaaagaaaaaatgcaaaagaaaaatcacaaaayctaatctataaagatcccaggtattgaaattagcaggcatggatttaaaataactgtataactattttaaatatactcaagaatttataaggaaagatggttacttggtttttttttcaaatatgactctagtaatatctcacatcatgcttttctacgatatgactttgaccttcttcccatccagaaataggaactat

SEQ ID NO: 589199 - DNA, 576 bp, Homo sapiens
tggccgctgttccttcagccatccagtaccaaagggatctgtctgtggattctccctgatcttccctgtgaggatcatcatgaaggagtttcactctctctactcactcacayttagcctcaagcaatttgcttagcaattcttgataaatcttttcaatggcttaaatggtgtttgatgatgtgtgccccaggcaagcaaatgctagggtcctgtatctcctcctaatgcacctgtctctttccaggttacaggttagttgtttgctctgcaattcctgttctctgatgggttaaaaaaaaaaaaaaaagtcattaatttgcagtttatccagttgtttttctgctggggtgggaatgtactctttatagccttctacatccctgagccaaaacccaaagtgcattatgcttcctaaaattaaaaccagcaatgaaattctctcctctctcttatcatttaattctggctggcctgggtgaaatgaatctgactcattttgctttcattacagaccatgtaagcatacagcttacctggatcatctcatgatttaaagtcagtcccaaggaggtc

SEQ ID NO: 589200 - DNA, 630 bp, Homo sapiens
gtcaataatgaaacaggctgactctgcatggaaaccataaagaacttctctgctgactcttgcccagctcatctacatttgtgaatgacgacacattttttatatcattttcttggaggggagcacagtaacattgacattccactttttatgtgacagaattcagtgttatataagctatataataagtagtaattttattattaccttctgtgaccctctccttcaaccctctcactccacaaaaacaaataatatttaaccattagtgttcgaattgctgcacaagttaattggaagtataacttttcatcaatataaacatttctattacactttactgtttctcaatttcagaatacttgtaaaaagtataatttgctatttcagatgctaagagggattttaaacctagactataaatatctatgataatatgcgtcacttctgaagttgtaaatattttataaattactccttaawtaaaataattagagataacacaatgcccccaaatagtctgtcagttatgccatggaatttgtgacaaacacattgtagatgtcaatgttttgttaagatcagtattcttcctcaagaatcacaggttctttgcattatccctaccag

SEQ ID NO: 589201 - DNA, 600 bp, Homo sapiens
agtggcagagtggcagagcggcacagcggcgtggcagagagggagcatctgaatgtcaagaggagttcagctggggatggtcagagagatcagctgcgggatggccaaactccaggtaagttcatcttcccactccattccctttcaagctccctatccatcctgctgagagccacctccacctccgtcactcaataaaacccctacattcaccgtccttcaactccgtgtgacctgattcttcctgcatgccggataaggagccgggtaccaagagggcagggtgtaaaaggctgtcagcctgactctccactgagctcgtttaacacttagccatccacggacagcaactgctaacacagcattaattatagcgcrcccttagatgctactgtggggccggagcccagagccttcaccctggctcctgcacctgcccatctgggttctccccctcccactcctgtcacaagtcctgcaagggggtcagggaactctattgtttcagtatatatatgagtgcctatgaaatgcttgcttgtattccctaagaagtagtcctgccctaagttgaggtagaaagctgacaggagagtagag

SEQ ID NO: 589202 - DNA, 628 bp, Homo sapiens
acctttaacccagttaagctaactgggttgactagaatgtcatcgtctagttatttagctgaaggggacccaattaaagactcaaacataattatgtgtttcttaaaatatttattgttggaaattctaagtatttgtgacaccgtttcaaaaataagggagagggctgggcacagtggctcacgcctgtaatctcagcactttgggaggccgagctgggtggatcagctgaggtcaggagttcgagaccagcctggctaacatagagaaaccccatctctactaaaaatacaaaaattagctggatgtggtggcaggggcctataatcccagctactcaggaagctgaggcaggataatcacttgaacccaggaagcgaaggttgcagtgagccaagatcacacaacttcactccagcctgggtgacagagtgagamtccatctcaaataaataaataaataagggaggggaaagattaattaatatggagaagaaaaacctaaaaaaaattattacatcatatgaaataaaaattatttctaccataacagtgatttctgaaattaataggctgaaaaagttgctatgtcaatattaaaaattagttcttccctgcagaaaaaata

SEQ ID NO: 589203 - DNA, 628 bp, Homo sapiens
acctttaacccagttaagctaactgggttgactagaatgtcatcgtctagttatttagctgaaggggacccaattaaagactcaaacataattatgtgtttcttaaaatatttattgttggaaattctaagtatttgtgacaccgtttcaaaaataagggagagggctgggcacagtggctcacgcctgtaatctcagcactttgggaggccgagctgggtggatcagctgaggtcaggagttcgagaccagcctggctaacatagagaaaccccatctctactaaaaatacaaaaattagctggatgtggtggcaggggcctataatcccagctactcaggaagctgaggcaggataatcacttgaacccaggaagcgaaggttgcagtgagccaagatcacacaacttcactccagcctgggtgacagagtgagaatccatctcaaataaataaataaataagggaggggaaagattaattaatatggagaagaaaaacctaaaaaaawttattacatcatatgaaataaaaattatttctaccataacagtgatttctgaaattaataggctgaaaaagttgctatgtcaatattaaaaattagttcttccctgcagaaaaaata

SEQ ID NO: 589204 - DNA, 628 bp, Homo sapiens
acctttaacccagttaagctaactgggttgactagaatgtcatcgtctagttatttagctgaaggggacccaattaaagactcaaacataattatgtgtttcttaaaatatttattgttggaaattctaagtatttgtgacaccgtttcaaaaataagggagagggctgggcacagtggctcacgcctgtaatctcagcactttgggaggccgagctgggtggatcagctgaggtcaggagttcgagaccagcctggctaacatagagaaaccccatctctactaaaaatacaaaaattagctggatgtggtggcaggggcctataatcccagctactcaggaagctgaggcaggataatcacttgaacccaggaagcgaaggttgcagtgagccaagatcacacaacttcactccagcctgggtgacagagtgagaatccatctcaaataaataaataaataagggaggggaaagattaattaatatggagaagaaaaacctaaaaaaaawtattacatcatatgaaataaaaattatttctaccataacagtgatttctgaaattaataggctgaaaaagttgctatgtcaatattaaaaattagttcttccctgcagaaaaaata

SEQ ID NO: 589205 - DNA, 628 bp, Homo sapiens
acctttaacccagttaagctaactgggttgactagaatgtcatcgtctagttatttagctgaaggggacccaattaaagactcaaacataattatgtgtttcttaaaatatttattgttggaaattctaagtatttgtgacaccgtttcaaaaataagggagagggctgggcacagtggctcacgcctgtaatctcagcactttgggaggccgagctgggtggatcagctgaggtcaggagttcgagaccagcctggctaacatagagaaaccccatctctactaaaaatacaaaaattagctggatgtggtggcaggggcctataatcccagctactcaggaagctgaggcaggataatcacttgaacccaggaagcgaaggttgcagtgagccaagatcacacaacttcactccagcctgggtgacagagtgagaatccatctcaaataaataaataaataagggaggggaaagattaattaatatggagaagaaaaacctaaaaaaaattattacatcatatgaaataaaaattatttctaccataacagtgatttctgaaattaayaggctgaaaaagttgctatgtcaatattaaaaattagttcttccctgcagaaaaaata

SEQ ID NO: 589206 - DNA, 613 bp, Homo sapiens
acccatggaaacttaggttgatttgtatctttgctattgtgaataatactgcaatgtcatctttctttgcttttctggatgctgtgctcctctttgggtgacatttgaagtatayttctttgcagaagaatagtacgtttttagaatttttagagtgtaagtctgatactcatttctatttatggtaccttaatttgacttaaaaaatgtgcgtgtgtgtgcatgcatgcactataaaactagaggtatgttcagaacagaatattctactaaaaagaagtatttggaatacgctatcactcttaatttttaataagatgttttaagcttgtgacagtgtaaaaatcagattaaactcattaatgccaagataatacaagtaaattcacatatacaataattattctgttcatagctattaaggactagttgtgaataacctcatgttttcttttcaccttttctgacatcatcaaaaacatgaaatactgagggattatttaacaaaatatatacaaaatcacaaaaaagcacaataaagactataaattgttgctaagagaaattaaagatgacctaaataaatagagatatatagcatgcttctagtttg

SEQ ID NO: 589207 - DNA, 601 bp, Homo sapiens
aagcttgtgacagtgtaaaaatcagattaaactcattaatgccaagataatacaagtaaattcacatatacaataattattctgttcatagctattaaggactagttgtgaataacctcatgttttcttttcaccttttctgacatcatcaaaaacatgaaatactgagggattatttaacaaaatatatacaaaatcacaaaaaagcacaataaagactataaattgttgctaagagaaattaaagatgacctaaataaatagagatatatagcatgcttctagtttggaaaatgttaggatatcatttgtccctctatttatgtatggattcgatgcaattccaatcaaaatmccagtagtattttttaaatgataaattggccttaaataatatgtacggatataaaggacataaaatagccaaaacaattttgcaacagtaaaacaagtttagaaacattagccttatactaccttatatcagaatttaacaaactacagtaataaaggcagctaggtttctaatatcaatggattagaataaatctaaaatgtgaaccagacatacatggatgattgatttttaacaaaggtgtca

SEQ ID NO: 589208 - DNA, 583 bp, Homo sapiens
atactggcaaaaagcagattaagtggttgcctggggtcagggacctggaggggctttacataatcaacttcaaaggagtcaaaaaagccagaagttatttaggggaatgttggaaatattctctatcttgattttgagtatgtatgtggcaaaggggggatattacatagtatatatgtttgtcaaaacgtattaaaatgtactcttwaatttttattttatgtcattacgcattaataaagttaattctaaaacaagatgtgcctatgttttattgtatataaataatacctcaataaaaatcatgtggaaactatagtaaaatataattcgtggcagggaggaaaagagaaaaaaaaaatctcttttaagtaaggaagccctcctgctgtttctttaaggactcagatactgttcatatcataacaaatgaacaatgaacaaatgaactttgacacacagaacaagaagctttgtctttcagatttgttggggttgagacacatctcatttaaaagtcaccgtcagagctgcaatcaaaaagcttgtggtttgtcatcagatatatcttctatgtttgtgc

SEQ ID NO: 589209 - DNA, 562 bp, Homo sapiens
tattagtagtaataagtgcactggtataaaatttactgcaggttaaaagtatttttgaatgaaccatgtgaatatgatgaaagatatatatgtatatatataaaatgcaagctaacatatacagaattatttaatgggtgttgagaaatattctttcctgcaaaatgacactttggattatttttcttgatatcattgccaaaatgaatgttaaaaaggagtaaattcagtaaaagtgagcagaacaacatattaacataaagtctcaaaaatwgttctgtgtgtgggagagaagatggttgctctaaacttcattaagccaattgttgaggagacatctggaatctgatactaggggatgccagagcaataaatgtgcatagtgattttgtgttaaaatgcagcagtctaaatagggtttgtctgaataaaatgcattatttagtaatgccattgagttgcctccccgggctcttgtcggtgttggagaaggatgtgagacacagggaaagggtgaagggcgcagtctccaggagagcacagagacaaataagtgatgggc

SEQ ID NO: 589210 - DNA, 589 bp, Homo sapiens
gatttcatttttcattctttatcctctcccaaatcctccagaaatgcttgcatatgtcatttgtaatgattcttccactgatgtacatttttttggttgttttcagatagctcaatgccacttctatatgagatctttaagaatatttttgtggccccatccctagagaagygattgtcacctaataagtaatatttgttgaaaatagcactattttaatgaatctttaacatgagaaattaggtaaccgaaatgctatcagaaaagcaaagtgctcttgaagaaatgctattgtagagcatgatgcttcaaatggaatgaataaaatctgagcgcatactcccaaatgctttcttatgtattatcctaattatttggaggtatttggaaaagcttttaaatgattataaagtaaagatacaccgttgtagtagccaacttcactgatggcccccagtgactctcacctacactttaaatgaataaggttgacctataaagcaagcagaagatgagggatgttattacaatatcggcctttctctcttgggccatttactttggggaaagtgagctgccaggtcatgag

SEQ ID NO: 589211 - DNA, 604 bp, Homo sapiens
ataaccatgaaaactctccagggcaggcatatttaaatatatcttgctcttgatcatttttatttttaacaatgctagaagtcaacatagcaagtcttattagtgcagagttatgggaacttgatcttggaaattgttttatagcttttgattttaaaatactatgaatatttaattcgggtggtgttaaattaaaatgtatctcttatttttactattccaaacttaattttaataaagtatcctcaaaatttaaaaagkatgaaccatgaatatatgcacataatttatctgaaaacaaagtgatacattttgctatttttttttacctgttatgcttaatctgttttttaaaacctttttaaaatggtaactaagatgcctagcattaaaaggtaagcattaatcttgttctaaattagaatgataggctgatgtagttcgtttctttctcggtctttatactggaaaagaaatgcaaagagaggtaacaattcacctatctttctggtaattatattctattattcttttctatttattcaaatacgtagttataatatttttccaatatgcaactcatacgcggtgtcaagtgcacact

SEQ ID NO: 589212 - DNA, 604 bp, Homo sapiens
ataaccatgaaaactctccagggcaggcatatttaaatatatcttgctcttgatcatttttatttttaacaatgctagaagtcaacatagcaagtcttattagtgcagagttatgggaacttgatcttggaaattgttttatagcttttgattttaaaatactatgaatatttaattcgggtggtgttaaattaaaatgtatctcttatttttactattccaaacttaattttaataaagtatcctcaaaatttaaaaaggatgaaccatgaatatatgcacataatttatctgaaaacaaagtgatacattttgctatttttttttacctgttatgcttaatctgttttttaaaacctttttaaaatggtaactaagatgcctagcattaaaaggtaagcattaatyttgttctaaattagaatgataggctgatgtagttcgtttctttctcggtctttatactggaaaagaaatgcaaagagaggtaacaattcacctatctttctggtaattatattctattattcttttctatttattcaaatacgtagttataatatttttccaatatgcaactcatacgcggtgtcaagtgcacact

SEQ ID NO: 589213 - DNA, 588 bp, Homo sapiens
gatatcacaagtatgttgcaaaaaacattcatttacaaagatttttgtgtgtagacaacatatgtgctatggtttgaatgtgtctcccaaagttcatgtgttgtaaactggatccccaatgcaacagtattgagaagtgggattttttttttttttttttttttttttttttgagatggagtctckctcttgtcgcccagcctggagtgcagtggtgtgacctcagctcactgaaacctctgactcccgggttcaagtgattctcctgcctcagcctcctaagtagctgggattacaggcacctgccaccatgcccagctaattgttgtacttttagtagagatggggtttcaccatgttggccagcctggagaaatgagaattttaagaggtgattagaacatgagcactcttacctaatgaatggattaatgtcattttttgcagaattgggtttgttgtcagaagagtgagtttcctataaaagcaaatttggccccctcttggtcgtgctcacacttcttgcctttccaccttctgccatggaatgacacaggaaaaaggccttcatcagatgccagccccata

SEQ ID NO: 589214 - DNA, 588 bp, Homo sapiens
gatatcacaagtatgttgcaaaaaacattcatttacaaagatttttgtgtgtagacaacatatgtgctatggtttgaatgtgtctcccaaagttcatgtgttgtaaactggatccccaatgcaacagtattgagaagtgggattttttttttttttttttttttttttttttgagatggagtctctctcttgtcgsccagcctggagtgcagtggtgtgacctcagctcactgaaacctctgactcccgggttcaagtgattctcctgcctcagcctcctaagtagctgggattacaggcacctgccaccatgcccagctaattgttgtacttttagtagagatggggtttcaccatgttggccagcctggagaaatgagaattttaagaggtgattagaacatgagcactcttacctaatgaatggattaatgtcattttttgcagaattgggtttgttgtcagaagagtgagtttcctataaaagcaaatttggccccctcttggtcgtgctcacacttcttgcctttccaccttctgccatggaatgacacaggaaaaaggccttcatcagatgccagccccata

SEQ ID NO: 589215 - DNA, 603 bp, Homo sapiens
attgatgatttatatgtaaaatatgaggctataaaggtagaatatataagcaaatttaaaatattatactaaaaaggtctttttgagsatgattaaaaggctagaaataacaaaaatttttaatagacttaaataaataaataaatacaatttatgaagtgtaaaaccccataggtaaaactgaaaggcaaattagctcctagtaaaaattatttgtgatatatgacatagataaaagctgataacctctctttaaggaaagaacaagtgccccagtagaaaaataggccattgggtagatgtatcacaaaagaagaaatacaatgggcccaaaacataaaatatattccatagatatgcattcaaatgaatataattttaaaaatgagataccattttgggcttttgtattagcataaatcagaaataatcttaatgcttaaaattagagcaagagaatacatacgtgagcaaagtgttgtttattaataaaattgtcttagggtactgacatttcatgtttctttttcctttttgctttattgtctcttagttcctaatattttgggtcagttaatgaaaataacaccttaattcaaattt

SEQ ID NO: 589216 - DNA, 603 bp, Homo sapiens
attgatgatttatatgtaaaatatgaggctataaaggtagaatatataagcaaatttaaaatattatactaaaaaggtctttttgaggatgattaaaaggctagaaataacaaaaatttttaatagacttaaataaataaataaatacaatttatgaagtgtaaaaccccataggtaaaactgaaaggcaaattagctcctagtaaaaattatttgtgrtatatgacatagataaaagctgataacctctctttaaggaaagaacaagtgccccagtagaaaaataggccattgggtagatgtatcacaaaagaagaaatacaatgggcccaaaacataaaatatattccatagatatgcattcaaatgaatataattttaaaaatgagataccattttgggcttttgtattagcataaatcagaaataatcttaatgcttaaaattagagcaagagaatacatacgtgagcaaagtgttgtttattaataaaattgtcttagggtactgacatttcatgtttctttttcctttttgctttattgtctcttagttcctaatattttgggtcagttaatgaaaataacaccttaattcaaattt

SEQ ID NO: 589217 - DNA, 565 bp, Homo sapiens
agctcctagtaaaaattatttgtgatatatgacatagataaaagctgataacctctctttaaggaaagaacaagtgccccagtagaaaaataggccattgggtagatgtatcacaaaagaagaaatacaatgggcccaaaacataaaatatattccatagatatgcattcaaatgaatataattttaaaaatgagataccattttgggcttttgtattagcataaatcagaaataatcttaatgcttaaaattagagcaagagaatacatacgtgagcaaagtgttgtttattaataaaattgtcttagggtactgacatttcatgtttctttttcctttttgctttattgtctcttagttcctaatattttgggtcagttaatgaaaataacaccttaattcaaatttcctatgggagagaattgtaaaatgttgaatattaaccaatgtgttttccaagctggaccccaaaagaatatttgacttttgtgatgttatttccttccttttcctacaattgactgaattgattatattmtttatagcctttaatcacaacttgtt

SEQ ID NO: 589218 - DNA, 591 bp, Homo sapiens
atgtaaaatacattatttaaataattgaattttgtggaaagtttttgatctatttctacaacagtctagattttgaattaccacagtgaaacatggtttctgggacgataaaatgtcagtaaggtgtttcattgtgttgtcaggtgtgaagcagaaaataatcatgtttttaagaacacttccttaggagtacatttttcttgttgtttacctgagtgaaaaattatctaacacgaattatcttttctttcttctaaggtagaagagaartgaagtaaatagggtatatagtagcagtcattaaaaactagagtcatctaaaatataaaatttagcattttaaaaggaataagtgacttctgaatgattttacactcattttattatcaagtatattttcaggaagaagtttttttgctgttttattttaagaaataatcaatgtcttctcaatattagcttctttaataatgttaaattattcaatctcttctttgattatagattgggaatacgagcaaatcaatttaaccaagaaatctgcacaaactcagagcttaagttttggaagctccttgttatgttgaagct

SEQ ID NO: 589219 - DNA, 591 bp, Homo sapiens
atgtaaaatacattatttaaataattgaattttgtggaaagtttttgatctatttctacaacagtctagattttgaattaccacagtgaaacatggtttctgggacgataaaatgtcagtaaggtgtttcattgtgttgtcaggtgtgaagcagaaaataatcatgtttttaagaacacttccttaggagtacatttttcttgttgtttacctgagtgaaaaattatctaacacgaattatcttttctttcttctaaggtagaagagaaatgaagtaaatagggtatatagtagcagtcattaaaarctagagtcatctaaaatataaaatttagcattttaaaaggaataagtgacttctgaatgattttacactcattttattatcaagtatattttcaggaagaagtttttttgctgttttattttaagaaataatcaatgtcttctcaatattagcttctttaataatgttaaattattcaatctcttctttgattatagattgggaatacgagcaaatcaatttaaccaagaaatctgcacaaactcagagcttaagttttggaagctccttgttatgttgaagct

SEQ ID NO: 589220 - DNA, 591 bp, Homo sapiens
atgtaaaatacattatttaaataattgaattttgtggaaagtttttgatctatttctacaacagtctagattttgaattaccacagtgaaacatggtttctgggacgataaaatgtcagtaaggtgtttcattgtgttgtcaggtgtgaagcagaaaataatcatgtttttaagaacacttccttaggagtacatttttcttgttgtttacctgagtgaaaaattatctaacacgaattatcttttctttcttctaaggtagaagagaaatgaagtaaatagggtatatagtagcagtcattaaaaactagagtcatctaaaatataaaatttagcattttaaaaggaataagtgacttctgaatgattttacactcattttattatcaagtatattttcaggaagaagtttttttgctgttttattttaagaaataatcaatgtcttctcaatattagcttctttaataawgttaaattattcaatctcttctttgattatagattgggaatacgagcaaatcaatttaaccaagaaatctgcacaaactcagagcttaagttttggaagctccttgttatgttgaagct

SEQ ID NO: 589221 - DNA, 591 bp, Homo sapiens
atgtaaaatacattatttaaataattgaattttgtggaaagtttttgatctatttctacaacagtctagattttgaattaccacagtgaaacatggtttctgggacgataaaatgtcagtaaggtgtttcattgtgttgtcaggtgtgaagcagaaaataatcatgtttttaagaacacttccttaggagtacatttttcttgttgtttacctgagtgaaaaattatctaacacgaattatcttttctttcttctaaggtagaagagaaatgaagtaaatagggtatatagtagcagtcattaaaaactagagtcatctaaaatataaaatttagcattttaaaaggaataagtgacttctgaatgattttacactcattttattatcaagtatattttcaggaagaagtttttttgctgttttattttaagaaataatcaatgtcttctcaatattagcttctttaataatgttaaattattcaatctcttctttgattatrgattgggaatacgagcaaatcaatttaaccaagaaatctgcacaaactcagagcttaagttttggaagctccttgttatgttgaagct

SEQ ID NO: 589222 - DNA, 610 bp, Homo sapiens
gaaaaagctactatgaccttcataattttatcatccccatttttccaatgactaaaggttaggctcacatttctgtttaccctagttaattcagctagtttaaagatgagattaatgctcaaacaaatgtctttagactctaaaataacgactctttctacaacagttttctgcttctcaataaaggtgatgcttttagctttcataagttatgggaaattatgcttcttaaaagtgggaagagaatatatttaagcaaatacaaaacactctgtttctgaaaactaaaaattctcttttctgtaggtagattggagaatacagaaaaatggaaaagtaactggaccttataagaactttaacctggcttcattaaccccgtgctttgactaattgaaataaacctgttgcatctaagaattttgacctagtaaaaaataaagataataactgtgraatagaacagttatcactagtcaaatttaaaaatcgcattggtctttatataatgttttgctttaattcatttaaaattcgtcactttaaatataaaccttgtggggaaaagtttgtcatgaccagaagctaaaacctggaacttataaagctc

SEQ ID NO: 589223 - DNA, 528 bp, Homo sapiens
aaccaacatttaaatgcatatccaaactcacaaaaaagtatatattgaagaaaattatctaacaccagagaattaaatggaactgcaggggctcactggtaaaacaccagctacagagtggcatgtacagttagtacaattctaagaaaaagctattctaatatgtgtatagtacaagtgaaatggttaatgattcagacartgattaccaaacctggctgcctatgtgtattatcagtatcaggatgtaaatttattaaacgcgtagtgcccactggtattcacccaaaatgtacaagtcagaatcttctgataacttgtactttttaccagttttccaggtgattattatggctccagctcaagtacagactgtagactatgggaactactggtttagagaaagacatatatcattgaaccttatttaagaagttattacaaatctcctcagaatgagaaacaaattcaggaagtttttaaggaatcaccttttataagtaacccccaaatccaaagcaggcattt

SEQ ID NO: 589224 - DNA, 528 bp, Homo sapiens
aaccaacatttaaatgcatatccaaactcacaaaaaagtatatattgaagaaaattatctaacaccagagaattaaatggaactgcaggggctcactggtaaaacaccagctacagagtggcatgtacagttagtacaattctaagaaaaagctattctaatatgtgtatagtacaagtgaaatggttaatgattcagacaatgattaccaaacctggctgcctatgtgtattatcagtatcaggatgtaartttattaaacgcgtagtgcccactggtattcacccaaaatgtacaagtcagaatcttctgataacttgtactttttaccagttttccaggtgattattatggctccagctcaagtacagactgtagactatgggaactactggtttagagaaagacatatatcattgaaccttatttaagaagttattacaaatctcctcagaatgagaaacaaattcaggaagtttttaaggaatcaccttttataagtaacccccaaatccaaagcaggcattt

SEQ ID NO: 589225 - DNA, 626 bp, Homo sapiens
gccttaactatgataggcttgccgtggttctttttatcacaagtccaattcatcctcctgccctctaattctactcaacttctcaaatggctgcgatcactgctgttaatctttaaagattaacaggataaaccttctctgaccttcagactaagaaaatttccctctaacccttttttgtacttgtcatagaacttcatagaaccacatagaataacagttgcagttactaaatcatttaatcatgtatataataaaactttaaacttttattgcactctagcacacatacaaaaaggacacaaaacataaatgtaaagcccaaaagattatcaaaagcaaacactcatggagccataatcattaaaaaagagaacattacgcacatrgcagaaacgtccaccctacatgcctttctctacagttatcctttccattgatttttaaagttacttttgtttcttttcttttcataccataatttaggaatgagtgttttaaactttttcgatcataccattttgtttcatggtatttttgtgtgtgtgtgtgttttattttttatttttccacttaaaatagtatttgtaaaattcatctatgcagttgtgtgagtggttctttct

SEQ ID NO: 589226 - DNA, 560 bp, Homo sapiens
tctgattaaataacttttcatcattattaccttatactatatatgtatacaatctcctttatattatttacatatttttatattaatatcattatatattttatttttctctctgtgctgaattcttatttcttcagatacatttcccaagttgtcaattttttcttgagctacatctattctgatgttcactacttcaattaattttgttttttcttgkttttttttttttttttttttttgagatggagtcttgctctgtcacccaggctggagtacagtggcgtgatctcagctcactgcagcctctgcctcccggtttcaaacgattctcctgcctcagcctcctgagtagctgggattacaggcatacgccaccacgcctggctaatttttgtattttcagtagagacagggtttcaccatgttggccaggctggtctcaaactcctgacctcacgatcgtcacgcctcggcctccccaagtgctgggattacaggcatgagccaccacacccagcctacttcaattaattttttaatttcaattattattttag

SEQ ID NO: 589227 - DNA, 470 bp, Homo sapiens
atgcatcttctacttttgtagttgctgataattactaacaaaaccagtagctacccccaggcttcttagcattaaagttcatttctgaaaaattaaaaaaaaaatagtgagcaggataatagctaaataatggcaaagttaatctatattctatcatgggccaaaaatggcccagaatatatttttaaaaagacagagagaaagagaaggaaaaaaagaggattgcttgaaatgcaatggcaattattctattgaaaaactgggaaatgattaataaaactgtttagaagcaaccacacacaagatagcttgtttagagtcttccatccttggrttatgaacagacgtgaacacaatagcgtttcgaaacacccacacactggataaagaggagaaatttaaatacagctacaagtctgtctcctgcaaaaatattggagtggtaattagtctgtcctcagactgggatt

SEQ ID NO: 589228 - DNA, 441 bp, Homo sapiens
acctttgaaatagatgaaaataattttccttttaatcagaacacctttttatgtctttcttattttttattttttcatcataacacatcttactttagcacacttcatataagaattatatattaactagaatttttattcttagtaaccttgtaaccagggcagccctgataaaataattgggaaagtttcctttcttactgttttcctttagtctctgtatttataagcacagctgcttacaagagccaggctacccaggctggcgccgagtttcttgacccctcaccrgataccagagggagataagaccctgcaaactggcacaaagtggaacagaggacccctggttaccttcagtcattaacatattataatactaaaatatcctctcctaaaggaaaatctctgccattttttggacttggttcttgaagttgt

SEQ ID NO: 589229 - DNA, 617 bp, Homo sapiens
tataatgttttaatgtagaaataaatagaaaggagctaagaagtgttattattacttgggtagagaaaaagggaactgttgaattttttattcttgtcaaactctatgacaaaacatataacaacggcatgctaataacctccctgatcatggcgagwaacagcattaatgtgtttactgattagagaattagaaaaggacatggttcttataagatcataccgtttaagtattctgatcactcagtctacatatatatcttacagggaaacaacgcaatggctccaccaaaatcacttttatgagattttagagtcactaagcgtgtttaaaaataatctaggtcagcaattgtgttcaactatagaaacagacttggcctcttcttggaagaatcaattacagttgccactctgattttattgtctctcatttgccctttccctcattacattgtgtggatccttgtcatttggccacatctgtttgcgagaaggtcatggagtcaatgtcttgcatgatcatcagcatttgacatcattaatgtcactttgatgcttcttcaatctatcctgtgattgctattcaacactcttcttacctcttcttggggtgta

SEQ ID NO: 589230 - DNA, 621 bp, Homo sapiens
ggagatgattatgactgtgtgctaacatggattgttcagacatgcatatgagggagaatagtacagacaattcattgtatattttagttttaaaatcctctctgtgatggatctgatcagaatatccaacagtagtggagaaatcataaacttataaaatgaaatttagcctaatttttacatattactttactccttaaattaatgagactctataagtaactattttgttttaatagagaatagctgtttgatrtctttctatccctccttttcttctctgatggagtatcggcatatattgggaaaggatctcactcctttggactcatggcagttgagagaagaccagattctaagatccctgtagagttcatgggatcttcctggggctctactgcagagatacttgatccaccacttaaccctttgaacatggagaggtaatcagaacccttttactacttgggattgatcatactggttcccttactgcaaatgagatttagcctatgatacaacagccccaccttctacaaacattctggggtgctaccacctaacacatcacctcagtgtcgcctcactgggtaacctggaacttccaggctccttgcatcc

SEQ ID NO: 589231 - DNA, 517 bp, Homo sapiens
cttattcctaaaatctaggtggtttataaggcatgccaattatttccccttgaatctctggaacttcatctccccaaacattactgtcactgtaataggagtagactagcgttcataaatatttttacaatttcctaccaaagcttgtttttggtcttccttgataaatcatataagtttactaatttttctccatatttcagtagaatgacttttttcaaagtctaattatgatgacactgcttaaaatccatattgcctccccaaaaccttaaagacaaaataaaaatcatttagcrtggtgctctagagccttcaagatctaatttctggctaagtttaacaataacaactaaaagtcccattgtttacttcactactgtctagtgaaggtagtgacaatttgcagaaacttaaagcaattaccatccaccatactatgaactaatctccagattattctggctgctgtaacaaaatactaggtgtcttataaacaacagaattttattgctga

SEQ ID NO: 589232 - DNA, 623 bp, Homo sapiens
gtttcctggctcatgtgacctcggacatgttgttttcaccctcaggtctcagtttcttcatccgyaaaagggccattgtaaataccgagtaagctagaacatgaactgcctggcatccagcagcccaagcctgcgtgaaccacaccagagggacatcctgcgcaggccacctctttctgcttgcttcttcttgtcttcctcaccacccctcccatttgcttctgccctcatccagattttccagtcttggcctttgttcagccaacatttgttgttactctagccctgctgtaaactcagtgaaaataacagattgcccaggtgatggaggttaatatcaacagcaagaagtcaaatacgagttattaatagaaatcatgtacccttcagccgggtgctcatgcttgtaatcccagcactttgggaggcgaggtgggcagattgcttgagcccagcagtttgcgaccaacctgggtaacacagtgagactttgtctctacaaaaaatttaaaaaaaaaattagctaggtgtggtggcatccacctgtggccccactacttaggaggctgaggtggaaggattgcttgagcctagaaggttgaggctacagtgagctgagatca

SEQ ID NO: 589233 - DNA, 604 bp, Homo sapiens
tgcaccaggtattacagaattttgtttttttttttcttattggttaatgtaagacattatatgatgctaactatgctacagtcataagcacatatgtaatgacacttttaattcttaaaaagaggaaagtactgttactattcccattttactgtgaagatgctgaggcatggagaggtaacaaactcacccactgttccatagttataacaaatatgacctgtctattaaggcagacagtctaattctagcgtccagtctattcaccccttggctgcactaaccctgttttaaggataatacatgtgtttctgaaccttcttgtgtaaacctccccttctatctcctgtcctcggatctctctgttggccccacttagyaatgtttttctttaacttggccaggcttcttactaacactgccacagaaattttacatctccttcctcccctattctatgacttttttcatactattctcaattacttaaataacttgcattattcagcacacatttaacgattccctatttaatgatctagatactgtgtaactcctattaacaaatctatcctagtttgttccttcaggatttggtttatga

SEQ ID NO: 589234 - DNA, 447 bp, Homo sapiens
catctccttcctcccctattctatgacttttttcatactattctcaattacttaaataacttgcattattcagcacacatttaacgattccctatttaatgatctagatactgtgtaactcctattaacaaatctatcctagtttgttccttcaggatttggtttatgaatcactttctctgggaagcaatatataatatcctttcctcaaactaatcattccttacttaaygttttattgttgcaattcacgttgagtactgtggatttccattcatttctaattcaaatccgcaggactttgtggtgaaatgcgcctgggatttagcataagaagataaaaaccaaagccaagtattacttgccaagtcatttattgtagttgacattccttcttgttaccaaaatgttaataatagcaattataatgtgatttaattcatagga

SEQ ID NO: 589235 - DNA, 436 bp, Homo sapiens
agtcccagctactggggagggtgaggcaagagaattgcttgaacccaggaagtggaggttgcagtgagctgagatcactccattgcattccagtctggacattgcagtgagactctgtcttgaaaaaaacaacaacaaaacaaaacataaaacaaacaaatacctttgcttatatccaatttcctgccaaattactgccctaattgcacaaaaattgtcattttcaattcctcttctttattctttcctaaactcacttcaatcaagtgttcatgcttaagctcaaacataactgatcttaatgatacatccagtgatttctaggttgccaatggataattgctagttycatattgacatattatcagcatttgatgaaattgatcattccctcatccttgatatatagtcttttcctggcttttaggacacaaca

SEQ ID NO: 589236 - DNA, 567 bp, Homo sapiens
ttaactctttcctggtgtaaagtattatttgaatgcaaagataattctgcatttaacaaaaaggttcataaattaacatttaccaagaccattcaggttaactttcatatcattatttaaagcttaatgaaagcttttttatttttttttcttttgagacagggactcaaaaaataagaagttaagcttttctaaaaggctcatttgtaaatatgtcacatctcttgccattaatttattaacaagattattctttttaataaggaagggctatacaaattttctctctctccccccacctctgtgcatacttcctcatcaaatgtttcaaaactgttcattgttttttccaaagaatttatattttaaataaatataatatttttaattctaaaaactatggcaagttagaaytgaaagtgattttgttgagtttacttctgagaaaatagacgtaggatctaagatgactgactagctgcagccatgtggaagagctcccactgagggactaagattactggcatggttttaacagatcttttgagggaaggcactgagaataga

SEQ ID NO: 589237 - DNA, 567 bp, Homo sapiens
ttaactctttcctggtgtaaagtattatttgaatgcaaagataattctgcatttaacaaaaaggttcataaattaacatttaccaagaccattcaggttaactttcatatcattatttaaagcttaatgaaagcttttttatttttttttcttttgagacagggactcaaaaaataagaagttaagcttttctaaaaggctcatttgtaaatatgtcacatctcttgccattaatttattaacaagattattctttttaataaggaagggctatacaaattttctctctctccccccacctctgtgcatacttcctcatcaaatgtttcaaaactgttcattgttttttccaaagaatttatattttaaataaatataatatttttaattctaaaaactatggcaagttagaactgamagtgattttgttgagtttacttctgagaaaatagacgtaggatctaagatgactgactagctgcagccatgtggaagagctcccactgagggactaagattactggcatggttttaacagatcttttgagggaaggcactgagaataga

SEQ ID NO: 589238 - DNA, 619 bp, Homo sapiens
tattgcagcactagtcacaatagcaaagacgtggaataaacactcatcgactgttcaattacataacaacacttttcctactatttatttatttattgagctagwtgtatttaggtttatgctatttgaatcaagactattgttaaccaatacacctctttcttcacgtgggaacctaatatcttcagaatgcctctctccttctgcaaaattttatgttccaatagtatcccacatttaagtctatcatcgaaagtctcattttgcaatagttacccctttctttctaccttatacattattggaatttaagttccttgaagggtacaaactttcacttacctgaagatgtctggtacatagtatatgccaatgtctgttaaaggaatgaatattcattcagaatataaaatatattattaatggcatcattattggcttaacataccataaagtgaagcatttgtattgaaatgtaataagaaaataaagagaaacttaccactgtgaaagtacgataggcaagaagttttgtttctataacatatcctcaaatgtgtatgctttgtttcacagcttgaaaatttccctcatatattcccacttgatgcccacaaca

SEQ ID NO: 589239 - DNA, 619 bp, Homo sapiens
tattgcagcactagtcacaatagcaaagacgtggaataaacactcatcgactgttcaattacataacaacacttttcctactatttatttatttattgagctagatgtatttaggtttatgctatttgaatcaagactattgttaaccaatacacctctttcttcacgtgggaacctaatatcttcagaatgcctctctccttctgcaaaattttatgttccaatagtatcccacatttaagtctatcatygaaagtctcattttgcaatagttacccctttctttctaccttatacattattggaatttaagttccttgaagggtacaaactttcacttacctgaagatgtctggtacatagtatatgccaatgtctgttaaaggaatgaatattcattcagaatataaaatatattattaatggcatcattattggcttaacataccataaagtgaagcatttgtattgaaatgtaataagaaaataaagagaaacttaccactgtgaaagtacgataggcaagaagttttgtttctataacatatcctcaaatgtgtatgctttgtttcacagcttgaaaatttccctcatatattcccacttgatgcccacaaca

SEQ ID NO: 589240 - DNA, 619 bp, Homo sapiens
tattgcagcactagtcacaatagcaaagacgtggaataaacactcatcgactgttcaattacataacaacacttttcctactatttatttatttattgagctagatgtatttaggtttatgctatttgaatcaagactattgttaaccaatacacctctttcttcacgtgggaacctaatatcttcagaatgcctctctccttctgcaaaattttatgttccaatagtatcccacatttaagtctatcatcgaaagtctcattttgcaatagttayccctttctttctaccttatacattattggaatttaagttccttgaagggtacaaactttcacttacctgaagatgtctggtacatagtatatgccaatgtctgttaaaggaatgaatattcattcagaatataaaatatattattaatggcatcattattggcttaacataccataaagtgaagcatttgtattgaaatgtaataagaaaataaagagaaacttaccactgtgaaagtacgataggcaagaagttttgtttctataacatatcctcaaatgtgtatgctttgtttcacagcttgaaaatttccctcatatattcccacttgatgcccacaaca

SEQ ID NO: 589241 - DNA, 619 bp, Homo sapiens
tattgcagcactagtcacaatagcaaagacgtggaataaacactcatcgactgttcaattacataacaacacttttcctactatttatttatttattgagctagatgtatttaggtttatgctatttgaatcaagactattgttaaccaatacacctctttcttcacgtgggaacctaatatcttcagaatgcctctctccttctgcaaaattttatgttccaatagtatcccacatttaagtctatcatcgaaagtctcattttgcaatagttacccctttctttctaccttatacattattggaatttaagttccttgaagggtacaaactttcacttacctgaagatgtctggtacatagtatatgccaatgtctgttaaaggaatgaatattcattcagaatataaaatatattattaatggcatcattattggcttaacataccataaagtgaagcatttgtattgaaatgtaataagaaaataaagagaaacttaccactgtgaaagtaygataggcaagaagttttgtttctataacatatcctcaaatgtgtatgctttgtttcacagcttgaaaatttccctcatatattcccacttgatgcccacaaca

SEQ ID NO: 589242 - DNA, 546 bp, Homo sapiens
tttcaaaactgttcattgttttttccaaagaatttatattttaaataaatataatatttttaattctaaaaactatggcaagttagaactgaaagtgattttgttgagtttacttctgagaaaatagacgtaggatctaagatgactgactagctgcagccatgtggaagagctcccactgagggactaagattactggcatggttttaacagatcttttgagggaaggcactgagaatagacagagggaagacacagaagttgagctgaagggagaaaaagctgggaacccagtacagggctaccacacaccacaactgattttcagacctcagcagctccagagaaacggttgaactggagaaacccactgtcaccatgggcctccggaaccccacaggagaagactccttgatcaccatggacactcaagttggcagggagagctgcttatagaagtgataagggcagcartccagctgatgtggagcccagagggttgatgtgggagcatctgtagcagaacacagccagggacagctatct

SEQ ID NO: 589243 - DNA, 561 bp, Homo sapiens
taaggtgctcatttgtaagttataccaagtcttttagaatatatactattgtgctaaatgggactggattggattggctaaaataaactgaataaattagaagttaagagagtctcataaaatttcggagacttttcctgcatagcttttggtaccaatccagaaataaagagggaggtgtaaatgaaaaattatttcaaaccatattgtcatggtgacaaataagaatatgataataatactttaacttttatgaatcacataaagttctgactaattttagctgtactttctctcaagttttgattttcacccttttgccaataatcaatatcaatttacactaaataaactccaccatttacatactattggcactatattttcctagttatcattgttaaatgcttagaaaaaagtactaaaatcttaagtggtaatataaaaatatttggyattcattttttaaatgaaaaggcactattaggttttaaaatggcggtaatcattttggagagttaaaatcaggcaagtatcgagacagagtatataaactaacat

SEQ ID NO: 589244 - DNA, 568 bp, Homo sapiens
acctcgtgatccacctgcctcgacctcccaaagttctttcattttacagtatgtacaaactttagaatgatcacatttggatacaaaccaaaaattatttggttaaatacttgattttctaaaattgataggtaaatataattgctttctaaagtgtactttaatgcttttaraaatataaacctttaattggagagtgaaaaaacattgtccagaactgttttttcacttagtcagagtacacatacttttgaaaagcatgttaagtctacttcaaggtttcaacagagttcttttcaattattttaaatttaatcaccacattacataatattaatcttacacaaaatatagaaattatgacagatttaaataaaaaatagctcctagatataaaatctaattctgcctccctgagttcctccctcaaagatgacttaaataggtggcccactttgagtggaatataatattgtccacggctgccaatccccagaacatgtacattaaaaatcaaatcactgctgaatttgagattctgaccagcctaattttttcttttcttcaa

SEQ ID NO: 589245 - DNA, 204 bp, Homo sapiens
tacaccattcaaccaagcaatctcartactgggatatatccaaaggaatatgaatcattctattataaagagacatgcaggtgtgtgttcattgtagcacagttcattacaacaaagacgtggaatcaacctaaatgcccatcaatattagactggataaaaatgtggtatatatacaccatggaatactatgcagtcataaaa

SEQ ID NO: 589246 - DNA, 204 bp, Homo sapiens
tacaccattcaaccaagcaatctcaatactgggatatatccaaaggaatatgaatcattctattataaagasacatgcaggtgtgtgttcattgtagcacagttcattacaacaaagacgtggaatcaacctaaatgcccatcaatattagactggataaaaatgtggtatatatacaccatggaatactatgcagtcataaaa

SEQ ID NO: 589247 - DNA, 426 bp, Homo sapiens
acaacaaatccccatgacacaagtttatatattgttatacataagttatatatgttatatatacacaatatacatattatatatacctatataataaacctgcacatgtaccctgacttaaaagttagaaaaaagaaaatagatatagtcatacagttatttgacagcctgtagattaataatcatatgcctgtgtgaataatagatattttaaaataactgttatttctattttcagtctcatcaaatatgcttagtatctgcttgtcattgacagtgtttattgccatrtaaagaaaaacagacatgtgacttatatctaatattcttatttttaataaaaaagaaagttgtttcaaagctttagtgtgcataacaatcaactggggtttttgttaaaaaaaaaaagttttcacagtccaccag

SEQ ID NO: 589248 - DNA, 512 bp, Homo sapiens
gtgtattacttttatttttctaacaacttctagccagagataaacttgttgctcatttgtacttacaagtaggttctcaggttagcaaggataatattagcaaggtcaggcaaaatgcaaagagccgtgaagagagtccacaataagctttatgtgaactctaatttgtgtcatgattgattctgcaaaatatgttatagttcatacacaactttctcttactgctttccccggttaaaaacttaagttgcaacatcctaactctgtcgtgaatgayactatttgctttagtagcataattcaggagcaggtagtccttctaaatcctatccattatttttccattagtaaaataccaaagagtctaattataaggtagtctttttaaaaatatggtcttatagatgctaaaagctttgttcaataatatgtctcttaagatgttataagtaatctaaattcatctgtgtgaaagtaaaattgttatttattcactttacaatctcaaatac

SEQ ID NO: 589249 - DNA, 580 bp, Homo sapiens
tttgggtatcttttaagcagcgccccagtctactggtaccagtttactgtattagtccattttcacactgctgataaagacgtaccagaaactgggtaattttatatattaaaaaaatttaatggactcacagctccatggctggagaggcttcacaatcaaggcagatgatgaaaggcatgtctttcatggtgccggacaagagagaatgagagccaagtaaaagggcttcccccttattaaamcatcagatctcgtgagacttattcactatcatgagaactgtatggggaaactgctctgatgattcaattatatccagctgggtcccttccataacaagtaggaattgtggcagctacaactcaagatgagatttgggtgaggacacagccaaaccatatcaccctgcatatttaatactatacctgacacccattaaaccctaaatacctaacctttgaataaattaataaaaagtataaattattaagaactgtaatggaacaatgttcaatgaccagttaaagacattgatttttttaaacactattgctgggtttggttctttttaaaattt

SEQ ID NO: 589250 - DNA, 503 bp, Homo sapiens
ttaattttattctattatagtctggaaagtttttcgcttttctgttttctggtgtccttacttagggaatattaatagattagaagagtaactttgtggattccagaggatggaagtagtaaaatgtttatttccttgaggcagcttcatagccagtgactgacctatacaggagtatgaatgaccaactttattgactcacaggtggcaaactaaggtgtaatttcctcaaattaattcctcaaactgaggtataaactccaggattccccttgtaggttagcctggtaattgaaagtggaataatctacaatcacacccttgcttggtttttccttcactgtcctcctccactctcttactggcttatcctgagagcacctttttaataaaacacttgtacatcaatccccacctcatagtttgctttgagataacttaaactaagatrgtgtattattgaaaactttaccagcattctaaccttgatcaaccacaaaatt

SEQ ID NO: 589251 - DNA, 551 bp, Homo sapiens
aatataagaaaaggtaacttcaagaagagagtcatcagcagaatcaaacaccacagaaaaggcagaaatagctaattaaatacagataaaaaccttatatttgaattggaatgatagtcccaaaggatttgtaggcatgtaagtgtgtaagcctttgagatatgaatgaccagaggcatttcagacagtcaggtagactaatctttaagcagtcaataaaacagtgaatggatgggtggatggacgaatggatgcatggatggctggatggatggatggatgggtaggtggatggatggatagatggatagacagatgaatgaataaactgatagcaattcattctaatagtcttcattcctgtgaatagtttacgcattgattcagcaaatagccatgmcatgagctgctttaaacattgggaatataatgtaaacaacacaaagccccaaccctaaaaccctaaatagcttaatagtataatggctgcaaagctcttacatttgtctctactgcagttctctaagcaaaaacaatagtcacttgtgcta

SEQ ID NO: 589252 - DNA, 491 bp, Homo sapiens
gttgatgggtgcagcaaaccaccatggcacatgtatacctatgtaacaaatctgcttgttctgcacatgtatcccagaacttaatgtataataaaaaaaaaattcaaaacaaagacattgaacatactatgtcatgacataaacggtcttatttgaataggatatacaaaattttatctaggtattcataatgttgtgatttagtgtctctatggtaccaacatgatccttagatccaaataggtactatttggatactctttctctcatttcaaacactgtatctcaaaacctgaagctccattgtatggggaaagatatgaatacattattattttcttttttttaacctagaaagacatgagttgtcatttgaaaaactaatagaacatatttaacattattatttatatctcattccttctatgactcaraacatcataacccatcagtttcttcaagctggtgtctaagagtgtaaattagtttta

SEQ ID NO: 589253 - DNA, 433 bp, Homo sapiens
taagaaaaccagcaggtaaaagaaaaataataataaaattgaagatttttcctccatagggaaaaaaattgcaactctattttttaattcatattgaaggtgatcaacttgtctgataatagatgcaagtcaaagttagaggaagatgtaactgagctaacgagaaaatattttgtttgtttgaaatgycagatatagcaaaaaatatctgagatatttaacattttctaaagtaattcacacagttacagactaaaatacatgtgatcatctcaatcagtgaaggaaaatatttgaaaattcaatacccataaatgacaaaaatctctcagctacctacaaatataaggtgcttcatcagtgcaataaagggcttatacagaaaagcatacagttcacatcatacttagcaatgaaagagtaaatactttcc

SEQ ID NO: 589254 - DNA, 584 bp, Homo sapiens
gaattgggaacactgattataaatgaytttttagagaaaactaacaaaaacaagaaaaaaataaaataataagaataagagttccagaagatgattatgatttctataatttgacatagaatgtaagagtatctgaaagaaggaagataaaaacaatatgtaagtactcctaaactaaattataaaattgaaaagatggtggcatctttcaatattaagaaagcagaagtccgaggatgggtgagagcatgactggggaaaacttttaattactgatcaagtttaaaactacattatgactgtttgaaaaattccatatacttgcttaaagcaatatataataagtctaagacatgttttatgtctacagtatcaaaaactgatctacatacaaataaaataatagttattttttacaaaagatatttatctccagatttcaaataaattgtcaataataatcaaaagtctaataaaaattccatttaaaagcagtgaacagcaagtattaaaactgtccaagcagagaacagaccattaagtcaagctaattattacactgtttttttcttaaagcaccaata

SEQ ID NO: 589255 - DNA, 553 bp, Homo sapiens
tcctgtctttgatttttccttgttttaatgtccaaatatcaaagataaagaaaacacctgaaattattcagaagtatgctttattaccaattgatgagaagcaggtcccattccagttttcctctgtaaaaacaaagaatatttaagctccatagtgtaattttttagtgcttttgatttgaaaatggttttgaaattagaattctgtgcccaattaatgtacatacaagtacataaggaatattttcattcatgttctgagtatcagagtcatagcaggaaaaagctggaacactcaaatttggataattagaggagggttcatttgcaaaggagggtgggtgattaattgtatttgtcaacttgagtggactaaaggatgcctagatagctgggcaaacatttctggatgtgtctgtgagagtgtttcaggaacagaatagtgtatgaatcagtagtagactgagcaaagaatagctaccctcasccgtgtgggcaggtttcatccaatccccagagggtccaaagagaacaaaaatgtggaggaagggta

SEQ ID NO: 589256 - DNA, 570 bp, Homo sapiens
tagaaaacaattcctgtttttagacactatgtataaatttgctcacaatacacatcttcttttctctgtcatgatgaaaatctttaactcaaagaaaaaattgctagagtaactatgcctcttaatttttttcagtttcctatcttgaacttcatttcttacttcaatctttaaatatatattcaattataagctaacgtctgtggatataagaataaaatgtactcacttcaattattttgaaatcattcatattataatttcactataataattcatcttattattktgaaatatactataatgaatataatgaaaaagttctactgtaataaaaagcgttatgtaagaattttcaaaaatatttcaaagcatgattaggaagtgctattctgccaaagtacttaaggactaccttcccaaaaaaggtgaaatttgagctaagtcatcttggctggataagcatcctaatgatagagaagaaaataaaaggaacagctgtcctaatagagagaactaatatgtcaaaaggtatcagaaatcatggcccactcagaaagccacaatttg

SEQ ID NO: 589257 - DNA, 573 bp, Homo sapiens
agccataatttaaatgctcaaatcctaggcggctccagaatttcctccmacacctgaattcatggtggaggggtgagaccctgacaagccttgacagtcttttaggcattcatttatttttcgccagaccagtttggttttgacttaaatcttgggtcttaagtttttctctttttctgtaaccctattgattgaaaagacaatttttttttcttttggttttccactaattctggtatgataaggtgaggccaattttaaataactattttttacatctgcttatcaaccctaaaacctaattctatacccatcttcatctttttttttttttcaagatggagtcttgctctgtcacctaggctagagtgcaatgactcaatgtcggctcactgcaacctccacttcctgggttcaagcaattctcccgcctcagcctcccaactgactgggactacaggtgcacaccaccatgcctgactaattttttttttgtatttttagtagagatggagtttcaccatattggccaggctggtctcgaactgctgacctcaagtgatccgcctgcct

SEQ ID NO: 589258 - DNA, 623 bp, Homo sapiens
tagcaactgatacatttactgagcatccacaatgtaccacatttactgagcatccacaatgtaccaagtatagtgcaaggtattttcatgtacatttaatttttttaaatatttataacagccccatgaagtagctattacattttccgttttattatattctcccttttatagatggataaactgaggctaaaaatacagactccatcacttatggacttggggaaagaggaaaattgatttttgtccttcccttggctagagaggaattatatctgagtcaaccaaagatcagacacactggcaaggaggagcaaactggagaactctaaggaaaagacagcaaattatagggggatgaattagggcctgctaatcccactattctttactgcctcctgggcacttttttgttcctggaagattgggaccttgtttgattaagagttgcgaaggtgggcggatcacaaygtcaggagttcaagaccagcctgaccaatatggtgaaaccctgtctctactaaaaatacaaaaattagccgagcttggtggcgggcgcctgtaatcccagctactcgggaggctgaggcaggagaatcacttgaacctgggaggtggagcag

SEQ ID NO: 589259 - DNA, 479 bp, Homo sapiens
tatcacatgaaagacaaatgcacaaaaatagcaaaggaaaaaactaaagtagaataaaaatatgggaactcagcctaccagacagcaaaaaagaataaagtaactttaattaaaacactgtcatactaatgcaggaactgaaaaataatatcagaacagagttcacaaatggacctctgtgcatgtgggaacctaatatctgataaaagtatactttcacagcagtaaagaaagaatggactatgaaataatgttacagcaactaactatccatttgaagggaaatgaaacttgttagatccctaactcacaccattctctgcttaaatccatataaaatataggttttatatattaatttagagggaatatatatgaaatatatgaaaatatataagaaatactrtataatatataagaaatactgtataatactagaataaaacacagattatttcaataatcttgaagtggtgaca

SEQ ID NO: 589260 - DNA, 541 bp, Homo sapiens
tcttttgcacaaacatggatgcagttggagaccactatcctaagtgaattaacacagaaacagaaaaccaaatactgcatgttctcatttataagcaggagctaaccactggaaacacatgaatataaagatggcaacaacagacactggggactacttggaacaagggctaaaaagctacctatcgartactatgcttattacccgggtgataggaccattcataccccaaacctcaactttatgcaatatacccatgtaacaaagctgcgtgtgtacccccgaatctaaaataaaagttggaattatttttaaaaaacaggaaataagttcaagggatctattgcacagtatggtgactatatttaatgatgttatattgtattcctgaaaaatgctaagagagtggatattaagtgttctcaccacaaaaataactatgtgagataatacacatattaattagctaaatttaaccattccacaatgtatatatactttaaaaaatcatgttgtacacaataaatgcatataattttat

SEQ ID NO: 589261 - DNA, 637 bp, Homo sapiens
gagtgtgcacaggcacacatgaaagtctaaaaagaatcttttggtaacaatgccttggctggaagacttaattttggttaaataaaatacagcaatctaacctcgcccaataattgccacatgaaaattatttctgccaagtctatactgatatctatcttcctaaaatatagttgaatagacataactttctctggcttttattttaactattgtcatatttcttaaaccattcaggctcctgtaccaaaataccacaaactatgtgatgataaacaacagtaatttgtttcttacaattctgaaggctggaatgtccaagatcatgatgccagcagattcagtgyctggtaagaatctgcttcctcttagacagctatattcttatcctaacctcatacagtggaaggggtgaggggtatcttttgaccctctcctataagagcaatgattttatttgtgcagattccactcctatacataatcacctcccaaaagccccacgacctaatacaatcattttgggagtgaagattacaacatacgtattttggagggacataaacatttataccatagagccagacatatacaggttgacacccttaagctgaaaatataaaattcaaaatgcccc

SEQ ID NO: 589262 - DNA, 593 bp, Homo sapiens
tgctgttctttccctggaatacttttycccatgatatccacatagttaattactgacttccttcaggtctctgctcaaatatcattttctggcaatcttcttgaaaatccattagcaacccctaccttgatactgttgtgcttctgaaactgttattaatgtactcagattctgttattaagggttgcccatctgagtcattttgaagaaagaagacggctagcactctgtttcaaggggccaacctaaacttggccctgaatcagacacatactgtttttcaaggtgggcttctgattgaggcttctgagcttgactgcagacactggtcaaagtccagaggcagagagtaaccaatggtggctccagataactcgagcagtgtggaggttccagtcagtgtctggggtctacacaggccagcacaacatttgctggacagcctaaaacacagcactgcgcatctgtctgccattggctttcgcccactggtaatgctgatttagaaggaatttgcaaacgttatctaggtatcaggagcctaacaaagtaggtcatcaattaattcagcactcccttcctcgtggaggaag

SEQ ID NO: 589263 - DNA, 610 bp, Homo sapiens
agttttgttacatggatatactgtgtgtgtatatatacatatagtatagtggtatatatatatatatatatatatatatatatatatatatatatatatatatatatatataaaagagtggtaaagtctaggcttttagtgtaaccatcaccctaacaatgtacattgtgcccaataggtaatttctcatcccttccccctcctcctgtagtgtctatttttccacagtgtctccagtgtctattgttctacattctatgtccatatgtgtactttgtttagctctcacttgtaagtgagaacatgtggtgtttgacttcagtttctgagttatttcacttaacacactctcaagacttaaycaggaagacattgactccctgaatagatcaataacgagcttcaaaattgaaattaaagtggtaggttccccatcgcttgctctctctctctctctctctctctctctctctctcctgctgccatgtaagacgtgtcctgctttcccttcaccttctgccatgattgtacgtttcctaagacctccctaaacatgtggaactgtgagtcaactagacctcttttgtttattaattactcaagtacaggt

SEQ ID NO: 589264 - DNA, 559 bp, Homo sapiens
gcattactgtttcgatgtattgttggatttakttttctagtgttttgttgaggatttttacatcaatggtcagagagatattggcctgtagttttcttttttgttgttgtattcttttctaatttgggtatcaggcttatgctggcctcataggagagttaggaaaagttccctccacttcaatcttttggaatagtttgagaaggattgatattaattctttaaagtttcagtagaattcagtggtgaagccatctggtcctggacttctttttttgttgggagattttttattactgattcaatctcattacttgttattggtcagttcaggatttctgtttctacttggttcaatcttgataggttgtatgtgtccaggaatttatacacttcctctaggttttcaaatttattggcctagagttgttcacagtgatctctaatgattctttatctttctctggtgtccactgtgccatctctttttggtttctgattttattcatttgggtcttctcacttttttctcagtctagttcatggtttgttgattttg

SEQ ID NO: 589265 - DNA, 630 bp, Homo sapiens
atgaagttggaaagtaatgttattacaaaaaacacagctgaaagttccttgctagggattgctgtttggttctgagcttcctagaggcccagcacaaaaggaaacatgagttatgaggcactatgtcaattttacaaaaccaaatcattcactgcaatgtaggaatttcttttgttgtgttttcccccaaaagaaacaatttgtgtaagaagatataatttgaatggtctcagctgacctttccttttctcacttaaaatattgagttacttgcttgataatgggttatcaaatggagatttataggatttcataggtcaaattaacctatgaaatccactggtgccacagamatcacctacgacttaagaggtatttctgacagccatctaatttggcaaagtaggtaatgacctagaaatttatgatgaacaaaacacagagaaacaggagagtcttacaacggaaaaggtatcaagttaaaatctgaaaatgtttttttatatcttacatcattgcatatgactaattttattactttaggacaaggaaactgtcttagcatgcacttttttgatctgaaaaattctgatttggaaatagatgaacttttaatttgtctttctagct

SEQ ID NO: 589266 - DNA, 630 bp, Homo sapiens
atgaagttggaaagtaatgttattacaaaaaacacagctgaaagttccttgctagggattgctgtttggttctgagcttcctagaggcccagcacaaaaggaaacatgagttatgaggcactatgtcaattttacaaaaccaaatcattcactgcaatgtaggaatttcttttgttgtgttttcccccaaaagaaacaatttgtgtaagaagatataatttgaatggtctcagctgacctttccttttctcacttaaaatattgagttacttgcttgataatgggttatcaaatggagatttataggatttcataggtcaaattaacctatgaaatccactggtgccacagacatcacctacgacttaagaggtatttctgamagccatctaatttggcaaagtaggtaatgacctagaaatttatgatgaacaaaacacagagaaacaggagagtcttacaacggaaaaggtatcaagttaaaatctgaaaatgtttttttatatcttacatcattgcatatgactaattttattactttaggacaaggaaactgtcttagcatgcacttttttgatctgaaaaattctgatttggaaatagatgaacttttaatttgtctttctagct

SEQ ID NO: 589267 - DNA, 537 bp, Homo sapiens
tctgtgtattttcaaatagcctctattcragctaattctgctttatccattctaattctgctttatccattctgctattgagagactctgatgctttactcagtatgtcaaatacatttttctattgcagaatttgtgctgcttttttaaattttcaatccctttgttaaatttatcttatagaattctgaatttcttctctgtgttatcttgaatttctttcttcaagtttcttcaaaacagctattttgaattctctgtctgaaaggttacatatctttgtttctccaggattttttcctggtgccttatttagtttatttggtgaggtgttcattttctggatgatgttgatggttattgatgtttgtcagtgtccaggcattgaacagttgggtatttatcatagtcttcacagtctgggcttgtttgtagccatctttcttcaaaaggctttctatgcacttgaagtgacttaggtgttgtaagctaagccaaactgcattagagggcacacccagcccagtaacactgtgg

SEQ ID NO: 589268 - DNA, 627 bp, Homo sapiens
agttttaatattaaaagaactgattgagacttttttgcttctctayctccacatgtaatgcagtgcccatgccctgcacatagtacacactctatagcccatgatatacacacaagaaatctttatggccactgtaggttatcgaaaagctctaacaggagaattgtccctcgaagggagttagtttgaggacctcccccatataccaaaagttacagatgctcaagtctcagatataaaatggcatagtaatggcatataacctacacacatcctcccgtatacttcaaatcatctctagattactcataatacttaatacaatgtaaatgctatgtaaattgcagttaaaccatattgtttagagaataatgacagaaaaaaagcctgtacatgttcactaaagatctaattactttccaaatattttcaatccatagttggttgaatctacatatgtgaaatctgcaaatagagaggactaactatacatgccattgctttacatttcagtgtcttggcaaaggcagatggaagggaaagaagccttgactaagcaggatgagatctggagatatttactgatctatagaagctgaccgccccaccctcaaacacccctcacca

SEQ ID NO: 589269 - DNA, 627 bp, Homo sapiens
agttttaatattaaaagaactgattgagacttttttgcttctctatctccacatgtaatgcagtgcccatgccctgcacatagtacacactctatagcccatgatatacacacaagaaatctttatggccactgtaggttatcgaaaagctctaacaggagaattgtccctcgaagggagttagtttgaggacctcccccatataccaaaagttacagatgctcaagtctcagatataaaatggcatagtaatggcatataacctacacacatcctcccgtatacttcaaatcatctctagattactcataatacttaatacaatgtaaatgctatgtaaattgcagttaaaccatattgtttagagaataatgacagaaaaaaagcctgtacatgttcactaaagatctaattactttccaaatattttcaatccatagttggttgaatctacatatgtgaaatcygcaaatagagaggactaactatacatgccattgctttacatttcagtgtcttggcaaaggcagatggaagggaaagaagccttgactaagcaggatgagatctggagatatttactgatctatagaagctgaccgccccaccctcaaacacccctcacca

SEQ ID NO: 589270 - DNA, 362 bp, Homo sapiens
accacaccctgtagcctttctgtccaaacaacttgaccttactgttttagcctagccctcatgtctgcgtgcagwggctgccgctgctttaatacttttagaggccctcaaagtaagtagaggcctttcctacagggtctgagaaggccaccgcagtcatttcttccgttctgtcagacataattcttcagtttagccttcccacctcaatacagtctgataacagacgagcctttattagtcaaatcagccaagcagtttttcaggctcttagtattcagtgaaacctttatatcccttatggtcctccatcttcaagaaaagtagaatagactaaaggtcttttaaaaacacacctcacc

SEQ ID NO: 589271 - DNA, 362 bp, Homo sapiens
accacaccctgtagcctttctgtccaaacaacttgaccttactgttttagcctagccctcatgtctgcgtgcagtggctgccgctgctttaatamttttagaggccctcaaagtaagtagaggcctttcctacagggtctgagaaggccaccgcagtcatttcttccgttctgtcagacataattcttcagtttagccttcccacctcaatacagtctgataacagacgagcctttattagtcaaatcagccaagcagtttttcaggctcttagtattcagtgaaacctttatatcccttatggtcctccatcttcaagaaaagtagaatagactaaaggtcttttaaaaacacacctcacc

SEQ ID NO: 589272 - DNA, 362 bp, Homo sapiens
accacaccctgtagcctttctgtccaaacaacttgaccttactgttttagcctagccctcatgtctgcgtgcagtggctgccgctgctttaatacttttagaggccctcaaartaagtagaggcctttcctacagggtctgagaaggccaccgcagtcatttcttccgttctgtcagacataattcttcagtttagccttcccacctcaatacagtctgataacagacgagcctttattagtcaaatcagccaagcagtttttcaggctcttagtattcagtgaaacctttatatcccttatggtcctccatcttcaagaaaagtagaatagactaaaggtcttttaaaaacacacctcacc

SEQ ID NO: 589273 - DNA, 362 bp, Homo sapiens
accacaccctgtagcctttctgtccaaacaacttgaccttactgttttagcctagccctcatgtctgcgtgcagtggctgccgctgctttaatacttttagaggccctcaaagtaagtagaggcctttcctacagggtctgagaaggccaccgcagtcatttcttcckttctgtcagacataattcttcagtttagccttcccacctcaatacagtctgataacagacgagcctttattagtcaaatcagccaagcagtttttcaggctcttagtattcagtgaaacctttatatcccttatggtcctccatcttcaagaaaagtagaatagactaaaggtcttttaaaaacacacctcacc

SEQ ID NO: 589274 - DNA, 622 bp, Homo sapiens
agatttagtggcccttactgacacattctcgaaaacctgcacccttgcctgtcctcctagaccacaaagagaccaagaaaaattggatttagtggcccttaccaatgcattctgaaaaacctgttaagagtcctaagcattctcctgttagtatcgggaccttacccctgtcctataaaggtgttatgccccaaaaatgaartggagggccataccctgagggagggaagggatctccagggttagaagagtgatgcctttgtcctcacttctcatcatatgaataggaaggatatcatttctgaggctcctcatatcctagcttcagtaatagcttttgttaggcctgatagtctggagggctcctaaaattccagatagtccccccaacccaaacaaggctttgggcaaaaattatgtctttctgattggtgagcctgggtgcctaaacaatggaacagagtcctgaagtttatactagaaataattcttataggagaaactagaaaagcaccagtgacagggagtggtttttagaagctggaccagcctcggagaagagacgtgagaggaaatttgtctgacaggcattaggacccaggaggcaatggtcaggatagat

SEQ ID NO: 589275 - DNA, 496 bp, Homo sapiens
ggccctggtggtgtaggaacctgagggaatctcctggtatacaggttgcaaaaaccgtgggaaaagtgtagtatctgggccagatagcacagttcctcatggcacagtccctcacagcttcccttggctatgggagggagctccccagctgcttgggcttcccgggtgaggtaatgccccaccctgcttctgcttgccctccatgggctgcacccactgtctaaacagtctgaatgagatgaaccacgtacctcagttggaaatgcagaaatcacctgctttctgcattggtcttcctggtagctgcaaactggagctgttcctatttggccatcttgccagatacacatcaagctaccattgactttcttcacagaactagaaaaaactactttaaayttcatatggaaccaaaaaagagcccgtatagccaagacaattctaagcaaaaagaacaaagctggaggcatcacgctacctgacttcaaactatact

SEQ ID NO: 589276 - DNA, 586 bp, Homo sapiens
cctcaaaaaactataaatcgaactaacacacrattcagcgatgccactactgaatatttaactaaaggaaaggaaaccagtatattgaagagaaatctgcactcacattttactgcagcactattcacaatagtcaagatatggaatcaacctaagtgtctaacaacagattaactgataaagaaaatatggtatatatacacaatggaatacaattcagccataaaaaagaatgaagtcctgtcattcacagcaacatggatggaactggaagacattaagttaaaaagataccacatgctctctctcatatgtggaagctaaaaaaagttgatcttatacaagtaaaaagcagaacagatgacagtagaggctgcaaagggtaggggaaaagagggatagggagagatttattaaaagacacaaaagtacaactagatagaagtagttccagtgttctatagcactataggatgactacagttaacaataacatattatataatttcaaatagctagaaggagaatattgaatgtttctaacccaaagaaataaatatttgaggtgatggatatgcgaattacc

SEQ ID NO: 589277 - DNA, 450 bp, Homo sapiens
gtcaaattatccctctttccagatgacatgaccatacatatagaaaaacctaaatactccatccaaaaactaataaattcattaaaattgcaggacactgaatcaacatagaaaaatcagtagcatataccagcaacgaactagctggaaaaaaaataaagtaattccacttagaatagctacagaataaaataactacgaataaatttaaccatagagttgaaagatctctaaattggaaaytacaaaacaccaatgaaagaaattaaagaggacataaacaaatggaaagatatcccaagctcatggattagaactaatagtgttaaaatgaccatacttcccaaagtaatctacaaataaaatgcaatcccaatcaaaatgccaatgatattcttcctagaaacagaaaaaccaatccaaaaattcacatggaaccacaaaagacac

SEQ ID NO: 589278 - DNA, 366 bp, Homo sapiens
  misc_feature 361, 362, 363, 364, 365, 366: n = A,T,C or G
gcatgcaccatcacatctggctcatttttttcatttttagcagaaacaagatctcactatgcctcctaggctggtcttgaactcctcrcctcaagtgatcctcgtgcctcagcctcccaaagggctaggattataggcatgagccacttgatagatacataggcatgagccacttgatagatacattactaatttccccaattacacattaaatttagtaactgaataatgccactgaaattctcattttggggggaaaacttagcaagagacctaataaaatataaagttaaaattgtcgttactgattcactaagtagaacctaggtgaaaatattttccaaaagaagaaaaattcaannnnnn

SEQ ID NO: 589279 - DNA, 586 bp, Homo sapiens
ctacatcacttgaggatagacaaagattttataggcagtacacagaaagcaacaattatgaaagaaaaaaacaataaattagaattcatcaaaactaaaaagtgtctgattatcaaaagatactgttaataaaaatgagtaggcaaaccacatatctggcagaaaatattccaaatacatatatctgccaaagaactggtatttagggcactgaaataattcctacaactccctaacaaaaaaacaaacaacctaatttttacaataggtaaaaggctggaatatayacttcacaaaggaagagataaaaatagccaatgagtatgtgaaaaactgttcaccatcattcatttttcagagaaattcaaattaaagtatccacacacaaaccaagaatgactgaaatttttacatggacaacaccaaaatttggcaaaaatgcagagcaaccaaaagcctcatttttggtaggaatgtataatagtataaccactttgaaataaatgttaattgtttcttatataacaaaatatacaccaatcctattgtattagtccattctcatgctgctatgaagaaatgccca

SEQ ID NO: 589280 - DNA, 559 bp, Homo sapiens
ttaactgactcacagttccacatgggtggggaggcctcaggaaacttacaatcatggtggaagggaagcaaacacatccttcttcacatggcaacaggagaaagaaatgttgagtgaagtgggggaaagccccttaaaaagctatcagatcatgtgagaacttgctcattatcatgaaaacagcatgggggaacaactcccataatctaatcatctcccacagggtcctgcctccaacacataaggattacaattcggattaaaattcaagatgagattttgggtggggatacaggcaaactgtatcattctgccccggcccctcccaaatctcatgtcctcacatttcaaaacacaaccatgcctttccaacagtctcccaaagtcttaactcattccagcattaaccaaaagtccaagtccaaagtctcatctgagacaaggcaagtcccttccacctatgagcctgtaaaatcaaaagcaagttagttmcttcctagatacaacggaggtacagactttgggtaaatacacctgttgcaaatgggagaaattggcc

SEQ ID NO: 589281 - DNA, 365 bp, Homo sapiens
taaacatttattatattatgttctataaaatatagttggtataatttcagaaacctgtactttaaaaaaagaaatataagaaattagatgggttcatttgtttctaaatatggtcatcattttacaaattcaatttaacttgacatttatttgtaacttttaactgtaactttgtatctatgatacaaagcaggtgatgcccgctattaagtttgtgtcataggaatccaaaagcaagagtaactccaactagaaaaagcaagagggtgkgggggaagcaggaggcgggtatttcagctgcgccttgaatggcctacttggcatttcagtattttagtgggcagaagtaaggattgttagtggga

SEQ ID NO: 589282 - DNA, 540 bp, Homo sapiens
gaggttcagagaaactgagactagaatgctgcaataaaatctagctgtcttctgttgcttgactttacctaaaatctcctcaatggtgtaaatattttttctgaatatattacatagaagaacctttatcattgaaaatccatatgatcrctagcaatgagtttcaatgttaatgaagtgctgactatttgcatagtatataggaccagtcctattttttattacttacaatatggatagcatttagaggttgttctcaaggcattaacagcttttgggtaaaaagtcagatttcaaaactagaatgagataaccaggtcttttcctgacacactgatattgaaagggctcctatgtatatatatgtgtgtgtgtgtatatatatatatatatagagagagagagagagagaaagagagagacaaagtctcactctgtcatccaggttggagaacagtggagtgatttcggctcactgcaacctcagtctcccaggttcaagtgattctctggcctcagcctcccaagtagctgggatta

SEQ ID NO: 589283 - DNA, 635 bp, Homo sapiens
ccatttgacccagcaatcctattactgggtatatacccaaaggattataaatcattttactataaagacacatgcacacgtatgtttattgcagcactatttacatagcgaagacttggaaccaacccaaatgcccatcaatgatasagtggataaagaaaatatgttgctgtttttaaaaacactaacatttctttagcctgcattaaggcagtattttacttagtgattcttgtttttactaatgcttaccctaactaatgctgctcgctttttggtatattttccttttgatgaatgaggatctaggcagcagttgctcaaaaaggctatgattgtttaagtggacatctggtacttaaagtggctagaatagaacccttggtcttttatactggaggctgcgcttccattttagttaacggtgtcaataaccctgatgcttaagcaaaggtgaaaatatcattcggctttggttgcattcattccaaagaatcaaagttgtattacagcatgaaaaataaaatatgactcttcttccattccctcccaacaaccctctgaagccggttgagtttttgttccatttttcacaaggcagaggccctcgagtttcccaggtcaaagatttggtc

SEQ ID NO: 589284 - DNA, 590 bp, Homo sapiens
tcagcacactactggatgtcctagctatagcaattagaccagagaaagacataaagaccatctaaattgaaatagaagtcaaactatctttgtttgcaggcaagttaatcttatgcatagcaaaacctaaagactccatgaaaaaaatattagaactgatacatttgataaagttgcaggatggaaaatcaacatacaaaattcagtagcatttctgtatactaaaaacaatctgaaaaagaaatcaagaaagtaaatgtatttacaatagctacaaataaaatacctaggaataaacttaaccaaagtagtgaaagatctctacaatgaaaagtataacacattaatgaaagtaattaaagagggcacaaaaacctggaaagatattccatgttcatggattggaaaatatattgttaaagtgtccatattgcctaaagcaatctgcagattcagtgcatccctatcaaaataccaatgattgtcttcacaaaataatagaaaaaaaattctaaaatgtrtatggaaccacaaaaattccagaaaagccaaatccatcctgagcaaaacaaaactggaggaatcacatt

SEQ ID NO: 589285 - DNA, 586 bp, Homo sapiens
aatttggttgtggaactgctcctgctgggcaactatctgttcttggcattgtttttccaccaaattgaatagctgtaaccacctggtctattaaattataaaatattttagttaaaaataattttttgacttaacatttcacagaacaattcctccagtgtaaaagagccctttttaggtcatgatccatcccaaatcccaagagccatcagcactctcatagctagagtatgctggcgcgccacaccaagagagcagggagttctacagaaggctacgttcagcctcaaggctgggaaactttcagccacagaccacatgcagcaatatacaacatcaggaagtggctatgaaaactaactgcctgcgtaaagcctttcagcatctttccactcctaagctctccttagacggctctgcactgtctgtctcctacgcacctctccacttcatcccagccctctgtcctttgctgrctacgcacctgcctcacgggcatcctctgttcgtgagcatgccaaaattgtctcccacctcacagctgagcacctgatgtgcccatcacctcgcgagctcttgcacagct

SEQ ID NO: 589286 - DNA, 582 bp, Homo sapiens
agtggaaatgtgtgctgttaaaaagaaatagatgaatggttgtgattctcaagtggtttatccataagctctcccttttattttgaaaacagtgtctttgtctaacactcttgcccactggcatagaaagacatgtgtcatcagagttaagagggttgtgtaaacattaacataaaaacaaataaccacccacgtgtactttaacatgtgcccttcagatagagaatggtgttcctaactatgcttgtgacaaaatcttarcttattacagtgaattagtaggatggttttaaatctcatagtcattacaagaatactaaatgtgggccgggcgcagtggctcaagcctgtaatcccagtacttcggaggccgaggcaggcggatcacgaggtcaggagatcaagaccatcctggctaacacagtgaaaccctgtctctactaaaaatacaaaaaattagctgggcgtggtggtgggtgcctgtagtcccagctactcaggaggctgaggcaggagaatggtgtgaacccaggaggtggagcttgcagtgagccgagatctcaccactgcactccagcctgg

SEQ ID NO: 589287 - DNA, 544 bp, Homo sapiens
ggttgtaaaatgttccgtttaacattgtcagttgactccgctcttaggtactataactttattttagtagcttataaacttttattgtcrtaattcacatttgtgccatttttcatctgacatttccagtagctgattgaaatcaggagcatccttgcaaaggagacatagtgaagacttgaggtctagaatgaggctaactaaacttctccagatcgcaggatagctgaacaggagcatgagaaacagtgtgccacatagagtctgatgggtcattcattccctgccattcgtaatgcccacagtgcaccctagttaatactttcataatataaccagctagttagtaatagtgttcaactgctgaagtagtaaaggactcaaaatatttagcattgttcagaattcctccaaatatctcttgcttagctagatgtatttgttcatttgaaagtcattttttagaatttttttgtgtaccagaaaatgtgcattccatgctgcttaagaaaaggaattcataaattagtaggggacaggcaaa

SEQ ID NO: 589288 - DNA, 544 bp, Homo sapiens
ggttgtaaaatgttccgtttaacattgtcagttgactccgctcttaggtactataactttattttagtagcttataaacttttattgtcgtaattcacatttgtgccatttttcatctgacatttccagtagctgattgaaatcaggagcatccttgcaaaggagacatagtgaagacttgaggtctagaatgagrctaactaaacttctccagatcgcaggatagctgaacaggagcatgagaaacagtgtgccacatagagtctgatgggtcattcattccctgccattcgtaatgcccacagtgcaccctagttaatactttcataatataaccagctagttagtaatagtgttcaactgctgaagtagtaaaggactcaaaatatttagcattgttcagaattcctccaaatatctcttgcttagctagatgtatttgttcatttgaaagtcattttttagaatttttttgtgtaccagaaaatgtgcattccatgctgcttaagaaaaggaattcataaattagtaggggacaggcaaa

SEQ ID NO: 589289 - DNA, 544 bp, Homo sapiens
ggttgtaaaatgttccgtttaacattgtcagttgactccgctcttaggtactataactttattttagtagcttataaacttttattgtcgtaattcacatttgtgccatttttcatctgacatttccagtagctgattgaaatcaggagcatccttgcaaaggagacatagtgaagacttgaggtctagaatgaggctaactaaacttctccagatmgcaggatagctgaacaggagcatgagaaacagtgtgccacatagagtctgatgggtcattcattccctgccattcgtaatgcccacagtgcaccctagttaatactttcataatataaccagctagttagtaatagtgttcaactgctgaagtagtaaaggactcaaaatatttagcattgttcagaattcctccaaatatctcttgcttagctagatgtatttgttcatttgaaagtcattttttagaatttttttgtgtaccagaaaatgtgcattccatgctgcttaagaaaaggaattcataaattagtaggggacaggcaaa

SEQ ID NO: 589290 - DNA, 419 bp, Homo sapiens
cgcaggatagctgaacaggagcatgagaaacagtgtgccacatagagtctgatgggtcattcattccctgccattcgtaatgcccacagtgcaccctagttaatactttcataatataaccagctagttagtaatagtgttcaactgctgaagtagtaaaggactcaaaatatttagcattgttcagaattcctccaaatatctcttgcttagctagatgtatttgttcatttgaaagtcattttttagaatttttttgtgtaccagaaaatgtgcattccatgctgcttaagaaaaggaattcataaattagtaggggacaggcaaagkgtaattattctggagcattaggccttgtagacactaaataaaatgtttctatttatccgaaattatcacagtcattttagagacaaagg

SEQ ID NO: 589291 - DNA, 419 bp, Homo sapiens
cgcaggatagctgaacaggagcatgagaaacagtgtgccacatagagtctgatgggtcattcattccctgccattcgtaatgcccacagtgcaccctagttaatactttcataatataaccagctagttagtaatagtgttcaactgctgaagtagtaaaggactcaaaatatttagcattgttcagaattcctccaaatatctcttgcttagctagatgtatttgttcatttgaaagtcattttttagaatttttttgtgtaccagaaaatgtgcattccatgctgcttaagaaaaggaattcataaattagtaggggacaggcaaagtgtaattattctggagcattaggcctygtagacactaaataaaatgtttctatttatccgaaattatcacagtcattttagagacaaagg

SEQ ID NO: 589292 - DNA, 417 bp, Homo sapiens
cgcaggatagctgaacaggagcatgagaaacagtgtgccacatagagtctgatgggtcattcattccctgccattcgtaatgcccacagtgcaccctagttaatactttcataatataaccagctagttagtaatagtgttcaactgctgaagtagtaaaggactcaaaatatttagcattgttcagaattcctccaaatatctcttgcttagctagatgtatttgttcatttgaaagtcattttttagaatttttttgtgtaccagaaaatgtgcattccatgctgcttaagaaaaggaattcataaattagtaggggacaggcaaagtgtaattattctggagcattaggccttgtagacactaaataaaatgtttctatttatccgaaattatyacagtcattttagagacaaa

SEQ ID NO: 589293 - DNA, 532 bp, Homo sapiens
cctgcatttctgctttggatcttcaagtatctcactatcaactccatcaaacactcaattttgtttattttaactgtaatcgatagtcttacattgtattagttgctatgagtatgaggagaggaaagatcaaaagttgattacaataagaatctcataatcagaggttaaaaaacatagatatatgtaaataataataatgtaacacagaatacaccatagagagaaaccaattacaatgtatattcagctgagaaagaaatcgcatattgtgggtgggagtcaagggggacctggaggaacttcatgaaagaacagtattagaaaaaggtttttagcaattaggaattttttaaaaagacacagagacaataaagaagtcaaacatgaytaaagttgagcatatttgtggaggagtaaagagagacaaatttatgtggttgaaatatataaaaatgctgttcttgtaggtcaaaattgtatgttggggcttaaattgtagatgatcttgaatgtcagaaaaagtcgggac

SEQ ID NO: 589294 - DNA, 600 bp, Homo sapiens
gccttggccttccaaagtgttgggattacaggtgtgagccaccacacctggcctattcttgcaattctggaagatttagggggctggcaggagacaagactgagattgtttaggccatcctgttgctgacacaatcctggcacttaagcgggaatgcagtggcctaagtgtaaggcaacatatctctcataccatttcaccaaaacaaaacaaaaaacacttctgagtgaatgtctggccatcttattagcatcttattaatctgttttgacattatcctaaaaatatgcttttcctcaaaaaaaaaaaagtcgtacaacactgtgaatgtattaaatgccattaaattgtacacttcagaatggttaactttatgttatataaattttgccccaatttttaaaaatgaaaaaaagagtatatgacaagaaagataactacaggattaccaaagccattatattttccctcatttgtatgtacatgacacactggttctataatgtttcccaagaatagatcytgaatcctaagactgctgtgatgggactctgagagaagagattataatgtcagaatacttagctcctaggatgtgat

SEQ ID NO: 589295 - DNA, 555 bp, Homo sapiens
ttttagcttcagtaggcaaacggaaaagaaaaatacaggcttttttcctttcattagtcatcactgacagaaggcctccaagtgaccctggtgccacaaatgtttaggatctttagggaagaaaggagtctagaaaaataacaatattccttcaccaatctcgagaagaatctctccaaatctctctgcagacattttttcttcatatcctttaacaaagccattcttaacatgtacatgaaatcttagttgaagaaacaatgtgattacataattacacatacggaaaaacttggtattctattatctctccaaatttttttttaactaaaactagacttacagtttttgttgaaaatgttttgtgtttctacctccgaagaatatgaaaaaaagaaaatgttttgctctgaagctgagttaagaagaagatagccaagacgtgggttgatggggrctgtattttaaggctgaacagttttgtttactattgtttattatttaatatattcttcccagtctccccacccccaccaaaggaaaagcgaaaaattt

SEQ ID NO: 589296 - DNA, 542 bp, Homo sapiens
gcagaacaattcttccccgaatgcaagaacscagaaaggtacatttttattttcaatgctctgatattagtacaatttatattttgtgtctgttttaaggcatgtaaaagaatagtggcatttttgcagaaaataagccataaattcagccataaatatttataaagaaagattatgaggcagcatttccttttctccagtgagtagaaatactcacttaaaatcattctaccctctttctcccaattaacagaggtttcctactgctgtgagatgataccaaataaataattttactattctaaaaaagcagttgtgtatcagcgatgttcaacacatgtgtagagtgtatttttgtttgttcatttgctttatatgggaacacaattagggaggagaggctaacccttgtctgtgcatgtgtgtatgactgactcagttattaaaaatatacatttataagcctgtaaggatgcgtaaatatgttaagcacatatatgtttatactgttgaaatatgtgaactaattttcatttttaaaa

SEQ ID NO: 589297 - DNA, 519 bp, Homo sapiens
ttataaaaatcattttaatttttctattacagtcctggagcagaacaattcttccccgaatgcaagaacccagaaaggtacatttttattttcaatgytctgatattagtacaatttatattttgtgtctgttttaaggcatgtaaaagaatagtggcatttttgcagaaaataagccataaattcagccataaatatttataaagaaagattatgaggcagcatttccttttctccagtgagtagaaatactcacttaaaatcattctaccctctttctcccaattaacagaggtttcctactgctgtgagatgataccaaataaataattttactattctaaaaaagcagttgtgtatcagcgatgttcaacacatgtgtagagtgtatttttgtttgttcatttgctttatatgggaacacaattagggaggagaggctaacccttgtctgtgcatgtgtgtatgactgactcagttattaaaaatatacatttataagcctgtaaggatgcgtaa

SEQ ID NO: 589298 - DNA, 579 bp, Homo sapiens
tctagtcaatgagctctgtagtcagtgagactacaattaattctagctttgcaagttgtaatatgtgacctgtactaaattacttagtgtctactaacctagtttactaatctacattgggaaaaataatttataaagtataatgtatgtaraaaactaaacacacaacctggcacatattagcactgaatacataatagatatttcaactatttttaacacaattgccattttattatttctgatttgcattagagtgtgttaaaataactcattaattaggcgtctcatgtcagtgtggtacatcttttttgcaatgtttggttcaattgttttaagtcttccaattgtttataattaaggtcagatttgcattttatggaaatgatttcatccttacttttattaaaaattaaaactgctttcatgaaatctaggtgtgtgattgagaattaatgtttgacattcacaatttgatgtatccatattaaaaatttatttttaaagtttggtctaaatataatatacaaaatgtaatggttacaaaatccaaaattaattgttcattgtcatgatggt

SEQ ID NO: 589299 - DNA, 579 bp, Homo sapiens
tctagtcaatgagctctgtagtcagtgagactacaattaattctagctttgcaagttgtaatatgtgacctgtactaaattacttagtgtctactaacctagtttactaatctacattgggaaaaataatttataaagtataatgtatgtagaaaactaaacacacaacctggcacatattagcactgaatacataatagatatttcaactatttttaacacaattgccattttattatttctgatttgcattagagtgtgttaaaataactcattaattaggcgtctcatgtcagtgtggtacatcttttttgcaatgtttrgttcaattgttttaagtcttccaattgtttataattaaggtcagatttgcattttatggaaatgatttcatccttacttttattaaaaattaaaactgctttcatgaaatctaggtgtgtgattgagaattaatgtttgacattcacaatttgatgtatccatattaaaaatttatttttaaagtttggtctaaatataatatacaaaatgtaatggttacaaaatccaaaattaattgttcattgtcatgatggt

SEQ ID NO: 589300 - DNA, 579 bp, Homo sapiens
tctagtcaatgagctctgtagtcagtgagactacaattaattctagctttgcaagttgtaatatgtgacctgtactaaattacttagtgtctactaacctagtttactaatctacattgggaaaaataatttataaagtataatgtatgtagaaaactaaacacacaacctggcacatattagcactgaatacataatagatatttcaactatttttaacacaattgccattttattatttctgatttgcattagagtgtgttaaaataactcattaattaggcgtctcatgtcagtgtggtacatcttttttgcaatgtttggttcaattgttttaagtcttccaattgtttataattaaggtcagatttgcattttatggaaatgatttcatccttacttttattaaaaattaaaactgctttcatgaaatctaggtgtgtgattgagaattaatgtttgacattcacaatttgatgtatccatattaaaaatttatttttaaagtttggtctaaatrtaatatacaaaatgtaatggttacaaaatccaaaattaattgttcattgtcatgatggt

SEQ ID NO: 589301 - DNA, 511 bp, Homo sapiens
gggggcgggtctttcctgtgctgttctcgtgatagtgaatgaatctcacaagatctgatggttttattaagggggagtttccctgcacaaattctctcttgtatgtcacyatgtaagatatgcctttcgccttttgccatgattgtgaggcctccccagtcacatggaactgagtccattaaacctccttttctttataaattaccctgtctcaggtgtgtccttatcagcaatgtgaaaatggaataatacgcccctcctccttgattttttgtagtaatttcaggacaattgataccagttgtttttgtacatctggtagaatttgactctgaatccatctatttccagggcttttattggttggtattttttttattatgcattcaatttcagagctcaacactactctatttaggatttccaatctctttctgattcaatcttgggagattgtatatttccaggaatttatgcatttcctctagattttctaatctgtgtgcataaa

SEQ ID NO: 589302 - DNA, 511 bp, Homo sapiens
gggggcgggtctttcctgtgctgttctcgtgatagtgaatgaatctcacaagatctgatggttttattaagggggagtttccctgcacaaattctctcttgtatgtcaccatgtaagatatgcctttcgccttttgccatgattgtgaggcctccccagtcacatggaactgagtccattaaacctccttttctttataaattaccctgtctcaggtgtgtccttatcagcaatgtgaaaatggaataatacgcccctcctccttgattttttgtagtaatttcaggacaaytgataccagttgtttttgtacatctggtagaatttgactctgaatccatctatttccagggcttttattggttggtattttttttattatgcattcaatttcagagctcaacactactctatttaggatttccaatctctttctgattcaatcttgggagattgtatatttccaggaatttatgcatttcctctagattttctaatctgtgtgcataaa

SEQ ID NO: 589303 - DNA, 555 bp, Homo sapiens
tgtttgaggtgctcaaaagacttagcttaactaaatctgtaattgtagtttaaatttgtataggacttaagtaattttgtataggacttgagtaattatgttgaaatcactattcaaatgtttgaatagcttkctttcttttttttatttttttaagacagggtttcttgctctgtcacccaggctggagtgcaatgggcgatcttggttcactgcagcctccacctcccgacttcaagtgattctcctgcctcagtctcctgagtagctgggattacaggcatgggccaccatgcctggctaatttctgtatttttagtagagatggggtttcaccatgttggctaggctgatctttgaactcctgtcctcaagtgatccgtccacctcagcttcccaaaatgctggggattacagggcatgagccaccaggccaggctcaaattctttttattagttaattagttaactatttgtgtgtaacaaattactaaattatcccacaacttatgctttttttgggtcaggaatccagccatgggtgactctgactta

SEQ ID NO: 589304 - DNA, 555 bp, Homo sapiens
tgtttgaggtgctcaaaagacttagcttaactaaatctgtaattgtagtttaaatttgtataggacttaagtaattttgtataggacttgagtaattatgttgaaatcactattcaaatgtttgaatagctttctttcttttttttatttttttaagacagggtttcttgctctgtcacccaggctggagtgcaatgggcgatcttggttcactgcagcctccacctcccgacttcargtgattctcctgcctcagtctcctgagtagctgggattacaggcatgggccaccatgcctggctaatttctgtatttttagtagagatggggtttcaccatgttggctaggctgatctttgaactcctgtcctcaagtgatccgtccacctcagcttcccaaaatgctggggattacagggcatgagccaccaggccaggctcaaattctttttattagttaattagttaactatttgtgtgtaacaaattactaaattatcccacaacttatgctttttttgggtcaggaatccagccatgggtgactctgactta

SEQ ID NO: 589305 - DNA, 555 bp, Homo sapiens
tgtttgaggtgctcaaaagacttagcttaactaaatctgtaattgtagtttaaatttgtataggacttaagtaattttgtataggacttgagtaattatgttgaaatcactattcaaatgtttgaatagctttctttcttttttttatttttttaagacagggtttcttgctctgtcacccaggctggagtgcaatgggcgatcttggttcactgcagcctccacctcccgacttcaagtgattctcctgcctcagtctcctgagtagctgggattacaggcatgggccaccatgcctggctaatttytgtatttttagtagagatggggtttcaccatgttggctaggctgatctttgaactcctgtcctcaagtgatccgtccacctcagcttcccaaaatgctggggattacagggcatgagccaccaggccaggctcaaattctttttattagttaattagttaactatttgtgtgtaacaaattactaaattatcccacaacttatgctttttttgggtcaggaatccagccatgggtgactctgactta

SEQ ID NO: 589306 - DNA, 609 bp, Homo sapiens
gatcagcatagtgattttaatcttaaactctacaataaatattcattttgctctaattctgagggctttgtcatgctcactatatattctgccttttgattttgtatagactttttatggcatactgttgcagtaaccctgggagttgctggctggcatttgcaggcttacgatatatgcatgagtatcagctacacatatttcatatgatagcaataagacaggatgaaaaatgagacactataactgtggaacctctacgaaactttgtaaactataaggttctagagacatgttagcaatcataatggtactgatgatattgatgaaaatgattttattatgttgttatcatttagtttttgtttatcatttagccacacaaaagagcatatagytgtgattacacaaaaatttcagatacactacactttacttaccagtgaaattttaaaaataaaattttaaaataatttattttaataaaatttaaaaatatgttagtgtatatatatactaacacctattttacatatgtatactaacacttattttatactaaaaataagctaatatatatatactagtataaattagtatgtatgtagt

SEQ ID NO: 589307 - DNA, 588 bp, Homo sapiens
gctcatgtaccatttagcttgtgttttaaaaatctactttttctgccctccctatttttaactagatgatgttttaaaaattacttttccctctctatatagtttgatttaagcattagtcatttacaacaaatattmatattaaaatgcagaccgttaggattggaaaataaatcaatgaacaatataatgagtggtttttatataatttcaatctctggcgtggtgatatagggcaatattttttaatgagttattcgtcccagagacatatatttcaatgagagttatgtgattaatttagttttaaaaaactgaatgagagaattttaagaactatcaagaaagtaagttgggaatttaactgtgagaattgatgtcaattacaatgaagtggaaatgtattttctcagaataattagtgacaaatacattaaattcctattggtaagattattattttaaaaatttatcgtcatattagcagtgatatatagaggtatatgataaagaagtacataatcccaagttttagccaccctgtgtaaatgtagaagttaaacatgtaagagactctgaaaaaggtat

SEQ ID NO: 589308 - DNA, 588 bp, Homo sapiens
gctcatgtaccatttagcttgtgttttaaaaatctactttttctgccctccctatttttaactagatgatgttttaaaaattacttttccctctctatatagtttgatttaagcattagtcatttacaacaaatattcatattaaaatgcagaccgttaggattggaaaataaatcaatgaacaatataatgagtggtttttatataatttcaatctctggcgtggtgatatagggcaatattttttaatgagttattcgtcccagagacatatatttcaatgagagttatgtgattaatttagttttaaaaaactgaatgagagaattttaagaactatcaagaaagtaagttgggaatttaactgtgagaattgatgtcaattacaatgaagtggaaatgtattttctcagaataattagtgacaaatacattaaattcctattggtaagattattattttaaaaatttatcgtcatattagcagtgatatatagaggtatatgataaagaagtacrtaatcccaagttttagccaccctgtgtaaatgtagaagttaaacatgtaagagactctgaaaaaggtat

SEQ ID NO: 589309 - DNA, 584 bp, Homo sapiens
gtctcatgcaatgctgcacaatgaaggccaggataacctgtggatacctaataatataaaggtattaagtgaaacctaataatataaaggtattgagacaccctggagagcctcttccctctttgagggaataaagttgctacttccagttcttcagcatgccctccttaattcacaaaggaaatgcatctctaagtggggagtgtcagtyctcagggatgggcaagacactgttcttgagaagatgaacctggtgcatgctcctcaaatctcacaccacaaaaaatcttctacttttacctaaaaaaatctttgatcctataaaaacaacagaaaatttttggaatcataaaaatgttggaaagaaaaaaaaaggaatcattagccactactattttctgttttatttttaaagtaatatcaggttgttctaccaatatttttaaaaactactacattagtagtcaaatatattacagattatctaagaaacatgtaacttatctaagaaacatgtatctagaaaaatcagggttttaagaaggctttgcctggtgtagttagtgcagcaaaaggaagacaag

SEQ ID NO: 589310 - DNA, 606 bp, Homo sapiens
tcaaaatagctgttttgaggaaatgcaaagtaattcaagataacagagaaggagttcagaattctatcaaataaatttaacagactgaaataattaaaaagaatttagcagaaattctggagttgaaaaatgcaattgacataatgaaaaacacatcagtcttttaatagcagaattgatcaagcagaagaaataactagtgagcttgaaaacaggctattagaaaatacatagtcagaggaaacaaaagaataaaggacacctacaaggcctggaaaatagcctcaaaagggcaaatctaagagttattggccttaaagatgaggtagagaaaaagatgaggtagaaagtttattcaaagggatagtaacagagaacttcccaaatctagagaaagacatcaatatctgaatacaagaaagttacagaacaccaagcagatttaacccaaggaagactacataaaggcatttaataagcaaacccccaaaggtcaaggacaaagaaaggatcctaaaagcagcaagagaaaagaaactaataacaaaaaatggagctccartatgtctggcagtagacttttcagtggaaaccttacagactagg

SEQ ID NO: 589311 - DNA, 608 bp, Homo sapiens
ctttaacccatcttgagttaattctgtaagtggtgtaaggaaagggtccagttttattattctccataaggatacccagctatcacatcaccattttctaaacagtgagtcctttccatattccttatttttgtcaactttgttgaagatctgatggctgtaggtgtgtggctttacttctgggttcttcattctgtagcattggtctatgtgtttgtttttgtaccagtaccatgctatttttggttactgcagccttatagtataatttgaaatcaagtaatgtgatgcctcttgatttgttccttttatttaggatggctttggctttcaacctcttttttggttccatacacacattttgttttaacataatcttaattatagattttaaaaygttttattcaactgtgctggtctttttcttccattaatatgttgatcatttctaaacttttcttaatacgtggcaatggttcaacaaaataaagaggttctgttcttatgaatatcatatatttataggatatcttaattcaacttttcaaatgagcattattcaagcttataactttgacacaaaaagttgataatgctggatgaaaaag

SEQ ID NO: 589312 - DNA, 608 bp, Homo sapiens
ctttaacccatcttgagttaattctgtaagtggtgtaaggaaagggtccagttttattattctccataaggatacccagctatcacatcaccattttctaaacagtgagtcctttccatattccttatttttgtcaactttgttgaagatctgatggctgtaggtgtgtggctttacttctgggttcttcattctgtagcattggtctatgtgtttgtttttgtaccagtaccatgctatttttggttactgcagccttatagtataatttgaaatcaagtaatgtgatgcctcttgatttgttccttttatttaggatggctttggctttcaacctcttttttggttccatacacacattttgttttaacataatcttaattatagattttaaaatgttttattcaactgtgctggtctttttcttccattaatatgttgatcatttctaaacttttcttaataygtggcaatggttcaacaaaataaagaggttctgttcttatgaatatcatatatttataggatatcttaattcaacttttcaaatgagcattattcaagcttataactttgacacaaaaagttgataatgctggatgaaaaag

SEQ ID NO: 589313 - DNA, 497 bp, Homo sapiens
cctttatctgagatctgtgtgccagtggatggcattttctacccagtgggggtccaggtttatgaaaaacaactcaggaatatatgttaagatattacctttagctaccaagggaatcaaacatcttgaggctcaaatttccttggctgttgttctaagttattatcacctttttgcttattatcaggttgctcatttacttaccaaagctagctaggtacctggaaatttccttgaaggaactcaaaatttttytttattttcatgcatggggagtggggagctatcttaggtagcaggcccctaagagggatccctgctccatgttagtgacagtgtaccacacagggttaataattagaatttcgctcttcagtacagagagaatttggtacctgaagtccaggtcaggaagcagcagaaaccatacagtttataaagtttataaaagaaaccatgcagtttatttcagtgtcctgaaaacatcagcagtatca

SEQ ID NO: 589314 - DNA, 550 bp, Homo sapiens
aatcttttttttctcttttttgagatggagtctcgctctgttgctcaggctagagtgcagtggtgcgatcttggctcactgcaacctctgcctcccgggttaaagcaattcttctgcctcagcctcccaagtagctgggactacaggtgcatgccaatatgcccaactaatttttgtatttttagtagaaatggggtttcaccatattggccaggctggtctcaaactcctgaccttgtgatctgcctgcctcagcctcccaaagtgctgggattacaggcgtgagccactgcgcctggcctgacaaagcaatcttaaagctactacaaaggtatactaatcaaaacagcatggcactggcataaaaacagacatagaccaatggaagaaatataaagagagctcagaaataaatccacataattacggttaactgatcttccacaaaggtracgagaacacacaatggggagagaacattttcttcaataagtgatgttggaaaagctggatatccacatccaatataataaaattggacccttacttc

SEQ ID NO: 589315 - DNA, 532 bp, Homo sapiens
tataaaagaagagatttactacagttaagagctcagattttagtcaggtagacctgggttcaaatcttccctctgcccctattaaatttctgagatccaggataagacaatttacttaggagccttgtttaatattctttatatccttctgccagttttacatatattccacctttgttgtaaccttcatttctgttgtttaatgtctattattgttttcattgcttattgtccatatgtcattaaatgtatatgtcctctctttttatctgtaatttccatcattgtgtcaaattcagaattaatttctggtacctcctggtgcttcaaaatggaagggctgggcatttcagtattacttcaactgtcatttccatacatgctaaagaatatttcatcaataattattttttcaaataaattgtcacatttacagtatttctgtatacaataaatgtttgtggagttcatgtatatgacccatgtcaaaatayggctccttctaatgatcagggaaagtttaaaatggctg

SEQ ID NO: 589316 - DNA, 558 bp, Homo sapiens
catcccaggaatgaagcctatttgattatggtggactcagtttttgattccgtttgcaagtattttgctgaggatttttgcatcaatgttcatcaaggatattggcctgaagttttcttttttgttgttgtatctctgccagtttcgggattaggatgatactggcctcatagaatgagttaaggaggagtcccttctcaattttttggaatagttttagtagaaatggtaccagttcttttttgtacatctggcagaattcagctatgaacccatctagtcctcagcttttttttggtttgtaggctattcattactgattcagtttcagagctcrttattggtttgttcaggggagaaatttcttcctggctcagtcttgggagaatatgtgtgtccaggaatttatccatctcttctaggttttctagtttgtgtgcatagaggcgttcataatagtttgtcatggttatttttatttttgtgggatccatggtaacatctattttgttgattctaattgtgtttatttggatcttctcttgttttttattagtc

SEQ ID NO: 589317 - DNA, 484 bp, Homo sapiens
ttgcagtgggccaagatcacaccactgtactccagcctgggtgacagagcaagaatccatctcaaaaaaaaagagagaaagagagagagagagagagagagaaaaaaaaaaagagagaaaaagaaaatgatattattaacagttcacaaggtactgagcatcttggtaatagaaatctcctgtcaccttggtactggctgacatgtggactctgacagaagagtgggtatccatgccatagatgcttcagtggtgtcatcacaggcatagttttagtctcacctgacacaaaatrtgattatagttttaaagaataatcatgaaggcaagtaatttacatttcagtctaataaaaacactaagaccttccttagccaagcagctgaaatcctgctaatgagattcatcattggcctgcttagttacctcatacatctttatctgctgatttcagctctcttcacatgcagaactacacatcatt

SEQ ID NO: 589318 - DNA, 520 bp, Homo sapiens
ttttttcccattccttttattttttcctgtctttttagttacaactctttgcattactttttttagtgttcactctaactggtgaaactccccaatatggtagccactagaaaaatggggctgcttaaatttaaatttacatcaatcaaaaattaaataactgcacaaatttagtttctagttgtggattttctctctctccctctctctctctctctctctctctctctctctctctctctctctccctctctctctctctctmtatatatatatatatacacacacacatatgcatatatacttacttatttgttatatgtaggatcataacctcctgcaatgggatatgtgatagcagacccaattgcaaaaaaaaacaatcttaatgctcatccctgagcctagtgtcatccttcaaactgaagtggataaaatctatcctcaccttctccagtttccctttctgctcttcctcccctggtttcccctgtgaactcctcttctagatgtcacaaag

SEQ ID NO: 589319 - DNA, 190 bp, Homo sapiens
gctgtatccttagtcttttccaaatacaagttgctgaataaatgtttcttaaagatgactgatatgattaggctttgtgtccccacccaaatctcaccttgaattataatccccataatccccatgtgtcagggaagagaccaggtggagggaattggatcatggcrgcggtttcccccatactgttcct

SEQ ID NO: 589320 - DNA, 554 bp, Homo sapiens
gccactgctgttcccagtagaatattttttcttaagtgtctgagtttggtttatcattttattctgaataaattgcatttcgtcagagatgcctgtgaccattctacttaagatataaatcttttcatcactctctatccttttacctggatatacttttttcctgttttgatttcttatcacctgacacgcatatttgttgtttactgatttaygcattgtcttccctctagaatttaaactccaaaaaagaaaaaaaaacagagactattttgttcattgtacagcctagtacctacaatgttagttggcccttaagtgggtggttaataaatgataagtaaatacatgaaatatataatctgtcactcaagaaaatcaacaacatgtttggccagaggaaacaagcacaggggccccatatcttctttttatcactgcataccccaagtttgtctttggaaagttccttaatacataatttttgtatttatacttttattacccaagtaaccagttatacgcagtctaaatagctagaaattgctgataat

SEQ ID NO: 589321 - DNA, 439 bp, Homo sapiens
agctgtccactttcgggtggtgtctgcatattgtgcagaaccatctgtgaaccaggtcctagtcttctcttcctctgtcagctgatcatagggaactccccatgaggccatcagtgcaggttgggggagagaaggcagggtggcaagagtggagaccatgggcatttgagccacttcctcgtgtaacttacttgtgccttcaggacctgcttgagcccaatcacatatataccactttcatttggtgatggaatgctgctgtgcatgacccactttatggctagatgggtccraaagcatgcagttcattataggtagttcaggtcgcgtggtgacttgataacccatagtcaaatgttcattttctaccaaaccccagtaacagtccaaaagctgtctctcaaaaggagagtagttatctgcagaagatggcaggggc

SEQ ID NO: 589322 - DNA, 417 bp, Homo sapiens
gtggtgtctgcatattgtgcagaaccatctgtgaaccaggtcctagtcttctcttcctctgtcagctgatcatagggaactccccatgaggccatcagtgcaggttgggggagagaaggcagggtggcaagagtggagaccatgggcatttgagccacttcctcgtgtaacttacttgtgccttcaggacctgcttgagcccaatcacatatataccactttcatttggtgatggaatgctgctgtgcatgacccactttatggctagatgggtccgaaagcatgcagttcattataggtagwtcaggtcgcgtggtgacttgataacccatagtcaaatgttcattttctaccaaaccccagtaacagtccaaaagctgtctctcaaaaggagagtagttatctgcagaagatggc

SEQ ID NO: 589323 - DNA, 631 bp, Homo sapiens
atttgtatgtcttcttttgagaatgtctgttcaagccctttgtgtacatttaacagggtcagtttcttgttattaagtagtttgagttccttgtatattttcagtattagcccctgatccagtgaattatttgcaaatattttttcccaatttgtagactgtcttttcactctattaattgtttcctttgctgtacagaagcattttagtttgatgtaatcccatttggtattgtaaactagtagccatattgaaaaacagtacggaagttcttcaaaaagctaaaagtaggattaacatatgatccagcaatcccactattgggcatatacccaaaaagattgaaataagtatgccaaagagatgtctacactcccatgttcattgcagcattattcactataaccaagataaagacaaatctgacatgtctatcaatggatgacttgatttttaaaatgttgtatagacgcagtagaatactattccgcttttaaatacagtagactctaacatttgcaacaacactgatgaatctagaggacataactttaagtgaaataagccacacatggaaagacaaatactgtataatgccacttatatgtsgaaatttaaaaagccaaactct

SEQ ID NO: 589324 - DNA, 640 bp, Homo sapiens
taaagatggggaagctggggcacagagaggttaagtagcttgtctaagaccacacagccagccaaggctgcactcacacccaggcagtctgtctagggagcctgcggacttttctgctgtgttgcagtggtccaattatgattgtgccattgatgcagcaataattagcggctggctaattattttattttttgtagagacgaggtctcactttgttgcccaggctggttttgaactcctgggttcaagcaattctcccaccttggcctcccaaagtgctgggattataggcgttgagtcactgtgcctggctttatgagaattatccatgttgttgcatggcattcattctcattgatgtatatagcattccactgtgatttatttattcattctaactgttgagggcatttgggttgctgccgatctctggcaattacaaatagtgctgctaggaacattcctgtacaggtcatttggagaacatatgtatgcatttctgttgggtatgtaggccaggacctgaagggcaaggtcataaggtatgcatatgtttatgctaaatactgacagttttcygcaatggttgtatatttgaatcatgagattgtatttctctttctatttttttgtagagacg

SEQ ID NO: 589325 - DNA, 576 bp, Homo sapiens
gtgacccgcctgcctcagcctcccaaagtgctgggattacaggcgtgagccaccgcacccagccctttgcccaattttagtcagttccttgctttaaagaattacctcaaatacccttacatcattttcccctttgtgacactgttgagacaccaccgaactttgttctcccttgctgcaattggccttataaactcttactttgcgtgatcaatgggtttctctggtagtctttgcaagaaagtcaaccattaatagatacgctgatttcatgacatgtttattttaatttttttattttcttgtaactttatcgtcacagaatgtggcatatttattttttaaaagggagaggctcagcggatccagtggctcatgcctgtaatmccagcactttgggaggccgaggccggtggatcacttgaggtcaggagttcaagaccagcctggccaacatggcgaaaccccatctccactaaaaatacaaaaattagccaggcgtggtgacgcatgcctgaaatcccagctactcaggaagctgaggcagtagaattgcttgaacccgggaggcagagg

SEQ ID NO: 589326 - DNA, 576 bp, Homo sapiens
gtgacccgcctgcctcagcctcccaaagtgctgggattacaggcgtgagccaccgcacccagccctttgcccaattttagtcagttccttgctttaaagaattacctcaaatacccttacatcattttcccctttgtgacactgttgagacaccaccgaactttgttctcccttgctgcaattggccttataaactcttactttgcgtgatcaatgggtttctctggtagtctttgcaagaaagtcaaccattaatagatacgctgatttcatgacatgtttattttaatttttttattttcttgtaactttatcgtcacagaatgtggcatatttattttttaaaagggagaggctcagcggatccagtggctcatgcctgtaatcccagcactttgggaggccgaggcmggtggatcacttgaggtcaggagttcaagaccagcctggccaacatggcgaaaccccatctccactaaaaatacaaaaattagccaggcgtggtgacgcatgcctgaaatcccagctactcaggaagctgaggcagtagaattgcttgaacccgggaggcagagg

SEQ ID NO: 589327 - DNA, 576 bp, Homo sapiens
gtgacccgcctgcctcagcctcccaaagtgctgggattacaggcgtgagccaccgcacccagccctttgcccaattttagtcagttccttgctttaaagaattacctcaaatacccttacatcattttcccctttgtgacactgttgagacaccaccgaactttgttctcccttgctgcaattggccttataaactcttactttgcgtgatcaatgggtttctctggtagtctttgcaagaaagtcaaccattaatagatacgctgatttcatgacatgtttattttaatttttttattttcttgtaactttatcgtcacagaatgtggcatatttattttttaaaagggagaggctcagcggatccagtggctcatgcctgtaatcccagcactttgggaggccgaggccggtggatcamttgaggtcaggagttcaagaccagcctggccaacatggcgaaaccccatctccactaaaaatacaaaaattagccaggcgtggtgacgcatgcctgaaatcccagctactcaggaagctgaggcagtagaattgcttgaacccgggaggcagagg

SEQ ID NO: 589328 - DNA, 576 bp, Homo sapiens
gtgacccgcctgcctcagcctcccaaagtgctgggattacaggcgtgagccaccgcacccagccctttgcccaattttagtcagttccttgctttaaagaattacctcaaatacccttacatcattttcccctttgtgacactgttgagacaccaccgaactttgttctcccttgctgcaattggccttataaactcttactttgcgtgatcaatgggtttctctggtagtctttgcaagaaagtcaaccattaatagatacgctgatttcatgacatgtttattttaatttttttattttcttgtaactttatcgtcacagaatgtggcatatttattttttaaaagggagaggctcagcggatccagtggctcatgcctgtaatcccagcactttgggaggccgaggccggtggatcacttgaggtcaggagttcaagaccagcctggccaacatggcgaaaccccatctccactaaaaatacaaaaattagccaggcgtggtgaygcatgcctgaaatcccagctactcaggaagctgaggcagtagaattgcttgaacccgggaggcagagg

SEQ ID NO: 589329 - DNA, 517 bp, Homo sapiens
tcatatcccttcctggctgccacttctagggagaagttaaattaatacaccttgtataaaacatgaaagactcactctgacatctaagtaaaatgataatgttgctatggagtttatactcaaatcatcatgaatttgtctgaacaatgctcaaataataatagtattttccaagatttaataagcatttactctgtgccacatactcttttaggcactttgcatcatcatttcctttcatgctcacgtctaccttatgaaatagtaatagtagtawtcctgtcttagagctgaagtaaatgaggcttaaagattttaggtatctcatggttcatgcctgtaattctgccactttgggaggccgaggtgggcgggatcacttgaggccaggagttccagaccagcctggcccaacatggtgaaaccccatctctactaaaaatataaacattagctaggtgtggtggtgggcacctgtaatgccaggtacttgggaggctgaggcaggagaatcgct

SEQ ID NO: 589330 - DNA, 517 bp, Homo sapiens
tcatatcccttcctggctgccacttctagggagaagttaaattaatacaccttgtataaaacatgaaagactcactctgacatctaagtaaaatgataatgttgctatggagtttatactcaaatcatcatgaatttgtctgaacaatgctcaaataataatagtattttccaagatttaataagcatttactctgtgccacatactcttttaggcactttgcatcatcatttcctttcatgctcacgtctaccttatgaaatagtaatagtagtaatcctgtcttagagctgaagtaaatgaggcttaaagattttaggtatctcrtggttcatgcctgtaattctgccactttgggaggccgaggtgggcgggatcacttgaggccaggagttccagaccagcctggcccaacatggtgaaaccccatctctactaaaaatataaacattagctaggtgtggtggtgggcacctgtaatgccaggtacttgggaggctgaggcaggagaatcgct

SEQ ID NO: 589331 - DNA, 517 bp, Homo sapiens
tcatatcccttcctggctgccacttctagggagaagttaaattaatacaccttgtataaaacatgaaagactcactctgacatctaagtaaaatgataatgttgctatggagtttatactcaaatcatcatgaatttgtctgaacaatgctcaaataataatagtattttccaagatttaataagcatttactctgtgccacatactcttttaggcactttgcatcatcatttcctttcatgctcacgtctaccttatgaaatagtaatagtagtaatcctgtcttagagctgaagtaaatgaggcttaaagattttaggtatctcatggytcatgcctgtaattctgccactttgggaggccgaggtgggcgggatcacttgaggccaggagttccagaccagcctggcccaacatggtgaaaccccatctctactaaaaatataaacattagctaggtgtggtggtgggcacctgtaatgccaggtacttgggaggctgaggcaggagaatcgct

SEQ ID NO: 589332 - DNA, 547 bp, Homo sapiens
cttcccaccacagctcaactgtaacaaagccaccttctcccaccaagttggtggaggccaggtggagacagtaatgagtcacyccttctcctcacagcaaggtggtgtctgccaaggtggaatttatagccacttaactgtaaccacccctcacccctatccccaaggtgttgatagaggccaattgtatccccatcacttagcagtaatgtctaatgttgtattaaggtgttgctaggcccttgcttccaatgatactctgggtagaatctttccttgcctcttctttgctgggtggtggctgttaaaacttgatgttccttggcttgcagcagcactacttcatgacaatttctcattagaaatggatcagaagaaggtgggctgagcacagtagtgtgtgcctataatcccagctaccccagagagtgaggcaggaggatagcttgaggccaggaggtgaaggccagttctggctagagccccatttcaaaaaaataaataaataaataaaacacaagaaaaagggagagaaaaaatgagaaag

SEQ ID NO: 589333 - DNA, 547 bp, Homo sapiens
cttcccaccacagctcaactgtaacaaagccaccttctcccaccaagttggtggaggccaggtggagacagtaatgagtcaccccttctcctyacagcaaggtggtgtctgccaaggtggaatttatagccacttaactgtaaccacccctcacccctatccccaaggtgttgatagaggccaattgtatccccatcacttagcagtaatgtctaatgttgtattaaggtgttgctaggcccttgcttccaatgatactctgggtagaatctttccttgcctcttctttgctgggtggtggctgttaaaacttgatgttccttggcttgcagcagcactacttcatgacaatttctcattagaaatggatcagaagaaggtgggctgagcacagtagtgtgtgcctataatcccagctaccccagagagtgaggcaggaggatagcttgaggccaggaggtgaaggccagttctggctagagccccatttcaaaaaaataaataaataaataaaacacaagaaaaagggagagaaaaaatgagaaag

SEQ ID NO: 589334 - DNA, 621 bp, Homo sapiens
agactttgggtcagatatctctgttaccctaaccactcctatttgtgaggaagcctgggcttattcagaggtaacaatcaacaggctggacacaagggaggccatggcctctcaggagacctgtccatttccggggctttctactggatagttcctaaccaagtggatggggtcactctcagtgaagtatgagtcagagagacagagagaaagaaaactcagagatgtaaaaacartagaagaagagacaggccaggatggagggtgaggtgaagactcttgtctaggggagcctctgggcctcaagctatgacaaagtgactgtccacagagtggctggaggggctcacagcccagctggtctctgcttggtactctgtgaagcctgctgagatggcttcctgatcttccttccttccttctgtcacttaatggaatctgagtgagtcttgtaaacttgaaaaagcctatttttaaagctccacccaccccacctcaagcatcattagtttttagtgaggacacctgggtccaagattcagctctgccacggactcactctgcagtcctcgacacagcagctgcaccccccaacccccgccccaccgccacctctctgga

SEQ ID NO: 589335 - DNA, 621 bp, Homo sapiens
agactttgggtcagatatctctgttaccctaaccactcctatttgtgaggaagcctgggcttattcagaggtaacaatcaacaggctggacacaagggaggccatggcctctcaggagacctgtccatttccggggctttctactggatagttcctaaccaagtggatggggtcactctcagtgaagtatgagtcagagagacagagagaaagaaaactcagagatgtaaaaacaatagaagaagagacaggccaggatggagggtgaggtgaagactcttgtctaggggagcctctgggcctcaagctatgacaaagtgactgtccacagagtggctggaggggctcacagcccagctggtctctgcttggtactctgtgaagcctgctgagatggcttcctgatcttccttccttccttctgtcacttaatggaatctgagtgagtcttgyaaacttgaaaaagcctatttttaaagctccacccaccccacctcaagcatcattagtttttagtgaggacacctgggtccaagattcagctctgccacggactcactctgcagtcctcgacacagcagctgcaccccccaacccccgccccaccgccacctctctgga

SEQ ID NO: 589336 - DNA, 634 bp, Homo sapiens
aacttaaagtataataaataaatttttttaaagaaataataacaataaattaggactaaaggaagaaaaaatatgtctacaccatttcttccttcttctttagcgaaaaactcattaaaagagttatttgccctcgacacaggttaagcaaaaagccaagttccattatgcatattgagctgcctacttgacacctaataaagatctttaattaaactattaaatattaaacttctaatagacatttctaattaattatccaaaactaattttttgatcttctgcaaacccacagcttttctcatctcagttgcttgtgtccatcctttcagttgcttacatcaaaaaccttgggtgtctgtgtcccctcaggttcatttatgcagagtggaaaaaattaatcctcagggtagaaaacgtaaaataccaaagaaccactgccarttaccctcattgtctgacactttcacttggcaattagggattcacctttagactcttaggatgaggtaatattagaaggtggaagtgtccttaggttgtccgagaaggagctgaccctgtgttgttaaagtatgattccataaatttaagaaataaacaaacaaatcaactctcagagagtaaaaatggg

SEQ ID NO: 589337 - DNA, 518 bp, Homo sapiens
aaaaaagtgacgggtaaaatttgttttattattgtggttgagagaagacataaaaccagagattagggatgtaaaagctgggttaatttccacatatcctaaaccactggaagcatggttgagccagtaagaaaaggtcacagcaaggtatttgctgtggttttctcagctctaggattgaataaagagtcagtggaagtgaacattggaggacatagattctggtcctaatttttgttaactctgtgattccagaattatcctcaaattcccaggaggaaggtaaacccctaacgtgtgtcccagcatcatctccactggccccctccatcccattccccacactaagccccaagctaagtgatcttttcaaaatataaattgcacacagcctaacaccctccatggttgccattcctcacagggtaaacacaaaagtctcagcaggrgttccaaggccctggatggtctagcctgtggcttgcctctccagccccagctcatagcctccttttact

SEQ ID NO: 589338 - DNA, 527 bp, Homo sapiens
taaaatggaaagaggcaacttctacatgtttcatccctgagctctgatatcatctctccccagaatgacaaagagtagaggggccttctgtcagttttgcaagctcttgaccagttgcagtgtcaggacaacaggatcattgtaccaagctcctaatttatcaaaggagaggacatgcctgctttgggtgcttggcatttcttgatcagtcattttgtaacttgcatggcctcttgaagatctggttaaatccagttcaaattccatttctccagtctatcatattctgaagcattctgtcgtttgtatagaatttcactgaagatttgagagagatgaggcaggcacagggagagatcatatgttaaggcccacagcctctccctcctcttccccaaccttctccctctcctgtgcaaccaagaaatccctcccctcttctagtgcaagaaggttccacccataktcagtgccctacaaggtagccattcaaaatattgcttctgatcacatacagtggactccct

SEQ ID NO: 589339 - DNA, 546 bp, Homo sapiens
ctttgggaggccgaagtgggcagatcacttgagatcaggagtttgaggccaacctggccaacatagcaaaaccccgtctctactaaaaaaacaaaaattaaccaggcatgtggtgcatgcctgtaatcccagctcctcaggaggctgaggcatgaggattgcttgaacccaggaggtagaggtgaggttgcagtgagccgagctcatgccactgtattccagcttgagtgacagagtgacactctgtcttttttgggggggtttttggtgccaattttaaatagttttatttaaaacattgcattttccacttacaatacagtgtttataaagtgcaatgttatttccttcccctgtgcatatgttccacattcaagtattgagaaaaatatggaatgcttcaccaatttgcttgccatcctcgtgcaggggccatgctaataatcttctctgtattgttccagttttttagtatatgtgctgccgaaacaagcatgactctgtctttaaaaaaaaaaaaaamaacaacaacaacaacaacaaatg

SEQ ID NO: 589340 - DNA, 573 bp, Homo sapiens
gatacagttttggtgagcatttattattaaaatatttcttctcaagaggtcatagaaaataagcaaagttattaaaaatcataccaacagttgccctgaacgtgcaagattgcaaaacattttttggagacatggtctggctctgtcacccaggctggagtgcggtggtgccatctcagctcactgcaactcccacctccctgtgcaaaacatcttaaagcttaatgttttccaacctcagatgtgtggccacaagaacaaccattagagagtaacatgctatgtggttctgaaaaataaagagctgmtttctgaaacataacctagcgccaaaacagaatccatcaaaaataaatgttggaatctacagtggttcctaatatgtggtcctgagactgataacattagtgtcacctgggagcttgtcaggaatgcaaattcctgcgccccacctgagcccactgaatcagaaactctgaatatggggcccagaaacatgtaataggccctctacgtgattccgagacacgctactgttagagaactattgcttgctttgtgtctggtattagc

SEQ ID NO: 589341 - DNA, 573 bp, Homo sapiens
gatacagttttggtgagcatttattattaaaatatttcttctcaagaggtcatagaaaataagcaaagttattaaaaatcataccaacagttgccctgaacgtgcaagattgcaaaacattttttggagacatggtctggctctgtcacccaggctggagtgcggtggtgccatctcagctcactgcaactcccacctccctgtgcaaaacatcttaaagcttaatgttttccaacctcagatgtgtggccacaagaacaaccattagagagtaacatgctatgtggttctgaaaaataaagagctgctttctgaaacataacctagcgccaaaacagaatccatcaaaaataaatgttggaatctacagtggttcctaatatgtggtcctgagactgataacattagtgtcacctgggagcttgtcaggaatgcaaattcctgcgccccacctgagcccactgaatcagaaactctgaatatggggcccagaaacatktaataggccctctacgtgattccgagacacgctactgttagagaactattgcttgctttgtgtctggtattagc

SEQ ID NO: 589342 - DNA, 297 bp, Homo sapiens
cccatgggagatccccagattccaacagggctgcctcgccaaacttcaacccaaggttgagcatgtatcacagcctggctaatctgtatattccaggctgttgacctggaaagaaccyactgcttattttgccttcccttcctaacattttaattctgattaaataaattaaaataaactttaaaggcatccttgaaggggaaaagatgtcagatgccaacagctagacagcctggggcctgagggaggacagggttatctgcagaagggacaatagaaccttataattcatgatgg

SEQ ID NO: 589343 - DNA, 521 bp, Homo sapiens
ttctaagtccgttaactccaagatcttctaaatccatccttctggtctccaattcccaaactcaccctttttcctcctctaattatctcacyttgtttagcatctggaaaaagaaccaagtgaggcaatatataattagtaaattattcttagctgactgaatcatgtagcagcagttagcaattacagtccacaaaatgcaaaatattaagcttgctcctttaatactctatgaaacatgagccctcttctgtccttaaactgaaggcagagttgcaccgagaatgccattaggtcagttttatcttattggctcatgtggaaaaaaaaaagggaagttccccacacaaaagtttcacaaccccaaaatgctggtatgtgtgtccctggataggctgagaagaaactatccccaacagtaaagggcaagttccccttcacaaagaaaaatcttcccaacacaccaggctggtacccccacatccatccatctgcagccaccaagacaatggagattcaaa

SEQ ID NO: 589344 - DNA, 302 bp, Homo sapiens
tgcatgctgtcataattccattgaawactttgcagatgttaagaataacaagaggataaacagcagtgaaagtggatcagatggctaatgccggcagtagccttaaacttcaaaattggggctgccaatgcatctctgtgggtgggtgttgggatgtctgcttgtgagtgggtgacaggctcctggaaaattggtgagtttggcacgttacagccccttctgtggatatcctctttccctgttgctgtagtgtgtcttcccctagagccctcttgggggatgttttttttcgcacatgcctc

SEQ ID NO: 589345 - DNA, 558 bp, Homo sapiens
ggtgggagtgacttgattttccaggtgctgtctgtcacccctttctttgactaggaaagggaattccctgaccccttgtgcttcccaggtgaggcgatgcctcgccctgcttcagctcatgcgtggtgtgctgcacccactgtcctgcacccactgaggaacccrgtacctcagttggaaatgcagaaatcacccgtcttctgcattgctcacgctgggagctgtagactggagctgttcctatttggccatcttggctccacaccccatgaaaggttttgaacaccatgcttgatagatggatatcttgaatgtagcagggagccattgaaacatttcaaacattaggagctttatgggcattaagaattagagtagtgatggggtaagactgactttttaacacttatatattgtctgtttctaaatggggccaatattcctttttcttcctttgggatgaaattcttactcattctagatgaatgagcccttattcctctttctttgtctaggtcacaaatcctgggataaatgagggccctggttgtgttataa

SEQ ID NO: 589346 - DNA, 447 bp, Homo sapiens
aacaggcggatcacaaggtcaggagattgagaccagcctgaccaacacagtgaaaccccatctctactaaaaatacaaaaattagtcgggcrtggtggcgcgtgcctataatcccagctactcaggaggctgaggcaggagaattgcttgaacctgggaggcggaggttgcagtgagccgagatcgcgccactgaactgcagcctgggtgacaaaaaaaagaaaaaaaaggaataggaaccctcatttccaggaaatccctgcccctttcctagaaaactcatgaataatccactccttgtttagcatatgaccataaaaatagccaccagcagccctcggggctgctcggcctaggaagaagctattcttttatttctttatttcttaataaacttgtttttactttactctgtggactcccccccaattcttccttgcatgagag

SEQ ID NO: 589347 - DNA, 547 bp, Homo sapiens
gaagtttattgaagtttgattataaaatgacatatgagatggatttggctgactatatttgcattttagccttaaaaattctttgatgctttgttttatttctctaatgattttacagtatctatgctcaccatcacagggaacactgccatctctcatccacccacctggccacaccagaaacttgaccaccatatctaatccatgtctaaacaaggtatctcctcccacctaaagatctcacccctctctgcccacacctctttctcttcatcacaaacrccctagttcaatccaccatcattgctcactttgatgactacaaaggcatctttgtgggtctaccctcttctcttctaggcccactacatccatgttctacctagcaaaaaaaaaaaaaaaagttctctctaaaatgtaaatctagtcatgccacctccatggctctaacaagcaacatcacacacttcttaccatgacttataagtttctgcactttctggttgagaaatgctacacatggccatgctggtgaatcttgaagaac

SEQ ID NO: 589348 - DNA, 617 bp, Homo sapiens
tctaacaatgtgatcttaatagcatcctatgtcatcacggagcagactacttgcatcttatattgcctcctttcatgagaactcttttacttttctaaattgcactttggtgggacatattataagacagtcaaatgaaatccatgttttctataagggcatcactgaggatactgtccattactttacatagtgtcttctctatcaggctgcaggagaaaatatcaatgactttctggtcttagaatcaggaatagatgtgtctctcccgagcyaccagatttttcgccttatgagctctacgcattctttgactgacacatttctctctctgcactgggatgcttacagaccaggatcatactatttgccatgtaattcatgcattaatctctttcctgagttcatcttatttttccagatagtttcccttctttgtcttatttatcttaatttttatttattttattctgttgtttttcatgcatcctggtaagctaccttgaatattttggaaaataaacttggtataaacagataactgatatcctaatgaatgtgaaacattattcaagctctttaatatcaaattcatgtgtgaatgttaagggtgaggg

SEQ ID NO: 589349 - DNA, 610 bp, Homo sapiens
gaggtggtgcacattaggtgcttagtacactgcctggaatattgtaagtgctaaggagtgaggcaacaataattattttactatcaacatgcaaaaaacttgaattgctacaaccgcattttggtggcaggtcctctcttctaaagcctggagcagacagattggagtagactcaaaggacaagggggcattttaccaacaggaacaaaatcaacactaggaggagacagggaagcattgaccttaagtggtagatgtaatggtcattggtggggtcccgtgttcagccgacagaacctgattgtgaactaggaaaggtcagccccagactctgcagtcctgcctggaattgagattggtgatcagaggcccagacaccaaacatttgcaggtggacctgggaaatgatgcagttggcacaatctccagatatattattctggattttgagatatggataaagagatgacscacatgatgttgaactccggtgtacacgccttctgggtcctgcaatttgcctgtggtctggccttatagcatgtcttcctacttagcgtttcctaaacttagttctgcagtgtttcttaagatgataatgaatgttttg

SEQ ID NO: 589350 - DNA, 579 bp, Homo sapiens
caacaaagaaggagaataagtattgatgagttgattaatagtgtctgccattgccctttttctttacaacctgagcttatagtcttgggaaactccttttttaaggtctttttttttttttttttttttggatcttgagaggcttgagctatgcttatagctgcttaraaagggtttaaatgaataaatggctgagaagatttctgatgagttgtcaaataggtcaggaagcctctttttttcttaatatattttggcttggggctagaattttttaaatgaaaacacaccttaatttaaaggtgtgactccaataatgagaatttcaaccaatgacacattatggagggcaaatctaacttttcatagagcattgtactgtgcagtatcctttggttaggacttttgttgccttttacttttgtgaggagagtcctagtatgtcagccctgaagggagtctttgataaacgtagtcaaaagatagaatgcattgaaatcttaccatctactagtcactctactacagctttaaaattacaaactccttcaatccttatgaaaaacctatgcagtagat

SEQ ID NO: 589351 - DNA, 579 bp, Homo sapiens
caacaaagaaggagaataagtattgatgagttgattaatagtgtctgccattgccctttttctttacaacctgagcttatagtcttgggaaactccttttttaaggtctttttttttttttttttttttggatcttgagaggcttgagctatgcttatagctgcttaaaaagggtttaaatgaataaatggctgagaagatttctgatgagttgtcaaataggtcaggaagcctctttttttcttaatatattttggcttggggctagaattttttaaatkaaaacacaccttaatttaaaggtgtgactccaataatgagaatttcaaccaatgacacattatggagggcaaatctaacttttcatagagcattgtactgtgcagtatcctttggttaggacttttgttgccttttacttttgtgaggagagtcctagtatgtcagccctgaagggagtctttgataaacgtagtcaaaagatagaatgcattgaaatcttaccatctactagtcactctactacagctttaaaattacaaactccttcaatccttatgaaaaacctatgcagtagat

SEQ ID NO: 589352 - DNA, 579 bp, Homo sapiens
caacaaagaaggagaataagtattgatgagttgattaatagtgtctgccattgccctttttctttacaacctgagcttatagtcttgggaaactccttttttaaggtctttttttttttttttttttttggatcttgagaggcttgagctatgcttatagctgcttaaaaagggtttaaatgaataaatggctgagaagatttctgatgagttgtcaaataggtcaggaagcctctttttttcttaatatattttggcttggggctagaattttttaaatgaaaacacaccttaatttaaaggtgtgactccaataatgagaatttcaaccaatgacacattatggagggcaaatctaacttttcatagagcattgtactgtgcagtatccttyggttaggacttttgttgccttttacttttgtgaggagagtcctagtatgtcagccctgaagggagtctttgataaacgtagtcaaaagatagaatgcattgaaatcttaccatctactagtcactctactacagctttaaaattacaaactccttcaatccttatgaaaaacctatgcagtagat

SEQ ID NO: 589353 - DNA, 614 bp, Homo sapiens
cttgggttcttctgtctagccaaattataatcttttggaagacataagtgaaattatttcttccatatccaccacagcatcaaatgaaactgtaagtcacccagaaagtactcaacaactattcattgaatgataacatttttaacatttattttaggttcaggggtatatgtgagggtttgttatataggtgaattatgtgtcatgggagtatggtgtacagattacttcattagcacataataagcataatgctcaacaggtagttttttaatcctcttctttctcccacccttcaccctcaagtaggccttggygtctgttgtcctcttccttgtgtccatgtgttctcattgtttaggtcccacttaaaagtgagaacacgcagtatttggttttctgttcctgcattagtccacttagaatcatagcctccagctccatccacattactgtgaaaaacataatcttgtttttttttatggctgcattataccatggtgtatacgtagaacattttctttatccagcccaccgttaatgggcatttaggttgattctgtatgtttgctattgtgaacaggactgtgatgaacatacgtgtgcatgtgttt

SEQ ID NO: 589354 - DNA, 614 bp, Homo sapiens
cttgggttcttctgtctagccaaattataatcttttggaagacataagtgaaattatttcttccatatccaccacagcatcaaatgaaactgtaagtcacccagaaagtactcaacaactattcattgaatgataacatttttaacatttattttaggttcaggggtatatgtgagggtttgttatataggtgaattatgtgtcatgggagtatggtgtacagattacttcattagcacataataagcataatgctcaacaggtagttttttaatcctcttctttctcccacccttcaccctcaagtaggccttggcgtctgttgtcctcttccttgtgtccatgtgttctcattgtttaggtcccacttaaaagtgagaacacgcagtatttggttttctgttcctgcattagtccacttagaatcatagcctccagctccatccacattactgtgaaaaacataatcttgtttttttttatggctgcattataccatggtgtatacgtagmacattttctttatccagcccaccgttaatgggcatttaggttgattctgtatgtttgctattgtgaacaggactgtgatgaacatacgtgtgcatgtgttt

SEQ ID NO: 589355 - DNA, 557 bp, Homo sapiens
ctctttgtaaaaaaaccacatgcataatttttattgtatacatttaaggtgtacaacatgatgttttgacatatacagtaaagttattactatagtcaaggaaattagcatatscatcatctcatatagttacttttttcttttctggtgctaagagtatctaaaatctaccctgtgacaaatttccagtgtatagtacaatattattaactacagtcctcatgctactattagatttctagatttattcaatctttataattgcagctttgcacctacaatttcccatttcctccaccccctgcccctggtaactaccattctactctctgtttctatgtatttagtttctttctctttagattccacatgtaagtgagatcatggagtatttttctttctattctggatcaatacccaccccactcaaaaaaataaatgagatcactttgtaaagatatttgcccttctttgttgattatagtattattcacaatagccaagacataaaaacaattgaagtattcatcaatgtatgaataataaagaaaacagaa

SEQ ID NO: 589356 - DNA, 557 bp, Homo sapiens
ctctttgtaaaaaaaccacatgcataatttttattgtatacatttaaggtgtacaacatgatgttttgacatatacagtaaagttattactatagtcaaggaaattagcatatccatcatctcatatagttacttttttcttttctggtgctaagagtatctaaaatctaccctgtgacaaatttccagtgtatagtacaatattattaactacagtcctcatgctactattagatttctagatttattcaatctttataattgcagctttgcacctacaatttcccatttcctccaccccctgcccctggtaactaccattctactctctgtttctaygtatttagtttctttctctttagattccacatgtaagtgagatcatggagtatttttctttctattctggatcaatacccaccccactcaaaaaaataaatgagatcactttgtaaagatatttgcccttctttgttgattatagtattattcacaatagccaagacataaaaacaattgaagtattcatcaatgtatgaataataaagaaaacagaa

SEQ ID NO: 589357 - DNA, 591 bp, Homo sapiens
aacatcacacaccagggccagttgtggggtgaggggattggggagggatagcattaggagatatacctaatgttaaatgacgagttaatgggtgcagcacaccaacatggcacatgtatacatatgtaacaaacctscacgttgtgcacatgtaccctaaaatttaaagtataatttaaaaaaaagatatcataaaaaataaaaataaaaaaaatctttggagaactattacaggaatacgagtttgagatgttattcttggtacttctcagttttagggacaagtttgctgactttaatcaactgtgaaatgtagtatacagattggacacagaagctcgtacctgtaatcccagcactttcagaggctgagacagaagaatcaattgacaccaggagttcaagaccagactgggcaacatagtgagaccctgtttctaaaaaaaaaaaaaaaattaattagctgagagtggtggcatgtacctgtagtgctagctactcaggaggttgaggtgggataatcactttcactccaagagtttgaggttgcagtgagctatgattgtgtcactgcactccagcctgagtgac

SEQ ID NO: 589358 - DNA, 591 bp, Homo sapiens
aacatcacacaccagggccagttgtggggtgaggggattggggagggatagcattaggagatatacctaatgttaaatgacgagttaatgggtgcagcacaccaacatggcacatgtatacatatgtaacaaacctgcacgttgtgcacatgtaccctaaaatttaaagtataatttaaaaaaaagatatcataaaaaataaaaataaaaaaaatctttggagaactattacaggaataygagtttgagatgttattcttggtacttctcagttttagggacaagtttgctgactttaatcaactgtgaaatgtagtatacagattggacacagaagctcgtacctgtaatcccagcactttcagaggctgagacagaagaatcaattgacaccaggagttcaagaccagactgggcaacatagtgagaccctgtttctaaaaaaaaaaaaaaaattaattagctgagagtggtggcatgtacctgtagtgctagctactcaggaggttgaggtgggataatcactttcactccaagagtttgaggttgcagtgagctatgattgtgtcactgcactccagcctgagtgac

SEQ ID NO: 589359 - DNA, 737 bp, Homo sapiens
tgtggaaactgaagctatgggtatacatgaaatcatcaatggaaaaagtagaaagtggaaagagagggcagataggacaaaacctggaggaactataatatttaacacagtgattctcaaagtatggttccctgtccaatagcatgagaattccctgggaatctattgggattgcaaatagacctaaagcattataaacccaggggtgaggctcagcaaacatgctcagcaacaggcctcctgatgtttctaatgccactggtatccgggagaataaaggaggacatgtttgtgaagattactgagactgagccacctgctagatggtaaaaagaaaaccagaaatgtatggggtcattagggtaagggaagagaatagttcaaggagaaggtcaaggtcagcagggtcaaatggtggtgggagatcaagtgaaattgwgaccacttttgactttagagaaagctgtttcggtcaacgcttggtatgaaaacaaactggagtgagtgggataggaagaaagggaataatgaatataaaaaattctttgaaatttgaataggctaggaatctggaggagaaaaggggatgcattttatgatattaatgtcatgaacatgtttaaatgctgatggaaaagagatgtaagattcagaggaatatagaggaggcagatgtagtccattagtagcgagagttcttgggaaagtaaagggcatggtccaaacccagacagaaa

SEQ ID NO: 589360 - DNA, 428 bp, Homo sapiens
acagtaagggaatacaaaagaaatgggcgctgtgtcacaagcgctgctgagagaataagagccaacctgaacaaagaccctggatttagtgrtataagaaacaaagccatgtactgagaccaaactaggtctgagaagagtacagagtattgaaataaatattgcatagaggttttttttgtttttctttttttaagtgtgtgtgtgtgtgtgtgtgtgtgtgtgtgtgtgtgtatatatatataaaacttacatatatacacatatatgtgtatatataagtgatatacataagttatatacatataatgtgtatatatatgttatatatatagaagttatatatatagagagagttaataaaatgtatatatatagagagagagagagagagagagagttaataaaagtggatcgaggtccaggtt

SEQ ID NO: 589361 - DNA, 590 bp, Homo sapiens
  misc_feature 26: n = A,T,C or G
agaatcactggtagtcgaggttgcangagaaagaaagaaaagaaagaaagaaagaaagaaagaaagaaagaaagaaagaaagaaagaaagaaagaaagaaagaaagrgagaaaaaagtatggagtaggcatttacattgtattgggactatgttggttacagtgcaaagcaacaatgatcattgccatggggtcatttatcatttaaatcataaaccaccctaaatcccttttcattttttatacctttacatttaaaataattcatcttatatattactttatagtttctttaatatttcatagcttataatacttctaaacataaaaggttaaattgctagcattctcttcttagggttttcttttttcacatttctgctctgtcattttttaaattatagctttttatgagatataattcatataccataaaattaaaccatttacagtgcacaatccagtagtttttagcatatttaccaaaatcgaattttagaacaaccattaccacctaattttagaatatttttgtcacacccgaaagaaaccctatagcattcactacccattccccaaactcagtcctag

SEQ ID NO: 589362 - DNA, 541 bp, Homo sapiens
gttgcttaccactatctgtattctgtgaatgaagatgtgtgaggatttgcattcaagtgtaagttatttcttgatagaggaatgcctttcttagttgtgtatgtagatggtcttcattcagtactgatctcagcatatattttcatgctttcttacaggttatagaaaaaaatagttaagggagcttcaaatctcttttaaggccatctatttctagttaaaaaaataaaattttatcaaactattctcttcatacaggtgctgcacatatgccaggagctgattcagtggtttcatccaaatgtaaagcaaaatatggaattatttcaacatataataataactactgttacacttatgtaaggcaataaaaatatttttggcaaaagcttgtcctgctttcttttttgagcataatttatgttttacaatcttgttggcaaaagtgtgacctrtgtctgtttttgttctggtgagtgcaactaagaatgatgccactgtcatttttgttcttttctctggtttgcatgacaacattaat

SEQ ID NO: 589363 - DNA, 341 bp, Homo sapiens
gaggggattttttttttgtaaatatctcttacccaataacaaagacttcctttcattgctaatttgtagaaaatttttagtccttaatgaatgttgaacattgtcaaataatttttatgcgtctatggagatggtcatattatttttattctttattatctttgcgtggctaagtatattgataaaggttctaatattaaaccaatgttcctttactgaaagaaaaccttctttgtcatgataatacattgtatattttacatataactttgtttgaatctttaaaattcttakagggtttgctttcatgtcatgggaatagatttttttctccaaataca

SEQ ID NO: 589364 - DNA, 550 bp, Homo sapiens
ctgaccatgctggcaccatgatcttggacttccaacccccagaactgtgagctgtaaatttctgttgtctaagccacccaggcaatggtcctttgtgattaaaacctgagcaaactaacacaaggtctaaaaagtttcaacactgtagagttccttaaatgctaagccaaggatgttggccttgatttcatagagtgagtgatcttatctcagctggattttaggaaagacatgattgcaaggattgcaggagggagagggtcaaggcagagagacccatgaggaggatggtgcaatgaggccaggagtagccatggggttggaatgcagctgcaggggcagcaggactggaagcagggaactgaaggttgggggctctggaagtggaactgagagtctctgrgtaggagaggatcggggcaaaggataaagtaaacatggattgggtaagtggaaggatggtgggcttttttttgagatagagttttgctcttgttgcccaggctggagtgcaatggtgcgatctcagctcactgcaacctctgcctca

SEQ ID NO: 589365 - DNA, 349 bp, Homo sapiens
ttctgatggtctaaattgcactggggtatgaagggctggtcaaagtatttgcattttgaaggcactgttagagagaagccagtgctaaccggtgttgcaaatgtacatacttccagggaacatgaagtgggctgggtgggagacatcagggagtagtggagcctgtggctaactggagcacatgcccctcctaaagacattcacattcagatgtttccaaaatagcgttccatccaactaaatcacttgggccactagtatakgagctctgaccaaggaaatgggtttcagcctggttagtggagctgtctgagtggcaaagaaggtcttaatcagaatgtaaaatagt

SEQ ID NO: 589366 - DNA, 566 bp, Homo sapiens
ggtgaggtggaaggattgcttgagcctaggaggtcaaggctacagtgagctatgattggaccactgcactccagcctatgtgacagagcaagaccctatctcaaaaaaaaaaaaaaaaaaaaaagacagatgtaatccttatcagtgaggtctacaatgaatgggccaacaytggtcagcctgagatttatcccccctcacctactggccaaatcatttgcagagtgaagacaaatgggggactaaaggtccccataaagaggctcttccatggtttctttccatgtaggtgttcaagacagaggggacggtaagtgcaaaggccctgaggcaggaacaagcctggaagttttaaaaatcagaaaccagaaatttggggacaatattctttgcttcacattttttcaatttattttattttatttcattattatttttctgagatggaggctccttctgtctcccaggctggagtgcagtggtgcaatcttggctcactgcagcctctgcctctcgggttcaagtgattctcctgcctcagcctcccaagtagctgagattacagg

SEQ ID NO: 589367 - DNA, 554 bp, Homo sapiens
aaaatgctgcattatcacacagtggttaccaagggcatggggtagatgtaagtcaaagaaagggagttcttgggacaaataataagaatatggcttagagggaaatatatacaaaaatgtgagtctttaatcctaatttcacaaaccttaacacaagaacacccaccaggcatattgcaattttatcatatagattttgagctcaccaaaatcaatgagattaaaacttaaggcttacacgaaactcttgtgccacttgatcccagagcagaaattcctcaaccaggagttagtattaacaaatatgcatgcccctaagagagggatatattaacgtaaccttataaatcagatctaattctcccacatataactctaactatccatgcatcacatatacttaaaaaaattgtgagtacacagtaggtatatatatatattaatgggktatatgagatatttgatatatatatacacgcacataatgcataataatcacatcaagtaaaataagatattcatcaactagagcatttatcctttgtgttacaaac

SEQ ID NO: 589368 - DNA, 574 bp, Homo sapiens
tatttttagtttttcaaggaacctccaaacttctccatagtggttgtactaatttacgttgtactaatttacaccaacattaaacgtgggttcccttttctccatatcctctccaacaggattgtttatcttttgtctatccaccagtttaagaggaggtgtgggtaatgtcagaacatgcattttattcactttattgagtgggaagactgctcttacttgagcaaggaccacgtctacttctatagccgattcttatactggaaatgttggaagtacgtagaaaggacaaaagagaatctcaccactgaggctgccttcttaagtcatctcaactattattttactggtacagttttagcttttgatggtctttcaagtttcaaaagaataggagatctcttctattgctcatgagccttacaatttgtgtgattttaatcaagttacttaacctctaaggctgtttttaaatctataaaataaagataaaaagggtatctaccttacaaaattactaaaatttttaaattcagtgaatttaatgtgccyggttgatgatatgatcctaata

SEQ ID NO: 589369 - DNA, 548 bp, Homo sapiens
ctatggggcatcccccacccctgcaatatatctcaagcatcaaatagccactctatgttaactaccaccaaaccttttccaaccactaggttgtcacctttttcacaaccctaagacaactatgcaaatactttatctaaattttgagaaactgggctgagtgaattagtaagcactatatgaggaggggttaacagcaatttattaaggttgcctgaaacaccctagtccaaacaccgattcaaactcttatttaaatatgctattttaaacctgatttgcagcagggcagcagaccaaattaaagcactcattttactgacctgagtcccaagcctgaattctctggtggattatttttaatttaaaaatgagctcttgtcctataaaataagcagcaccaaggagaaatgcaagacagcttaaatggcccaagaggcagcgcaagttacttttacaaaaaaactggaaagtattagtgacattatctccacttctaatttcagaaaatgactttacagtatasttctaggttataacgtagacaa

SEQ ID NO: 589370 - DNA, 338 bp, Homo sapiens
agttaagaaaaaaaaaaactaagaaaatctagtcaatacagaaaagaagaaaagaacaaaagagagcagtatgcagacaatagaatgagatagatggcagaagtaaagccaygcatatcagttttcgtaagaaaagtgaatgagttaaactcctctgtaaaggccaaacactgtctctgtgattaagccaaaaacaaaaaacctcaattgtatgctgcttataagagacacacctaaattaaaatggcacaaaatgttcaaagaaaataaaagaagaagtactcatatcaacatcagacagagtagaattcaaaagtactaaataaagaaaaaagagc

SEQ ID NO: 589371 - DNA, 493 bp, Homo sapiens
aagtttgcagtgatccatgatcataccactgcactccagcctgggcaacagagtgagaccctgtatcaaaaaaaaaaaaaaaaaaaaagaaaagaagaaggagtgattgaatggttgtagagagtgaggaacagagagacatacatgaatcccatgtttccagacaggatgttcagatggatgtttgcgtaggtttgaggaggggacatgcagattttaattccaaacacagtgagtttgaggcacctattgtgcwttcaaaaggagatttttagtaggcatttgggtttatgaatcttgagttcatgtgtgaagatcaggcttgggtttaggaataattagcatataaattaaaaacatggaaatgggggagactaaagttcctggaaagcagggacaaaaatcttactagcttctgtgttcttcacagctcacaatacacatcttgaaatgtagaagatgctccagaaatatttgctgagcagatgagtga

SEQ ID NO: 589372 - DNA, 544 bp, Homo sapiens
actttaatacagtgggtcgtcatttgatgtttgctgaactaaaaggaaacacatctcacttgtttgattaatattagttgttgggttcagggtctatttcttttcagaattattattcttcctttccatatgatctttagagtttggaggtttacgcaattttggttttttttttwtacttaagaataacttttaatttgaagaataaatatacatatggaaaagtataaaaatgtaaatatacagcttgatgaaatataacaaattgaacacacttctgtcttcatcacccaggtgaagcaatagaatattacctgcattctagaataacctcctgagtccacttccagaggtaaccattagctttcttgctgttgcttgtattaattttgcttgtttttgaaatatgtgcctgtaggggatcttcttgtcctcagcattatgtatatgagatgttctggttactgtagcgttatagtattggctgaagttgggtagaatgatgcctccagctttgttcattttgcttaggattgattttgct

SEQ ID NO: 589373 - DNA, 398 bp, Homo sapiens
aggaaatattcaagtacgtttgatttccagcaaatccagatagacagttttggcaacaaccaagtcataattttaagtcttgttataggagctagaattttattcaagggacaactgatttgattagattagwtgctgtgcactgcatgtttgcatcaacaaatgcacatgttgaaactcttacaatagaatggcattagaagggggacctttggaaagtaatttggttttgatgaggatggagttccacaatggggttagcatcctaataagaagagtaggagactagagccctcttctctcagccatgtgaagatacaacaagaacacctgcaaaccagtaagatggccttcaccagacactggctctgctggcccagattttaatctttgaattt

SEQ ID NO: 589374 - DNA, 358 bp, Homo sapiens
cacccttcctagttttttgaaccccaagcraaatatgaggacaggccccacgttccattacaaaagcagaaagggagtgcatgatcctttttccagtttcttggccactcacgtgtgggcacatatctaggcccagccaactgatgtctctttattagaactaggaacccgatgaaatgatgcaaaagacctgaaagaatcagagaagattctgagaaattgagcagagatgcaggtccaggaatgtggcagcaagtgcctaggttcagcagagcccagctacatggtgacaagtgtcaaatgacaacatcctagtggtggcatccaagatctgcttccgtcgaatgaacttggctgt

SEQ ID NO: 589375 - DNA, 358 bp, Homo sapiens
cacccttcctagttttttgaaccccaagcgaaatatgaggacaggccccacgttccattacaaaagcagaaagggagtgcatgatcctttttccagtttcttggccactcacgtgtgggcacatatctaggcccagccaactgatgtctctttattagaactwggaacccgatgaaatgatgcaaaagacctgaaagaatcagagaagattctgagaaattgagcagagatgcaggtccaggaatgtggcagcaagtgcctaggttcagcagagcccagctacatggtgacaagtgtcaaatgacaacatcctagtggtggcatccaagatctgcttccgtcgaatgaacttggctgt

SEQ ID NO: 589376 - DNA, 358 bp, Homo sapiens
cacccttcctagttttttgaaccccaagcgaaatatgaggacaggccccacgttccattacaaaagcagaaagggagtgcatgatcctttttccagtttcttggccactcacgtgtgggcacatatctaggcccagccaactgatgtctctttattagaactaggaacccgatgaaatgatgcaaaagacctgaaagaatcagagaagattctgagaaattgagcagagatgcaggtccaggaatgtggcagcaagtgcctaggttcagcagagcccagctacatggtgacaagtgwcaaatgacaacatcctagtggtggcatccaagatctgcttccgtcgaatgaacttggctgt

SEQ ID NO: 589377 - DNA, 350 bp, Homo sapiens
tcaatatcctttcattgaattcctgttttgcttaagttgtctagaatttgttattttcagggaaaaatataaaccagttatcccctcacattaaaacacactccacttaggcatctcctgtgatctcactggagaaaagtgtggacgttatttgtaatttgactcagaatgataggattagtttggtactagtaacaatggagataagtaactaactttttgtgaaacttcttcctggggtgaaacaaaatctattgtggaaactcttttcaatcatctctggaaatttattaagtgacctagtatataacgataatttaccatgatayttgataaaatagttttgtgtg

SEQ ID NO: 589378 - DNA, 375 bp, Homo sapiens
tggtctgaatgtttgtccctcaaataggattccagaacactgctatgagtgtctgaatgtttttccatcacacagaattacaggacactgctgttaccgtctacatgtatgtctgtcacataggatttaagaacattgctgccggtttctgagtgtttcaccctcacatagaattccagrtcactgagacgaatttctgaatgtatgtccgtaacttaggattccagaacactcactctgttgttggaatgtttgtccctcacatacgattccagaacactgctgttgtagtctgaatgtttctccctcacataggattcgagaacacagctacgattgtctcaatgtttgtccctcacataggattccagaaaa

SEQ ID NO: 589379 - DNA, 417 bp, Homo sapiens
aatttctgaatgtatgtccgtarcttaggattccagaacactcactctgttgttggaatgtttgtccctcacatacgattccagaacactgctgttgtagtctgaatgtttctccctcacataggattcgagaacacagctacgattgtctcaatgtttgtccctcacataggattccagaaaaatgctacaagggtctgaatatttgtcacttacataggattccagaacactgctacaagtgtctgtatgtttgcccctcacataggattccagaacactgctacgattgtctgaatgattgtccctcccataggattccagaacactcctgctggggtctgaatgattttccctcacataggattccagaatactgctgctgggttctcactgtttctacctcacatagaattc

SEQ ID NO: 589380 - DNA, 552 bp, Homo sapiens
cccttgtagctgtgttctggaatcctgtgtgagggacaaacattcagaacacagcaggaggtttctggaatcccctgtgaggagcaaatattcagaacctcgtatcagtgttctggaatcctatgtgatggacgtacctgtagaccccagcagcagtgttctggaatcctacgtgagggacaatcattcaaaccctcatagcagtgttctggaatcctatgtgatggacaaacatttagacgccagcagcagtattctggaatcctaggtttgggacaaacactgagaacctactagcagtgttstggaaccatatgagagggaccaacgttgagaccctcataggagtgttctggaatcctgtgtgatggataaatattcacaacacaagaggagtgttctggaatccccagtaaggaacaaacattcagaacctcgtggcagtgttctggaatcctatgtgaaggacaaacattcaaactacagcgagagtgttccggaatactactttatggagaaacattcaggctctcgtcgcagtgttctggaatt

SEQ ID NO: 589381 - DNA, 363 bp, Homo sapiens
ggaattctgtgtgagggaaaaacattcagaccctcgtagcagtgttctgaaatcctttgtgagggacattcagacaacagcagtagtgttctggaatcctctgtgaggaacaaacgtttagacagtcgtagcagtgttctggaatcctacgtgacagacaaacttttagaccccagcagcagtgttctggaatcctatgcgagggacaaacattcagacaatggtaaaagtgttctgaaatcctatgtgagggacaaacactcaaaacccagcarcagtattcttgaatgctatgtgagggacaaactttcagaccacagcaggagtgttctggaatcctatgtgagggacaatcattcagac

SEQ ID NO: 589382 - DNA, 238 bp, Homo sapiens
agctatgctcatcaccaacatcgttatatgatggtaataatcagatagtcaggaaggccgacacmaagaaaatggatacatgctctgagggaatgaatgtggagagatcagaaggtcaagaacaaagccctacaacatgtctgcagtaaagggatagagaaaagaaaggctataaaagaaggaatgaaacagagttagagtaaaattataaaatcaaagctaaggagaatttccagaa

SEQ ID NO: 589383 - DNA, 607 bp, Homo sapiens
tctaacagtggggattacaatataacataagatatgggtcagggaaaatatccaaactatatcatatrcacatgtggccataaaaaagggtaaaatcgtgtcacttgtgacaacatgaatgatcatagaggacattgtggcaagtgaaataatctaaacacggtaagacaaatatcacatgatctcattcatatgtgaaatgtaaaaacactgatctaatagagagtagaagagtggttgccagactgggaaagatagggaggagaggttttaacaatgtgtcatgtatcaaaataccacattgtaccccatcaacatgtgaaattaccatgtatccacttaataaaaaaaaagaaaaaagaaaatggaagagtcaagatactggggcactggaagagatagaagagaaggtaaatcggcagtaaggaagcgagagtctgaaagagcaggtcacagagtggaacattaaagtttataacaatagaaatcaatttttaagttattgaaaagttaagtttatagccatgaaaatgagtagctcaactgaagtgaaagtaaaagtcaatgaaatattaaattagaaaatacattgcttggcatttaatag

SEQ ID NO: 589384 - DNA, 607 bp, Homo sapiens
tctaacagtggggattacaatataacataagatatgggtcagggaaaatatccaaactatatcatatacacatgtggccataaaaaagggtaaaatcgtgtcacttgtgacaacatgaatgatcatagaggacattgtggcaagtgaaataatctaaacacggtaagacaaatatcacatgatctcattcatatgtgaaatgtaaaaacactgatctaatagagagtagaagagtggttgccagactgggaaagatagggaggagaggttttaacaatgtgtcatgtatcaaaataccacattgtaccccatcaacatgtgaaattaccatgtatccacttaataaaaaaaaagaaaaaagaaaatggaagagtcaagatactggggcactggaagagatagaagagaaggtaaatcggcagtaaggaagcgagagtctgaaagagcaggtcacagagtggaacattaaagtttataacaatagaaatcaatttttaagttattgaaaagttaagtttatagccatgaaartgagtagctcaactgaagtgaaagtaaaagtcaatgaaatattaaattagaaaatacattgcttggcatttaatag

SEQ ID NO: 589385 - DNA, 410 bp, Homo sapiens
tttcagagacatcatagttttagtttttacattaaatctgtcattaatctcaaattaatttttsgcatggtgtgagtttggtttcaagatttacttttttttttaacatcttgatagccatttgtgctagcaccactggtgtttcctttttgcattaatccagtttcatatcttcataaaaaatcaattaactttctatgtattggtctatttctggactctgttctatcgattgtctgtttttctgttggtatatttctcttgatttctataatttcatgaagtcttgagatcaggtagtatgtgctccaactttgtacttactaactattagtttattaatttctacagtgaagcctgttggattttctcggagaattgtattgagtcgagatcatttggggcgagaa

SEQ ID NO: 589386 - DNA, 348 bp, Homo sapiens
  misc_feature 143: n = A,T,C or G
tcttcttagatggtaagtgagttctcatgagatctgatggtttaaacatatggcacatcccccctggctcacttgctctcctgtcaccatggtagaatgtgccttgcttcccccttcaccttctgccatgattgtaagtttcntgaagcctcccagccatgcttcctgtacagcctgtggaactgtgagtcagttaaacctcttttctttataaattacccagtcttgggtagttctatatagcagtgtgagaacagattaatacatkagcatagtacccaatagttagtttgtcaaaccttgccttcctccttctcccctctagtagtcccggtgtttattctttcc

SEQ ID NO: 589387 - DNA, 566 bp, Homo sapiens
cacacaaacatggcacatgtatacatatgtaacaaacctgcacattgtgcacatgtaccctagaacttaaagtataataaaaaaawatatatatatataaataaaaaaataaagaaggagactgcttgggtcacttcatcctttttccccatcctccatgttccttctcctctgttcctagcggtccttccacaaaaatgtttgaaaagcatagccataaactattctatacctccccaaacagacacacacacacacacacatacacacatacacacacacattcagggagagacacagagacattctcatgatctaccttagcaattaatcattcatatgtttgtgtgtgtaatctgcagtgatttttcttgtcatttactcttatttgtttgtatatatttgagagtatttctctcattgatagcaacatcaaaggaggaaaaatgtacttatactttcactctaacactttaaagtttccaaagaactcaattcagaaagttccagaactatatatgggtgttcctctaaaagtttgaagtcaaaaaacatttaccatagaa

SEQ ID NO: 589388 - DNA, 598 bp, Homo sapiens
gttatgccacagatctgtcttcwctgccagggcttttgtgaaatctggtacctagcagacaatgcctgacacttaatatagctgataaatatttgttaggaaaaagaaggaagaaaggaggaaggaacagagggagggagggaggaaagaaagggaattaggaaaggaagcaagtaaaagagaaaggaggggagaagaagagaggaagaaagaaaaaaaggaaggaaggcaaagaaagaagagggcaagggaagaaggagggaagcaaaaggagaagaaggaagggagggagaggcaggttaagggatggagagaggggtggaaggaaggaagaaagagagaaaacaaagaaaggaatgaagagaaaagtagaaaggtagtaagagaggagatggagagatgaaggcaggaaggaaggaaaaaaggaagggagaaaacggaggaatgaagaaagggggagagaaaggaagggaaaaggaggaagggagaaaggtggagaaaagagagggaaggagggaggaaggaaggaagagacaaaaaaaaggatggaaggaatgaatgcagaaaggaatgtaggcagagagggaaaaaggggaga

SEQ ID NO: 589389 - DNA, 533 bp, Homo sapiens
tctgcctgtgtgctgttgtatactatctgccaaaggctgtgcaatctcatctttcactttgtctcctattacctctaggggataagggtgtactggatgcatctttgaggattcatgaacatcaggccagggggattgagctatattaaatttaaggggaaaagttcagatattacatgatgtcctgcatgtgtagttacaggttcattaaggcagctgcttgggtatttattcagtattcaatcaatatttatttagtatttatttattgaacaccaactatgatccagaaactactaggtcagtgacaatacagtcaaatgtattgtctgttacccccaaaataattttgaaaaaaacatatatccttcaatacatttgacacttaaaattttttggtgtgtgtgtttttgtattagtatgaaatataatgttaaacattttytaagataaaatttgcagtaatttgatatgaataaaataacttgactattaattaaacattttctaagataaaatttgcagtaatttga

SEQ ID NO: 589390 - DNA, 568 bp, Homo sapiens
taaatttttatttgctataatttaaatcagttttaagaggtgttgaaataaacatgtttaatcttctgtgctctgtaaaaagtcttaaaaattagttcaacttttttgtattagagctactattaagaggaaaatttagttgcatatagtttagaattatcaataggaggaaaagatattttgatttttcattttgaacatgtttagtggaaacactagcattaagagacaaagaggatggattattttggataatcatctcccaaatgcactcattataatcacatagaatttagcttttcgaaaagcagcctattatttcccactttttcttagataacattcaaatcatttgtattgcaatactgtacatacatatttatcatatttttctggacacatttttaggaaaaacaacactggtttttctggaagtacagaatgaaaatgaaatgggctataatggcagttacatttttcccatttggaagtyttttgttcttttatctcaagatagcacttgccagtgtaggagtttgcaatcagttgcttgctctgctcttctgtt

SEQ ID NO: 589391 - DNA, 533 bp, Homo sapiens
tagtatttctggattggggcatgggattctgcatttcctgccagctctcaggtaatgctcatggcgcaggtccctggaccacactttgagtaactgagccttacagttaaagtgcatgttgycagctccttcccttcacctcctctttttgaggctctttcctctgaagactcctcctctgtccccctctaaagcccctcattccacatcccatctcccaaatgcaaaatctgagctcacagcaatttgggaggccgaggtgcgcagatcacgaggtcaggagttcgagatcagcctggccaacatgtgaaaccctgtctctactaaagatacaaaaaattagctgggcgtggtagtgggcgcctgtaatcccagctactcgggaggctgaggcaggagaatcgcttgaacccaggaagcagaggttgcagtgagccgagctcaccctccatcccgtcgcgccaatgcactccagcctgggtgacagcgcaagactccgtctcaagaaaaaaaaaaaaaaaagcctgagccca

SEQ ID NO: 589392 - DNA, 533 bp, Homo sapiens
tagtatttctggattggggcatgggattctgcatttcctgccagctctcaggtaatgctcatggcgcaggtccctggaccacactttgagtaactgagccttacagttaaagtgcatgttgccagctccttcccttcacctcctctttttgaggctctttcctctgaagactcctcctctgtccccctctaaagcccctcattccacatcccatctcccaaatgcaaaatctgarctcacagcaatttgggaggccgaggtgcgcagatcacgaggtcaggagttcgagatcagcctggccaacatgtgaaaccctgtctctactaaagatacaaaaaattagctgggcgtggtagtgggcgcctgtaatcccagctactcgggaggctgaggcaggagaatcgcttgaacccaggaagcagaggttgcagtgagccgagctcaccctccatcccgtcgcgccaatgcactccagcctgggtgacagcgcaagactccgtctcaagaaaaaaaaaaaaaaaagcctgagccca

SEQ ID NO: 589393 - DNA, 538 bp, Homo sapiens
tctcttgttcaccatcaccagagccccaactccaagggcttcccccagatcttttgcctcctctttggaccctggtgacaggaatcaatggttctygaatattttcatttttctgcataatacagactttcagagaaaaagatactggcaacctggggtacaggatatttgaatggcaatttgccttggaggttagaaattatgtattgctccaaaaatatttgctgacattctagagtggtaaacccagagaatcttatctttccagaagatatttgggttataaaactctagaaattgccatctcacaggagaggggtagtttatactccagaacaaagcattctctctctctctctttctctgtctctaactttcaccctataataaagaaggagcatatgagctagctgtcctatataagctataatactcataatgtgggggcccctctccttggtgcaaattcttgtgcatttacaggtaaaaacattgtgttgccctaggaatggggagccagcactaccatcctactcca

SEQ ID NO: 589394 - DNA, 670 bp, Homo sapiens
ttttgcctcctctttggaccctggtgacaggaatcaatggttcttgaatattttcatttttctgcataatacagactttcagagaaaaagatactggcaacctggggtacaggatatttgaatggcaatttgccttggaggttagaaattatgtattgctccaaaaatatttgctgacattctagagtggtaaacccagagaatcttatctttccagaagatatttgggttataaaactctagaaattgccatctcacaggagaggggtagtttatackccagaacaaagcattctctctctctctctttctctgtctctaactttcaccctataataaagaaggagcatatgagctagctgtcctatataagctataatactcataatgtgggggcccctctccttggtgcaaattcttgtgcatttacaggtaaaaacattgtgttgccctaggaatggggagccagcactaccatcctactccacctgctgttactgctgtaaataattaatgggctgctgtgatccaggggcttggtgcatcttttatcatagatacagacatagacaaagacgtagacatatagatacacataaaaatgtgaaagactaacacactaacttgtaagttgaataaaatatcatgctcttcacagtttcagaattag

SEQ ID NO: 589395 - DNA, 670 bp, Homo sapiens
ttttgcctcctctttggaccctggtgacaggaatcaatggttcttgaatattttcatttttctgcataatacagactttcagagaaaaagatactggcaacctggggtacaggatatttgaatggcaatttgccttggaggttagaaattatgtattgctccaaaaatatttgctgacattctagagtggtaaacccagagaatcttatctttccagaagatatttgggttataaaactctagaaattgccatctcacaggagaggggtagtttatactccagaacaaagcattctctctctctctctttctctgtctctaactttcaccctrtaataaagaaggagcatatgagctagctgtcctatataagctataatactcataatgtgggggcccctctccttggtgcaaattcttgtgcatttacaggtaaaaacattgtgttgccctaggaatggggagccagcactaccatcctactccacctgctgttactgctgtaaataattaatgggctgctgtgatccaggggcttggtgcatcttttatcatagatacagacatagacaaagacgtagacatatagatacacataaaaatgtgaaagactaacacactaacttgtaagttgaataaaatatcatgctcttcacagtttcagaattag

SEQ ID NO: 589396 - DNA, 670 bp, Homo sapiens
ttttgcctcctctttggaccctggtgacaggaatcaatggttcttgaatattttcatttttctgcataatacagactttcagagaaaaagatactggcaacctggggtacaggatatttgaatggcaatttgccttggaggttagaaattatgtattgctccaaaaatatttgctgacattctagagtggtaaacccagagaatcttatctttccagaagatatttgggttataaaactctagaaattgccatctcacaggagaggggtagtttatactccagaacaaagcattctctctctctctctttctctgtctctaactttcaccctataataaagaaggagcatatgagctagctgtcctatataagctataatactcataaygtgggggcccctctccttggtgcaaattcttgtgcatttacaggtaaaaacattgtgttgccctaggaatggggagccagcactaccatcctactccacctgctgttactgctgtaaataattaatgggctgctgtgatccaggggcttggtgcatcttttatcatagatacagacatagacaaagacgtagacatatagatacacataaaaatgtgaaagactaacacactaacttgtaagttgaataaaatatcatgctcttcacagtttcagaattag

SEQ ID NO: 589397 - DNA, 575 bp, Homo sapiens
cttcaagcgtgattagaatggattccgaaacctggcttagggagactaaaataataactctgacaattccaaagagaccctagctcccagaccttggacaagctacaaacatggccaagagatgacaaggaggagaaaagacaatttcaaatcacatgtcagagaagaaccagaaagtctctgacatgccccaagtgtcctcgaccacagctgagccacacacatgatgacttctccatatgatcccaggttaaacagaaaagatataaccaggtataatattgaaactataggcggctatttatgggacccctgggggtaaggtgagctttcggacaagaactgagctgctaggacccatggttgacagataagagaacggctgccttaaaagaaaaagtgatgcagagaaatggtgaaattaagaaaaggagacagattcctgataatgttcattgacacctggattcagccatgcctgaagaccaccctccctgaamtttacactcctttgattctctttatttgcttagagcacacaaagttgagtttccatcactcacaactgaaagaga

SEQ ID NO: 589398 - DNA, 575 bp, Homo sapiens
cttcaagcgtgattagaatggattccgaaacctggcttagggagactaaaataataactctgacaattccaaagagaccctagctcccagaccttggacaagctacaaacatggccaagagatgacaaggaggagaaaagacaatttcaaatcacatgtcagagaagaaccagaaagtctctgacatgccccaagtgtcctcgaccacagctgagccacacacatgatgacttctccatatgatcccaggttaaacagaaaagatataaccaggtataatattgaaactataggcggctatttatgggacccctgggggtaaggtgagctttcggacaagaactgagctgctaggacccatggttgacagataagagaacggctgccttaaaagaaaaagtgatgcagagaaatggtgaaattaagaaaaggagacagattcctgataatgttcattgacacctggattcagccatgcctgaagaccaccctccctgaactttacactcctttgattctctttatttgcttagagcacacraagttgagtttccatcactcacaactgaaagaga

SEQ ID NO: 589399 - DNA, 529 bp, Homo sapiens
tattactagcataacaaatgcaatggaagtctcatgtaattatgttacatatacctgattatcaactgaatatagtgtcctcaaaataagtcattggtatagtttgaagtttttgatrtatactgcaaaattactttgaagaagaattttataaatatccacatgcatatctgctccgtatgaaggtggacagcattacacactgaaggccttatatgtttttaaaaagcctttatcaatgtaatagtcaagaagtaacatcttggccgggtgtggtggctcacacctctaatcccagcactttgggaggctgaggcaggcggatcacctgaggtcaggagtttgagaccagcctggctaacatggtgaaaccctgtctctactaaaaatacaaaaaaaaaaaaaaaaaaattagctgggtatggtggtgcacgcctgtaatcccagctactccagaggctgaggcaggagaatcacttaaacccaggaggcagaggttgcagtgagccgagatcatgccactgcactc

SEQ ID NO: 589400 - DNA, 524 bp, Homo sapiens
atagtgagaccctgtctctacaaaaaaaaaaaactagcaggtctggtggtgcacgcctgtagtcccagctactggggaggctgagatgggaggattggttgagcccaggaggtcaaggctgcggtgagctatgattgcaccactgcactccagcctgggtgatagagcgagaccctgtctcaaaaaaaaaaaaaaaaaacatgggcagccagggagtacctgctctgtgcagtccaccctagaagcccccagtaraacaaggatacaacgatgcattaatgtggggaagacaagtaggaacttgagccaaagcaggcttagggtggggaagagagagaaagaaaaaggcctggggccatggagtggacagagaggaggaatgaatccggttggggcagtgaggaaataggggctcccctcggcctccctcactcctctgatgtcccagaccccaacccaccctcaatatccagctccctgagccccattcccacccctctagaagtccacccaccctgagaccc

SEQ ID NO: 589401 - DNA, 502 bp, Homo sapiens
tagactctctcaggtccatgtctgagcatgccacatcaggacaggtcatgtatattgtgtcaatgtcagaacatgttaacgcatctcaggctatgccacatatctcaggtccatgtcagaagatgtcagagagtactgggcagacagggtgtcctaggtcctttttttttttttttttttggagacagcgtctcactctgtcatcctggctggggtgcagtagaacgatcttggctcactgcaacctccgcctccctggttcaagcaattcgcctcccgagtagttgggactacaggcgcccgccgccacacccagctaatgtttttgtattttttagtagagacggggtttcaccatgttgcccaggctggttttgaactgctgagctcaggcaatccgcccacctcagcctcccaaagtgctagaattacaggcgtgatccaccgtgcccggctagggtgtcctaggtcctygtaaaggcattttgtagagcgttgagct

SEQ ID NO: 589402 - DNA, 591 bp, Homo sapiens
tgcctgatgcatattggatgcttaataaatgtggccattattacctcctctctgagaaagtctggctaataaaccatgttgcctttcaagatagtttttttctaccacgactttaaagactgtcttggaacttacaggcaaaaattgtaatatttgtgctccttgaataatctcttgccttttagagggctgtgcatttaggaggcaattttttctaagactggttgcgggcacctgaaagtgcaaggtggtaggagaaggaaagaagcctcagttaatgttttaaaatgatgtcctgccacaaacattgacctctgttcatagcctaaggaattctgcaccgctgcaccctgcagacttgtcaratcttctctccagctcatattcctccctttttacactcagtcaccttgtccttgattcttatctccaaatacattatattttcttgtttagggccattgtacttccttggaactcttgtgaaagatcagttgcctatacttaacgtgggtctattttctgggatttgtattctggtccattgacctatttgtcttttactaataccacaacatcttgattactgta

SEQ ID NO: 589403 - DNA, 591 bp, Homo sapiens
tgcctgatgcatattggatgcttaataaatgtggccattattacctcctctctgagaaagtctggctaataaaccatgttgcctttcaagatagtttttttctaccacgactttaaagactgtcttggaacttacaggcaaaaattgtaatatttgtgctccttgaataatctcttgccttttagagggctgtgcatttaggaggcaattttttctaagactggttgcgggcacctgaaagtgcaaggtggtaggagaaggaaagaagcctcagttaatgttttaaaatgatgtcctgccacaaacattgacctctgttcatagcctaaggaattctgcaccgctgcaccctgcagacttgtcagatcttctctccagctcatattcctcccttkttacactcagtcaccttgtccttgattcttatctccaaatacattatattttcttgtttagggccattgtacttccttggaactcttgtgaaagatcagttgcctatacttaacgtgggtctattttctgggatttgtattctggtccattgacctatttgtcttttactaataccacaacatcttgattactgta

SEQ ID NO: 589404 - DNA, 385 bp, Homo sapiens
agaagatctagcgcaccctggccaacatggtgaaatcccatctctactaaaaatacaaaaattagctgggcgtggtggcgggcactcgtagtcccagctactcaggaggctgaagcagaatcacttgaacccaggaggcagrggttgcagtgagccgagatcatgccattgcatgcactccagcctggcaacagagcaagaatctttctcaaaaaaaaaaaaaaaaggaagaaagagaaaaagaaaagaaacagacaaagacacagacatagacaaagatgtagacattgacaaagaccaagaattagacaaagacagacacagacatagagaaagatatagacatgagcatatacaaaggcataaacatgacatagacataggc

SEQ ID NO: 589405 - DNA, 385 bp, Homo sapiens
agaagatctagcgcaccctggccaacatggtgaaatcccatctctactaaaaatacaaaaattagctgggcgtggtggcgggcactcgtagtcccagctactcaggaggctgaagcagaatcacttgaacccaggaggcaggggttgcagtgagccragatcatgccattgcatgcactccagcctggcaacagagcaagaatctttctcaaaaaaaaaaaaaaaaggaagaaagagaaaaagaaaagaaacagacaaagacacagacatagacaaagatgtagacattgacaaagaccaagaattagacaaagacagacacagacatagagaaagatatagacatgagcatatacaaaggcataaacatgacatagacataggc

SEQ ID NO: 589406 - DNA, 385 bp, Homo sapiens
agaagatctagcgcaccctggccaacatggtgaaatcccatctctactaaaaatacaaaaattagctgggcgtggtggcgggcactcgtagtcccagctactcaggaggctgaagcagaatcacttgaacccaggaggcaggggttgcagtgagccgagatcatgccattgcatgyactccagcctggcaacagagcaagaatctttctcaaaaaaaaaaaaaaaaggaagaaagagaaaaagaaaagaaacagacaaagacacagacatagacaaagatgtagacattgacaaagaccaagaattagacaaagacagacacagacatagagaaagatatagacatgagcatatacaaaggcataaacatgacatagacataggc

SEQ ID NO: 589407 - DNA, 385 bp, Homo sapiens
agaagatctagcgcaccctggccaacatggtgaaatcccatctctactaaaaatacaaaaattagctgggcgtggtggcgggcactcgtagtcccagctactcaggaggctgaagcagaatcacttgaacccaggaggcaggggttgcagtgagccgagatcatgccattgcatgcrctccagcctggcaacagagcaagaatctttctcaaaaaaaaaaaaaaaaggaagaaagagaaaaagaaaagaaacagacaaagacacagacatagacaaagatgtagacattgacaaagaccaagaattagacaaagacagacacagacatagagaaagatatagacatgagcatatacaaaggcataaacatgacatagacataggc

SEQ ID NO: 589408 - DNA, 538 bp, Homo sapiens
caggtggcatctgtaggcactctttatctagagcaagtggcattcaatgggctctctctcttttttatttttttgtgagacagagtctcactctgttgcccaggctggagtgcagtggtatgaactcagctcactgcaaactctgcctcccgggttcatgagattctcctgcctcagcctcccgagtagctgggatcataggtgcccgccaccacgcccggctaatttttgtatttttagtagagatggggtttcaccatgttggccaggctggtcttgaactcccgacctcagatgatctgcctgccttggccycccaaagtgcttggattacaggcatgagctactgtgcctggccagtaggcactctttatgtattgcaggtggtactgagtaggcactttttatgtagcgcaggcaagagtaggaactcttcatgtagagcaagcagcactcagtaggcaccctttatgtacagaaggcagcccacagtaggtacactttatggagcacaggcaacactcgagcaggcagcact

SEQ ID NO: 589409 - DNA, 538 bp, Homo sapiens
caggtggcatctgtaggcactctttatctagagcaagtggcattcaatgggctctctctcttttttatttttttgtgagacagagtctcactctgttgcccaggctggagtgcagtggtatgaactcagctcactgcaaactctgcctcccgggttcatgagattctcctgcctcagcctcccgagtagctgggatcataggtgcccgccaccacgcccggctaatttttgtatttttagtagagatggggtttcaccatgttggccaggctggtcttgaactcccgacctcagatgatctgcctgccttggcctcccaaagtgcttggattacaggcrtgagctactgtgcctggccagtaggcactctttatgtattgcaggtggtactgagtaggcactttttatgtagcgcaggcaagagtaggaactcttcatgtagagcaagcagcactcagtaggcaccctttatgtacagaaggcagcccacagtaggtacactttatggagcacaggcaacactcgagcaggcagcact

SEQ ID NO: 589410 - DNA, 583 bp, Homo sapiens
tagggacatgtcctgagtccatactgctccccacaaacctcccctgtgaggacctcctcatatgcccacctctgggctgaaatgactcccagaacaaggaaatctttcctctcaagctaagtgggcctctgtgagtggacagtgtgtcttttccttctgccttgggatgcgctcttgggacttgggggtggccccaagagagatagagcaggaggaatgtagacagatagataggtaataggatagatggatggatggatgcacagatagggtgaatagatggctggctggctggataagtaggtgggtagatagacagatagatagatagataacaggatagatggatggatggacagatggatgcatggataagatggatggatggatggatggatggatggataatacatacataaagtagtagataagatggatacattaggtggatagataggtagagtggatatgtaggatggatagattagatggatggatagatagctagatgattgatagataataggataaatggatgagtggatgwatgtacagataagatggatggatggatggatggatg

SEQ ID NO: 589411 - DNA, 548 bp, Homo sapiens
tttattttctttctttgggatagaaatttcttctctttcttttcagtagtggaatttctgggttatatggcagttctagttttagtttcttgaggaacctctgtgctgttctctgcagtggctgcactaatttatattcccaccaacagtgtgtrtgagttcccctttatccatatcctcaccagcatctatcattgcctgtctttttgataaaagccattttaactgggatgagatgatatctcattgtggttttgatttgcatttctctgactgttagtgacattgagcatttttccatctacctattggccatttgtatgttttattttaagaaatgtctattcagatcttttgcccattttaaaatcagatatttggttacttttcctattgagttgtttgagctgcttatatattctggttattaatcgcttgtcagatgagtagtttgtgagtattttctgccattctgtgggttgattcttcgctttgttgattgtttcctttgctgtgcagaagcttttttgcttgatataatctcattt

SEQ ID NO: 589412 - DNA, 548 bp, Homo sapiens
tttattttctttctttgggatagaaatttcttctctttcttttcagtagtggaatttctgggttatatggcagttctagttttagtttcttgaggaacctctgtgctgttctctgcagtggctgcactaatttatattcccaccaacagtgtgtatgagttcccctttmtccatatcctcaccagcatctatcattgcctgtctttttgataaaagccattttaactgggatgagatgatatctcattgtggttttgatttgcatttctctgactgttagtgacattgagcatttttccatctacctattggccatttgtatgttttattttaagaaatgtctattcagatcttttgcccattttaaaatcagatatttggttacttttcctattgagttgtttgagctgcttatatattctggttattaatcgcttgtcagatgagtagtttgtgagtattttctgccattctgtgggttgattcttcgctttgttgattgtttcctttgctgtgcagaagcttttttgcttgatataatctcattt

SEQ ID NO: 589413 - DNA, 548 bp, Homo sapiens
tttattttctttctttgggatagaaatttcttctctttcttttcagtagtggaatttctgggttatatggcagttctagttttagtttcttgaggaacctctgtgctgttctctgcagtggctgcactaatttatattcccaccaacagtgtgtatgagttcccctttatccatatcctcaccagcatctatcattgcctgtctttttgataaaagccattttaactgggatgagatgatatctcattgtggttttgatttgcatttctctgactgttagtgacattgagcatttttccatctacctattggccatttgtatgttttattttaagaaatgtctattcagatcttttgcccattttaaaatcagatatttggttacttttcctattgagttgtttgagctgcttatrtattctggttattaatcgcttgtcagatgagtagtttgtgagtattttctgccattctgtgggttgattcttcgctttgttgattgtttcctttgctgtgcagaagcttttttgcttgatataatctcattt

SEQ ID NO: 589414 - DNA, 449 bp, Homo sapiens
cctcttcccacttccccacagctcctgacaccaccaatctcctttctgtctctatagatttgcctattctggacatttttttttttgagacagagtctcactctgttgcccagactggagtgcagtggcgtgatggcatgatctcagctcaccacaacctccrcttcctgggttcaagtgattctcctgcctcagcctcccaagtaacttggattacaggcatatcccatgacgcccagctaatttttcttgtatttttagtagcgacggggtttcaccctgttggccaggctgctcttgaactcctgacctcaagtgatctgcctgcctgggcctcccaaagtgcttggattataggcatgagccaccacacccagatggacatttcttataaataaatcatacactatgtgaccttttgtgtctgacttctttcacagactataagt

SEQ ID NO: 589415 - DNA, 449 bp, Homo sapiens
cctcttcccacttccccacagctcctgacaccaccaatctcctttctgtctctatagatttgcctattctggacatttttttttttgagacagagtctcactctgttgcccagactggagtgcagtggcgtgatggcatgatctcagctcaccacaacctccacttcctgggttcaagtgattctcctgcctcagcctcccaagtaacttggattacaggcatatcccatgacgcccagctaatttttcttgtatttttagtagcgacggggtttcaccctgttggccaggctgctcttgaactcctgacctcaagtgatctgcctgcctgggcctcccaaagtgctkggattataggcatgagccaccacacccagatggacatttcttataaataaatcatacactatgtgaccttttgtgtctgacttctttcacagactataagt

SEQ ID NO: 589416 - DNA, 449 bp, Homo sapiens
cctcttcccacttccccacagctcctgacaccaccaatctcctttctgtctctatagatttgcctattctggacatttttttttttgagacagagtctcactctgttgcccagactggagtgcagtggcgtgatggcatgatctcagctcaccacaacctccacttcctgggttcaagtgattctcctgcctcagcctcccaagtaacttggattacaggcatatcccatgacgcccagctaatttttcttgtatttttagtagcgacggggtttcaccctgttggccaggctgctcttgaactcctgacctcaagtgatctgcctgcctgggcctcccaaagtgcttggattayaggcatgagccaccacacccagatggacatttcttataaataaatcatacactatgtgaccttttgtgtctgacttctttcacagactataagt

SEQ ID NO: 589417 - DNA, 385 bp, Homo sapiens
cacgttgtgcttttggtttgcataatgggaataatgtttagcatcttttcaygtgctcatttggcaggaaaatagcacttgtaaacaaaattacatgcaaatgtgatatgacacagctatatagatgtaaataaacattttcatatgtaaaaagatcacatatgaattaaaaactggaagcatatgcaagaaaatataaacagtgattattctgacattttgaaattatggatgatttttatttcttgcaatttcttctataagcatgcattatttatgaaacttaaactttaaagggaagaaaaattgactttcagcatagaatatattaaatagttatttatttcgttttgcaatgttccattcttattttgcagccaataat

SEQ ID NO: 589418 - DNA, 385 bp, Homo sapiens
cacgttgtgcttttggtttgcataatgggaataatgtttagcatcttttcatgtgctcatttggcaggaaaatagcayttgtaaacaaaattacatgcaaatgtgatatgacacagctatatagatgtaaataaacattttcatatgtaaaaagatcacatatgaattaaaaactggaagcatatgcaagaaaatataaacagtgattattctgacattttgaaattatggatgatttttatttcttgcaatttcttctataagcatgcattatttatgaaacttaaactttaaagggaagaaaaattgactttcagcatagaatatattaaatagttatttatttcgttttgcaatgttccattcttattttgcagccaataat

SEQ ID NO: 589419 - DNA, 385 bp, Homo sapiens
cacgttgtgcttttggtttgcataatgggaataatgtttagcatcttttcatgtgctcatttggcaggaaaatagcacttgtaaacaaaattacatgcaaatgtgatatgacacagctatatagatgtaaataaacattttcatatgtaaaaagatcacatatgaattaaaaactggaagcatatgcaagaaaatataaacagtgattattytgacattttgaaattatggatgatttttatttcttgcaatttcttctataagcatgcattatttatgaaacttaaactttaaagggaagaaaaattgactttcagcatagaatatattaaatagttatttatttcgttttgcaatgttccattcttattttgcagccaataat

SEQ ID NO: 589420 - DNA, 496 bp, Homo sapiens
agttttgagatctattgcatgcatggtgactacagttaataataataaatttctcaaaattgctaagagagcaaatttcaaatattctcaccacaaaaatgatgagtatatgagatgacgggtatgtttattaaattgacttaatcattccacgttgtatacatatatcataatatcacattgcaccccataaacatatataattaaaatttgccaattaaaaataaaaacgaactaattttccaaaactcatatttttagaaaaagaaaagctcccaaagatatattgttaatgtgcagatctgtctcttctttayttccttttatttcaatagcatttgggatataagtggtttggttacatggatgatttctatagtggtgaattctgaggtttttgtgcacccatcacccatgcagtgtatactgtccccaatatgcagtcttttctcccttacccggctcccaaccttgctctccgagtctccaaagctca

SEQ ID NO: 589421 - DNA, 601 bp, Homo sapiens
taataataataaatttctcaaaattgctaagagagcaaatttcaaatattctcaccacaaaaatgatgagtatatgagatgacgggtatgtttattaaattgacttaatcattccacgttgtatacatatatcataatatcacattgcaccccataaacatatataattaaaatttgccaattaaaaataaaaacgaactaattttccaaaactcatatttttagaaaaagaaaagctcccaaagatatattgttaatgtgcagatctgtctcttctttacttccttttatttcaatagcatttgggatataagtggtttggttacatggatgatttctatagtggtgaattctgaggttttwgtgcacccatcacccatgcagtgtatactgtccccaatatgcagtcttttctcccttacccggctcccaaccttgctctccgagtctccaaagctcattatatcactctctatgtatttgtgtcctcacagcttagctcccacttataggtgaaaatatgtggtatttggttttctattcttgagttacttcacttagaataatggcctccagctccatccaagttgcggcaaaagac

SEQ ID NO: 589422 - DNA, 601 bp, Homo sapiens
taataataataaatttctcaaaattgctaagagagcaaatttcaaatattctcaccacaaaaatgatgagtatatgagatgacgggtatgtttattaaattgacttaatcattccacgttgtatacatatatcataatatcacattgcaccccataaacatatataattaaaatttgccaattaaaaataaaaacgaactaattttccaaaactcatatttttagaaaaagaaaagctcccaaagatatattgttaatgtgcagatctgtctcttctttacttccttttatttcaatagcatttgggatataagtggtttggttacatggatgatttctatagtggtgaattctgaggtttttgtgcacccatcacccatgcagtgtatactgtccccaatatgcagtcttttctcccttacccggctcccaaccttgctctccgagtctccaaagctcattatatcactctstatgtatttgtgtcctcacagcttagctcccacttataggtgaaaatatgtggtatttggttttctattcttgagttacttcacttagaataatggcctccagctccatccaagttgcggcaaaagac

SEQ ID NO: 589423 - DNA, 601 bp, Homo sapiens
taataataataaatttctcaaaattgctaagagagcaaatttcaaatattctcaccacaaaaatgatgagtatatgagatgacgggtatgtttattaaattgacttaatcattccacgttgtatacatatatcataatatcacattgcaccccataaacatatataattaaaatttgccaattaaaaataaaaacgaactaattttccaaaactcatatttttagaaaaagaaaagctcccaaagatatattgttaatgtgcagatctgtctcttctttacttccttttatttcaatagcatttgggatataagtggtttggttacatggatgatttctatagtggtgaattctgaggtttttgtgcacccatcacccatgcagtgtatactgtccccaatatgcagtcttttctcccttacccggctcccaaccttgctctccgagtctccaaagctcattatatcactctctatgtatttgtgtcctcacagcttagctcccacttataggtgaaaatatrtggtatttggttttctattcttgagttacttcacttagaataatggcctccagctccatccaagttgcggcaaaagac

SEQ ID NO: 589424 - DNA, 592 bp, Homo sapiens
actacgctccagcctgggtgacagagcgagactctgtctcaaaaacaaaaacaaaaaaacrgcattcttagttattttattcttttgtggctattgtgaatggggttgcattcttgatctggctctcagcttggacataattttttcttaattagaaatgacccagatgtttaatgagtatctattatttaatttaacataactttaagattttgaattacacaaaaagtttttaataagcatttatctcatttatgcttacccaatttatttatttttaataggttgactagactatttatgaaaacttagatattagacaaagttagtcattatcaaaagttatgtatggttatgttaaacatttttatagcctgtgattatcaggtgttcacccgagtgagaaacttaaattaaaatatgggtattttgtcaacaactcagaagatttagctgtttttattaagctaacaatattaaatgtcttatttattaaaattgcacaaacaaagatcatttggttttgaccagatttatagtcttataacctttgtgtcaaacccaggcaccttaaaatatctagtggagagaa

SEQ ID NO: 589425 - DNA, 592 bp, Homo sapiens
actacgctccagcctgggtgacagagcgagactctgtctcaaaaacaaaaacaaaaaaacggcattcttagttattttattcttttgtggctattgtgaatggggttgcattcttgatctggctctcagcttggacataattttttcttaattagaaatgacccagatgtttaatgagtatctattatttaatttaacataactttaagattttgaattacacaaaaagtttttaataagcatttatctcatttatgcttacccaatttatttatttttaataggttgactagactatttatgaaaacttagatattagacaaagttagtcattatcaaaagttatgtatggttatgttaaacatttttatagcctgtgattatcaggtgttcacccgagtgagaaacttaaattaaaatatgggtattttgtcaacaactcagaagatttagctgtttttattaagctaacaatattaaatgtcttatttattaaaattgcacaaacaaagatcatttggttttgacsagatttatagtcttataacctttgtgtcaaacccaggcaccttaaaatatctagtggagagaa

SEQ ID NO: 589426 - DNA, 572 bp, Homo sapiens
ctcaggcagggagcattgtcctgactgcccccttctctcccacaggcattatctgcctcatcagtgtttttggaacccatcacaacccagccgtgtggccggaccctgaggtgcgggccccccgtctctgtttttgtccattccaaggctcctagaggagggggcagggttttgatcaggagaatccaacatcacctccctccaagacacacaccactgtctctccaaggctggcggactgggagaccccacccggcaacccttcttggtctcgcctccaggtctatgacccctttcgctttgacccaaagaacatcaaggagaggtcacctctggcttttattcccttctcagcagggcccaggtaagrgcggcctgtgtttgaggcggggacggggagataggtgcaggggtctgggcatgacagtggggaaaagggggacattgtagacggtccgagttccagctctccttccctcacctcctctggagtttatgggaaaaggcccacagagtaggattgggttggtcctagaaggatccctagtgagctcagagctccctcctacccc

SEQ ID NO: 589427 - DNA, 614 bp, Homo sapiens
ggggtgaggtgttatctcactgtggttttgatttacgttttttgggaaccaaaagtaaacaggagtagctatatttatatcagrtaaaatagactttaagttaaaatctgtaaaaagagacaaagatgtttattatataataataaagggatcaattcaactagaggaaataattgcaaatgttgtaaatatttacaatattatttacacccaatagtagagtacccagatatcgaaagcacacattattagatctaaagagagacatatactgtgacacaataatcactggggacttcagcaacccactgtcagcattggacagttcatctagactagcagtctccatcttttttggcaccagggacgagtttcacggaagacgattttcccatggacgaaggtaggggatggttttgggatgattcaagcacattacacttatcattagatcctcataaggagtgtgtaaactagacgcctcatgtttgcagttcacagtagggttcacattcctatgagaattgaatgctgctgctgatctgcatccgatcagcagggcaagaggtggagctcacctttgcttgcttgcccaccactcacctcctgctgtg

SEQ ID NO: 589428 - DNA, 614 bp, Homo sapiens
ggggtgaggtgttatctcactgtggttttgatttacgttttttgggaaccaaaagtaaacaggagtagctatatttatatcagataaaatagactttaagttaaaatctgtaaaaagagacaaagatgtttattatataataataaagggatcaattcaactagaggaaataattgcaaatgttgtaaatatttacaatattatttacacccaatagtagagtacccagatatcgaaagcacacattattagatctaaagagagacatatactgtgayacaataatcactggggacttcagcaacccactgtcagcattggacagttcatctagactagcagtctccatcttttttggcaccagggacgagtttcacggaagacgattttcccatggacgaaggtaggggatggttttgggatgattcaagcacattacacttatcattagatcctcataaggagtgtgtaaactagacgcctcatgtttgcagttcacagtagggttcacattcctatgagaattgaatgctgctgctgatctgcatccgatcagcagggcaagaggtggagctcacctttgcttgcttgcccaccactcacctcctgctgtg

SEQ ID NO: 589429 - DNA, 467 bp, Homo sapiens
tatactgtgacacaataatcactggggacttcagcaacccactgtcagcattggacagttcatctagactagcagtctccatcttttttggcaccagggacgagtttcacggaagacgattttcccatggacgaaggtaggggatggttttgggatgattcaagcacattacacttatcattagatcctcataaggagtgtgtaaactagacgcctcatgtttgsagttcacagtagggttcacattcctatgagaattgaatgctgctgctgatctgcatccgatcagcagggcaagaggtggagctcacctttgcttgcttgcccaccactcacctcctgctgtgcagcctggttcctaacatgcatcggattggtattctatacatacatatattaattaatatatattataatatgtctttcctttttttggtgatcttttcagtgtctttcatcagtgtttt

SEQ ID NO: 589430 - DNA, 435 bp, Homo sapiens
cacaataatcactggggacttcagcaacccactgtcagcattggacagttcatctagactagcagtctccatcttttttggcaccagggacgagtttcacggaagacgattttcccatggacgaaggtaggggatggttttgggatgattcaagcacattacacttatcattagatcctcataaggagtgtgtaaactagacgcctcatgtttgcagttcacagtagggttcacattcctatgagaattgaatgctgctgctgatctgcatccgatcagcagggcaagaggyggagctcacctttgcttgcttgcccaccactcacctcctgctgtgcagcctggttcctaacatgcatcggattggtattctatacatacatatattaattaatatatattataatatgtctttcctttttttggtgatctttt

SEQ ID NO: 589431 - DNA, 437 bp, Homo sapiens
acctagctagctgctgctagtggaacactgtgggtgcaagacctgtcttgccaagagtgtaggagctgggtgtggcttattgccacctgctactccccattccccatacagactcttctgtgaagcagaggcagctgtgctcctccctggacattattcctgcaaccagagaaccactctctgatccccagtggggctactgcttttgtccagaggtggagagccagagtgcggacttgcctgattgagctctcacttggctttgcccctccacctgccctgatatattaatacgtagggcagaaatttttgggagccctatggcccccccgcccggcccgccactgcctgagacgcgagagtacctcctctgggtaacatragacagacacaaattccactgctaccaccacagctggtgttattttgcaagcgcc

SEQ ID NO: 589432 - DNA, 634 bp, Homo sapiens
taaacaaaatagaaacaaaaaatatatacaaaggttcaatgaaacaaaaagtggttttttggaaagataaactcagtctgggcaaggtggctcacactcgtaatcccagcacttcaggaggctgaggtgggtggatcacgacctcaggagttcaagaccagcctgggcaacatagtgaaaccctgtctctacaaaaaaaaaaaatgcacaaattagccrggcacagtggtgcatgcctgtagtcccagctacttcggaggctgaggtgggaggatctcttgagcccgggaggtggaggttgtagtgagccaagatcgcaccactgactccagcctgggtgacagaaataaaactgtatctcaaaaagaaaaaaaaaagataaaatcaataaactactagctataccaaccaaacaaagagaggtcccaaataaaatcagaaatgaaaaagagatattacaactgataacatctaaataaaaagatcatcagactagtatgaacaactgcacactgacaaactggaaagcctagaggaaatggataattttctaaacacatacaacttaccaaggttgaatcaggaagaaataaaaaacctcaacaggccaataatgagtaagtaacaagattca

SEQ ID NO: 589433 - DNA, 634 bp, Homo sapiens
taaacaaaatagaaacaaaaaatatatacaaaggttcaatgaaacaaaaagtggttttttggaaagataaactcagtctgggcaaggtggctcacactcgtaatcccagcacttcaggaggctgaggtgggtggatcacgacctcaggagttcaagaccagcctgggcaacatagtgaaaccctgtctctacaaaaaaaaaaaatgcacaaattagccgggcacagtggtgcatgcctgtagtcccagctacttcggaggctgaggtgggaggatctcttgagcccgggaggtggaggttgtagtgagccaagatcgcaccactgactccagcctgggtgacagaaataaaactktatctcaaaaagaaaaaaaaaagataaaatcaataaactactagctataccaaccaaacaaagagaggtcccaaataaaatcagaaatgaaaaagagatattacaactgataacatctaaataaaaagatcatcagactagtatgaacaactgcacactgacaaactggaaagcctagaggaaatggataattttctaaacacatacaacttaccaaggttgaatcaggaagaaataaaaaacctcaacaggccaataatgagtaagtaacaagattca

SEQ ID NO: 589434 - DNA, 605 bp, Homo sapiens
aggcatcaaggcctagagtgaaaaacagattatccccatataaacactagaaagaagctatatgtgaaactgctttgtgatgtgtgcattctgctcacagagtgacatatttattttgatttggcaggaaggaaacactcattttgtagaagctgcaaagggagatttaggagcccactaaagcctatagtgaaaaattaaatatcctgaaataaaaactagaaagaagctatctgtgaaactgttttatgatgtgtccattcagctcacagagttgaaccttacttttgattcagctgtttggaaacactatttttatagaatctgtgaagggaaatttcaaagtccactggggccagtagtgaaaaattgaatatccctggaaaaaaaaattgtaagaagctatctgtgaaactgctttgtgatgtgtacattcagatcacagagtgaaacctctctgttgattcagaagtttgaatacactmtttttgtagaatctgcaaggggatatttcagggaacattgaggcctagtgtgaaaaaccaaatatatcctgaaataaaaactagaaagaagctatctttgaaactgttttgtgatgtgtg

SEQ ID NO: 589435 - DNA, 583 bp, Homo sapiens
tgtttcagaccacagtgaagtttatagtgaaaaaccaaatatcttgcaatgaaaaactagaaagaagctatgtgtgaaactgcttggtgatgagaagactcagcttgcagagttaaatctttcttttgattcaggagattggaaacactattttttgtagaatatgcgagaaaacattacagagcacagtgagccctatagtgaaaaacagaatatcttacaataaaaactaaaaagaagctatctgtgaaactgctttgtgatgtgtggagtcagatcacattatatctttattttgactcagcagtttggaaaaactctttttgtaggatcagctaagggaaatttcagagtgcagtaatgcctgtattgaaaaaccgaatatctcaccagaaaagctaaaaagaagctrtctgtgaaactgctttgtgatgtgtggactcagctcacagaattaaacctgtcttttgattcaaaaggttggaaacactctttgtagaatatgcaaatggatatttcagagcatattatggcctatagtgcaaaatagaatatcccaagataataattaaaaagaagctat

SEQ ID NO: 589436 - DNA, 596 bp, Homo sapiens
tttgtgatgtgtgaattcaaaactattttagtagggcctgcaaggggacattttggggctctataaagccaaaaatgaaaaacagaatatcccgcaataaaaactagaaagaagctatctgtgaaactgctttgtaatgtgtgcaatcagctcacagagtgaaaccttccttttgattcagcaggtgggaatactctttttgtagagtctgtgaagggacattttgatgcccactgaggcctatacagaaaagctgaattaccctagataaaaactagaaagaagatgtttgtgaaactgctttgtgacttgttcatttaggtcacagagttaaaccttactttcaattcagcaggttggaaacttttttttgtagagtctgtgaagggatatttcagagccaactaaggcctrtagtaaaaaacggaatatcctgaaataaaaactagaaataagctatcttgaaactgctttacaatgagtgcattcaactcacagaattaaatctttcttttgattcagtagtttggaaacaatctttttctagaaaatgtgaaaggatattttggagggcattaagtcctatagtgaaaaat

SEQ ID NO: 589437 - DNA, 600 bp, Homo sapiens
gttggattcagcaagttggaaacactctttttggagaatctgtaaaggtacatttgggagcccattttgtcctatgaagaaaaacagaatatccccagatgaaaattagaaagaagctatctgtgaaactccgttattatgtgtgggttcatctcacagatttaaaccattcttttgattcagcaggttggaaacattatttttggagaatctgcaaaaagacatttgggagcccattgagacctatggggaaaaaccaaatatttccagaaaaaaaagtagatagaacttatctttgaaactactttgtgatgtgtggattcatctcacagagttaaactttttgtgattcagcagtttggaatcactctttttgaagtatctgtgaagaaacmcttcggagcctattgcagcctattaggaaaactgaatatttccaggtaaactggacagaagctatctgtgatactgctttgtgatctgtggattcctcttacagggttaaaccattttttttgattcagcaggttggaagtactctttttgaagaatctgtgaggaaaggttgggagcccattgagacctatggggaataacaga

SEQ ID NO: 589438 - DNA, 602 bp, Homo sapiens
atcaccctgctctcctaccacattcctcttgctgagaaaatgaaaataataatcaataaaaactgaaggaactcagagaccggtgctagtgcaggtccttggtatgctgagtgycagtctcctgggcccactgttgtttctctgtacgttgtctctgtgtcttatttcttttcctagtctctcatcccacctgaggagatatgtccacaggtgtggaggaaaaggtcaccccttcaaatatttttgtagaatctgtgaagggacacttgaaaacccatttaggcctatgggggaaaacagaatatccccatataaaaactagaaagaagctatctgtgaaactgctttgtgatgtgtggattcatctcactgagttaaacctttctttttattcagcaggttggaaaaactcttcttgtgtaatctgccaagggacatttgggtgacctttcagggttatgtggaaaaactgaatatcttcagataaaaagtagaaaaacactatttgtgaaactgctttgtggtgtgtggattcatctaacagagttaaacctttctttgattaagcaggtttgaaatactctatttggagatactgtgaa

SEQ ID NO: 589439 - DNA, 578 bp, Homo sapiens
gggtttcactatgttgtccaagctggtctggaactcctgaactcaggcaattcaccaatctctgccttccaaagtgctgggattacaggcatgagccaccacatctggccctggattttacatagaatttaaagagctcatgatccccttgaagttctttcatcatcttcccatacaagaagcctagttaagaatatctgagttagaggttctgtacggtctttcaatcagggtgtaagaaatggacaggatctcagagttcaatgaatataatcctyataaattcatatcttacagattcagtcaatgaggcccagagagttttcatggctgactcatagcatagctggtggagacctatatcttggttttctgaatcccagttctcacacagtgttgtgttaatatactgtgtttaaaagaaatgtaaagaaggagagaggactgtgaagagactggctgggggcaaaaaaagcaatagttattcataggatgtatagattggctattactcagcttcttttttgtgttcagcatagattagttttctagcttcagctgaaaaagaccaagcctga

SEQ ID NO: 589440 - DNA, 578 bp, Homo sapiens
gggtttcactatgttgtccaagctggtctggaactcctgaactcaggcaattcaccaatctctgccttccaaagtgctgggattacaggcatgagccaccacatctggccctggattttacatagaatttaaagagctcatgatccccttgaagttctttcatcatcttcccatacaagaagcctagttaagaatatctgagttagaggttctgtacggtctttcaatcagggtgtaagaaatggacaggatctcagagttcaatgaatataatccttataaattcatatcttacagattcagtcaatgaggcccasagagttttcatggctgactcatagcatagctggtggagacctatatcttggttttctgaatcccagttctcacacagtgttgtgttaatatactgtgtttaaaagaaatgtaaagaaggagagaggactgtgaagagactggctgggggcaaaaaaagcaatagttattcataggatgtatagattggctattactcagcttcttttttgtgttcagcatagattagttttctagcttcagctgaaaaagaccaagcctga

SEQ ID NO: 589441 - DNA, 656 bp, Homo sapiens
ctctgctagacgaatgcacacatcacaaatcaatttctcataaaatttctttctgctttttctcctaagataagtcrtttttcaatgtaagtgtgaatgtgctcccaaatatctcttcacagattctataaaaagagtgtttccaaactgctccatccataggaatgtttaactctgtgagatgaatgcacaaaacacaaagcaatttctcagacagctactctgtaggttttctctgaagatatttccttttgcaccataggcctcaaggcgctccctagtatcgcttcacagattctacaaaagcagcgtttccaaactacacaatcaaaagaatagattaactctgtgagacgaatgcacacatcacaaatcagtttcctaaaaagcgtctttctagtgtttatctgaagatatttcctttttcaccataggcttcaatgtgctcacaaatatcccttcacagattatacaaaaacagggcttccaaactgctccatcaaaagaaaagattaactctgtgagatgaatgcacacatcacaaatcagtttctcagaaagcttctttctagttcttctctgagcataattcatttttccacataggcctcaatgcactcccaaatatatcttcacagattctacaaaaacagttt

SEQ ID NO: 589442 - DNA, 499 bp, Homo sapiens
gtatgatatagtactctgtttatgtgttgttagcttccacttgctaatatgctatttaggacttttatgtctatgttcatcagtgaaattgaaaggtaattttcatttcttttaatatccctttcaggttatggtattatgattacattgacctcataatttaatttgggaaatggtccctttatttttatgcactgaaagaatttgtgtaatggtttatttcttccttaactgtttgaaagaattcactgttaaagcatgtaggcctggaattttatttttgtacawgtttttagtaggaatttaattagataaagtatttttagtttgttttattacttcttgtgtcaattttggtaaactttgttttcctaggaaatttatcttttatttaaatttccaaatttggcacaaagttgttcataacattttctcatgttctgaagaatctgtggtgacatctcttttcatttctgtgattgggaatctgtattttatc

SEQ ID NO: 589443 - DNA, 559 bp, Homo sapiens
agtgccacacacttttaaaccatcagatctcatgaaggctcactcactatcatgagaacagcatgggagaaatatgccagcataattcartcacctccaaccaggtgcctctcccaacattgggaattagaattcaacatgagatttgagtggggacacagagccaaaccatatcacccatcatcaaaacatcactaaagtatgatacatcatatgcaatatctagttttttatcccttacccccattcccaccctctcccaagtctccacagtccattatatcattctgtatgcctttgcatacccatagcttagctcccacttataagtgggaacatatggtatttggctttctattcctgagttacttctcttaaaataatggctttcggctccatccaagttgctgcaaaagatattatttgattcttttttatggctgtgtagtattccatagtgtatacatactgtatgtctttatccactcattagttggtgggcacataacttggttccatatccttgcaattgttaattgtgctccaacagacatacata

SEQ ID NO: 589444 - DNA, 514 bp, Homo sapiens
atttcattgtggttttaatttgcatttccctgatgattagtgacattgagtatttttttcatatgtttgttggccatttgtatatcttttttttttttttttaraaatgtctgttcatctcatttgcccactttttgatgggattatttatcttcttcctgctgatttgagttccttgtagattctggatgttagtcctttgtcagatgcatagtttgcaaatattttctcctaatctatgtgttgtctgctttctctgctgattatttctttggccatacagttcaattaggtcctatttatttatttttgtttttgttgcattttcttttggggtctgagtcatgaattctttgcctgggtcaatgtccagaagagtttctcctaggttatcttcttgaatttttagggcttcagccttcagatttaagtttttgatcatcttgagttgatttttatataaggtgaaagacaggtatccagtttcattctattatatgtggctatccaattt

SEQ ID NO: 589445 - DNA, 532 bp, Homo sapiens
aatctaatttattattttattagaagtgggtatcagagtgatgcaggactgtggatttaagaaatctgtaaatctctttaataaaggcctggggaattattagcaaggacaaatgtaaaatgcttgacagttacakttctaaaagaaaaacacaataatctcattaaagaaattactgacagcggctcacagatgttaatggttgaagaaacaaaggacacaatatcagaaagcagattatcttcttccccttttagaattttactatcgatctaacttactgtgcacatcgaaataacaaatttcagtttttcactcaagaattctctttctcagtaacaataggtaatttagaataaaaaatatttttatacaatggccactagaatttaagcagaaagaattgttaaagtcattaaaggaagaggtttgtataaaaatgatactgaactatgcaacataacaaccataagaaagactgccctgaaagcaaataatatttacattatgggataatacagatatagatata

SEQ ID NO: 589446 - DNA, 532 bp, Homo sapiens
aatctaatttattattttattagaagtgggtatcagagtgatgcaggactgtggatttaagaaatctgtaaatctctttaataaaggcctggggaattattagcaaggacaaatgtaaaatgcttgacagttacatttctaaaagaaaaacacaataatctcattaaagaaattactgacagcggctcacagatgttaatggttgaagaaacaaaggacacaatatcagaaagcagattatcttcttccccttttagaattttactatcgatctaacttactgtgcacatcgaaataacaaatttcagtttttcactcaagaattctctttctcagtaacaataggtaatttagaataaaaaatatttttatacaatggccactagaatttaagcagaaagaattgttaaagtcattaaaggaagaggtttgtataaaaatgatactgaaytatgcaacataacaaccataagaaagactgccctgaaagcaaataatatttacattatgggataatacagatatagatata

SEQ ID NO: 589447 - DNA, 489 bp, Homo sapiens
attattctggctacatgctgattgttatgttattctagaacctggcttctggcccccgggtcaccaatttcaggccactctcaagcatagtaatcaatcttgttaagggcagtggcatctgtcactgttctgagcttcctccattgccaatgagtggttttgtgggattcccagtacgaagcatatggccgagtggggtggctcatgcctgtaatcccagcacttggggaggccaaggcgggcagatcacctgaggtcaggagttcataaccagcctggccaacatggtaaaaccccatctctacaaaaaatacaaaaattagcttggcgtgttggcaggygcctgtaatcccagctacttgggaggctgaggcagcagaatcgcttgaacccaggatgtggaggttgcagtgagctgaggtcaggccattgcactccagcctggggaacaagagcgaaactccatctcaaaatcaatcaatcaatcat

SEQ ID NO: 589448 - DNA, 489 bp, Homo sapiens
attattctggctacatgctgattgttatgttattctagaacctggcttctggcccccgggtcaccaatttcaggccactctcaagcatagtaatcaatcttgttaagggcagtggcatctgtcactgttctgagcttcctccattgccaatgagtggttttgtgggattcccagtacgaagcatatggccgagtggggtggctcatgcctgtaatcccagcacttggggaggccaaggcgggcagatcacctgaggtcaggagttcataaccagcctggccaacatggtaaaaccccatctctacaaaaaatacaaaaattagcttggcgtgttggcaggtgcctgtaatcccagctacttgggaggctraggcagcagaatcgcttgaacccaggatgtggaggttgcagtgagctgaggtcaggccattgcactccagcctggggaacaagagcgaaactccatctcaaaatcaatcaatcaatcat

SEQ ID NO: 589449 - DNA, 489 bp, Homo sapiens
attattctggctacatgctgattgttatgttattctagaacctggcttctggcccccgggtcaccaatttcaggccactctcaagcatagtaatcaatcttgttaagggcagtggcatctgtcactgttctgagcttcctccattgccaatgagtggttttgtgggattcccagtacgaagcatatggccgagtggggtggctcatgcctgtaatcccagcacttggggaggccaaggcgggcagatcacctgaggtcaggagttcataaccagcctggccaacatggtaaaaccccatctctacaaaaaatacaaaaattagcttggcgtgttggcaggtgcctgtaatcccagctacttgggaggctgaggcagcagaatcgcttgaacccaggatgtggaggttgcagtgagcygaggtcaggccattgcactccagcctggggaacaagagcgaaactccatctcaaaatcaatcaatcaatcat

SEQ ID NO: 589450 - DNA, 546 bp, Homo sapiens
ttctttcctttctaaatattctgtaattttcctgttataataagagaaaagtaaaatgtagaccaaaattgagttagtaaagtgtactttattttttatgacgcaactaaccacatcccatatttggcctgccaaatatcactactcacctggtagcctttttccttaattgtggacacagtccctgagaagaaaaatattaatcttataaactaaaacaattacacaagaagtattttatctcaaagcagcccctgcatagagcaggcctgggtacacagtttaccgcagtgagtcaacctgcagggctgcactggctctggagcrggctcaggggagggcagtgtctataaagagatctggcccatgtaatgtgtttgttatatctcaagaggacaagttataggaagaacccaagaaagaaccgtaaatgagatgaaggccattgtttttaatccccctgttttaacctgttctcatgctgctaataaaaatatactcactcaagactgggtaatttaaaaaggaaagaggtttactggactc

SEQ ID NO: 589451 - DNA, 575 bp, Homo sapiens
aaaaccctatctctactaaaaatacaaaaattatcaaagygtggtggtgggtgcatgtaatcccagctacttgggaggctgaggcaggagaatcacttgaacccgggaggcggaggttgcagtgagcagagatcacatcactgcactctagcctgggtgacaaaagtgaaactccatctcaaaaaaaaaaaaaagagatgaaggggaaaaaaattataagaaaagagaaggatcagggaactgtaggtctgggagagataccaaaataaaaaagacatcccaaggaagacagactgccttgtggaccacagaacacgtaagaacataatagcaccactatgaaataaattgagttttggtttggcttcatatttctgctttctggttgaggtactggggaacctcatttggattcaagtgcaaacacatcttgttcattttgatttatctgagaaatttcaatcaagtatcttagcacagcacagtactcaggctgtcattcctttgaaaaagacaggtgatgtatgggtgcaaccaccgcagggtcttctgcacgctgggctttgcggctgccc

SEQ ID NO: 589452 - DNA, 575 bp, Homo sapiens
aaaaccctatctctactaaaaatacaaaaattatcaaagcgtggtggtgggtgcatgtaatcccagctacttgggaggctgaggcaggagaatcacttgaacccgggaggcrgaggttgcagtgagcagagatcacatcactgcactctagcctgggtgacaaaagtgaaactccatctcaaaaaaaaaaaaaagagatgaaggggaaaaaaattataagaaaagagaaggatcagggaactgtaggtctgggagagataccaaaataaaaaagacatcccaaggaagacagactgccttgtggaccacagaacacgtaagaacataatagcaccactatgaaataaattgagttttggtttggcttcatatttctgctttctggttgaggtactggggaacctcatttggattcaagtgcaaacacatcttgttcattttgatttatctgagaaatttcaatcaagtatcttagcacagcacagtactcaggctgtcattcctttgaaaaagacaggtgatgtatgggtgcaaccaccgcagggtcttctgcacgctgggctttgcggctgccc

SEQ ID NO: 589453 - DNA, 489 bp, Homo sapiens
gactgtaccactgcactccagcctgggcaacagagtgagactttatctcaaaaaaaaaaaaaaagaaagaaagaaagaaaagaaaaagaaagaaatataagaagaaggcaggaagctgggaatgtgatagggaacagcagacaagtgggagtggatgaggaaagattgaagggaaaagtggagctttgagagtcaggcaagttgtttatatttcatgcagggtttcactaagaagtcaatgaagtttttgagcctgatagtgatataaggaggatcatcggaatcacctgatagtggttttccrggcaaatgggaagagggaagccctaaggaccaggcaggtggcttttgggtggggctgcaaggaaaggatgggaatgcagtggcaggagttgttataaaatggaatgaaactggtttaaaaaaaggcaattaaaaagcctagggttcgatcatgatagataaagaaactgaaaatatcaaagaatt

SEQ ID NO: 589454 - DNA, 602 bp, Homo sapiens
atacctacccttccctaattgtttttacgctgtgcccaccttttactggtgcctttgttttaaccttttttttccatactcacacaccaatcagcatgcacacccctagccccagattcagccacatcaagaagagatgacctgactttggcaaagacaacctgaccttcccaaccctctccagttcccctctctgctgagagctgatttgtgactcattaaaattctctgctctcatcacctttcaatagtcagcatgacctcattcttcttggacgctggacaagagctcaggacccaccaagcaggggtacccagtagggctgtaacacttgccctttgcccttgctggtggagggcagccaccccacacaacagaagcagtggcagagctaagacagtcccagagccgtgggccagaacaagtcaaggggccaactgagcttgctaatacacygcagtctattgagctgcggatggcagaactaaaagagctaattagcaaactaacacctcctctggggctttggaatcacgggcacccctgcctgggagctgctgcattcccctcagggtgacatgcctggtctggccgcaggccc

SEQ ID NO: 589455 - DNA, 590 bp, Homo sapiens
tgtggctaaagcaggtgggtaaacataacacccaatggtgggcagaggacccagccttgccagaggcagctggggaagctctcagtgacatgtgttgagacctttttggggaaaggatgggagccactttagttcycctactaggccagcaggaaggtgatccacctgtcagtcacacttcttacctagtgttctagccattcaaatcaaacaagcacttctttttatctgcaggaatgctgatgttccacatagatgggtcttgtgactgtacccctcatgcaaacttaaacctggatggcactcctcttatggggatgtagtcaccctgaagtgttacagaaaggctgtctacagctgcacccatgctgagctcccatgggcgaagcctccgctgtgtctgcagtggtgggtgagaggaagaagaagtctccttttccaagatgcttcatgagccttggggctgcctgaatgttggggtagagctgcagactttccccactgagcccagcattccacttgtgtctctgctgaaacattttgtaagcagaaagttccaggactcaagtcctaccgactggattctgtta

SEQ ID NO: 589456 - DNA, 573 bp, Homo sapiens
cacttaaacctcttttctttataaattacccagtctctagtagtatctttatagcaatttgaaaacggagtaatatagtatcctttgtcagtggaaggcagaaagaggtcaggcttattcaggagagtttgtagctgaaatcaaatgttattaaagccacttaaatatatcatatgactatcacatggcatgttgcatcacattatactctagtgacttatgttactgttcctttcactagaccaaacactgctccaaagctggatgagatgtttttcctcttaccgtccccaagyctggccaagtacaggcacctggaggcaactcagcaaggacctattgggtgaacagcaaataaataaagtatctccttgattagcattaggcaagaattactcattatcatgcaatatgagtcattcaactggggcaaggaaagatgctggaaagggaaagtagtatttttttagggtctattgtgttattcatgtaaaatagcttgcatggtaccttttgcatgcctggaactctttacatggtggctgtttttatgttcttattaatttttgctaa

SEQ ID NO: 589457 - DNA, 573 bp, Homo sapiens
cacttaaacctcttttctttataaattacccagtctctagtagtatctttatagcaatttgaaaacggagtaatatagtatcctttgtcagtggaaggcagaaagaggtcaggcttattcaggagagtttgtagctgaaatcaaatgttattaaagccacttaaatatatcatatgactatcacatggcatgttgcatcacattatactctagtgacttatgttactgttcctttcactagaccaaacactgctccaaagctggatgagatgtttttcctcttaccgtccccaagtctggccaagtacaggcacctggaggcaactcagcaaggacctattgggtgaacagcaaataaataaagtatctccttgattagcattaggcaagaattaytcattatcatgcaatatgagtcattcaactggggcaaggaaagatgctggaaagggaaagtagtatttttttagggtctattgtgttattcatgtaaaatagcttgcatggtaccttttgcatgcctggaactctttacatggtggctgtttttatgttcttattaatttttgctaa

SEQ ID NO: 589458 - DNA, 554 bp, Homo sapiens
gtactagtctgttttcatgctgctgataaagacatacccaagattgggcagtttacaaaacaaagaggtttaatggacttacagttccatgtagctggggaggcctcacaatcactgtggaaggtgaaaggcacgtctaacatggcagcagacaagagagcttgcgcagggaaattcccatttataaaaccatcagatctcatgagacccactcactatcacaagaacaccatgggaaagacccacccccatgatttaactgcctcccaccaggttcctcccacaacacatgggaattgtgggagttrcaattcaagatgagatttgggtggggacacagccaaaccatatcagacagaaacactgagaagaaggccgagtgaagaaagaggcagaaagcagagttatgctgccacaagatgggagccaccggaagctggaagagggggcatagccctgcacagccttgatttctgactctagtctccagaactgtgagagagtaaatatctgttgttttaagtcaccaagtttatggccattcattgcagcag

SEQ ID NO: 589459 - DNA, 602 bp, Homo sapiens
cccttattttttaattagttcagaacttgagggggaagaaaaagagtggcactattttggggggactcttcaagaactccaatttaagactttggcaaatattttctgatgatgaaactactatctgatagagcagagggagagagctgtctaaagaatcatgtagccccaagaggaggctctggaaaggaagtgtatacaggaaatgcaggaaaaagaaaataaggcaagacttatgatcgtcatgtatctgaattaatcattgttctgattcctactttactgattaggtatcaataaagctgcacaagggaaagcagtttgttttgtttcattgctgaatttttagcrcttagagttctgcctggcacatagtagttggtcaatgaacactttttaaataaacaaataaaatgcaattgcccgtggtggaattatagatttcttttacaggtgactacactgaagccaagggaacttgattacccaaacagaaactgctaattcatggcagaatccaggcttcctggacgctattaaaatgctttttccattataacatgctgctcccctgggtagcctcccacctacaagcccttgcc

SEQ ID NO: 589460 - DNA, 636 bp, Homo sapiens
aactagttccagggcagaagaatctcagctggcactaaaagaagttacgtggctcccaaccacatggcggcagtcttcgtggtcacaaagagaatggggctgtcctcttttcctccactcttttctaggactgcttttctctttcaggattgcctcaggtgatgatttaaatccaatttatttcactagtatgtgtctgtcttggggagaggagttggttcaccaggacttgaggcagaatctgttaatccttccttgcccctgactcatcccctccaatcttcaggggaagctctgctggttgccattggcaaaagaacttgcttgcatcacaattagtactctatagccaagtctttgccaatagggttaaggcaacaaaaaagtgaactccagaaacatcaaggagagtactagtgggttttttgacaaatgggatataactagcttagtgaccttgtcccacctcatttattttatgttctctattattagaacaattgtccttcgtaagtgsttttccctacctgttttccaaaaactatcagtggatcatatttgctatgacattaaatgtaactgtgacttggcttttaaagcctttcaaaatccagctccaccatgcctttctgaatt

SEQ ID NO: 589461 - DNA, 510 bp, Homo sapiens
gaaggagggctcaatgtcttctttacttcagtcactcatttcctaaactcatatcttgagttccctacatctattctacctatgaaatttaaactccaatatcccactctctaaccacagtcttttatcattcaagttttcatccacttggtaccaatataccatgtatctatttaatgtcacaatgaccttgtcatcttcatttctyttgggctattgggtctcattcaggctttatttctctttatgtgttgcttagattccatagttcattacttcagtcattttctctgtaatgtcttaactttaatttccttaacctattgtccattcgttgtgcacattctacagaattcaagatgagccaagtgatctgccttttctattcttacacctgtgctgtagggcgaagcaaggagaagaaagaaaaaatatatgaatgctgccacacacatccatggtttgtcaatgcccagccatccttggtgtgcattcttagtgagtttctac

SEQ ID NO: 589462 - DNA, 510 bp, Homo sapiens
gaaggagggctcaatgtcttctttacttcagtcactcatttcctaaactcatatcttgagttccctacatctattctacctatgaaatttaaactccaatatcccactctctaaccacagtcttttatcattcaagttttcatccacttggtaccaatataccatgtatctatttaatgtcacaatgaccttgtcatcttcatttctcttgggctattgggtctcattcaggctttatttctctttatgtgttgcttagattccatagttcattacttcagtcattytctctgtaatgtcttaactttaatttccttaacctattgtccattcgttgtgcacattctacagaattcaagatgagccaagtgatctgccttttctattcttacacctgtgctgtagggcgaagcaaggagaagaaagaaaaaatatatgaatgctgccacacacatccatggtttgtcaatgcccagccatccttggtgtgcattcttagtgagtttctac

SEQ ID NO: 589463 - DNA, 510 bp, Homo sapiens
gaaggagggctcaatgtcttctttacttcagtcactcatttcctaaactcatatcttgagttccctacatctattctacctatgaaatttaaactccaatatcccactctctaaccacagtcttttatcattcaagttttcatccacttggtaccaatataccatgtatctatttaatgtcacaatgaccttgtcatcttcatttctcttgggctattgggtctcattcaggctttatttctctttatgtgttgcttagattccatagttcattacttcagtcattttctctgtaatrtcttaactttaatttccttaacctattgtccattcgttgtgcacattctacagaattcaagatgagccaagtgatctgccttttctattcttacacctgtgctgtagggcgaagcaaggagaagaaagaaaaaatatatgaatgctgccacacacatccatggtttgtcaatgcccagccatccttggtgtgcattcttagtgagtttctac

SEQ ID NO: 589464 - DNA, 477 bp, Homo sapiens
tcttgcataggagaccgaaagttctggctggccaaatttaagggacagtttatttgcstgtagcttctagaacaaagatattcatgtctttaacctcttcactttcccagtgcccaagagaacctcataaacttgacatcaacaggcttagcaataagccatattcatgaatagtcagggaaagttacagctctttctaaaggggtgggaggggtctcagtaatttaggggaggaaagtctttaccttctggtattcacatctttatgtaatcccctccccttgagtatggggaatcacttctgaattagttataaatcgactgtagctctgacttaggtacactctcttgggtcctcattctgggggaagccagctgccaggtcctgaggcagtcctgtggagaaggccacgtgactgagcttggctatagattctcccatagctttgagatgactgcagccctggccagcatctt

SEQ ID NO: 589465 - DNA, 477 bp, Homo sapiens
tcttgcataggagaccgaaagttctggctggccaaatttaagggacagtttatttgcgtgtagcytctagaacaaagatattcatgtctttaacctcttcactttcccagtgcccaagagaacctcataaacttgacatcaacaggcttagcaataagccatattcatgaatagtcagggaaagttacagctctttctaaaggggtgggaggggtctcagtaatttaggggaggaaagtctttaccttctggtattcacatctttatgtaatcccctccccttgagtatggggaatcacttctgaattagttataaatcgactgtagctctgacttaggtacactctcttgggtcctcattctgggggaagccagctgccaggtcctgaggcagtcctgtggagaaggccacgtgactgagcttggctatagattctcccatagctttgagatgactgcagccctggccagcatctt

SEQ ID NO: 589466 - DNA, 432 bp, Homo sapiens
ctggtcacatgtagataagaaaaatgccttttaagatgatcataaaccacaaaagctttgtgtaaatcatgggtaggcagctagtgatgtcctctgaggaagtaggaagagcatgtggtcactacttacactatctgaccccgtgccttctgattgacaggaggaacccatcacttccctggggaaggagctccttctctatccctgtggtcagcaggaccagctgcctgactacctggagctgtttgagtgacagcctccatcagggtcatcctacagcctccaagcrggctttcccctggacaaatgccactgcaacatttatgtgtgaagccaaaatcaccctgcagcagagccaatactgatcaactgaaagtaaagtatccatggagtcctcattgacacctcttttctgcacaaatactggaattc

SEQ ID NO: 589467 - DNA, 603 bp, Homo sapiens
gtttatcatgtttgcagctctgaagcatctcttgaacactcctatacttgaagagttttccacattatgaatcctgattccccaaggtagaaactagaactcattctcctggcatcatttgccactaaagtgcaggcatgtgaggtcacttccatcagtcagatgcttcggcatgagatgctgacttggaagggaacaatgtcaggaggtaggtgcatggagactccatattctgttcagacacaatagggacagaacktccggtttccagttctaagcattagcaatgcatggttctagcgaacgtttggattccggcagtggtgctcaccacaacagccctcttggcatggttggggctggatagctccgaagctggctttctggctttcctggagattcctgtaacaactgtggcattcaaccagcagactgggttctgttgtttattatgaagagtgctgactgatacagcaaccatgtgtaaagtcatcaattttctcaagaagggaggcaaggtcatctgctgaaattgagagggaaagggcatgaagagaatgataatgggttggagtcactgatgaaatcactgggagaggaatc

SEQ ID NO: 589468 - DNA, 605 bp, Homo sapiens
taattttggtcctgctttcctggctcctttcagtctaatcttaaagaatcccactggccatatcattcctaactcctcttcatcaccctagaatcacagttctctatataaggccatctttcttatctctaagcctttgttcttagaatctctttgcctggaatgccttgtgtctcatttctgcttgtctatgtcagattcctccttgaagacccatctgaaataccacatcctccatgaaaaccctactgatccttccatgttgatgtaatstctctcctcctgaatgcccacaacttcatctctgtggcctttttggcacttatactttctacttctttatttaaagcattataattattttcattcacgacattttacccttttagatattatgctcactaccatcagggactgtttcctttcattttcccccagcactaacagaggcttaccacatgttcgatgaacaagcagaagcaatcattcattttcctttcacgtgatcaatggaaactacacccctgtgtgttccaagcatatcatgtgagtacgaagagatgaaaagcaagaagagaagaaatgcaggaagggaaggaagagga

SEQ ID NO: 589469 - DNA, 534 bp, Homo sapiens
ctgctcacaaaaaccaagaggaatactgcatgatagtcatggctttgaaataccacttgggggtcattacgcaacaatagataactgggactgatttcgatccttgctcatgargttaaaaaaaatccgatttcctactgaatgtaactcaaaaagaaactcaggaatcgcagataaaaaacagtttaagttttggaaattaattctggaactcaagagatgtttaatttaatacaaatcatttgtaatttcaagttacctggctgcctcctcacactctaatttgcaacgagacacagtgcctgcatttatagccaacaattacttaactacgagattttaattgttctaggttttaaaaaatctagtcgctacaagtgaagataatcaataatttaaaaaaccatactatcaaaagcaaacacactctgggaataaaaatggaactatgattctcagttctccatcagttgttgtagcttggctctgagtggaaatgtcaaagaagtcattggacagaaattattctgtgag

SEQ ID NO: 589470 - DNA, 534 bp, Homo sapiens
ctgctcacaaaaaccaagaggaatactgcatgatagtcatggctttgaaataccacttgggggtcattacgcaacaatagataactgggactgatttcgatccttgctcatgaggttaaaaaaaatccgatttcctactgaatgtaactcaaaaagaaactcaggaatcgcagataaaaaacagtttaagttttggaaattaattctggaactcaagagatgtttaatttaatacaaatcatttgtaatttcaagttacctggctgcctcctcacactctaatttgcaacgagacacagtgcctgcatttatagccaacaattacttaactacgagattttaattgttctaggttttaaaaaatctagtcgctacaagtgaagataatcaataattwaaaaaaccatactatcaaaagcaaacacactctgggaataaaaatggaactatgattctcagttctccatcagttgttgtagcttggctctgagtggaaatgtcaaagaagtcattggacagaaattattctgtgag

SEQ ID NO: 589471 - DNA, 653 bp, Homo sapiens
cagctgtttattaatctgtaacttcctgttaagatgcagggtgtacttttttaagaagccttacacagcataagttttattttgggaccggacacactattatataaagaggatctgtgagtgttacttggtcttgtaagctatttttctttttttcagcaaaatgttgtgagcacctaccatatgccaggcactgttcagtgaactggttgtacaggagtgaatgagatcatcttgattttgagaagtttataakctactcaagggaaacacgtgtaatcaactatggtaagcgcaaccatagatgtacaaggtatgggagggtgcaaagaaggaagtggaaaattccaggccaacagaggaatgagaaagttttcatgaaagagactctagaacagaacctagcaaagattttcaactggtgggtagtagagcaaagatggcacattctggtgacagtgtggggaggacagattggacaaggaagaacttggaggtaggaaagttatttcaaggttatttgagaggctgttgcaaatggtttaggcaagaaataatagaaataaagagaggggcagaaagaaggtttgaggtaattttcacaacaggatgggacagggggaggtgaggaaaaatgagttgatgaaaagttt

SEQ ID NO: 589472 - DNA, 554 bp, Homo sapiens
ggccatggtcccagatatttggtcaaaagttattctggatgtctctgggaaggattttttggacgagatttgttttatattttattattattattttgagacagagtagcactctgttgcccaggcctggagtgcaatggcacaatctcagctcgctataacctgtgcctcctgggttcaagcaattctcctgcctcagcctcccgagtagctagaattacaagtgtgcaccaccatgtccagctagtttttgtatttttagtagagatkgggttttgccccattggtcaggctggtctcaaactcctgacctcaagtgatccgcctgcctcggccttccaaagtgctgtgattatagacatgagccactgtgcctggtcttggatgagatttaaatgggaggacttggagtaaagcagattaccctccataatgtgtgtgggcttcgtccagtcagttgaaggccttcctacgtcaaaggctgacctccccctgagcaggaagggatgctgccagcagggggcatttggatgggaatagccattcctccccgc

SEQ ID NO: 589473 - DNA, 585 bp, Homo sapiens
aaatgcaatgaataaaatgaaaaatgcaatagagggtttcaacagtacacttattagtgagccagaagacaggctatttgaaaatacacagagataaaaaagaaaacaatgacatgaagaaagcttatggggtctgtgggacaacatcaaaagagtaaatattggagttattaaagagggaattcaggaagacaaaggggttaaatgcttatgcaaagaaataataacagaaaactttccaaacctggaaaaaaattaatagccaagcataggatgatcraaggtcaccagtcagattcaacctacataggaataccccaagacatattataatcaaaccctcagagtgcagagacaaatagaggatcctaaaagcagctaaagaaaagcagcaaataacatgtaagacagatccaatacacccagcagcagacttctcagaagaaaccgtataggccagaaagaagtgagatgatacatgctgagactgaaggaaaaaaaaaatgcaacccagaatactgcacacagcaaagtattccttcagaaaaggaaagagaaagatttttccacacaaacaaaagctga

SEQ ID NO: 589474 - DNA, 616 bp, Homo sapiens
ggatttaaagatactctccctaggctacctcagtttaccaacaaggactcaatggcctggggagtgatttgacttggtctaggacagtggttctcaaccactcggacaaaggtgtccgagagacatctttggttgtcatggatggaggatggggttagaggycagggatgttgctaaacagcctatgagacacagaacagccccacactgcagagaattatccagccccagatagcagtagtgctgaaattgagactccctggtgtgggaggctcagtaatttagtgacagagccaagtcagactcagttctactcagttctataaagtaccttagcctgtagctattgctaaatgacactacactggcatttaaaggaataaaactatatgtgtgtctttatatacacatatgaagttatatatagacatagcttagatgcctcaggaattcacactcttactccagaccagccttttccccagttagtccaaactcatgaggtctgactcatgttccaaattttttattcccatcataatccatcaatgaatagataatgctgtaaaactcacagagtagaaacgcatcttggaaagatggggaagtcaatgaa

SEQ ID NO: 589475 - DNA, 616 bp, Homo sapiens
ggatttaaagatactctccctaggctacctcagtttaccaacaaggactcaatggcctggggagtgatttgacttggtctaggacagtggttctcaaccactcggacaaaggtgtccgagagacatctttggttgtcatggatggaggatggggttagaggtcagggatgttgctaaacagcctatgagacacagaacagccccacactgcagagaattatccagccccagatagcagtagtgctgaaattgagactccctggtgtgggaggctcagtaatttagtgacagagccaagtcagactcagttctactcagttctataaagtaccttagcctgtagctattgctaaatgacactacactggcatttaaaggaataaaactatatgtgtgtctttatatacacatatgaagttatatatagacatagcttagatgcctcaggaattcacactcttactccagaccagccttttccccagttagtccaaactcatgaggtctgaytcatgttccaaattttttattcccatcataatccatcaatgaatagataatgctgtaaaactcacagagtagaaacgcatcttggaaagatggggaagtcaatgaa

SEQ ID NO: 589476 - DNA, 610 bp, Homo sapiens
gtcccagttactcagtaggctgaggcagaagaatcacttgaacctgggcagcggaggttgcaatgagccaagatcgcaccactgtactccagcctgggggacagagcgagactctatctcaattaaaaacataataataataataattcatcagtatcaggtcatagttgtgacaaatatacaatgcaaaatatcaatggtgggraaaccaagtatgaagtatatggaaactcttgatactatcttcacatctttcctgtaaatctaaaactatcctatgataaaaagtttactggaaacacacacacacacacacacacacacacacacacacacacaaagagagagagagagagagagagagagagagagagagagagagagagagacagagagagagagagaactccaggcccagatggcttcacagctaaattctatcaaatatttaaaatataaatagtgtcaattctacacaaactcttccagaaatagaagaggagggaactttttcaactcattctttgaggacaatattgttctgataccaaatctatacaaagacagtagaagaaaagaaaattacataccaacatctttcaagaacata

SEQ ID NO: 589477 - DNA, 610 bp, Homo sapiens
gtcccagttactcagtaggctgaggcagaagaatcacttgaacctgggcagcggaggttgcaatgagccaagatcgcaccactgtactccagcctgggggacagagcgagactctatctcaattaaaaacataataataataataattcatcagtatcaggtcatagttgtgacaaatatacaatgcaaaatatcaatggtggggaaaccaagtatgaagtatatggaaactcttgatactatcttcacatctttcctgtaaatctaaaactatcctatgataaaaagtttactggaaacacacacacacacacayacacacacacacacacacacacaaagagagagagagagagagagagagagagagagagagagagagagagagacagagagagagagagaactccaggcccagatggcttcacagctaaattctatcaaatatttaaaatataaatagtgtcaattctacacaaactcttccagaaatagaagaggagggaactttttcaactcattctttgaggacaatattgttctgataccaaatctatacaaagacagtagaagaaaagaaaattacataccaacatctttcaagaacata

SEQ ID NO: 589478 - DNA, 610 bp, Homo sapiens
gtcccagttactcagtaggctgaggcagaagaatcacttgaacctgggcagcggaggttgcaatgagccaagatcgcaccactgtactccagcctgggggacagagcgagactctatctcaattaaaaacataataataataataattcatcagtatcaggtcatagttgtgacaaatatacaatgcaaaatatcaatggtggggaaaccaagtatgaagtatatggaaactcttgatactatcttcacatctttcctgtaaatctaaaactatcctatgataaaaagtttactggaaacacacacacacacacacacacacacacacacacacacacaragagagagagagagagagagagagagagagagagagagagagagagagacagagagagagagagaactccaggcccagatggcttcacagctaaattctatcaaatatttaaaatataaatagtgtcaattctacacaaactcttccagaaatagaagaggagggaactttttcaactcattctttgaggacaatattgttctgataccaaatctatacaaagacagtagaagaaaagaaaattacataccaacatctttcaagaacata

SEQ ID NO: 589479 - DNA, 610 bp, Homo sapiens
gtcccagttactcagtaggctgaggcagaagaatcacttgaacctgggcagcggaggttgcaatgagccaagatcgcaccactgtactccagcctgggggacagagcgagactctatctcaattaaaaacataataataataataattcatcagtatcaggtcatagttgtgacaaatatacaatgcaaaatatcaatggtggggaaaccaagtatgaagtatatggaaactcttgatactatcttcacatctttcctgtaaatctaaaactatcctatgataaaaagtttactggaaacacacacacacacacacacacacacacacacacacacacaaagagagagagagagagagagagagagagagagagagagagagagagagacagagagagagagagaactccaggcccagatggcttcacagctaaattctatcaaatatttaaaatataaatartgtcaattctacacaaactcttccagaaatagaagaggagggaactttttcaactcattctttgaggacaatattgttctgataccaaatctatacaaagacagtagaagaaaagaaaattacataccaacatctttcaagaacata

SEQ ID NO: 589480 - DNA, 510 bp, Homo sapiens
atatatatatattttttagatggggtatcactctgtcatctgggctggagtgcagtggtgcaatcacagctcactgcagcctccacctcccaggatcaagcgatctcccacctcaagtctcccaagtagctggtactacagatgtacaccaccacaccckgctaatttttttgtatttttggtagggacagggttttgccatgttgcccaggctggtctcaaactcctgagcttatgtgatctgcccacctcggcctcccaaagttctgggactacaggtgtgaaccaccacacccagaccctcaagactttcttgccccactgctatatgtactctgaatcacacactttacctgagtgtgggcaagacttgtgaatatgatacgagaacccctcccttgattacattatgttatatggcaaaggtggtagaatagtcactcctgtggttatgctacattatgtaagattctgtcaaagccaactgaagattctcctactggtcttgaa

SEQ ID NO: 589481 - DNA, 571 bp, Homo sapiens
aggttgtgtctctgtgagtttggaagaagattctcctctattgtccagatgggaatgcaactctcctgataatttgagtgcagtgtgttgagactctgaaaagaggatccagttaagccatgcctagagtcctgacctgcagaaactgcaaggtaagaaatgtgtgttattcaatgttgctaaatatgtgataaattgttagcaatgaaaaaccaattaactcattgaaagagtgtgaagttaggtagagtagtcagctagatgttgctgaggttgcaagaaccctaatgcaaaacaaggcttgacattgttcagggaggtaaagaagtcttgcatgactggagtacacttgctgaagagaggagcgtctgcaatgaggtgacgagggagacacagaaagatggtacaagattcgtgttaagaattttagattttgtcagtgcaatgagaagcatttgaaggttttaaagcagtgaaatgacatgatcaaacttgagatttttgcaagattactatattagtttactattgctkctgtaacaaattaccacaagtggtggtttaaaggaat

SEQ ID NO: 589482 - DNA, 579 bp, Homo sapiens
ttttccttctaagttgcagattcagtgttactaattctagatttcacctgatagatagactgtatattacaactatatatgatattgctttacttaatgcctggctaaagaagcaggtaatttackggcaaccctggcccacactttcacgtggcaacaactggctgatgctgggtggtggtatctgcctctttcctggggtgttccctctctggctcatttcagtccctacgtgtataaaatctcttaatctatattaactaaggggaaatagtttcccttggcatgcatttatttttaataatcacaaagactaactccagcaataacaaaatactttctggttctaaaatcaacttgtctctacaaaacaacttcaatattttatttgaaatagcttcttaatataaatctagaaggtatgttcaaatttttaatttagtgattgtcttcagtaatatgtattcagaactctcttcccagaaattgttttttaaagatgcttgcttgaactgcaaagaagaagcaattttgaaattaataaatttgtagcataaaggatattccacaaagcaactt

SEQ ID NO: 589483 - DNA, 572 bp, Homo sapiens
ggtggcctgaccacagaaggaatgagttgccctaggacaaagagagactcccatcactggaagtgtgcaagcaggaggtgggcatgggcaacagcaggggctggtgagctgaccagtgacctccaaggccccaccggatccatgaatctatacgatgagttttttaaccaaactctttctttttggagctgtaagtggagcttctgctaattgaaaagcaaatttgaattttaaaatattaaaagaacatataggtctttgactggcatagttttggactcactggggtaaggtctagtgaatgccaatgttatccttctgaatcacatgcagcctcctgattagattggtttcrgagtgttactctctagtcatagggcatttgatttcctttctaacaacacatggcaatcagatgtacggttttccttctggggaaaaacatcgattatttaaaaaacagtaacatcagcataactgtcagaaaacgggaaaaaaggcacagtggtactgaaaatcactctgaagcttttatttgctgaagggagtaaagaaagaatatataatgtcct

SEQ ID NO: 589484 - DNA, 520 bp, Homo sapiens
gtcaatgtgataacagagagcgctaccaagggactcacgggtgaagagtgtagacagtgtggataggttggacaaggggaagattcatgtcctgggtgggatggaaccagatggcaagggatttcagcacactacacagaatgaggtgccttttggagcttaggaattatttatattctggaattttctatttaatattttccaaatgcagttgacagataactgaaaattcagaaagtgacaccagggataagggggtsggggggagggcgctactgtagttctaacacagactgtctggcccccaaacctaaaatatttattttctggcccttaacaaaaacagttcactgatccttgacatagactagctaatttatactattttatataactatcacttgtcagtaaaacaaaaagtcaagtgaggtctctatcttgatgctcctatggaagaaaatactgtactttcccatctaaggggtatataaaaagtagcattttttctgtctactggctt

SEQ ID NO: 589485 - DNA, 563 bp, Homo sapiens
ggtgggtcccctgttgaacaatgcagccctagattattgctagtataaaatgcctgggaaacagattacttcttgcaaaatcttaggggtttatgtttttattaaagtaagaccagtaggattccaaggacctccaatgaggacaattttaactgctcctatgtcttctgaagttctaatacatgggtctgaaaaaagaatgaaaattacttcttacaaataataagaaataaaacttttatggcagcaacttgctaagcaaactgtatattactgagtcatgacaagaatcttcaaccctagtgactatgattatcatccctatttcatgggtgaaagaaagctgagacacagatgtattacctggtttkcaggaggtcttataaatcataactgacggaactgctatttgaagtaaatataacactatgcaattatctgctctactatcttaagctcaccgtgtaccacagtggatccactcttcttggcttactaagtttcaatctactttccttctaagctgaactagaactaatattgggatacagacatgataatcc

SEQ ID NO: 589486 - DNA, 563 bp, Homo sapiens
ggtgggtcccctgttgaacaatgcagccctagattattgctagtataaaatgcctgggaaacagattacttcttgcaaaatcttaggggtttatgtttttattaaagtaagaccagtaggattccaaggacctccaatgaggacaattttaactgctcctatgtcttctgaagttctaatacatgggtctgaaaaaagaatgaaaattacttcttacaaataataagaaataaaacttttatggcagcaacttgctaagcaaactgtatattactgagtcatgacaagaatcttcaaccctagtgactatgattatcatccctatttcatgggtgaaagaaagctgagacacagatgtattacctggtttgcaggaggtcttataaatcataactgayggaactgctatttgaagtaaatataacactatgcaattatctgctctactatcttaagctcaccgtgtaccacagtggatccactcttcttggcttactaagtttcaatctactttccttctaagctgaactagaactaatattgggatacagacatgataatcc

SEQ ID NO: 589487 - DNA, 538 bp, Homo sapiens
atttcaaaggggcagaaacagaatttatgatatcaagtttcttaacgtaaatgctgtatgaaaagataaattagggacctatagtcagcaaaaaaacaaaaaaaccctgtctaagttgatycaagttttgggaatgctaagaccatattgatcagttaaagtggtaattttaccagtgacagctttggagtggagtatgaaatctcacactcagcggtgtggtcaatagaagtaacaaacttgattagaaatatttaaaaaatctgtagcttgctactttgagactgcagtcctagttggagtgggtaatgaactaactttaaatttaatagagagattcttaaagtgagagctatagaagggctagatgagtactcctgtaggcttggctgactgagaaactgcaggcatgttcagggaaggccaaagagggcctagtgggaatcaaaagctaaggcagacatgaaaacatcttgaactctaaatgtgctatccactccatgcacagatcatcaaagagcagaagtcataagggctc

SEQ ID NO: 589488 - DNA, 631 bp, Homo sapiens
ttagcaagctgaatccaataacatgtaaaaaatattacagactgagcacagtggctcacatctataatcctatcacttttagaggcttaggccgggggactgaaaccaggagttcaagagcagactgggaaacataaggagatcctatctctacaaaaaataaaacaaattagccggtgagggcctttgcctctggtcccacctgcttgggaggctgaggtgggaagatcacttgagtccaggaggtcagtgcaatggtgatcacactgggtggtgcctagacccgggctaaagggcaagaccctgtctcaaaagataaaaaaagattatatgttataataaagtagaatttatctcaggaagtcaaggttggtttaatatctgaaaattaattagtgtaatmtattgttttaataggataaaagacaaccaacaagtaattatgtcaataaaagcaggaaaaggatttaatgaaatttaacacccaccaaaaaataattcccaataatctagaaataaaagagaaattcttcaaactggtaaagggcatctatacaaaacccacaagtaacatcatctttaatacagcaagacagaatgcttatcttttgagattgaaatgtctactctt

SEQ ID NO: 589489 - DNA, 547 bp, Homo sapiens
aggaaagacctgctcccgtaactcagtcacctcccaccagcttcctcccatgacacctgggaattgtgggagttacaattcaagatgagatttgggcagggacacagccaaaccatatcaataagaaaacaaaagaaattacatttytcatttagagttaggaaaatagttcctagatatgacaccaaaaatgtgaaagaacatattgatagatttgaacttcttcaaaattttaaaaacacgtttttcagaagataaacattaaaaaattaaaaacaagctgaacacagggaggaaatatttatatttagatatttgataaaggacttgtatcaaggatatataaagaattcttacaactcaataataaaaagacaatccaataaaacatgaagaaaaatttaaacagacacatcaccaaagaagatagatgaatagctaatatttccatgaaaagatgctcagcaacattagtcattaaagagctgcaaattaatgtcctggtgagataccactctacatccatcagaagggtataacaaaaaag

SEQ ID NO: 589490 - DNA, 547 bp, Homo sapiens
aggaaagacctgctcccgtaactcagtcacctcccaccagcttcctcccatgacacctgggaattgtgggagttacaattcaagatgagatttgggcagggacacagccaaaccatatcaataagaaaacaaaagaaattacatttctcatttagagttaggaaaatagttcctagatatgacaccaaaaatgtgaaagaacatattgatagatttgaayttcttcaaaattttaaaaacacgtttttcagaagataaacattaaaaaattaaaaacaagctgaacacagggaggaaatatttatatttagatatttgataaaggacttgtatcaaggatatataaagaattcttacaactcaataataaaaagacaatccaataaaacatgaagaaaaatttaaacagacacatcaccaaagaagatagatgaatagctaatatttccatgaaaagatgctcagcaacattagtcattaaagagctgcaaattaatgtcctggtgagataccactctacatccatcagaagggtataacaaaaaag

SEQ ID NO: 589491 - DNA, 547 bp, Homo sapiens
aggaaagacctgctcccgtaactcagtcacctcccaccagcttcctcccatgacacctgggaattgtgggagttacaattcaagatgagatttgggcagggacacagccaaaccatatcaataagaaaacaaaagaaattacatttctcatttagagttaggaaaatagttcctagatatgacaccaaaaatgtgaaagaacatattgatagatttgaacttyttcaaaattttaaaaacacgtttttcagaagataaacattaaaaaattaaaaacaagctgaacacagggaggaaatatttatatttagatatttgataaaggacttgtatcaaggatatataaagaattcttacaactcaataataaaaagacaatccaataaaacatgaagaaaaatttaaacagacacatcaccaaagaagatagatgaatagctaatatttccatgaaaagatgctcagcaacattagtcattaaagagctgcaaattaatgtcctggtgagataccactctacatccatcagaagggtataacaaaaaag

SEQ ID NO: 589492 - DNA, 605 bp, Homo sapiens
gttacataaaaaagccacacataaaagagcacacattttataattcaaattccatgaaatttctaggaaagaaaaatccacagagacataaaggatatcagtggttgcctgttaagagtgaagactgactgcaaactgccacaggaatctttttggagtgatgggaatgttctaaacctggattgtggttatggataaacaaatctataattactaaatatcattaaacaatagaattacagttgaactttatgttatttaaaccataacttcacaaatctrttaagaaaaagttgcagaatcagaagctttacaaagctatgtaaatccataaaacttaggtagatgaacttcaatgtgagccaaaggaaggaaatttatttaataaaaaatggaatttgacatattagctagaaaatagggaagagatttagacatttttgtgatgtagatatcattgtaggctttctcctaaatctatcagcctaaactatggaataaaacattagaaaaagtaaaatgtcataataataggcaatgctgagtagactacaatgaagtgatcccttcttctattagatataaatatcttttacttatgtatt

SEQ ID NO: 589493 - DNA, 508 bp, Homo sapiens
attctaaataagtctcaaagtatactattgcccctacaaggacttaggtctcaagtggataatgattccaacttatttatgcaagtgacttractatgtttgtgcaaaattcatttacccctctccatcacttgctgatatcaaatgcacaaggacggataaaagacaaggcatgatgctatcctgattgaatccatacatgaaaatcaagaatattccatctgtacgctttcttatattagtactatgaaactttgcgtacatcatatttaatttatacaggaagcacattagtagagtaaagattaatatttttgattgtcagatgaaaaactgagagagaaactaagcgattgtccagactgatataaataaattgtgattggagcttgaattagaacccaaggttcattccattaaacctcacagaaccaatagtacatcttattattgaaaatatgttttggtgataggggccttttcctttttaaataggtcatggtcagtt

SEQ ID NO: 589494 - DNA, 546 bp, Homo sapiens
aaaatgacttaaatctgttcaagagattatgagcagatatgcagagtttatacagcatatatataaacatttccaaaaatcggaatataggcctgagattgaaaaccactttttaatcaatatgaaaagaatgtyaagtatacaaatcttatttttccataagtcaatgaggatgcaaatgctctgagtcattgcagagagctgtagaatttatagattggtaactgagattcctttcttaaaccctgcaagaatttaaaaccaaacaaataaccagtgacaacaatcaaacatatatgatcctggtcaaggaaattacagtgtttttttttttctttttatactttcattttaggttttgggggttcacgtgcaggtttgttacatgggtaaatggcatgttgttgaggcttggtgtatgaagaattccatcacccaggtagtgagcatagtacctgataagcagccttccaattcacacttccctccgtccctcccctctcaagtagtctctggtgtctgttgttcctatctttgtgtccatgt

SEQ ID NO: 589495 - DNA, 512 bp, Homo sapiens
catggtgcaattcaagaagccataatgatggaacgatgctaatcagatataaaaatatggctggtgaaaacctgtgaaaagagagaagaaaaaatagtttagctaatttaagctaattttccaaaaaaaaaaattaagaggaagaatgaaaaaaaaatgcacatactccgaccacattgagtcaaaccttttcgtatamcttcaaagtgtttatttcaatgaagaaaaaagcattatgtgatttctgccatatggattataaagaaacaaagtaactgtaaaaggcactagcagctgtcattctcactgaatttctaatccaattaatagacattaattttgatatggtttaatgggacactgccaattagtttcaggcacaacactggatattttgtatttaatatgttttacgaaaagcaaatacagcaggagtaaatcttgaatttattagacattacaatttcaagatatggctacatttttcaacattaacctggaactctgagagc

SEQ ID NO: 589496 - DNA, 484 bp, Homo sapiens
agatcttggaacaaccttctccactctcctatttctaagtacctctttatgtcttcctcttacttttgtcttctttctttgctgccacaatgataaatgaataggtaggacatggtttgagttggtgaagaatgtctagaaagaaaagatgacaacaccaataaccagcatctattgactgcttactctgtgcctggcatataytatctcatttaatcctcaggacaaggatcaaaaagctaatacaagtaaaatgaccttatacaggaattttattctgtgtccttctttgccctccagcataacgtacacatggcaagtgacaaagcttaatagtcattaagaagccatctaacacattggaatgaaaaagattccctatatgtagcagttgcaaaagtccatggtgacaaaatctttgtgataactcaactaggtgtgaatatttaatttttggcaggtctttggggcctttcaagatcac

SEQ ID NO: 589497 - DNA, 630 bp, Homo sapiens
ttcaatagtttcttaggtaacaattttcattctctgcaattttcattctctgcacttgagatgtttgaaaaatgaaaggctgcaaccccaaatcaaacaataattaaacattcatctttactttaaaatgagctttttaacaccgaggtacttaccaatctaatgccccccaaatgggggatgaacacaacttcctgagatgatgacatctgtgggcaggtttttcaggaggaatctaccattttaaccttgagcttcagctatttggatgcttgattgccagggttgcctcaagcagagagaggtcccatgtaggctggtcttggacaaacacccatggggacttasacgtggcatctcctttgtttttactcttgggggatttggcatagtctccaggccaacggcgattctctcatgttacaattgtggaacccacttccttcgcagactgggagttatgtgcatgtaattctacagcagacagttctctacagatatatactatgaatgatggagatggcactacatttcctgacttcccatttctgctcacctggactatgtgaggctgaatgatctcccattgcttttgctgcagtgtatcagagtgatttaaaaaaagactct

SEQ ID NO: 589498 - DNA, 605 bp, Homo sapiens
caacatatgaagcacatttctacctcagggcatttgtacccactggtccctcccttagaaaactcttcttccaggtgtccacatgcctccctctctcactattttttttggttttctgttttagacagtctcactctgtcgcctgggctggagtgcaatggcgcattctcggctcactacagcctccaccatcgctaggttcaagcgattcttgtgcctcagcctcccgagtagctggcatcacaggcaagcgccaccacgccaggctaatttttgtagttttagtagatacagggtttcaccatgttgtccagggtggtctcgaactcctgacttcaagtgatctgctcaccttggcctcccaaagtattgggattacaggagtgagccaccgacccggcctcctctcttacttctttttacatcttgactcaaattacttcctctgttaggccttctttacctactctatttgaaatarcaacccccaatcctacccagcactctgaacttcttcgtttattcttctttatccccactatcaccttcaaataaactatacattctacttctttatctgcctctttcctctagaatgtaagctt

SEQ ID NO: 589499 - DNA, 605 bp, Homo sapiens
caacatatgaagcacatttctacctcagggcatttgtacccactggtccctcccttagaaaactcttcttccaggtgtccacatgcctccctctctcactattttttttggttttctgttttagacagtctcactctgtcgcctgggctggagtgcaatggcgcattctcggctcactacagcctccaccatcgctaggttcaagcgattcttgtgcctcagcctcccgagtagctggcatcacaggcaagcgccaccacgccaggctaatttttgtagttttagtagatacagggtttcaccatgttgtccagggtggtctcgaactcctgacttcaagtgatctgctcaccttggcctcccaaagtattgggattacaggagtgagccaccgacccggcctcctctcttacttctttttacatcttgactcaaattacttcctctgttaggccttctttacctactctatttgaaataacaacccccaatcctacccagcactctgaacttcttcgtttattcttctttatcsccactatcaccttcaaataaactatacattctacttctttatctgcctctttcctctagaatgtaagctt

SEQ ID NO: 589500 - DNA, 534 bp, Homo sapiens
aatctttcattcataaataaaaaacaaggctgaatttagtaaaaaggcactaatgatggaaagatctttagcaaatccgatcaccttattggaagagagaattaaggatcagagaaattaaatgctgtgttcaagcttacgcagcttgttaatagtgggactagaactataattgacatttgaaatttccaatctcacccacaatacccaaaaggctgtgtgtctttaaacttttgttaatttgcattcattccacagttatgttttaagcactttctctgtgccaggaatcttgtttaattctgtggatacaagatacagagatattgtataggaggtacagtctttacacttaacggaacttaaagattttgaggaaagtcaacattaaaccattatttactaaatggattgcaactgtaatgagtgctacaaagatggagactgatataaawaaactttttcaagtaccagctatttatctagggcttcaagctctactgctctgctgtaatttctgtcactatggtagtt

SEQ ID NO: 589501 - DNA, 389 bp, Homo sapiens
gtgagaaaatgagctccatgtgaatgaaccacttacccaagattgtactgctggtaggccagggcaaaaatgttcagattaaagaagaatgctgtttagacatgcattaggtgtgaaaaggacatgccacaagttctacataaagcagaagggaagaaatactgatggaacaaataactttttactctttttcttgaaatgcataccatttgccagtcacgctcatacattacctcattaaacagtcttagcagccctctctgaagtatcaccagctcygttttactgatgagtacgtcgaggcctagagagattaagttgcttgtccaagttcacagagctggaatgtggcagagctgggatttgaatctgcatttgactgacttcag

SEQ ID NO: 589502 - DNA, 492 bp, Homo sapiens
ataattactacatgacttagcagttctactcctaggaatagacccaaaagaattgaaaacaacttttcaaacaggcacttgtacacaattattgatagcagctttatttgcgatagtccaagggtagaaacaagccgatttttcatcaagagatgaatggataaacaaaatgtaatatatccatgtgctagaatattattcagccaaaaaagaatgaagcactgatgtatgccacaacatggatggctcttgaagactgtataagttaaatatgtyggacacacacacaaaaacacatataatatggttagtttatatgaaatatccagaataaaaaaattcatagagacctaaaaatatattggtagttgtcaggggctgcagagagagggattgggtggtgaatgcttattgaatacacagtttctatttagaatgatgaaaaggttatggaaatagagagtggtgatgatcacataacatagtgaacgt

SEQ ID NO: 589503 - DNA, 593 bp, Homo sapiens
tttgccagtcacgctcatacattacctcattaaacagtcttagcagccctctctgaagtatcaccagctctgttttactgatgagtacgtcgaggcctagagagattaarttgcttgtccaagttcacagagctggaatgtggcagagctgggatttgaatctgcatttgactgacttcagaatccatgtttgtctagaatgtcatattgccttgcaggtagggtgttaggaatctgaggagtcaaagaggtggtctgggaaatttattctgatttttggtcaaaagtttaccaatgctattttatagcctcatacatttttctttaagaagtttcagaatgtgctgataccatctcccaagatacttcatcataaaataaatttcttaaaaatattggaagattgataatattttctcttgcttaaaaatgctattaaggtttttttttctagataaagggaagttaaatgacaatggctgctagaaactctagttttatgtaattttttaaaagttatcattttacagtgaatattaattcaaaacataaaattttgcaaggtagtgtgccaaaattactcatagaaactc

SEQ ID NO: 589504 - DNA, 591 bp, Homo sapiens
acaataataataatagaagtagggctttgtcagcacggagtgttggctaactacccagttagttagtgacggctaactactcaacaagctttatatatgcctaagaaacagaatatgaatttcactaagtgagtacttcatcattgggcaccaaagctggacayccgtgtgggtcaatggaggcccagaaatgagtgtgaagacccttagtcccaaccacccaccatcgggataaaaaatatcccttgaaaccagaaactgccttgtgagtaggaggaaagaagcagatgtggtagggattgaacttgcaattctcttcataatttctaaaacaaaactgttcaaatcaaaagatagcatttttcaacttaaagggcttcagacactgtaattggcaagttttgaagtattttttttctgcaactggaatggatgtctcagagtaaaatgaaaacagttatagaaaataaaaagaccacttttgtgcatattttagtagagtatatgtgtttcaggttttaatgagataaaaatcacgagcaaccagtgtacagtgtggttgtgttaataacccatctcttttgtttgagt

SEQ ID NO: 589505 - DNA, 593 bp, Homo sapiens
tttgccagtcacgctcatacattacctcattaaacagtcttagcagccctctctgaagtatcaccagctctgttttactgatgagtacgtcgaggcctagagagattaagttgcttgtccaagttcacagagctggaatgtggcagagctgggatttgaatctgcatttgactgacttcagaatccatgtttgtctagaatgtcatattgccttgcaggtagggtgttaggaatctgaggagtcaaagaggtggtctgggaaatttattctgatttttggtcaaaagtttaccaatgctattttatagcctcatacatttttctttaagaagtttcagaatgtgctgataccatctcccaagatacttcatcataaaataaatttcttaaaaatattggaagattgataatattttctcttgcttaaaaatgctattaaggtttttttttctagatamagggaagttaaatgacaatggctgctagaaactctagttttatgtaattttttaaaagttatcattttacagtgaatattaattcaaaacataaaattttgcaaggtagtgtgccaaaattactcatagaaactc

SEQ ID NO: 589506 - DNA, 578 bp, Homo sapiens
cctttctacctcattgttttctccctgcaaattaactttttctgttcctttatgcatgtggaagaatacagcttttcatagcttactttttttttttttttttgaggcggagtttcgctcttcttgcccaggctggagtgcaatggcgcaatcttggctcattggctcaccacaacttctgcctcctgagtacaagtgattcacctgcctcagcctcccgagtagctggaattacaggtgcctgccaccatgcctggccaatttttttgtatttttagtagagatggggtttcaccaggttggccaggccggtctcgaactcctgacctcaggtmatccacctgcctgtgcctcccaaagtgctgggattacaagtgtgagccaccatgcccggcccacagcttaccttttattaaccttgcctgggagagaaaatctgattggtaaagtcaagtttgctatgggtaagtagcaaagaagacagctagcttcccatagaagtgaaaataattttgagctggttagatgcctacaaactctctaaaacaaaaaaggaaagaaatttgccctaagaagtt

SEQ ID NO: 589507 - DNA, 466 bp, Homo sapiens
ctgactctgcccagctgcctcctgtcatggccaaaagtccagacctttcagcaaacagtcagatgttagttccagctgagtgaattggttaggtctcaaatcctttctgctcatcgcctgtaaaatgggataacagtacaattcttgcttatttctgttttcagttaggatgaaaatgtcagaagagaaaatattagaaaagagcaaaagcatatgtgtgaacaatggtcttgtataacggagtcacattgtacagttgtaaaatagcaaatgtatgtggtaagcaaaaagrtgcgggagagaaggatagagtgagagagaataatttgaccatggccaatcattcctcctgctattctactcagtgagaataaacccccagtgaacaggagatgggcagcctcgctccctcccagtcctctgtgcctcttcaagtgtgagtatctcccagagctgggtatggctt

SEQ ID NO: 589508 - DNA, 466 bp, Homo sapiens
ctgactctgcccagctgcctcctgtcatggccaaaagtccagacctttcagcaaacagtcagatgttagttccagctgagtgaattggttaggtctcaaatcctttctgctcatcgcctgtaaaatgggataacagtacaattcttgcttatttctgttttcagttaggatgaaaatgtcagaagagaaaatattagaaaagagcaaaagcatatgtgtgaacaatggtcttgtataacggagtcacattgtacagttgtaaaatagcaaatgtatgtggtaagcaaaaagatgcgggagagaaggatagagtgagagagaataatttgaccatggccaatcattcctcctgctattctactcagtgagaataaacccccagtgaayaggagatgggcagcctcgctccctcccagtcctctgtgcctcttcaagtgtgagtatctcccagagctgggtatggctt

SEQ ID NO: 589509 - DNA, 624 bp, Homo sapiens
tgttttctcaaaaaggagccctgctgtttagagttgaatactgaggtatttatgggtgaaataatgtgggttctgagattctctttaaaatatttctgaaaagaaagaggggttgagatcactaaaatattgacaaaatgttaataaccttggtgattaatacacagaggttcattaaattgcctacctattctatatatgtttgaaaagttctattataagaatcttattttaaaattctgtgatacttgcattatataaagtcagccaaatttcattaatttttttgttttttttgagatggagtttagctgttgttgcctgggatggagtgcaatggtacaatctcagctcactgcaacctccayctcccaggttcaaatgattctcctgcctcagcctcccaagtaggtgggattacaggcaggagccaccacacctggctaatttttagtatttagtagaattcgggttttaccatgttggtcaggctggttttgaactcctgacctcaggtgatcctccagcctcagcctcccaaagtgctgggattacaggtgtgagccaccacacccagcccaaacttcattaatttgtaattcaccaatttaaattctgtgagcg

SEQ ID NO: 589510 - DNA, 624 bp, Homo sapiens
tgttttctcaaaaaggagccctgctgtttagagttgaatactgaggtatttatgggtgaaataatgtgggttctgagattctctttaaaatatttctgaaaagaaagaggggttgagatcactaaaatattgacaaaatgttaataaccttggtgattaatacacagaggttcattaaattgcctacctattctatatatgtttgaaaagttctattataagaatcttattttaaaattctgtgatacttgcattatataaagtcagccaaatttcattaatttttttgttttttttgagatggagtttagctgttgttgcctgggatggagtgcaatggtacaatctcagctcactgcaacctccatctcccaggttcaaatgattctcctgcctcagcctcccaagtaggtgggattacaggcaggagccaccacacctggctaatttttagtatttagtagaattcgggttttaccatgttggtcaggctggttttgaactcctgacctcaggtgatcctccagcctcagcctcccaaagtgctgggattacagrtgtgagccaccacacccagcccaaacttcattaatttgtaattcaccaatttaaattctgtgagcg

SEQ ID NO: 589511 - DNA, 624 bp, Homo sapiens
tgttttctcaaaaaggagccctgctgtttagagttgaatactgaggtatttatgggtgaaataatgtgggttctgagattctctttaaaatatttctgaaaagaaagaggggttgagatcactaaaatattgacaaaatgttaataaccttggtgattaatacacagaggttcattaaattgcctacctattctatatatgtttgaaaagttctattataagaatcttattttaaaattctgtgatacttgcattatataaagtcagccaaatttcattaatttttttgttttttttgagatggagtttagctgttgttgcctgggatggagtgcaatggtacaatctcagctcactgcaacctccatctcccaggttcaaatgattctcctgcctcagcctcccaagtaggtgggattacaggcaggagccaccacacctggctaatttttagtatttagtagaattcgggttttaccatgttggtcaggctggttttgaactcctgacctcaggtgatcctccagcctcagcctcccaaagtgctgggattacaggtgtgagccaccrcacccagcccaaacttcattaatttgtaattcaccaatttaaattctgtgagcg

SEQ ID NO: 589512 - DNA, 595 bp, Homo sapiens
acctttgttaatgttcacagcaatcccacaatataaggactattctttctttcattttttttttttttttgagacagagtctccctctgtcaccaggctgaagtgcagtggtgtgattttggctcactgaaacctccatctcccaagttccagagattctcctgcctcagcctccggagtagctgggactacaggtgcgcaccaccacgcccagctaacttttgtatttttagtagagatggggttttaccaagttggcctggatggtcttcatctccttctctcgtgatctgcctgccttggactcccaaagtgctgggattacaggcrtgagccaccacgcctggcctataaggactcttcttatgctcattttacatacaggagaactgaagcacagagaggctaaataacttgcctaggcacagccaggaagtagcagaattgcaatttttaactcagtatgctcttaacactaggttatcttgtctctcaaaaatgcagggaaacattggtctattagcatgcattttcagccatagtgatgttgaccccaatggggcaaaattggttctcggtggtctaaaatatctta

SEQ ID NO: 589513 - DNA, 410 bp, Homo sapiens
ttctggggactgccaacagccatatgagtgatcttgcaagttgatccygccccagctgagccttgatgactgtagccttggccaaaatattgacttcagcctcatgagagatccaggtaacctgcttctggattcctgaaccacagaaagtctgagatagcaaatgtttattatttattgttttcagccactaagtctcatgcagcaataaataacgaatatgaatggtaaccaaatgactggctggagaactagaaccttttcaagcctgcctccttcaattcattcaacaaatacttattgagatattacatgccaggcattagatgtggttcctgccctcaaactgctgatcttctgatggggcatgatgtggtgggaaaaattttttttaaaaattaaaaatcaaa

SEQ ID NO: 589514 - DNA, 416 bp, Homo sapiens
tacaaaatcttattggaagcacattctgcaaaatgaccccgaacagctgctaaggttgtcacaaaagcaaggatcttcagcatcccatmcaccttatcccagtgatagttgctgaggacactgcaaattcagctggaaaatcatgcacctactaaaacatctccattctacaaatagaactctgaggtccaaaagggaaattattttctcatgattatagaactcaatagaggagccaggccgagaaccaagatttttggcttctaatccatggcctggttcacgtcactctagcatagaacatcaaccattcttcctccctaatgtatgaaattcctaaaatcagtcccctggtggattgtagacacttccagaggtacttgataatgccattcgaagcatctaaggaaacaaac

SEQ ID NO: 589515 - DNA, 575 bp, Homo sapiens
aagacagcagagaatcaggcatatttgcgggctcaggggcaagaacccggaaagcaacggagatcaaggatgcgtgagagacaggatgtttggtggcggggtctgggcaacccaaatagcacctcagacccatgggagagaccaccaagccttctcagtccccatcagggtgggttcaccttgccaagccccgtctgaatgtagtgaaacaggcctgattgtacaatgtgtatggtacttgtttcgaaatggatagcctcctaaagaaatgatcctaattcaggaaaagcattatacgcacattgtccctccaagaagtatttaaaataaacattagaaacactctaaattttatcaagaaggaaaggattaaataacttatagtaataatactaatagtaataatagtcaccacgtctgagcacttccctygtgccaagcaccgcactaagccctgggtatgtaacaactcattttcactccacccagtgaatagcacagcaccgttaccaggaagctggtggagaacatataaaaaatggaaacatcagtttcacagtaagtgaaaaagagtt

SEQ ID NO: 589516 - DNA, 592 bp, Homo sapiens
tctgacttcccaggggggctctattccatagcctcgggggtccccctgggcagttccagctacacaaaatagcgattggccagagcgatgaggcctcatgctgtcagggcagggcaaggcagggaagacctcctcagctgggaaagctgggaccgccgcccaggaatcccaagactgctgcccgatgttayggaagctgttaggaaacggggccgtgagaggcagtgagggcagcaggcccagccagcaccctctgctgcggctttcatgggggggagggctgagagcctcccatcaagagtccacctggaggaggaggctgggtgcagggcagaaggggaaagtgtggactcaccttctcgcctggttggccctttactccctggggcagccacatgcaacacagggtgcaggaagggaaaggaggggagagaaaaaagaggggatgagaaagaggcacccacacgagaatccatgttcatagcacaacaaccaaacagaagaaatcactgtgaaataagaaacaaagcaaaacacagatgtcgacacatggcaggtccacgtccaacaagcacagcatgtggcatgtgga

SEQ ID NO: 589517 - DNA, 629 bp, Homo sapiens
gctggggaccaaggcgggtcttctggattagttagcaagcagatggcctctgtctgcctgggcagccctgtgctctggggagccatggttgaatggggcgatcacaygcaagggcacagtcctatgatgtcagactgctctaacaatggcaaatgccaaggccagtgtgaatcaatgaaaactcattgttggtaggaactctgggagcccaggagagatttggctgcaggtcacatgtgtggtggcatgaagctctgccagcttaaatgcaaggggagtggtagagtggtgaggagcacagcccctaggggaggcacagtagcatgtgagttcagagtgaaagcaactgagatgtcctacgtctaagacatgtcatcacgtggcataaacgaccttagaggaactctatgagtgtgatctggaactccttggggaagttccttgggggaaagacactatgtacattgaacacacaaagcataaagatgtcacctgtgtggctgcatggacattccgcctagggtttactgatgttctaagaagcattttaaaatgtttgttaacagcatgcagtgtatgggatgtttaatgggcaccctgcctttgagacagtgactatttgacctatg

SEQ ID NO: 589518 - DNA, 469 bp, Homo sapiens
acaccagccatctcactatcccccgctttacaaaggaagaactcaagaggrgtgcaggattccatccaggccactgcatgttactgcctcccttttcaagagcaagaggtggtgaagccagaactttctgtgctaccctgacctggtttccaaagtagagaaagaagacgaggcacctctgagctacctgctgcagattctgcctccagaatcaggttttttatgctgtcagccactatgggacataaaaatgcttgtccatttcttatcaataaaccaatattgattttacaggctctacaagccgcttaaacattgggtctaagattcactgaaaaaggaagctttatatgaaatatgatgtgcttagcagatggtgttggacgtcatttccaaagagcagaaagtgtagatggtgagccctttttgctgggggcttacttggaaagaatagggagagtctgcagtt

SEQ ID NO: 589519 - DNA, 650 bp, Homo sapiens
gtgatttccaattaattaacctgacaattcagaaaatggcattagaaagaacttcagctgtgttttgttttaaatgactgatgtttaaaagctctagtttaaaagtctccagaaaattgatctgggtaaccaaatcttggaaagacaggaaaaacaagtggctgaatctttccacaaacaatcaggatttggaaggatttttgctaaaagataatgttcaggaaaaggtaaaatcatactcttawactgatataaaaatgaacacatgttaaagatttcatttgactcatatgatgagggaaccagacagatgttttcaccggtccaaaggaaaaatcaaacaagcacaaattatatgcagtaaaggaaggttgagatgaactgcaaatggaaacaaagtcaattatcactattggacagtatataatttatataactatcggttacctacaagttagaaagggctgcaaaatagctcaaagacaatgaatagtatagaacctgataccccagaaggatatgctacagatgtggcatcattttccattaaagcatagaatttttttcctacaattgtaaagcaatgctctgccttatttaatacctagacttatttcacagacattaaaacacatcatccttttcaactc

SEQ ID NO: 589520 - DNA, 501 bp, Homo sapiens
tccctacttccttcttagcaggtctattttcaagctactctggctgctggtgctattttaaatgagacaatgggcccatttggctgcccattaggggtcctggcatgagccacctgataagcagtgaggtggccagtaggtgtgacatgcctgggtcatccctggggttgaccagaagtggccccactggcctgtccagagcagggtggattgggactgtccatctactggtcactgttgttacaagggacccttggccgcctaaccagcctcctctgcatcactgaccygtgctccgttcttccagaggtgtgtgtcctgccttctggcctcctgtgattctccacgccccctccctccaccttgcccggccaggtccaaggactccaggcttgtctagcttggcaaagctttgttcttggtgttcagctggacctgcaaacctcctagacaccagcatcacaacacagtcctggggcaattcccccgatccccacccca

SEQ ID NO: 589521 - DNA, 602 bp, Homo sapiens
gtgatgagaactaaaacaaacatgagggtttaagggagaaaggtttgctgtaggaggattcattttttcattccttcattcattcaatcgacatttactgagtgctcattatgcggcagacatagacacagtgctaagcatggtaactataacaccgcactttgtctttataacaaccttgtgaagttggcattatcaccccttccatagacttggaacctgaggcttagaggttaagcaacctgcctaaggtggtcaccttgctcttagatgatggcatctgattcttaaggttaaaaaattttaatttaatttaatttaatttattattattttttgagatagtatctcactccgttgcccaggctggagtacagtggtgcaatcacggctcactrcagcctcagcctccctgggctcaggcaatcttcccacctcagcctcccgagtagctgagaccacacaccacacctggctaatttctgtattttttgtaaggatggagtttcactatgttgcccaggctggtctcaaactcctgagctcaagctatctgcctgcctcgggctcccaaagtgctgggattatacacatgagtcacc

SEQ ID NO: 589522 - DNA, 573 bp, Homo sapiens
ggactgcctatgtgctctttagggctccaggatgaacatgaactacatcaacaagcagcctgggtccacctgcgggtagagggctgctccaggccctgtgttcagtgccgtgggatgcaaggtgatccggcaaagttccttggttcagggctgggcaagtgctaaacagaagcataggcatctagtttgggaaatgcaagaaaaggagtgactactcctgaagggaggaatcagaaatggctgcatggaagaagtggcatttgaaggaatccctgaatggcaagtaagatttcagtaaatgagaatgtgcatgaggacattttaaaacaatgaaacaacataataaagaatagagacctgaacaactgtgttttttccacacacacccccacaccccacaccccactstgggaaatgaggaatgatctggagcggttgtagtaagctcctgcggagggatggagtaggaggtacggctggaaagaaaagttgggggttggggaggcagaccgtggagggagttggacaccaccctgaaagccagcttctatttggtgggtagcaggaaaccac

SEQ ID NO: 589523 - DNA, 556 bp, Homo sapiens
gatggcccagaaattccacccctgggtatatgtgaaatggaaatgaaaacatgttcacacaaaaacttgtacactaatgttcacagcagcattacttagtagttaaaaattataaacaggccatgcaccatggctcacatctgtaatcccagcactttggggggccgaggtaggcggatcacctggggtcaggagtttgagaccagcctggccaacatggtgaaaccccgtctccactaaaaaatacaaaaaaaattagccaggtgtggtggtgggtgtctgtagtcccrggtactctggaggctgaggcggagtatcgcttgaacccaggaggtggaggttgcagcaagccgagattgtgccagtacatgccagcctgggcaacagagcaagtctctgtctctaaaaaaaaaaaagtataaacaacccagatgcctatcaactaatgaatggataaacaaaatacagtatacccacacagtagaatattattcacccaaaaaaaaggaatgaagtcctgatccatgctacaacatcgattgtttttttttttgag

SEQ ID NO: 589524 - DNA, 590 bp, Homo sapiens
aatatttgaggctgtgtgagacacatgatctctgccacacctactccactcttccatcgcaggccaaagcagccatagtttggaaacaaatcagatgtggctgtgctcccataaaaaatatatatttacaaaaacgggctgcaagctggatttagctgtagttagcccaccctcacggaatcattatgcaaatatgctgttgtgtattcccagcataaaaacggaaaagagaataatcctcttttgactctggttagctctttccctagaaaaactcctggatgacaatcttcgctgcctcctacgtctctcctggaccactcctacctggctcttcccctactgtcccctaagaactgtcctgcaggttgccagtgacctccgggttgccaaatctggtgggcagtcctcatgcttcctcttagccaggctgcagcctttgctcaccccccttcytcctcggggcacttcctgcccttggctcccaggacacgcactctccccatttcccttccaccaccctggctgtgccctctcagtcttgtgctgattccttcttatctacttgatgtctaaatgttggaagtcac

SEQ ID NO: 589525 - DNA, 545 bp, Homo sapiens
ataaactctcactgaaattaatgctagaaaatgtacttgagcaaataaaaagacatgggatacaagaaactattatatccatagaaattggtaaaacgtgcagctaagcctaaataattgttgttttattgatagaatctagaagaaacaaaaatcccaaatagtttcagcaaggaaagtagcagagacctggggaaggagaaagtaaatcatatctagtttatccattattctgaataagaggaagagagaaatactgattaattgtggtcatacagaggagataccatgtgctaaattttaaaggtattcagggtgacatcagtacaaatggaggagtaaggagttctgaacattctctcctccataaaatcaactaaaacaatggcaaaaattgtcagaatcgwctttttcagaactctaaaattaatgaaaggcttacagcaatccaggagcatttattcaagaaaactggctgaaacttggtaagaacagggagttttgtggagttttaacttgccttttccatgaccctcctcagctca

SEQ ID NO: 589526 - DNA, 504 bp, Homo sapiens
caaaatacctaaaaagggattcaaaataatgatcttaaggaatatcagtgagatacaatagtatacagacaactcaataaaatcaggaaagcaattcatgatctgaataagaaattcaacaaagggagagttatcgttaaaaaaaaaaaaaaaagaaagaaatcttggacctgaagaactcaatgaatgaaataaaaatacaattgagagcttcaacaacagactagatcaggcagaaaataagaatttctgaacttgaaaacagktctcttaaaacaacccagtgagagagaggggaaaaaaagaacaataaagagaataagaaacgctatgggagttataggacaccattaagcatataaatattcacattatagaggtgtcagaaggagaaaagattaaggcacagaaaacctatttaacaaaataatagctaaaaacttcccaagtcttggaagagatatggatatccacagacaggaaactcaaagacaccagttagat

SEQ ID NO: 589527 - DNA, 563 bp, Homo sapiens
taggtggaagtaaattttcagctaccactgccccacccatcatgcccctggcagacattgctaatcaattaggaggctttttaacataatgcattagtcagttactcccaatccattggcatcagtgctcaagctgacatctattggccatccctggattcaatttaagggagaatttcctaatactgggaactatgagactgaaaacagatgaccaagggaagtagggatgtatctttctctgaaggaatatagggaaatatttgccagcagctgccaggccttgctgaatatgatccttgctgaaatagtagctaacacttactrtgtgttagacactgttatgtttttatggaggcagtgtaacatagtgattatgagcatgggctctggggccagaccaactgcaatcaaatcctggcactgccactttttgctgtgtaaccttagcaagtcacttaacctctctctgcctcagtcccctcatctgtaaaattagaacagtaatggtgtctgcttcatatggatgttgtaaggtatatgtgtgtatgtgtgtgtactgt

SEQ ID NO: 589528 - DNA, 459 bp, Homo sapiens
tccagcctaggtgacagagtgaaaccctgtctcaaaaaaaaaaaaaaaaaaaaaagtgaagcactagatccataaaagttcactgccgaattctataaacacttaaggaagaacttaaaccaattctctacaatctctttcaaaatacagaagcacaggaagtacttcctaactcattttataaggttagaattccccaaatattgaaactagatcaaaaaactacaagaaaaggaaactacagatcaaaatctctcatgaacacagaagcaaaaatctgccaaaaaaagcaaattgaattggaaaaatgtataaaaataattacacagtatatgactaagtgtcatttatcccatgtatgcaagactggttygacatttggaaatcaattgatatatgtcttagtttttctgcattgatataacagaataccacaggctggataactattaagtaaaa

SEQ ID NO: 589529 - DNA, 647 bp, Homo sapiens
gggaagacataggccctagaagagctaaaagaatcttgagaaagaataaagcaggaggtatcacttcacctgatgtgaagacttaatatatggctacagtaatcaagagagttcatattggcaaaaggatacacacamaaatcaatggaatagagaacccagaataagacccacgcatatacgaattactcttctaggaatcagtctcatcctgtattttggaactttcactttttagaagtctttccttattgttcattttaaattcctgattttataagataatgcttttacttcatattccaatctcaatagaaatcttaaaagctgattcttctactgtgatatccctactttgctttgaatgttttcactataatggggccttatctagttcaacctcctcttctgaaagaaaagaaaccagaacgttgacaggcaatgggactttcctgagaccacacagctggacagagaaactgacagcaggtcagaaatgactgactgactgactgactggtgggtgaaatggaaggattctaacttagagagaaaccactcatatcacatttgagtcactggtgtacagaggggaattctttttttacttattattttaattgacacataataattatgtgtcaatt

SEQ ID NO: 589530 - DNA, 647 bp, Homo sapiens
gggaagacataggccctagaagagctaaaagaatcttgagaaagaataaagcaggaggtatcacttcacctgatgtgaagacttaatatatggctacagtaatcaagagagttcatattggcaaaaggatacacacacaaatcaatggaatagagaacccagaataagacccacgcatatacgaattactcttctaggaatcagtctcatcctgtattttggaactttcactttttagaagtctttccttattgttcattttaaattcctgattttataagataatgcttttacttcatattccaatctcaatagaaatcttaaaagctgattcttctactgtgatatccctactttgctttgaatgttttcactataatggggccttatctagttcaacctcctcttctgaaagaaaagaaaccrgaacgttgacaggcaatgggactttcctgagaccacacagctggacagagaaactgacagcaggtcagaaatgactgactgactgactgactggtgggtgaaatggaaggattctaacttagagagaaaccactcatatcacatttgagtcactggtgtacagaggggaattctttttttacttattattttaattgacacataataattatgtgtcaatt

SEQ ID NO: 589531 - DNA, 637 bp, Homo sapiens
aatattaaattcagacttctggccttcagaactgtgaggaaaaacatttatgttattttaaccctccaagtctgtggtaatttgttgtagcagccatagaagactaacacagattttggtgccagaagtgggatgttgctataacaaatacctaaaaataaggaaatggctttggaattagatactgcatagtaactggaagcattctgaggcatgtagtaagctgaagaaaatgggcttccaaagatatattcactttcaaatttttaggacatgcaaatattaccttatatgaaaatcactgtgattaaattaaatatctggaaaggaggtgttatttaggattacctgggtggattgtaaatgcaatcacatgtatccttataagagacagacagagttttaggtcagacaaacacacaagaaagcaatgtaaggacagaatagagagacagatagcaccagccaagtttacagcccctagaagctggaagaggcaaacaataaattctacactggagcttctggagggagtgtggccctgcctaccaccttgatttttgatttckgacacatggaactgtgaaagaataaatttctgttgttttaagttaccaaatttatagtagtttttagt

SEQ ID NO: 589532 - DNA, 551 bp, Homo sapiens
tagcttaaataggtaggttgctattcattgtagattcctcactctcaaagcagggtgggctcaaccatcaccacgcagggggatattgataagggagtcataaagaacatgtagaagctagagcctatctttaccaaaatcttctactcagagagacaagagaggaaaacatgccctatatggagccaccgattaagagagacaagaattctcactatcgtcatggttgccatcacatcctagtaatrcgcaagtgaacctatattataaatacacatcatatgttgtcgaggttaatcttctttaaaaagaaagtcctaaagtataatcctcactttacagattaagaaattgaaacttggaggaatcgaataatatttccaaggtcacacagaaggtgaattcccactccattttaaccaatttgattacaatgctcatgtttttaacccctcctcaataatacccctccagtaatgtttctgtttgcatagagtggaataaaatttgttctattacttacctttgtactagataccttaaaaacaagc

SEQ ID NO: 589533 - DNA, 551 bp, Homo sapiens
tagcttaaataggtaggttgctattcattgtagattcctcactctcaaagcagggtgggctcaaccatcaccacgcagggggatattgataagggagtcataaagaacatgtagaagctagagcctatctttaccaaaatcttctactcagagagacaagagaggaaaacatgccctatatggagccaccgattaagagagacaagaattctcactatcgtcatggttgccatcacatcctagtaatgcgcaagtgaacctatattataaatacacatcatakgttgtcgaggttaatcttctttaaaaagaaagtcctaaagtataatcctcactttacagattaagaaattgaaacttggaggaatcgaataatatttccaaggtcacacagaaggtgaattcccactccattttaaccaatttgattacaatgctcatgtttttaacccctcctcaataatacccctccagtaatgtttctgtttgcatagagtggaataaaatttgttctattacttacctttgtactagataccttaaaaacaagc

SEQ ID NO: 589534 - DNA, 573 bp, Homo sapiens
gcagtggcgagatctcggctcactgcaagctccacctcccsggttcacgccattctcctgtctcagcctcccgagtaagctgggactacaggcgcccgccaaaaagcccggctaattttgttttgtatttttagtagagatggggtttcaccgtgttagccagatggtctcgatctcctgacctcgtgatccgcctgcctcggcctcccaaaatgctgggattacaggggtgagccactgtgcccggcagattgttagcatttttaatcaataaagtatttttaattaaaaaattaacgattttttttggtgtggtatcaccattgtcaattagccattcaatcaacaaacaactaatgagtatcttctgtgtgccaggtgctgctccacctgttgaagctacaatagtgggtaaaggtaaagtttctgttcacaatgaatttttctagaagaggagtgtggtaggaagaatagtggttccctcagagacatccattcattaatccccagaacctgtgaatacgttagtttacaaggcaaggagggcagtgtgattgcaggtgaaattaaagt

SEQ ID NO: 589535 - DNA, 573 bp, Homo sapiens
gcagtggcgagatctcggctcactgcaagctccacctcccgggttcacgccattctcctgtctcagcctcccgagtaagctgggactacaggcgcccgccaaaaagcccggctaattttgttttgtatttttagtagagatggggtttcaccgtgttagccagatggtctcgatctcctgacctcgtgatccgcctgcctcggcctcccaaaatgctgggattacaggggtgagccactgtgcccggcagattgttagcatttttaatcaataaagtatttttaattaaaaaattaacgattttttttggtgtggtatcaccattgtcaattagccattcaatcaacaaacaactaatgagtatcttctgtgtgccaggtgctgctccacctgttgaagctacaatagtgggtaaaggtaaagtttctgttcacaatgaatttttctagaagaggagtgtggkaggaagaatagtggttccctcagagacatccattcattaatccccagaacctgtgaatacgttagtttacaaggcaaggagggcagtgtgattgcaggtgaaattaaagt

SEQ ID NO: 589536 - DNA, 568 bp, Homo sapiens
ggagtacaggcttttggaggccttcaaatccatactgcttggtgactgtaagatcttcctgacccaccgctggccacaggtagaagctccctagtccttgccatttgtcctcaagaagcaccttgggaccagttcgctcattcttcttctgattaaaatgacaatcttgtaccttactttccagacaattaaaattgagtaaggcaacattttctttctaaatttccattgctcctccaagttttgttaactaaaatacttgttctttggagaaaatttgaaaattacstaagagttgaaagaaaaaacaaaaagacatcacccacatacctgtcaaagcaaatcaccatggctaggcacggtggctcatgcctgtaatcccaaacactttgagaagcagaggcagaaggattgcttgaggccagaagttcaagaccagcctgggcaacataatgagactacatctctacaaaaaatttaaaaatttgtcaggcatggaagcatgtgcctagagtctcagctacctggggggctggggcaggagctgagcccaggaatttgaggctgc

SEQ ID NO: 589537 - DNA, 575 bp, Homo sapiens
aaaaaatatacacatatgttgattaggcatagaagtatgtggatattattcaataaaagcagggccagaatatctctcaatttttggttgtttctcaaaaagctaaaacccattcatttaccttctgggctaggttgtagccaggtctgttgcactgaagtctcaatgatggaggaataggtaaaaagtagaagaatgtcactgtggtgaggcaaggatttcatcttatgatgataagggcttgaatactgacctggcctctctacccttgccaagctcacygtggtatacatggcagcatgcctgcagttttcaggtcctctgccttggtgaattccttgcttcacactggctgctgaggccatcagactttgggtaggcctctggatcaataaggatgaaaatcaacatatacattaccactatgagtgtttgatctcatgcaaatctgctgcatgatccatttactgattcaaggttaatgaagttgcaacagctgaactgattctgcatcctttgctcattcttgaatctggattagcctttgaacactggcctacctcacttccaccatt

SEQ ID NO: 589538 - DNA, 478 bp, Homo sapiens
aagtgggagagcaccacatcaagggatcaccctgkggacaaaagaatctgaacagcaggccttgagttccagacctttccattgaaataatctacccaaatgagaaggaaccaggaaagtaattttggtaatatgacaaaacacggttctataacacccccagaagatcataatagctccccaatgatgaatccaaacgaagaataaatctctgaattgccagataaagagtttagaatgttgattattaaactactcaaggcaacatctgagaaaagtgaaaaccagcttaaagaaattaaaaaatacaggatatggatgaataattctccagagaaatagatatcataaataaaaaacaattacagcttctggaaatgaaagacacacttagagaaatacaaaatgcatgggaaagtttcaacaatagaacaagtagaaaaaagaacttcagagaacgaaaacaaggctttcaaaa

SEQ ID NO: 589539 - DNA, 454 bp, Homo sapiens
aagcttaggcttaaattagaaggcagccagaagtaaaatatatatgtatactttatatatttatatactttatatrtatagttttatatacttatatataatttacatgtgtatacacacatatatttaagtattatataaaagtaaaaaacatatgcaaaatcctgaaggtgagaaataaaagtaatttgaggagaccaaaatggttacaggtgctaaagttgagagtggagggtgacaggcaagaaaggcaaaccacagaagacccacataggtccattctccatcgattgaagaaatcagactttatttgctggggttaaagtgctcttgaagttttcaacaaaggaattacttggaaattattttagttcagtatctggagataattaaaagtgggcaagtctagattaacaagacaatttaagagattgttgcagtagtttaagtgtga

SEQ ID NO: 589540 - DNA, 539 bp, Homo sapiens
gctaaactgcctgggtttataataaaactggtctccacttacattgcggcaaatgtgttaacttctctgcacactgtgtgcacagttttttttttttttgatatgcaaacaaggatcacatttgcacctacttacaagggtcctaaggtcctggcatgacggcactatgcaactgagacctggatggatggatggatggatggatgaacagaggcatgaatggatggacaggtaggtagataggtaggtaggtaggtaggtaggtagatagatagataattgtattctgtattacccttcttcaaatcttcattagctttttaatcttgctcagaatgaaatggaagccttttattgtgaattacctatctctataaaatacaagtttaggtccctaaacattatgtgatttagtctactctttgagtaacactcttgcaaagcactgatttaagtgaattatgattagtccctatccttcagtagatcacaastcctttgatgaactcaaactacatttttacctcagaatctgtaga

SEQ ID NO: 589541 - DNA, 460 bp, Homo sapiens
tttaggttgattccatatcttggctattgtgaacagagttacaataaacgtgagagtgcacatatatatttgatgtatttatttcctttcttttggatatacacccaaaagtgcaatggctgaatctttttgtaatctatgtttcgttttttgaagaaactccatactgattttcatagtggttatattaatttaaactccaatgaacagtgtaccaatgttyctctttctccaaatcattgccagcatttgttattttttgtcttttagataaaaactatttcaattggggttagatgtctcattatagttttgtttgcatttttctgatgattagtgatattgaacattttttatacacctgttggccatttgtaagtcttattttgagaaatgtctaatgagatcatttgcccatttttaattcgtatgaattaactgaattatatgaatatatgca

SEQ ID NO: 589542 - DNA, 576 bp, Homo sapiens
ttgtagacatacttcatatttctttcatttttatttattttttatrttctgaatatttattttcatgtggtctgtatttgagttcactaattatttgttcttcttgaataattgtgcttgattaattagttgtgacactgatgtagtttttggtttgtccaatgaatttctcagcttcagaatttctgtgtaatattttaaaaattattttaatttctctgttaaatttctctgttagacttctaaatttcttctctaggttatccagacatttggcaaacttccttaagacagctatttttaaattttctgtctgataggtcaaacatctccattactccaggatttgtcagtggtgccttatttagtctgcttgatgaggtcgtgttttctggatgttcttgctgcttgtggatgtccaccaatttctgagtattgaagaattatttataccagtctttgtagtctgacttacttgtatccatccttcttgaaaaggctttccacaaactcaaaagggattgagtgttgttacctaagcctgtggtcactgcagccatttcattactagggagc

SEQ ID NO: 589543 - DNA, 576 bp, Homo sapiens
ttgtagacatacttcatatttctttcatttttatttattttttatattctgaatatttattttcatgtggtctgtatttgagttcactaattatttgttcttcttgaataattgtgcttgattaattagttgtgacactgatgtagtttttggtttgtccaatgaatttctcagcttcagaatttctgtgtaatattttaaaaattattttaatttctctgttaaatttctctgttagacttctaaatttcttctctaggttatccagacatttggcaaacttccttaagacagctatttttaaattttctgtctgataggtcaaacatctccattactccaggatttgtcagtggtgccttatttagtctgcttgatgaggtcgtgttttctggatgttcttgctgcttgtggatgtccaccaatttctgagtattgaagaattatttataccagtctttgtagtctgacttayttgtatccatccttcttgaaaaggctttccacaaactcaaaagggattgagtgttgttacctaagcctgtggtcactgcagccatttcattactagggagc

SEQ ID NO: 589544 - DNA, 502 bp, Homo sapiens
attagctcttaaaaagttcattaaaaaatacactggtatgagaaagtgtcaacaaagaaataagatggaccatttaaagtgcaatgactataaaaaatagagcattctgaaaaacttaaatatatttatgttttaagtgttacatagggaatgctggcactgtctaggatrgaatgttcctaattatagtagcttacccattgaaggctgaaataaaacatgcaaggatgtgtgtgtttgtgtgtgtgtgtgtatgtgtgtaaaggctttagaaagctgatgagacctgaggtactcaatctccaagagaagaaaactgagcaccctgaggacagttagggaacagggctgttgaatcatagcagacagcaacagggcctctagtgtgcaacagaattggagttcagatcctccaaagtggctgtgatctgaagacaaaactgacatcaaagaatcctcacagaagcgagcggaaatatttttatatacttttctcaatcct

SEQ ID NO: 589545 - DNA, 620 bp, Homo sapiens
ctttcttagaagtcatgtgttgtagaattgaatcgaggtccacagaggacaaaaaaatctaattttctgggttttggaacctataatttacttttatctaagyaatttgacctttgaaatgctgatgatctgtgtctgtttatatatacttattattatttgctttttatttttatcatatatatttaaggtgtaaaacttgatgttttcatatacatatatatggaaaaatgattattatagtcaaataaattaacccattcatcacctttcattgttaattttgtgtatgtgtgtatgtgtgtgttaagagcatctaaaacttagtctagtagcaattttttctatataaaattattaactatagcccttatacagaaaaatgatattgttagacttatttattctatataattataatttttaccctttgacctatttcttccatttctttcccctttctgcttatggcaaacactgtcccattttcagattatgtgtttgccttttttatattttagattccacatataagtgagattatgcagtatttttatttctgcatctatctcattttacccagcataatgtcttccaggctcatccatgttatcacaaat

SEQ ID NO: 589546 - DNA, 538 bp, Homo sapiens
aaggaattaaacaatataaataaagaagtaaaatggttcagaacaaaaagtaaggcaagtagacaatacacaaagaattgcatatgcattattggattttctgaaaaagaaagataaaacaatgacacaattaatatttaaacctatactctaaaaacacttaaaaattagtaaaaacctgagtatatatattaaaacattctactgggtgcctaggaaaattaagcacaacaatcaatttcaagatattttctagtacaactgttagatttttaagataaagaaacaattttcaaggctcaggcacagtgatttgaaaactcacgaacacaaaattgcttctgtcatcaggcttttcaaaaaccacagaaaaacaaggaacacgcaaatgcatcaacactgtttcttgaaactcaatgaaagaaggtataaatattttatatccagtgcacttattattcaagtatcaagtttataaaacaatcactttatggatgtaaaaatrtaagaaatgattctgtatccatgaggacatttt

SEQ ID NO: 589547 - DNA, 552 bp, Homo sapiens
aatcattttttaaaaaatgwatcactgttggaaactttctgtttcttctctggaaattaatctttaactatagtgagagcttcatagctttctgggtatagactccctgaattttaatcctgcttgtaccaattattagctgtgtgacttcgggcaaattacataaaacttctctctacctcaatttcttcatgtttaaaatgaggattatcataaaacccatttgatgatggtattttaaaaattaaacaagtgttagtaaataaaaatattttggcctaatgtccaaaacattggcaatattgctaacatggctttataagttttgtcccagtcacactgaaataattttagtttatatatcatctttctgtttcctacatgttagattaagtacatgatattttccttgcctagaaagttctctttccctgtcttcctataaataattcttaatcttacttttctttcagttctaaattttaataggtttctattgcagtgtacaaaactattgcaaacatcacgttttcttttcttttcttttttttt

SEQ ID NO: 589548 - DNA, 552 bp, Homo sapiens
aatcattttttaaaaaatgaatcactgttggaaactttctgtttcttstctggaaattaatctttaactatagtgagagcttcatagctttctgggtatagactccctgaattttaatcctgcttgtaccaattattagctgtgtgacttcgggcaaattacataaaacttctctctacctcaatttcttcatgtttaaaatgaggattatcataaaacccatttgatgatggtattttaaaaattaaacaagtgttagtaaataaaaatattttggcctaatgtccaaaacattggcaatattgctaacatggctttataagttttgtcccagtcacactgaaataattttagtttatatatcatctttctgtttcctacatgttagattaagtacatgatattttccttgcctagaaagttctctttccctgtcttcctataaataattcttaatcttacttttctttcagttctaaattttaataggtttctattgcagtgtacaaaactattgcaaacatcacgttttcttttcttttcttttttttt

SEQ ID NO: 589549 - DNA, 546 bp, Homo sapiens
tttttaaaaaatgaatcactgttggaaactttctgtttcttctctggaaattaatctttaactatagtgagagcttcatagctttctgggtatagactccctgaattttaatcctgcttgtaccaattattagctgtgtgacttcgggcaaattacataaaacttctctctacctcaatttcttcatgtttaaaatgaggattatcataaaacccatttgatgatggtattttaaaaattaaacaagtgttagtaaataaaaatattttggcctaatgtccaaaacattggcaatattgctaacatggctttataagttttgtcccagtcacactgaaataattttagtttatatatcatctttctgtttcctacatgttagattaagtacatgrtattttccttgcctagaaagttctctttccctgtcttcctataaataattcttaatcttacttttctttcagttctaaattttaataggtttctattgcagtgtacaaaactattgcaaacatcacgttttcttttcttttcttttttttt

SEQ ID NO: 589550 - DNA, 552 bp, Homo sapiens
aatcattttttaaaaaatgaatcactgttggaaactttctgtttcttctctggaaattaatctttaactatagtgagagcttcatagctttctgggtatagactccctgaattttaatcctgcttgtaccaattattagctgtgtgacttcgggcaaattacataaaacttctctctacctcaatttcttcatgtttaaaatgaggattatcataaaacccatttgatgatggtattttaaaaattaaacaagtgttagtaaataaaaatattttggcctaatgtccaaaacattggcaatattgctaacatggctttataagttttgtcccagtcacactgaaataattttagtttatatatcatctttctgtttcctacatgttagattaagtacatgatattttccttgcctagaaagttctctttccctgtcttcctataaataattcttaatcttacttttctttcagttctaaattttaataggtttctattgcagtgtacraaactattgcaaacatcacgttttcttttcttttcttttttttt

SEQ ID NO: 589551 - DNA, 641 bp, Homo sapiens
attggctttttggaacaaagcagacttagaggcggtggagtgtggataatatccattttgcttatacagttttcctcaaggtcttggcctgcataaaaggaagtggatttgtcctagtgggattgtacatttaacaagatatttatttaaattttatgttcaatgtgctatgtaaaatttaatgtagacagcttaaaaacatgcttaaaagtagcacttagtgattaaaaaaaaacttggttgtgtctaagcacaggtatttcaaacagtgtaagtaacttatcatttcaattgagacatatttgtgaaatgaataaaagtaaatttccagagcttccagtttacaatctctgtgctttttaaattttaacctcttcttcccattctctcttttcccrttcgagtgagaaaaccagctctaaaaaaataaaataaaatgaaaactggcagcacctttgcacaaaatgtgactttctttttgtgaatacatcaccctattaggtgatactagattgaaatttccagaaaaaatttttaccctgaattacacagagtcgtttagatcaaatgcacttcagaatgtggaaaggaaaattaggaaagttgtatgaataagaaggacaacaagtatcatttgccta

SEQ ID NO: 589552 - DNA, 641 bp, Homo sapiens
attggctttttggaacaaagcagacttagaggcggtggagtgtggataatatccattttgcttatacagttttcctcaaggtcttggcctgcataaaaggaagtggatttgtcctagtgggattgtacatttaacaagatatttatttaaattttatgttcaatgtgctatgtaaaatttaatgtagacagcttaaaaacatgcttaaaagtagcacttagtgattaaaaaaaaacttggttgtgtctaagcacaggtatttcaaacagtgtaagtaacttatcatttcaattgagacatatttgtgaaatgaataaaagtaaatttccagagcttccagtttacaatctctgtgctttttaaattttaacctcttcttcccattctctcttttcccattcgagtgagaaaaccagctctaaaaaaataaaataaaatgaaaactggcagcacctttgcacaaaatgtgactttctttttgtgaatacatcaccctattaggtgatactagattgaaatttccagaaaaaatttttaccckgaattacacagagtcgtttagatcaaatgcacttcagaatgtggaaaggaaaattaggaaagttgtatgaataagaaggacaacaagtatcatttgccta

SEQ ID NO: 589553 - DNA, 577 bp, Homo sapiens
catacctttttaagcagatttaagtatatgcttttaaaggcatctgtttagtgatacaatatttaatgtagagccgttaccaataactgaatgtaattaacactctggcacacgcatttggagaaagcaagaccacaaactgcacccagattgactctatcttctatttttcctagttctatgttttaacaaaaattatgtaactgtttattcaaaatactggataaaattttctggcattcatttaaattaatttaagtatctgaatgtataattatgtgtatgaagtaacagaatgcaccccatacracatacctttgtggagtaaagacccagactctgaaaagggttaagagcaatgagtatgtctcccacatagacgtagatctgatctctggaataacacttctcaagttgctctgagactgtattctgcaataaaataaaataatttctccttcttaaaaattatttgtggtcaactacaatttaaaaagtaaacaataataaacagaacatctggaatctggacgaaggattagaaaaacagacacactgatagtaaaaaacatgtaac

SEQ ID NO: 589554 - DNA, 610 bp, Homo sapiens
agtggctgaatggataaaaacaacaacaacarcaacaacaacaaaaacccaaactaaaaccaaatgatctgttgcttacaagaaacacacttcatctaaaaagacacacatagactgaaaataaaggaatggaaagaggtattctatgccaaccggaaccaaaaaaagcaggagtcactatacttataccagacaaaatagatttcaagacaaaaactataagaagagacaaaaaaggtcactatgtaatgataaagaggtgaattcagcaggaggatataacaattgtaaatatatatgcacctgacactggagcacccagatatataaagcaaatattagagctaaatagagagataaaccccaataaaataacagctggagacttaaatacttcaccttcagcattgaataaatcttccagaaagaaaatcagcaaagaaacatcagacttaatctgcattatagatgaaatagacctaatacatatttatagaacattcatccaatggctatagaatacacatttttctcctcagcacatgggtaattctcaaagatatatgatatgttaggtcacaaaacaagtcttaaaatattttttaaatgg

SEQ ID NO: 589555 - DNA, 610 bp, Homo sapiens
agtggctgaatggataaaaacaacaacaacagcaacaacaacaaaaacccaaactaaaaccaaatgatctgttgcttacaagaaacacacttcmtctaaaaagacacacatagactgaaaataaaggaatggaaagaggtattctatgccaaccggaaccaaaaaaagcaggagtcactatacttataccagacaaaatagatttcaagacaaaaactataagaagagacaaaaaaggtcactatgtaatgataaagaggtgaattcagcaggaggatataacaattgtaaatatatatgcacctgacactggagcacccagatatataaagcaaatattagagctaaatagagagataaaccccaataaaataacagctggagacttaaatacttcaccttcagcattgaataaatcttccagaaagaaaatcagcaaagaaacatcagacttaatctgcattatagatgaaatagacctaatacatatttatagaacattcatccaatggctatagaatacacatttttctcctcagcacatgggtaattctcaaagatatatgatatgttaggtcacaaaacaagtcttaaaatattttttaaatgg

SEQ ID NO: 589556 - DNA, 426 bp, Homo sapiens
gctgtttcttgaacacattaagcatgcttctacctcacagctttggtatttgctgttccctctgagtggaatgccattttctttggtatctgtaaagctctttcttgcttcccatgggcttctttcaatattatattaatcagagtcttttcctggtgagcccttgtcaattagtggcttctctccagaatctctcatcacccttttccctgctctatttttagccattgccttctcccccaattttcctcatcacctctcatattctaccttgtcctctgtcttctcctattagattgtaattaatataatgccaatctagattttatggtactagtaagacagagtacctgtattgttcactgctgtgtccccagcagctgttaacagtgcmtggcatgcagtaggcactcaataaatagttgt

SEQ ID NO: 589557 - DNA, 446 bp, Homo sapiens
gattacagacagtcgccaccacgcttgactaatttttgtatttttgcagagagagggttttaccattttggccaggctggtcttaaactcctgacctcaaatgatccacctgcctcagccttctaaagtgctgggattacagtgtgagccactgagattggcctatgatttttgaaagctatgatgagaatgtatgtatcactgcctgtgagttacacatcacaggagatttccacccatctggactggtacctgaaacagaargctaaacaggaatgctagaaacaagggagggaggacagagagaggatggaaagaacaggagggaggaaggatgaaggatgaggatgataaagtcaaattcttgcctttcgcagtcctaccctgggattcggagtgtgatggtgaagtgctgcctgtcccagagaagggccacagagctgtct

SEQ ID NO: 589558 - DNA, 487 bp, Homo sapiens
tttttagtagagacggggttttgccatgttggccaggctggtctcgaactcctgacctcaggtgatcggcccacctcggcctcccaaagtkctgggattacaagcgtgagccaccgcacctggccatctgaacggattttaagagggcaaggagccctcttatatttttgtgtgtttgtgcaagagacattatacacgtggataactgtgttgtatataaatgtatagcatctttgaatggagaatggtctgtgtgtttacacgacacacaacatttgcaaaaaaaaaaaaaaaaaaacaaacatggcaggccagttggaaaaggagagccacaattaaaataacacctatttaattttttagaaacataaaatatatgaccttttacttataggagcaaaccctagtttggactaagaactgaatcatgtgagcttatggagagattcatcagagcagagggaacaatgcaatttggtggttgttt

SEQ ID NO: 589559 - DNA, 487 bp, Homo sapiens
tttttagtagagacggggttttgccatgttggccaggctggtctcgaactcctgacctcaggtgatcggcccacctcggcctcccaaagttctgggattacaagcgtgagccaccrcacctggccatctgaacggattttaagagggcaaggagccctcttatatttttgtgtgtttgtgcaagagacattatacacgtggataactgtgttgtatataaatgtatagcatctttgaatggagaatggtctgtgtgtttacacgacacacaacatttgcaaaaaaaaaaaaaaaaaaacaaacatggcaggccagttggaaaaggagagccacaattaaaataacacctatttaattttttagaaacataaaatatatgaccttttacttataggagcaaaccctagtttggactaagaactgaatcatgtgagcttatggagagattcatcagagcagagggaacaatgcaatttggtggttgttt

SEQ ID NO: 589560 - DNA, 487 bp, Homo sapiens
tttttagtagagacggggttttgccatgttggccaggctggtctcgaactcctgacctcaggtgatcggcccacctcggcctcccaaagttctgggattacaagcgtgagccaccgcacctggccatctgaacggattttaagagggcaaggagccctcttatatttttgtgtgtttgtgcaagagacattatacacgtggataactgtgttgtatataaatgtatagcatctttgaatggagaatggtctgtgtgtttacacgacacacaacatttgcaaaaaaaaaaaaaaaaaaacaaacatggcaggccagttggaaaaggagagccacaattaaaataacacctatttaattttttagaaacataaaatatatgaccttttacttataggagcaaaccctagtttggactaagaactgaatcatgtgagcttatggrgagattcatcagagcagagggaacaatgcaatttggtggttgttt

SEQ ID NO: 589561 - DNA, 540 bp, Homo sapiens
ggttacaaagcagcctgaatttttcagatcataacagctgataataaatctcattwaacaactcccggatagatatcagcaaactacagcctctgggacaaaccctggccactgccttgtacagctatgaactaagagtgttggattttttttttaagccgtatctgaaaactgccacacacaaaaaattaataaaaaaaaaataatgtggtttttagccaggcatggtggctcacgcctgtaatcccagcactttgggaagccaaggcagtaggatcacctgaggtcaggagtttgagaccagcctggccaacacggtaaaaccccgtctctactaaaaatacaaaaatttgccacacacctgtagtcccagctacttgggaggctaaggcaggagaatcgcttgaacctggcatgctgagtttgcagtgagttgagatcacaccactgcactccagcctgggcaacagagtgaaactgtgtctcaaaaaaaataataataaaataaaaaaattttaaaaatgtggtttttatatttct

SEQ ID NO: 589562 - DNA, 562 bp, Homo sapiens
ggttacaaagcagcctgaatttttcagatcataacagctgataataaatctcattaaacaactcccggatagatatcagcaaactacagcctctgggacaaaccctggccactgccttgtacagctatgaactaagagtgttggattttttttttaagccgtatctgaaaactgccacacacaaaaaattaataaaaaaaaaataatgtggtttttagccaggcatggtggctcacgcctgtaatcccagcactttgggaagccaaggcagtaggatcacctgaggtcaggagtttgagaccagcctggccaacacggtaaaaccccgtctctactaaaaatacaaaaatttgccacacacctgtagtcccagctacttgggaggctaaggcaggagaatcgcttgaacctggcatgctgagtttgcagtgagttgagatcacaccactgcactccagcctgggcaacagagtgaaactgtgtctcaaaaawaataataataaaataaaaaaattttaaaaatgtggtttttatatttctaaatggctgagaaacaaatcaa

SEQ ID NO: 589563 - DNA, 580 bp, Homo sapiens
caggtaaatcacatctccttttacttctgacccttcctgccttctcaagagtctcagcatccattattgtcagttctgtgtatttaacaggtttggtagggaaaacgtctcctcctggactactgtcaaattaatgaagattaaaactttgaaatattttgtttattctgagtttttataaataacctaaaagttcatgtcagaagcaatatcagatcctgggtcttcttagcctaagttccttggatgcttctgtcagagaaatgcgaaccagagtgactccatctcgaataggggctgggtaaaataaggctgagaccttctgggctgcattcccaggtggatagacattcttaatcacgggatgagagaggaggtcggcacaagctasaggtcaaaagaccttgctgataaaacaggttgcagtaaagaagccagccaaaacccaccaaaaccaagatggtgacaaaagtggcctctggtcatcctcactgcccattatatgctaattaaatgcattagcatgataagagacactcccaccagtgccatgacaatttacaaatgccatggcaacatc

SEQ ID NO: 589564 - DNA, 561 bp, Homo sapiens
ctcactatattgtccaggctggtctcaaactyctggcctcaagcaatctttctgccttggcctcttcatgtgttgggattacaggcatgagccaccatgccctgtccttataaaccacatcttatgccaaggctggcatatggggtggtcctgtaactgttgcgtttatgtaaacacctgctctgagggtatctgcagaatctcaagcctttcactgtagcctccccagtagattgtagtggtcacacatggcagtttgagaatgacatgctttaattctgcagccaaaaaccatgcagctttgtgatggccaggcccagtgtgggaaagggaaatggatggtgagattcagggtgcatttcagtggtgtaatggaagaggagagtctcacagcccctcactccagggccacaaatggacacacacttaatcgtgtgtgctaaacttttttcacctttgcaaaatcacacctgaatacattttgctatatttttcttcattgaatactttctaaatgaccaacgtgatatgactcacatttttcacaccaagatattggtt

SEQ ID NO: 589565 - DNA, 561 bp, Homo sapiens
ctcactatattgtccaggctggtctcaaactcctggcctcaagcaatctttctgccttggcctcttcatgtgttgggattacaggcatgagccaccatgccctgtccttataaaccacatcttatgccaaggctggcrtatggggtggtcctgtaactgttgcgtttatgtaaacacctgctctgagggtatctgcagaatctcaagcctttcactgtagcctccccagtagattgtagtggtcacacatggcagtttgagaatgacatgctttaattctgcagccaaaaaccatgcagctttgtgatggccaggcccagtgtgggaaagggaaatggatggtgagattcagggtgcatttcagtggtgtaatggaagaggagagtctcacagcccctcactccagggccacaaatggacacacacttaatcgtgtgtgctaaacttttttcacctttgcaaaatcacacctgaatacattttgctatatttttcttcattgaatactttctaaatgaccaacgtgatatgactcacatttttcacaccaagatattggtt

SEQ ID NO: 589566 - DNA, 561 bp, Homo sapiens
ctcactatattgtccaggctggtctcaaactcctggcctcaagcaatctttctgccttggcctcttcatgtgttgggattacaggcatgagccaccatgccctgtccttataaaccacatcttatgccaaggctggcatatggggtggtcctgtaactgttgcgtttatgtaaacacctgctctgagggtatctgcagaatctcaagcctttcactgtagcctccccagtagattgtagtggtcacacatggcagtttgagaatgacatgctttaattctgcagccaaaaaccatgcagctttgtgayggccaggcccagtgtgggaaagggaaatggatggtgagattcagggtgcatttcagtggtgtaatggaagaggagagtctcacagcccctcactccagggccacaaatggacacacacttaatcgtgtgtgctaaacttttttcacctttgcaaaatcacacctgaatacattttgctatatttttcttcattgaatactttctaaatgaccaacgtgatatgactcacatttttcacaccaagatattggtt

SEQ ID NO: 589567 - DNA, 543 bp, Homo sapiens
tggacaattcatgcatcaaaagccaactgcagagccactatttgcaagtcaagtctcaagatggtatactatctccaggaaaaggcttggaaggtaagcactactgttgaccccaatatctcaatttccacggagaaaccatatttgttaagatgcagagagatctctctaaagtgctattgccgagattaaatttgagccatctgaaggcttcgtcattatcttagatcttagccttacttgtgccttattctrttctttaactatcacttatgctgcaaactgtgatcctattgtgattttacccttactaggtggttttcctggtaagataagtatttgattctgctcaaatttctcctcttgccttcctaactggtctcaatctttctttctgcttagtatcattctgtctcagcacccgtttatctggctgtgctttggccagtttcattgtttatgattatttggttttggtgcctgcctatatgatcagttcaagtcctagccgtgctggaaaatttctggccccattacagacca

SEQ ID NO: 589568 - DNA, 543 bp, Homo sapiens
tggacaattcatgcatcaaaagccaactgcagagccactatttgcaagtcaagtctcaagatggtatactatctccaggaaaaggcttggaaggtaagcactactgttgaccccaatatctcaatttccacggagaaaccatatttgttaagatgcagagagatctctctaaagtgctattgccgagattaaatttgagccatctgaaggcttcgtcattatcttagatcttagccttacttgtgccttattctattctttaactatcacttatgctgcaaactgtgatcctattgtgattttacccttactaggtggttttcctggtaagataagtatttgattctgctcaaatttctcctcttgccttcctaactggtctcaatctttctttctgcttagtatcattctgtctcagcacccgtttatctggctgygctttggccagtttcattgtttatgattatttggttttggtgcctgcctatatgatcagttcaagtcctagccgtgctggaaaatttctggccccattacagacca

SEQ ID NO: 589569 - DNA, 530 bp, Homo sapiens
attaatcagggttcttcagataagtagaaccaatagggtagatacgcagtgagagaagtagtgaaaggtggagaaagagagtgaagagtgagagactgagagagagagagactgttttaaaaaatggcttaagggtttgttaggatgaacaaatctaaaatttgcagagcaagccaggtacattggctcacatctgtaattctagcactttgggaagctgaggcaggaggattgcttgagcccaggagctcagggccagtctaggcaacacagcaagacctcatctcatatttatttttttttaattagctgggcatggtggtgtgtgtctgtggtcccagctacttgggagtctgaggaaggaggatcacttgagcccaggaggttgaggctgcagtgagctctgatcacaaacactgcattccagcctgggtgacagagtgagatcctgtctcacacacacagaaaaaataattaattaattaatttaaaaaactaaaaarcataaacaattaaaaaataaagaataa

SEQ ID NO: 589570 - DNA, 457 bp, Homo sapiens
tgcagaactctgcgtcaattaaacctctttcctttgtaaattacccagtctcaggcatttctttatggcagtgtgaaaatgggctattatagtcagtgagggtcaagcatgttttatctcaaccaacaacagattcttgggtaggatggcagtaatgcagtttgataccaaaaggtgatggataggatgatgatgataataaataatatgtaataagaacaaattttagaaggatatgtttcaaagagtacagaagtttgttagacctgactggtattggatagacataacattgtttaagttcgacagaaggagaagatccaccctgtgtggggaacaatgagaacaggtctgaggtayagtgaatgagattgttgatttatgggaacggtgaagttttggaaaatacacagaatgagatgtggcatacttgaaagattctattccagggaaaaca

SEQ ID NO: 589571 - DNA, 457 bp, Homo sapiens
tgcagaactctgcgtcaattaaacctctttcctttgtaaattacccagtctcaggcatttctttatggcagtgtgaaaatgggctattatagtcagtgagggtcaagcatgttttatctcaaccaacaacagattcttgggtaggatggcagtaatgcagtttgataccaaaaggtgatggataggatgatgatgataataaataatatgtaataagaacaaattttagaaggatatgtttcaaagagtacagaagtttgttagacctgactggtattggatagacataacattgtttaagttcgacagaaggagaagatccaccctgtgtggggaacaatgagaacaggtctgaggtacrgtgaatgagattgttgatttatgggaacggtgaagttttggaaaatacacagaatgagatgtggcatacttgaaagattctattccagggaaaaca

SEQ ID NO: 589572 - DNA, 625 bp, Homo sapiens
gtgtttgtgacccagcttgccccgaatgcacaccctttggatatcatccctccattcttggcccaatattgtcccttcactccttgtagatctgaatttaaaagtagaacaagcaggcacttgcatctgcctaaatagtcatgtgaactacattttgaacactagtgttctgaatcttcatttctgcaagatatctttaaagtgggatttggaattttattagaattacatcagaattattgataataaggcaaataagctgctttcyaagggaaacgggaaatctgtatactgtatagtgataaaaatgatgccattaaacatcgtaagttaagctctataaattacccatactccagatagaaaagcaaaccaaacagaattaacccagaaaagggatttcaaattatatagttaacatttgttttccttttttctaccctgggacttattgttatctattagtcaccttccttagaaaacatcaagtctgtggataaatacacttaatagtgttagcaggaatgctattcatgacagacctcaacatgttgactcgtactttatttaagctattatgagcttggcgaaaatctgaaagaaagacgatacaatttattttagg

SEQ ID NO: 589573 - DNA, 426 bp, Homo sapiens
gaattcagtctgtgtattttttttattagtgttattttccctttctcgtaatgtaacaatttttataaatgtttcatgggctatgaaagaagggcatttttcattttcatgccactgctttagcaatgtatagatacaatcaatattatggattgtgatttaggtgggtgttctatatatttacagtcaattaaaaaccattgaagagcttttcattgatttcattaatttctattatcttaataattctatattcaggcagggctactttagctatttgtgtgtatgtgtgtttccgtgtgtgtaaatgtataaatacatrtacatgtgtgtgtgtgcatatacatataaaatcaaaggcatacctagacctaaacaaaatattctgttctcatgatgtaattaatctcataagcaagataccat

SEQ ID NO: 589574 - DNA, 636 bp, Homo sapiens
taaatgtgagaatggagaagtaatttaatatgagaagaaatgtaaatatttatacatgcatgtattcgcagaaagaggaaagagcccccaaaggaaaagaaatgtaacagaatattaatgataggccccattaataggtaaggataattctccagttcaaagggaaatcagcagagatgccagcagaagtagtgggtggcttctgagaaacagtgctcttattcatttaacaagtgactrctgagcacctactctgcaccagacattattctaagggccaggatacaatgatggacaagacagaacttagtctagtggaggtcataaactgttgaacagccaatggcaatacagtgtgatggaagccacattaggggaggagcaaggtagccgtcgaagctcagaggagagatgctggatgctgaaccgagacttgggagatgggaatcttggtaatggtcattaccatgattagagtagagaaatactgtagaagaaaactggaagaaattagtaaagtacttctctggggctcatttctaattatatctctgaggtgggaagcattagtctcagtttgggtttttaatagaaaatgtgtgtgtgatgaggccatacaacagaggggagtgatct

SEQ ID NO: 589575 - DNA, 593 bp, Homo sapiens
cctttgtgagacgaaaaaaaaatactgagtttttttttctattctttcactccacagtagccatcaagttcgtgaccaaatgagtggggttttttccccacatgccaagtagcagacactagctctaggtgtcctgtaattcaattgaaatctgacastatctgcctggaggttgctttagcttccatacgttgggggctctgtgcccaaactgccccctccttcagataccagtcgcaagtccaggctctggaacttctggctgatccactccaagttgaagttcccctggccctgtttttaggtatgcttaatttgcaggagctgttcacagaactcagggaaactcatttaccagttcattataaagaaggattttttttttttttttttttgacagagtctcactctgttaccccagctggagtgcagtggtgcgatctcggctcactgcaacctctgcctcctgggttcaggcgatccttgtgcctcagcctccctggtagctgggatgacagacacgaccactgtgcctggctaatttttgtatttttagtagagacagggttttgttatgttggccaggctggtct

SEQ ID NO: 589576 - DNA, 418 bp, Homo sapiens
atcacgaactctgagccacatagtttgttagagtcgcaaccccaatgcctgcaggggcaggcagtaagcaggtggagtgaacttgttggcatctggtgagtgccagccccatttatagcaggaggccatggagctctgggtgccattggtgccagaaattgggagtttatggaacatctcctgacttttacatgttgacaactaattcaaaattttttaaaaacagcacatctgcaagccatattcaacctaaaagccactagttggaaacctctgctctaagtggagagctaggtggaattttgtctttgagaccaaggcattttccctaggtggagtttagcctggctcccacagccatgatgttactccaagcagtattagtttgctattkctgggtccagagtttgagctcctt

SEQ ID NO: 589577 - DNA, 402 bp, Homo sapiens
ggccagccagttatatcactgcattatatcactgccatttatgcaatgaatgtcttatgcacactcatttgaataccacttttatcacatatatagatcaatrttgtctggtatatttattgttttacttgtttttattacattgtttttatattgttttaatatctgataatgcatggtaatcgctgatatgtattgtatgatttttgtgtgcctgggaggtgttgagtactttacaagtattatctcatttaatttttgtaactttgagataagcattttcatcctcatttctgaaattaaaagtgaagaaatggctgggcgcagtggctcacgcctgtaatcccagcactttgggaggcagaggcgagcggatcaggaggtcaggagatccagaccatc

SEQ ID NO: 589578 - DNA, 559 bp, Homo sapiens
gaattcaagaatcactaaaaagaatcacgtaccacaataaactggaatttatgggggaactctttgtactatattttctaactccttatgaatctgtaataatttcaaaataaaaaactgaaatatacatattacttaagaaagattattttcaaaacatacataacatttgggaatggacaagactggaagatcagagactcattgcacaattgatgagagagaatataaattgtagttgagcctgaacaacacaggtttraactacgcaagtccacagatacatgaatttttttcaataaaagttacatatagtgtgcatgcctctcctgcctccccttccaccttctcctcctcttccgcctctgccacccgagccagcaaaaccaaactctccttttcctcctactcctcagtcagctcagatgtgaagatgacaaagataaaaacctttacgatgatccactttcacttaatgaatattgaatacaaatatcttccttttgattttcttaataacatttttttctctagcttactttattctaagaaaaaaaaa

SEQ ID NO: 589579 - DNA, 668 bp, Homo sapiens
tgtgacagtcaataaactttgcttttataaatggcacaacagataggcagaaatttctatcatgtttttttaataactttgtgtagactagctatcaaattattgattaaatcctcaatttagaatgtgagagaaattatatyaccctctacaattaactctttttctatcttaaaattggatattttaatgaaaataaaaagaaagggagcacatttaaatttataaaaattacaaatggttaaatagatgaggcaagaatgtacataggtatataatttttctgttgctttacctgggaaaaatataaaagtatatcactattgaaatcctcggagggaaaaaaccttaaaatccgagtagacagaataattttgacatttttttaagaaaaaaaaattgatttttcagagacttcaaggcatcctctgtatcaattgcaatcaacagggactgaaaaaaaaatctggggtaataaaagcagttagagaactgccctttgggcactccttcccctggagagcataattgcctttgacagagataactaatattccacatatttcccctaatcaggatgcctaaaatcattttagtcttgagaagagaaaacctgttgcattgatttcatttttaaatgtgtgtatttcttttaggactcacacagc

SEQ ID NO: 589580 - DNA, 464 bp, Homo sapiens
gtgttaagaggtaaggccctagggaagatattaagccatgaggattccactctcatgaatgggattagtggccttatgaagagacttattctcttgccccattttgctatgtgaggaggcagaaagaagaccttaactatgaaagatgatagttctagaaaaccaaacacctcatattctcactcataagtaggagttgaacattgagaacacatggacacagagaggggagcaacatacaccagggccagttcgggggtagagggtgaggggagggaacttggraggatgggtcaataggtgcggcaaaccaccaaggcacaggtataactatgtaacaaacctgcacgttctgcacatggatcccaccccaccccacttttttttataagaaattcaaaaaagacatcaattgcaaaatgagagagagagaaaaaagaaagataagtgttccttaaatgtca

SEQ ID NO: 589581 - DNA, 609 bp, Homo sapiens
atttctttatctctacttaacatacccagtctttcctgtagcttcttgaacttatggaatacagttacaagaattattctaatagccttgtctactacttctatcatctgtatcattttcaacagatttttagtcctaagtatgaatcaaattttcttgcttttttgattggctgtcaatttttgattgaacacaagataatgtgattcacgcttttgtgtgctagatatttttgtgggcctgtaattatttttgagctttgttttgtgaagcagttatttagaaatggggtgaatctttctggtctttatgttargctttgtttgatagagccagaacagcatttcaggctagatctaatttttccacattaatgatgcaaagcacttctgataagcttactttatgatgtgtgaatcactctggctgatgggaagaggcactatgtccagtctgctttgagctctgtaaattttcccctctaatccttacaggttgctttttacctagccttgtatagttttcttataagcatgtgctcattagtgttctcatgtgaataatagaagaaaatgttctgcagatctccaaagttctttttggttcctt

SEQ ID NO: 589582 - DNA, 621 bp, Homo sapiens
gggtaatttataaagaaaaaggttgaattggctcacagttctgcaggctgtacaggaagaatggctgaggaggcctcaggaaacttacaatcgtggtggaagccaaaaagaaaggaggcacgtcttacatggccagagcaggaggaagagagagtgaaggggcaagttctacacactttcaaacaatcagatctcatgagaactcacttattatcatgagaacagcaagagaaaaacctrcccccaagtccaatcacctccctccaggtttctaccccaacattggggattacaattcaacatgagatttgggtgggaacacagagccaaatcatatcaaggtcataaaaagataccttaaaaacagaacaaagtggatctgtgtcaggggaatcttcacgaattggattagatttgatttgtgaaatgatatcttctctctttttatttatttatttatttttgaggcggagtctcaactgttgccaggttggagtgcagtggcactatcctctgcctcctgggttcaagcgattctcctgcctcaacctcccgagtagctgggactacaggcacacaccaccacgcccagctaatttttttgtgtttttagtagagatg

SEQ ID NO: 589583 - DNA, 572 bp, Homo sapiens
gggtttaattttcacagactggctcttgctgtcttaaaaatgctggctttcatgcaaggtttgttgcactgctgttatttttagtcatgtctctctggtgttgcttagccygaaacttttctaaaaactgtgataatcaaatgaatgaactttctaaaaatctagaaactgtagagttctaataagtcagtctagagacatttgaaatataaaatcatcataagaagcttacattgattcgtatcttgctttacaattttaaaagtcctttaacacattttatgtcatttgattcttgagttaaagctgagaaatgaacaaggtatttctcattacctcaaagaaaaaagtcacatcagtgactttttcagtcctaaaatatacacaagatttgtttggctaaaatttattccaaatcccacttttttttttttggccatgctaccttaatgctaattctttttaccgctatacctaaaattaaaccatttttatggactcttaagttcaaaataattataaaaatataattaatttaggaataaccacttttgccatttatttagtttttg

SEQ ID NO: 589584 - DNA, 586 bp, Homo sapiens
ggaataaccacttttgccatttatttagtttttgacaagttcttttaagtgttcatctacattaktttattttataaatacaacatccctttgaagtcataattttaatgagaaaattggaatttgaagaaactaaatgtattagctaaataaatagtaaattgtagagtttgaattagaacattagcttctataattccagtcagagctaccaactactcaatgaagtggtcatagcatttaggttcattaaggtcaaaattatagatttcctgaataaaatattatttataacgtattatgagtatagttgtatatatgcaggaggcaacatgggtattattaattattaataaaagtaataagttattacttattaaacacgacccacaaataaagtatggctatctatctaatttttaaaatacttttttctccatttttcccaggaaaatttacagaataaaaaaactttttatttaacataaattttaaaaaatttacaagaagtaggagcaaactcaatagaaagctaaattaatcttaaataaacatattctcttaggcttgatactgtgttttacaa

SEQ ID NO: 589585 - DNA, 586 bp, Homo sapiens
ggaataaccacttttgccatttatttagtttttgacaagttcttttaagtgttcatctacattagtttattttataaatacaacatccctttgaagtcataattttaatgagaaaattggaatttgaagaaactaaatgtattagctaaataaatagtaaattgtagagtttgaattagaacattagcttctataattccagtcagagctaccaactactcaatgaagtggtcatagcatttaggttcattaaggtcaaaattatagatttcctgaataaaatattatttataacgtattatgwgtatagttgtatatatgcaggaggcaacatgggtattattaattattaataaaagtaataagttattacttattaaacacgacccacaaataaagtatggctatctatctaatttttaaaatacttttttctccatttttcccaggaaaatttacagaataaaaaaactttttatttaacataaattttaaaaaatttacaagaagtaggagcaaactcaatagaaagctaaattaatcttaaataaacatattctcttaggcttgatactgtgttttacaa

SEQ ID NO: 589586 - DNA, 586 bp, Homo sapiens
ggaataaccacttttgccatttatttagtttttgacaagttcttttaagtgttcatctacattagtttattttataaatacaacatccctttgaagtcataattttaatgagaaaattggaatttgaagaaactaaatgtattagctaaataaatagtaaattgtagagtttgaattagaacattagcttctataattccagtcagagctaccaactactcaatgaagtggtcatagcatttaggttcattaaggtcaaaattatagatttcctgaataaaatattatttataacgtattatgagtatagttgtatatatgcaggaggcaacatgggtattattaattattaataaaagtaataarttattacttattaaacacgacccacaaataaagtatggctatctatctaatttttaaaatacttttttctccatttttcccaggaaaatttacagaataaaaaaactttttatttaacataaattttaaaaaatttacaagaagtaggagcaaactcaatagaaagctaaattaatcttaaataaacatattctcttaggcttgatactgtgttttacaa

SEQ ID NO: 589587 - DNA, 586 bp, Homo sapiens
ggaataaccacttttgccatttatttagtttttgacaagttcttttaagtgttcatctacattagtttattttataaatacaacatccctttgaagtcataattttaatgagaaaattggaatttgaagaaactaaatgtattagctaaataaatagtaaattgtagagtttgaattagaacattagcttctataattccagtcagagctaccaactactcaatgaagtggtcatagcatttaggttcattaaggtcaaaattatagatttcctgaataaaatattatttataacgtattatgagtatagttgtatatatgcaggaggcaacatgggtattattaattattaataaaagtaataagttattacttattaaacacgacccacaaataaagtatggctatctatctaatttttaaaatacttttttctccatttttcccaggaaaatttacagaataaaaaaactttttatttaacataaattttaaaaaatttayaagaagtaggagcaaactcaatagaaagctaaattaatcttaaataaacatattctcttaggcttgatactgtgttttacaa

SEQ ID NO: 589588 - DNA, 547 bp, Homo sapiens
ggcaaaggggttgaagaagtctttcttttcaaacaaagtagagtgaatcacttctgcaaacccagaggattcaggaaaatctttacttttaagtttctcaagtgactgtccccagacgtatctattctaatctcatttcacttcttccctctgatgatcctgattttggcatggaagacttgacyagtctaagaaattcaaacttttccaaatttctttcaattttacattaaggaatattatttttttagctttatatgttttaatagagagtctgaatctaggtttggaagtttgaatactgacatcttttacgcctaagccttttatgccccacatctgagattgctggtaagaaagcttgggtgctccctcagattgtacagatgggaagtttaaattacatgctgtcactctaagcctggcctcacccctaattaccataaaaatcctaagcgcagtctttttgtttgtttgtttttactctctcaagatattttagacttgctggagaaactctcgcttcagaaagccctattgtgtgagt

SEQ ID NO: 589589 - DNA, 507 bp, Homo sapiens
ataattttaaaatatcactgcatttggtatcacatagtaatttaacttttaaaattttattaatttagctattaacatgtatgaggtatggatttatcttttaaatggctccagacccctttatttttcagttaacgtatggcttattttcaggtaacaacacaaaacttaatgttgccaatgaaatgaaaaatataaaagaacattaaaccatgaataaatttgtacatgttgctttggaatcttagaatgattacttcctttctcacttcaaaatgatctctaatttttactaatgtattgagtaggagaaatattaattctgcttaattctttcttgattactactcatatatatgagtgatatatatacacacacacaccatatatatgtatatataattacacatgtatacacatataattacwactcatatatgtgactggtgtgtgtatatatatatacacacactatatatatgtgtatatatatgagtagtatatatt

SEQ ID NO: 589590 - DNA, 613 bp, Homo sapiens
gtaataatccttaggtgatccatctgtaaatgacactaccagaattggaaatttamaagcaatctatttgccattactgactagttattattcttctctaaagataaatgtgctgatttaagtatgaggagaactctaacctccttggcttaataaatactttggttgtcagaaaatccctgcctcattagcagagtaaaattttactgtgccaagaattccctaggtctctctggctgaatagaacactctaacttcagacttttttcttcgataaaacaaaacaaaacaaaacaaaaaaagaaactgctgtgactgtacaaaggcttgcaagccttgatgtctctcttggatacctagacttcatggtaatagttctctggaaataacaagacaaaagtgatagtgggtcagagcctctaagacagaagtgggtggtgtcctggaatgagaaactagtaccctatggattcccttgttccatggggactacttgaatgtctggtaaagatacattaagactactttggcctagatttgctttactagagacttctttttttttctccatctcccctctctttctccctcttttctctcatacacacatgca

SEQ ID NO: 589591 - DNA, 445 bp, Homo sapiens
ggcagctctctacagaagtcatacttgtaacaaattccttaactcctgtattctaaccaggggaaattgagtgaaattgtattgtcaaattgagaatcctaccagattattacaaataatccttgcatatttgtaaataataaatgaatataaagatgttgacttataatcattgaatttggtttctcattgacaagtacttagaaaacaatactttgggaatcatacattaaatttataaacctttatctaatatgataatccatcctaactatgttacaaraaaaggaatttgaaagtgcttttaaatgtaaaggtctacagaaataacattggtataaaatgcaatattttcaataaccctacaattattatgcaacctgtagttatttatatgagatcacaattgaactggaattacagaaaaagaaaggaattacagaat

SEQ ID NO: 589592 - DNA, 633 bp, Homo sapiens
tatttgctacaacatccagccagtgattgcttgatactcataaaagtccagcgcctcagaacagtgaggtgggaaacagtactgatrattaaagagagcgacaaacccagtaattaactagggccataagcaataaaccaggtagactaggcctgtagcagaatttacgccaggaatactggactacaggtcagaattaataaaggtgaattaagtaaatagatctcaactggggggctgatgttcctaaaacatattctacatgaacttattaaggatagtttacattctgccacagggttgcagttgcatttcaaatttttcacttataggactagagaaagcagctatgtatttttcttcattaaatggaaaataaactgacctccagctgaatggggcccttgataagctataatgttggtatttacagtagatgatagacagataaatatacagagatagagttatgcctatgggtgaaattctactctataaatagaagagctgcaatcaccatgatagcttctccagcactggaagtatctgtactagttaattaactggttttcgttatttttatccccaactgttatatgataaattgttaaaaatcaaaatcttaattatatg

SEQ ID NO: 589593 - DNA, 633 bp, Homo sapiens
tatttgctacaacatccagccagtgattgcttgatactcataaaagtccagcgcctcagaacagtgaggtgggaaacagtactgataattaaagagagckacaaacccagtaattaactagggccataagcaataaaccaggtagactaggcctgtagcagaatttacgccaggaatactggactacaggtcagaattaataaaggtgaattaagtaaatagatctcaactggggggctgatgttcctaaaacatattctacatgaacttattaaggatagtttacattctgccacagggttgcagttgcatttcaaatttttcacttataggactagagaaagcagctatgtatttttcttcattaaatggaaaataaactgacctccagctgaatggggcccttgataagctataatgttggtatttacagtagatgatagacagataaatatacagagatagagttatgcctatgggtgaaattctactctataaatagaagagctgcaatcaccatgatagcttctccagcactggaagtatctgtactagttaattaactggttttcgttatttttatccccaactgttatatgataaattgttaaaaatcaaaatcttaattatatg

SEQ ID NO: 589594 - DNA, 619 bp, Homo sapiens
aatagtctttcattataagtttaawctttaattcaatgagtacccccattcccctgcaagggatgtgaattaagatttaaacagcagcctatttcaacattcattgcaatgtagtcactcaagagatcaaacacatacaacttcatactttttgggttttttttttttttttgagacagggtctcactctgccacccaggctggagtgcagtggcacaacctcagctcactgcaacctctgcctcccggattcaaaggattctccagctttggcctcccgagtagctgggactacaggcacccaccaccatgcctggctaatttttgtatttttagtagagacggggtttcaccatgttggccaggctggtctcgaactcctgacttcaggtgatctgcccaccttggcctcccaaagtgctgggattacaggggtgagccaccatacccggccaacttcatactcttttaagtgaaggaaatagactaggctatacccttgagaaaaatgtataggagattgaagatttaagtaaaaacaaacaaaaaacgtgttgagagaaaataataaaatactgcaaaaagaaaaattaggaaaatgtggacatctgtcattcaa

SEQ ID NO: 589595 - DNA, 619 bp, Homo sapiens
aatagtctttcattataagtttaatctttaattcaatgagtacccccattcccctgcaagggatgtgaattaagatttaaacagcagcctatttcaacattcattgcaatgtagtcactcaagagatcaaacacatacaacttcatactttttgggtttkttttttttttttgagacagggtctcactctgccacccaggctggagtgcagtggcacaacctcagctcactgcaacctctgcctcccggattcaaaggattctccagctttggcctcccgagtagctgggactacaggcacccaccaccatgcctggctaatttttgtatttttagtagagacggggtttcaccatgttggccaggctggtctcgaactcctgacttcaggtgatctgcccaccttggcctcccaaagtgctgggattacaggggtgagccaccatacccggccaacttcatactcttttaagtgaaggaaatagactaggctatacccttgagaaaaatgtataggagattgaagatttaagtaaaaacaaacaaaaaacgtgttgagagaaaataataaaatactgcaaaaagaaaaattaggaaaatgtggacatctgtcattcaa

SEQ ID NO: 589596 - DNA, 619 bp, Homo sapiens
aatagtctttcattataagtttaatctttaattcaatgagtacccccattcccctgcaagggatgtgaattaagatttaaacagcagcctatttcaacattcattgcaatgtagtcactcaagagatcaaacacatacaacttcatactttttgggttttttttttttttttgagacagggtctcactctgccacccaggctggagtgcagtggcacaacctcagctcactgcaacctctgcctcccggattcaaaggattctccagctttggcctcccgagtagctgggactacaggcacccaccaccatgcctggctaatttttgtatttttagtagagacggggtttcaccatgttggccaggctggtctcgaamtcctgacttcaggtgatctgcccaccttggcctcccaaagtgctgggattacaggggtgagccaccatacccggccaacttcatactcttttaagtgaaggaaatagactaggctatacccttgagaaaaatgtataggagattgaagatttaagtaaaaacaaacaaaaaacgtgttgagagaaaataataaaatactgcaaaaagaaaaattaggaaaatgtggacatctgtcattcaa

SEQ ID NO: 589597 - DNA, 480 bp, Homo sapiens
acagtggcacaacctcggatcactgcagccaactcctcctcctggattcaagcaattctcctgcaaatcattatattctataatgatttgttacagtaaagattctacaatgagcacaacacttgggattagggctaataataggttacatttacagtcagccattgtcgtatgtcacatctgtttggtttttgcaaagaccaacaaataaattgagcaaggacacaataggaaccttctgagaaactacgtagaatgtgytttaggacaatccactcaagtcaagacgaggttaatatctacattaacattgatgtggattggtcaatggttacagagagagtgttaatggtctcatacttcaaggtttgtacattcatcagaatgggtgaatgtgctctcacaaaatcctaaatagcagtggcagagaggacctagggtaggtatgcgatacaactgaggtgcaacagatgcttacaa

SEQ ID NO: 589598 - DNA, 548 bp, Homo sapiens
caagaatgtcttttttaaaaaggaaaacaagccttttgtttaactaaacactaatttctaatatgaagctaagtgaatttaagaaaatatactatcataggaaagaaaagataaatatgaaagtctgttcactcagagttttagctgaggacccaaaactcataaaaataagtatttctacattctaaagagagccaccaaacctgtagcagtaagacttastaaaatgtaacaggacagttcccttgtttgggctcccctagaaaagagagtctgaggaaagtatttgtattcagctagttcatgtagcagtctgtcccagaaaacaagagtgaagaaacaggaaaattaagacagggaaggtgcaaagccaactcatggggcattagtgaggctgctccacaggcaacaggggttcccttctgcaggaacctctgaggaacacagaatgccccacaggatggcgtacccagaaaagaggagtctggggcatttgtctacaggtttgtccactggttgagggttgcttggaatattaactgcactgc

SEQ ID NO: 589599 - DNA, 544 bp, Homo sapiens
agtatggcagatgactagttgtccccacaaaattattttcccttcttgttggacatgtgactgtcaagcttcarattatatttcccagcctcctcccatgaaaagaaaccacatgactaagttatcatcattgcaatgtaacagaagtaatgggtgcaacttctgcctcacttgctaaaatgaagttgcttgtcctggattcacctctttcctcttctctctctgaaaaacagacatgtccatgacagctttttggtcatgcaaaccaggttaacaccttaggggttggtggaagaatgagatggaaagaactcgggtccctaaatgatcttttcaggcaaagctggactatcaagtgagagagtaataaatccctatttaagcaaatgttcatcattttttttattattgctccatgaaaaagaaaataaataaacttaaggttaatcctattaattttttattttaatttgattatgtttctaacaagagagattaaatccaaagaaattagaccttattggatgttagaaggccacaaacc

SEQ ID NO: 589600 - DNA, 437 bp, Homo sapiens
aattatgattttgcaactactaaaagaatttagaatcctttacaacaggggttgttctgtttttctagccagagattgtcactccatatttactaatgagcttttctagaaataacagaaaatgattagcatctctactttttttatctactgaagacaaacatctcagggtgayagcaggattatgggcggcatcacttaacaataacagtttttcaaagttatttatttatttatttatttatttatttatttttgagacggagtttcgctcttgttgcccaggctggagtgcaatggcactatctcggctcaccgaaacctctgcctcccaggttcaagcaattctcctgcctcagcctcccaagtagctgggattacaggcatgcatcaccaagcccagccaattttttgtatttttagtagagatggggttt

SEQ ID NO: 589601 - DNA, 437 bp, Homo sapiens
aattatgattttgcaactactaaaagaatttagaatcctttacaacaggggttgttctgtttttctagccagagattgtcactccatatttactaatgagcttttctagaaataacagaaaatgattagcatctctactttttttatctactgaagacaaacatctcagggtgatagcaggattatgggcggcatcayttaacaataacagtttttcaaagttatttatttatttatttatttatttatttatttttgagacggagtttcgctcttgttgcccaggctggagtgcaatggcactatctcggctcaccgaaacctctgcctcccaggttcaagcaattctcctgcctcagcctcccaagtagctgggattacaggcatgcatcaccaagcccagccaattttttgtatttttagtagagatggggttt

SEQ ID NO: 589602 - DNA, 590 bp, Homo sapiens
ttttagcttctttccgatgggttcgaacatcctcctttagcttggataagtttgttattactgatcttttgaagcctacttctgtcaactcgtcaaagtcattcaccatgcagcttggtttcattgctggtgaggagctgcattcctttggaggagaagaggtgctctgatttttagaatttttcagtttttctgctctggtttctccccatctttgtggttttatctacctttggtctttgatgatggtgacctatagatrgggttttggtgtggatgtcctttttgttgatgttgatgctattcctttctgtttgttagttttccttctgacagtcaggaccctcagctacaggtctgttggagtttgctggaggtccactccagaccctgtttgcctgggtatcaccagcggaggctgcagaacagcaaatattgcagaacagcaaatgttgctctctgatccttcctctggaagctttgtctcagaagggcacctggctgtatgaggtggcagttggcccatactgggaggtatctcccagttaggctacttggtggtcagggacccacttgaggaggcagtctgt

SEQ ID NO: 589603 - DNA, 571 bp, Homo sapiens
gaacttacagtatcaaattcccatataaatgcaaactataacatctgtgtaaaagtagatagtcagaatttaaatatttcttcatatatgctggcctttgcactgtctgcaattctctgttcccaggcacaaaatctattagaattgcatacaggaactattgcctcctctcttgtatgatttttgttgattttgataaggttcgtatgatttttccaaaccatacaatgatttggaagcttgggggagatctctcatgatattctttccctctccaccataagacttggcacgtggttgccattcagtaagtagtgaccaaagagtagaataaagagcttttccaaggaagcaagtttcaccaattcaatacattggaaagcaagaattgtatcttttgcttcaaatttttaaaaagttttaaataattttcaacacctactcaaactttggctatctcacaatactattatttcattgagcagtcattagatagtttttaagcatctactatattgcaagccycttgccagtttccccaagtacgaagatgagtggcatgtgatctctg

SEQ ID NO: 589604 - DNA, 535 bp, Homo sapiens
atggttacaggaaagcaaacagttccaggtgcaggggctttagatctatcacamggtgatagacgtggggctttgggtattatcaaccagatacatacatgggcgctctgggtgctattaactgggtgaattcctgggaactgtggatatagcttgccacagtaacttatcagtttaattgcattcttggatgtgctgggagtcagcttgcacaagttaagtccttgaggaaggaggatgggtaaggggctgcaagtgaaggagccaagatggagtttgtctggctcttttagctaagggagagtcaattcaggttaaaacaaggtagggtatcacaaaagaagagatccaaataatcctagttcatagagttagaactgatcttaaatcagctagtggaaaccttgctttgtgtaaaaggaggaagcagcaacagtaacagcagagagataagtgattgcctacacactgctcagtcagccaggatctgaatttaggtcttttgactaagccaatcctgaatatcaaattagaa

SEQ ID NO: 589605 - DNA, 535 bp, Homo sapiens
atggttacaggaaagcaaacagttccaggtgcaggggctttagatctatcacaaggtgatagacgtggggctttgggtattatcaaccagatacatacatgggcgctctgggtgctattaactgggtgaattcctgggaactgtggatatagcttgccacagtaacttatcagtttaattgcattcttggatgtgctgggagtcagcttgcacaagttaagtccttgaggaaggaggatgggtaaggggctgcaagtgaaggagccaagatggagtttgtctggctcttttagctaagggagagtcaattcaggttaaaacaaggtagggtatcacaaaagaagagatccaaataatcctagttcatagagttagaactgatcttaaatcagctagtggaaaccttgctttgtgtaaaaggaggaagcagcaacagtaacagcagagagrtaagtgattgcctacacactgctcagtcagccaggatctgaatttaggtcttttgactaagccaatcctgaatatcaaattagaa

SEQ ID NO: 589606 - DNA, 580 bp, Homo sapiens
gattccctcttgctgctctcctgatagtgagtgagttctcacgaaatctggttgtttaaaagtgtgtaacacttccccctttggtctcttcctcctgctccagtcatgtaggatgtgcttgcttcccctttgccttccaccatgattgtaagtttcttgaggcctcctcagccatgcttcctgcacagcctgtggaactgtgagacaattaaacctattttctttataaattacccagtctcaggtacttcattatagcaatgcgagaacgaactagtacaaacctattcacagagttttggagttatcaccacatgtgaacatgacwttagaacatatcaaaactcccaaaagaaaacctttctcctctagcagtcacttcctattcacacctaaaggcccgcctccaccctcgtcctaggcaagcactggtctactgtctgtcctgatggattttcctattctggacatttcatacaaatgggatcatttgacatgtggtcttttgtgagtagcttctttcacttggcataatattgtaatacttccatgttaaaatgataatccgtatttcattttt

SEQ ID NO: 589607 - DNA, 605 bp, Homo sapiens
caccacatgtgaacatgactttagaacatrtcaaaactcccaaaagaaaacctttctcctctagcagtcacttcctattcacacctaaaggcccgcctccaccctcgtcctaggcaagcactggtctactgtctgtcctgatggattttcctattctggacatttcatacaaatgggatcatttgacatgtggtcttttgtgagtagcttctttcacttggcataatattgtaatacttccatgttaaaatgataatccgtatttcatttttttattgccaaatagtattttattgtacaaacactccacattttgttaatctgttaatgagttgaaaaatcatataggctgttttcattttttggctattatgaatagtgctgttataaatattgtgtgaaagtttttgtgtgcactgcacatatattttaatttctcatgggtatatatttggaagtgaaattgttgggtcatatggtaaacctatgttcaatattttgaagaactgccaaactattttttcctagtttgtttttaaaacaatgtcacaatattatactaacaactaccatgaatcagggcgatgttcagctgattttcaaag

SEQ ID NO: 589608 - DNA, 605 bp, Homo sapiens
caccacatgtgaacatgactttagaacatatcaaaactcccaaaagaaaacctttctcctctagcagtcacttcctattcacacctaaaggcccgcctccaccctcgtcctaggcaagcactggtctactgtctgtcctgatggattttcctattctggacatttcatacaaatggratcatttgacatgtggtcttttgtgagtagcttctttcacttggcataatattgtaatacttccatgttaaaatgataatccgtatttcatttttttattgccaaatagtattttattgtacaaacactccacattttgttaatctgttaatgagttgaaaaatcatataggctgttttcattttttggctattatgaatagtgctgttataaatattgtgtgaaagtttttgtgtgcactgcacatatattttaatttctcatgggtatatatttggaagtgaaattgttgggtcatatggtaaacctatgttcaatattttgaagaactgccaaactattttttcctagtttgtttttaaaacaatgtcacaatattatactaacaactaccatgaatcagggcgatgttcagctgattttcaaag

SEQ ID NO: 589609 - DNA, 622 bp, Homo sapiens
atatataaagtttatatataaaaaagtatatatatactttatgtataaaaagtacatatactttataaaaagtatatattaaaaagtatatatatatgttttcatgatgaaagattgcaaatataaaataagacaaagaataggaaattttagtaagaatatatcaacagaaaatataattagcagcatgtcgagaacattaaattttgctgctgtmgaattttatgatagtagcagctgctctgccacttactacctaagcatcaatatcttaagacaacacagagccttattttttattattttttttctacctgaaaaaaaaccagacagggaattcagcaggtgctatttctggagaaaaatgactagcattatgaacatcttcagttatttgcctcgcttcatgtaacttcctctttcctccctccaagttctcattattcaaaaatcatttactactaaattatagaaacaatagtttctcctaaagcagaagtgaagtgaagctgggtatgagtcaataaaaaattacgaggctctcaaatcatcaaaaagatgccacctatgacatatgacctatgctggtcttggcacccgtttatgaagagactagaagggg

SEQ ID NO: 589610 - DNA, 602 bp, Homo sapiens
aaagtacatatactttataaaaagtatatattaaaaagtatatatatatgttttcatgatgaaagattgcaaatataaaataagacaaagaataggaaattttagtaagaatatatcaacagaaaatataattagcagcatgtcgagaacattaaattttgctgctgtcgaattttatgakagtagcagctgctctgccacttactacctaagcatcaatatcttaagacaacacagagccttattttttattattttttttctacctgaaaaaaaaccagacagggaattcagcaggtgctatttctggagaaaaatgactagcattatgaacatcttcagttatttgcctcgcttcatgtaacttcctctttcctccctccaagttctcattattcaaaaatcatttactactaaattatagaaacaatagtttctcctaaagcagaagtgaagtgaagctgggtatgagtcaataaaaaattacgaggctctcaaatcatcaaaaagatgccacctatgacatatgacctatgctggtcttggcacccgtttatgaagagactagaaggggtaatattttttcttctgtggaactgatg

SEQ ID NO: 589611 - DNA, 602 bp, Homo sapiens
aaagtacatatactttataaaaagtatatattaaaaagtatatatatatgttttcatgatgaaagattgcaaatataaaataagacaaagaataggaaattttagtaagaatatatcaacagaaaatataattagcagcatgtcgagaacattaaattttgctgctgtcgaattttatgatagtagcagctgctctgccacttactacctaagcatcaatatcttaagacaacacagagccttattttttattattttttttctacctgaaaaaaaaccagacagggaattcagcaggtgctatttctggagaaaaatgactagcattatgaacatcttcagttatttgcctcgcttcatgtaacttcctctttcctccctccaagttctcattattcaaaaatcatttactactaaattatagaaacaatagtttctcctaaagcagaagtgaagtgaagctgggtatgagtcaataaaaaattacgaggctctcaaatcatcaaaaagatgccacctatgacatatgacctatgctggtcttgrcacccgtttatgaagagactagaaggggtaatattttttcttctgtggaactgatg

SEQ ID NO: 589612 - DNA, 554 bp, Homo sapiens
tattgaaaaagctaataactgytataaataaattttcggtgccacaaagaaatagcactcgaacataaatttaattttctcaacaaggcaatttttacttctatagaagggtacaactcgtgaatggagaaatggtgaaagcgcacctgaacatgggaggggaaggggttcttatccctaaagcaggtagcccccactgctgtgtcgttcccctattggctagggttggaccacacagtctaagctaattccgactggctattttaaagagagcatgggtacaagtcagagtggcagggtgagtagtttggtgggaacaatagttacagaacaggtgactcaggataactgaagtcagagcaagtgaccaggggcgactcaggatggagcaggtgatagaggctaggagggggttgtttactgaaactagaagcaagagggtgaagagaaccaggaagttaaactttaaaatagagaacagagaataagagagctgaatatactgacatactgattctttgaagagaaacttggagttcactatatttaacata

SEQ ID NO: 589613 - DNA, 542 bp, Homo sapiens
aggctggtctcaaactcctgacctccagtgatccacccatgttggcttcccaaagtgctgggattacaggcatgagccatcacttctggcctcgagttgatttttttatacaatgtgatataatggtgcaatttcattcttccacatgcaaatatccagttttctcaacaacattagtggaagagactctcctttcccccacagtgtgttcttggcacctttgtcacaagtcaattgaccataaatgtgtggatttattcgtgaaatttttctgcagttccactgatctgtgtgtctgtttttatgccagagccatattgtttgtatgctatagctttctagtctactttgaatttaggtagtgtgacgcctccaactttgctctttttgctcaagattgctttcrctatttgaggtctttttggttccatatatatgtaggattctttttctgtttctataaaaagtgtagttggaattttgatgaggtgtgcatgaatctatagataactttgcatagtatggacatttaacagtattaa

SEQ ID NO: 589614 - DNA, 549 bp, Homo sapiens
cagtgagctacaagagaacatggataatttaataaaatcaagaagaaaatacaagaacaaaattagaagactgacaaagagacacaaagcataaaaaagtgccaaactgaaattttgcaggtgaagaatccaataactgaactaaaaaagcaatagagagctgcaatagcagattagatcaagcaaaagagaaaataagcaagttcaaagacagattatttgaaatcatcctgtcaaaggagaaaaagaaatgaaaagcaatgaagaatcttatgtaaatctatgggacaccatgggacaccatcaaaggarctaatattctaattataggacgttcaaaggagaagaggatgagaaaagaatagaagctgtatttcaaaataatgcctgaaaacttctcaaatcagaggaagatatgaatatctaggtatagaaagctcaaaagtctccagtcagattcaagccaaagaagacttcacttagacccattataattaagtggtcaaaaatcaaggacgagagaattttggaagcaacaagagaaaaaaa

SEQ ID NO: 589615 - DNA, 524 bp, Homo sapiens
gttccatgtaattaattcttatgtgcttgatttgtggttcacagtttcataaacctttctctttctaaatatctgatgagagttcacatgacaagaaaatttggttatttctgtgacatacaacaaaaattataaccacacaacaagatattgaaaaatttctatgaccttcatacaattttattacaattaatataatgcctacttatgtaatattcactcatacaaatataatccaggaaaagcaaaagcgtctcttcttttatttatttgcagaaaagcaacatctcctcttatttgacatgcctttccacaaaatttttaaaacaacttcattgaggtataattgatgtacaattaaaactgcacattttttcaactttcawtttagagtcagtgggtttatgtgtgacttttttacctgggtacattatgtgatgctgaggtttggagtacaaatggatgatcttgtcacccaggtactgagtgtcatacccaatagttagtttttcaacccttgcccc

SEQ ID NO: 589616 - DNA, 556 bp, Homo sapiens
gaaacaccattatctactaaaaatacaaaattagctgggtgtggtgacgcatgcctgtaatcccagctacttgggaatcttaggcaggagaatcgcttgaacctcagaggcagaggttgcagtgagccgagatcrtgccattgcactcctgcctgggcaacaagagcaaaactccatctcaaaaaaaagaaaaagaaaaaagaagaagaagcctgggactctaacccagctttagagagtatatcagaatctcaagaatcaaaatctgtccttaccagcttcagcagatatttgtccagagcaatggttctggagtctgtctcaccaatggatccccaacagtcagtcgggagtgaagacaaagtcttcaaagccttctcacttaggtgagaagcaggaagtcaagaagaggggtttttgacctctcttcaaaaagattcaagagcctaataatgaatctaatcttgagtcacagaatcataactgttatagaacaagattattcatttatttgttagagaaagaaaggaagaccttatccacggggactatagat

SEQ ID NO: 589617 - DNA, 568 bp, Homo sapiens
ccattcatgagggatctacccctatgatcgaaacacctctcaccaggcctcacctccaacattgtggtggctcacacctgtgatctcagcactttgggatttgggcaggcggatcacctgaggttaggagttcaagaccagcctgaccaacatggtgaaacaccattatctactaaaaatacaaaattagctgggtgtggtgacgcatgcctgtaatcccagctacttgggaatcttaggcaggagaatcgcttgaacctcagaggcagaggttgcagtgagccgagatcgtgccattgcactcctgyctgggcaacaagagcaaaactccatctcaaaaaaaagaaaaagaaaaaagaagaagaagcctgggactctaacccagctttagagagtatatcagaatctcaagaatcaaaatctgtccttaccagcttcagcagatatttgtccagagcaatggttctggagtctgtctcaccaatggatccccaacagtcagtcgggagtgaagacaaagtcttcaaagccttctcacttaggtgagaagcaggaagtcaagaagagg

SEQ ID NO: 589618 - DNA, 563 bp, Homo sapiens
  misc_feature 493: n = A,T,C or G
ggtctagttgagaagaaaattttgagtctgactagagtttcctcaaggagagaatctattaccttttgttcttgtctttgaaccattttccacattgccttgtttctcagtctccccsgaacctccttaaggagcctcaagaaaccaaactcctcatgctcgaggattctcattcccatcacttttcaaattctatccctgctttcacagaggaaacaaaaaggtgaagagagatgagcaaaggaaaaaattattggttattaaaaacaccaacttgtaatctatgtcctttttcaagagtgaagaaagtgttgggttgtctgagctaaaaaaccaaaactacaacccgatagacttcatgtcagtatatgaaattatcctgaaatcaattttaatgagaagctgtcagtctgtaaaatatctatatgcaattaaatggctgcttgttatttttttaatcagatgcacaaccattcctctactcccatattcntgaataataaagatgtttttcatctgctggaaagtttcacaagacaaggtaagtattaaatgtgtgtgag

SEQ ID NO: 589619 - DNA, 412 bp, Homo sapiens
aagcccatcccagcagactttcaaaacagcaatatttgcagttggaaatgtacaagaatgcagacaagtactcaagtatgtacatcttgtgcagtgtttgtggataaaaaatcataatgaaaatagaatgagatgagcgcattatagaacatatctgttttagttcttgttgtgtgatatatgcatttattatcataarccataagatgcaatgaacacatcaatcacataagcagctttcatatcacacacaaagtgctgctcatgctatacaataaaataaagctattaatttctttgcctcagtcaatgagccaaaaccaggaaaatgaattctcattgtaaacacttgctaatatcacccctctaatatttatcaagatatgtgaggatggcaagtctaaacatatga

SEQ ID NO: 589620 - DNA, 412 bp, Homo sapiens
aagcccatcccagcagactttcaaaacagcaatatttgcagttggaaatgtacaagaatgcagacaagtactcaagtatgtacatcttgtgcagtgtttgtggataaaaaatcataatgaaaatagaatgagatgagcgcattatagaacatatctgttttagttcttgttgtgtgatatatgcatttattatcataaaccataagatgcaatgaacacatcaatcacataagcagctttcatatcacacacaaagtgctgctcatgctatamaataaaataaagctattaatttctttgcctcagtcaatgagccaaaaccaggaaaatgaattctcattgtaaacacttgctaatatcacccctctaatatttatcaagatatgtgaggatggcaagtctaaacatatga

SEQ ID NO: 589621 - DNA, 576 bp, Homo sapiens
cttcactgagttttttctatctcataaattcttacatgagaagtttaactccaagagaaaaaaaaagcagccaaagtccagtactgctatttatgatgtatataaatctgagtcatttcagcatcacttgttcatgtaagttgaaaaacaagttctattgattcccacaagtctaacctagctctatttcccttaggatctaatgaaactcaggcattttcttgcattataatgactctatttcctcaatagcagtgcattcattgctatatcttagaagtctactaaagtttatggctctttcactaaaactgtgataaatttttggtaaagcataacaaaatagctaacaaattataattttaccttctgctcggcataattataattacttcccttaagaatacagagtagccttttgtcaattttctgtcattattttcaaaggaagagtttttaaaattattaatatgaaraggctaaaaatagcaacaacagcacttgaatattgagaaatacacataggtactcagatatctgtgcttaagtcacattttaagaaagtaagtatagaat

SEQ ID NO: 589622 - DNA, 578 bp, Homo sapiens
gaaagtttccctttttccatatcctcgccagcatttgttattgcctatcttttcgataaaagctattttagctggggtgagatgatatctcattgtagttttgatgtacatttctctgatgtccagtgatgttgaaygccttttcatatatctgtttgccaattgtaggtctttcttgagaaatgtctattcagaccttttgcccatttttaaattagattattaaattttttcctatagagttgtttgagctccttatatattctggttattaatcccttgtcagatgggtagtttggaaatattctttcccattctgtgggttgtatcttcactttgttgattgtttcctttcctgtgaagaagctttttaacttgatgcgatcccatttgtccattttttctttggttgcctgtgcttgtcaggtattactcaagaaatctttgcccacaccagtgtcctggggagttgtcccaatattttcttttagtaatttcatagttcgaggtcttatatttaggtctttcatccatttgatttgattttttatatgacaagagataggggtctagttcta

SEQ ID NO: 589623 - DNA, 576 bp, Homo sapiens
ttttattgttttcattatagagatctttcacttcttggattatttcctaggtattttattttatttgtacctattgtaaatggaaatacttttttatttctttttcagatcctttgctgttggcatatagaaatgctactgattttatatgttaattttgtattctgcaactttattgaacttatcagttctaatagttttttggtggagtctgtgggctttgccaaatataggaccatatcatctgcaaataaggataatttcacttattcctttccaatttatgtgcctttatttctttstcttgtctgatgctctagctagaacttccaatactattgaataacagtggtgaaactgggaatccttgtcatgttccagatcttaaaggaaaggctttcagtttttcctcatttagaatgatgcatagctgtgggtctgtcataaatagcttttattatgttatgttccttctatacccagtttcttgagggtttatatcatgcagggatgttgaattttatcaaatgctttatcatcatcaatagaaataatcgtatggtttgtgtcctttgt

SEQ ID NO: 589624 - DNA, 571 bp, Homo sapiens
actgctttcgctgtatcccataggttttgttatgtcatgtttccattatcatttgttttaataaatttttctgttttatcttaatctcctcattgacccacttgtcattcagggcatattttaaagttctatgtgtttgtatagtttccaaaattcctcttgttattgatttatagtttcatgtcattatggtcagagaaggtgcttgatataatttcaatttttttgaatgttttaagacttgttttgtgacctaatatattgtctatccttgaaaatgatccatgttttgagaagaatgtgtattctgcagccactggatagaatgttctataaatatctattaggtttacttggtctatagtgcagattaagtccaatgtttctttgttgatttactgtctggaatatctggctaatcctgaaagtagggygttgaagtttccagctattattgtattggggtctttttctttatctctaataacatttgctttatatgcctgactgctcccatgttggatgcatatatatttaaaatagctatatcctctgttttttagatcttgta

SEQ ID NO: 589625 - DNA, 582 bp, Homo sapiens
caataacccccaatttttgtacatctattcatatggcaccatactacacagacaaatcaagccgtagactatcccaggattcccacacttgtcaatgaatcatccttaacttgtaagtttacagggaaraatcaatgcatgtgtggccttatatgaacaaacttcattttctcagcctgaaatccttgcttggatagagctaactctcactacctgaaggcagctgaacacactaaggaaataaggactggcaagacctcaagtaactaaagcaccaccttgtaatgaaagtcacagagagccaaattccagcacataggacaagacaagccctccaattattctaatcatctgtcttatgcagaacacacagagtaagctgaaaaaatgtgattgtcttgaaggctcagagaggacacacaatgccaaactcaagtatctgtatcaagttgactcaaattcttattcaaagtagatgtaagataatgttaaaataaatcaaatccaaccactttggaaaacagtttggcagcttctcaaaatactaaacagggagttaccatatgacccaaaagttccatt

SEQ ID NO: 589626 - DNA, 502 bp, Homo sapiens
tgggccatgcggtgagtgttatagctctattagaagccgtgggtcacagaagagatccatggaacatagtgactagtattcagctcgattaggatgaactgwttaggatgaaccagggcacttagccatgcaggaacaatgatgaacctttagcccgaatgggagtggcaatgggtgcctcactggatcaggagcacagtggacaccctgccagatctggagggtggaagtcagtggtgggtctgcaacagcggcaaacagcagtggtggatggtgagcaaaagcttgagctgtaacaaacactggccagaagagtgtgcagttgcaaggtttaatagagtgaaaacagagctcccataaaatgggaggggacccaaagtgggttgcctgacatttctaaaagttcttgttccaacacaataggtggcaaactgcagctgcctgtttctataaatttgttttattggaacagagccacacccatatgttgatattgtcagta

SEQ ID NO: 589627 - DNA, 502 bp, Homo sapiens
tgggccatgcggtgagtgttatagctctattagaagccgtgggtcacagaagagatccatggaacatagtgactagtattcagctcgattaggatgaactgattaggatgaaccagggcacttagccatgcaggaacaatgatgaacctttagcccgaatgggagtggcaatgggtgcctcactggatcaggagcacagtggacaccctgccagatctggagggtggaagtcagtggtgggtctgcaacagcggcaaacagcagtggtggatggtgagcaaaagcttgagctgtaacaaacackggccagaagagtgtgcagttgcaaggtttaatagagtgaaaacagagctcccataaaatgggaggggacccaaagtgggttgcctgacatttctaaaagttcttgttccaacacaataggtggcaaactgcagctgcctgtttctataaatttgttttattggaacagagccacacccatatgttgatattgtcagta

SEQ ID NO: 589628 - DNA, 598 bp, Homo sapiens
tgtaacaaacactggccagaagagtgtgcagttgcaaggtttaatagagtgaaaacagagctcccataaaatgggaggggacccaaagtgggttgcctgacatttctaaaagttcttgttccarcacaataggtggcaaactgcagctgcctgtttctataaatttgttttattggaacagagccacacccatatgttgatattgtcagtagtgactttcatgctaccctggcaatttagtagttttgactatactgtctggaaagccaaagatagttactgtctggacctttaagaaaaatttttctgatccctattggaagtactcagacttcacctatgtttacttacctggactcttctaaaaataagtaatctcacacttgaatttttcagagctaatgttactttaataactttccttgtaatcatattttaaaatagtttaaagtattttgaataaggaaactaggaataaaatacacacagtttattgatttcctcttcccacaaatttgctactatatgcttccaaataataattctctttcacataagctcatctggtctcaattttaaacataaaattttcaaagag

SEQ ID NO: 589629 - DNA, 527 bp, Homo sapiens
taattggaacaagtatctagttttaattacagttttgcaaatgtgcagctataataactacatttccttgatgtatattttcataaggaatccataaaataaattcaaaggcaagcagattgctatcactaataacatcatttctccttagaaacagaatacaatttctaaatattgttttgtgaaaaacagattaatggccccgtctgaaggcaccatacaacatttaagtattttctacatttcttgtttgaaatgtctttccttatggcttttatcaaagggttagaaaaaagtaatcccataaagatacttgattagcttgggttatttcaatatctctagtctctctagatggcagtcatgctacagggatttaaaaactgttcttgttgaaatccacattaagaatgctccagaatttctgtatctgggttttttttttktttgtttgtcacagtcctcaaataatgctgatgagaatgttaagcctaggaaaatgacagaactgtgataaaatagaatgg

SEQ ID NO: 589630 - DNA, 523 bp, Homo sapiens
ctatgggttcaaacatcctcctttagctcagagaaatttgttattaccaacctttggaagactacttctctcaactcgtcaaagtcattctctgtccagctttgttccattgctggcgaggagctgcaatcctttggaggtgaagaggcactctggtttttagaattttcagcttttctgctctggtttctccccatctttgtggttttatctacctttggtctttgatgatggtgacctacagatgaggttttggtgtggatgtcctttttgttgatgtygatgctattcctttctgtttgttagttttcttttaacagtgaggtccctcagctgcaggtcttttggagtttgctggaggtcgactccagaccctgtttgcctaggtatcaccagcagaggctgcagaacagcaaatattgctgcctgatccttcctctggaagcttcatcccggagggcacctgcctgtatgaggtgtcagttggcccctactgggaggtgtctcccagttaggctatacg

SEQ ID NO: 589631 - DNA, 534 bp, Homo sapiens
gctggaggtcgactccagaccctgtttgcctaggtatcaccagcagaggctgcagaacagcaaatattgctgcctgatccttcctctggaagcttcatcccggagggcacctgcctgtatgaggtgtcagttggcccctactgggaggtgtctcccagttaggctatacggggtttagggacctacttgaggaggcagtttgtccgttctcagagctcaaacaccatgctgggagaaccactgctgtcttcagtgctgtcagacagggatgtttaagtctgcagaagtttctgctgccttttgttcagctatgccctgctcccagaggtggagtctacagaggcagcaggccctgttgagctgccataggctccatccagttcgagcttcctggccacttcgtttacctactcaagcctcagcaatgacagatgcccctctccctaacaggctgccacytcacagtttgatctcagattgctgtgctagcagtgagcaaggctctgtgggcatgggatctgccaagccagctgt

SEQ ID NO: 589632 - DNA, 584 bp, Homo sapiens
gttaagaaaggaggtataattttaacctcttcatggaccctatggcccatctgagggaaaaatgactttgtgtgcatttaactcagtcctaaaaggtacatattattaccaccattatatggtgaagatcaaggaggctcaaagagtaaagaagatatggcaaagtttgtacagtaagagatttagacaggacttgcaacccttgcatctatctccccagtatgactccttgcctccattcaagcaccaccaggaagctgaaagacaaggtgygagagttataaaagagacacacaaatggtgagatgaaagaatgtgttgggaaaatgtgcatatctcattaacttgcctagcatcaacctctgaacactgggataggtgatagactgtaaggttacctttctcaatgcaattatacaaaagttatctgtctaaatcagtttagaacattcctaagtagaggtgggaaaaatatctagataatttatggaagctgcttctcaacctatgagtcaacgaaaacttattgtgtagcttccctaatttatatttctaaccagaaaactgccaaatcttaaaattct

SEQ ID NO: 589633 - DNA, 584 bp, Homo sapiens
gttaagaaaggaggtataattttaacctcttcatggaccctatggcccatctgagggaaaaatgactttgtgtgcatttaactcagtcctaaaaggtacatattattaccaccattatatggtgaagatcaaggaggctcaaagagtaaagaagatatggcaaagtttgtacagtaagagatttagacaggacttgcaacccttgcatctatctccccagtatgactccttgcctccattcaagcaccaccaggaagctgaaagacaaggtgcgagagttataaaagagacacacaaatggtgagatgaaagaaygtgttgggaaaatgtgcatatctcattaacttgcctagcatcaacctctgaacactgggataggtgatagactgtaaggttacctttctcaatgcaattatacaaaagttatctgtctaaatcagtttagaacattcctaagtagaggtgggaaaaatatctagataatttatggaagctgcttctcaacctatgagtcaacgaaaacttattgtgtagcttccctaatttatatttctaaccagaaaactgccaaatcttaaaattct

SEQ ID NO: 589634 - DNA, 584 bp, Homo sapiens
gttaagaaaggaggtataattttaacctcttcatggaccctatggcccatctgagggaaaaatgactttgtgtgcatttaactcagtcctaaaaggtacatattattaccaccattatatggtgaagatcaaggaggctcaaagagtaaagaagatatggcaaagtttgtacagtaagagatttagacaggacttgcaacccttgcatctatctccccagtatgactccttgcctccattcaagcaccaccaggaagctgaaagacaaggtgcgagagttataaaagagacacacaaatggtgagatgaaagaatgtgttgggaaaatgtgcatatctcattaacttgyctagcatcaacctctgaacactgggataggtgatagactgtaaggttacctttctcaatgcaattatacaaaagttatctgtctaaatcagtttagaacattcctaagtagaggtgggaaaaatatctagataatttatggaagctgcttctcaacctatgagtcaacgaaaacttattgtgtagcttccctaatttatatttctaaccagaaaactgccaaatcttaaaattct

SEQ ID NO: 589635 - DNA, 554 bp, Homo sapiens
aaaaaactgtaagatgttttctgtaaccacaaaacaaaaatttataattgacacactaacaataaatggcatggaatcaaaacatattactaacagaaatcacttaatcacaaaggaagatagtaagagaggaaaaaagaagaaagaatctacaaaacaaccagaaaacaggtaacacaatgggagtaatattctcttatctatcagtaataatcctgaatgtaaatgaatttaattccccaattaaaaaacagagtgactaaatgtataaaaaaggcaatgacacaaatatatatactgtctaaaataaactcacttcacctataaagactcttacagactgaaagggaagggatggaaaaagatattccatgcaaatggaaaccaaaaaagagaaggagtagctatactgtrtaagagagagtatactttaagtcagaatggtaaataaaagacaaagaaggtcattatatcatgataaaggaatcaaaacagcaagagaatataaaacttgtgaatatatatgtacccaacactggagcacccaaatatat

SEQ ID NO: 589636 - DNA, 554 bp, Homo sapiens
aaaaaactgtaagatgttttctgtaaccacaaaacaaaaatttataattgacacactaacaataaatggcatggaatcaaaacatattactaacagaaatcacttaatcacaaaggaagatagtaagagaggaaaaaagaagaaagaatctacaaaacaaccagaaaacaggtaacacaatgggagtaatattctcttatctatcagtaataatcctgaatgtaaatgaatttaattccccaattaaaaaacagagtgactaaatgtataaaaaaggcaatgacacaaatatatatactgtctaaaataaactcacttcacctataaagactcttacagactgaaagggaagggatggaaaaagatattccatgcaaatggaaaccaaaaaagagaaggagtagctatactgtataagakagagtatactttaagtcagaatggtaaataaaagacaaagaaggtcattatatcatgataaaggaatcaaaacagcaagagaatataaaacttgtgaatatatatgtacccaacactggagcacccaaatatat

SEQ ID NO: 589637 - DNA, 524 bp, Homo sapiens
gagaggaaaaaagaagaaagaatctacaaaacaaccagaaaacaggtaacacaatgggagtaatattctcttatctatcagtaataatcctgaatgtaaatgaatttaattccccaattaaaaaacagagtgactaaatgtataaaaaaggcaatgacacaaatatatatactgtctaaaataaactcacttcacctataaagactcttacagactgaaagggaagggatggaaaaagatattccatgcaaatggaaaccaaaaaagagaaggagtagctatactgtataagagagagtatactttaagtcagaatggtaaataaaagacaaagaaggtcattayatcatgataaaggaatcaaaacagcaagagaatataaaacttgtgaatatatatgtacccaacactggagcacccaaatatataacaaatattaagactgcaatacaataatagcaggaggcttcaacaccttatttttgcaatggacagcccatccagatagaaaattaagaaaggaa

SEQ ID NO: 589638 - DNA, 548 bp, Homo sapiens
gagaggaaaaaagaagaaagaatctacaaaacaaccagaaaacaggtaacacaatgggagtaatattctcttatctatcagtaataatcctgaatgtaaatgaatttaattccccaattaaaaaacagagtgactaaatgtataaaaaaggcaatgacacaaatatatatactgtctaaaataaactcacttcacctataaagactcttacagactgaaagggaagggatggaaaaagatattccatgcaaatggaaaccaaaaaagagaaggagtagctatactgtataagagagagtatactttaagtcagaatggtaaataaaagacaaagaaggtcattatatcatgataaaggartcaaaacagcaagagaatataaaacttgtgaatatatatgtacccaacactggagcacccaaatatataacaaatattaagactgcaatacaataatagcaggaggcttcaacaccttatttttgcaatggacagcccatccagatagaaaattaagaaaggaacatcagagttaaactgcactctag

SEQ ID NO: 589639 - DNA, 594 bp, Homo sapiens
acatacatgaattattgaggttgagaattcccatgatttgtcacatttgtcacctgcaaactggagatccaagagagctggtggtgtaattttggcctgagtctgaaggccttakaactgatggtatactccaagtccaaaggcatgagaagaccaatgtcacagcacaacctggtaggtagtaagggaaagaattcttaatttccctgcattttgttctattcaggctctcaatagactgaaaaatgaccacccacattgtggagttaactttactttactgagttaatcagttcaaatactaatctcatctgaaaacactgttatagaccaaaacagaaaaacgtgtaatctgggcactcaatagcccagtcaaattcacactcaaaaggaacaattacatgagtgatcaccaccttttgacttgtacgcacggggcatgataatcaagtagtttctatattttcagaatttagtggtgaaaagatgtcaaattaaattaagaaatgagatataaagagactcaaatcctggcatttgaaaaagagctatttcttatttaaatttttcttgtaaatttctttataaagaaga

SEQ ID NO: 589640 - DNA, 646 bp, Homo sapiens
aatgactgcaaatgatcataatatttacttttatttctataatttaaaaaacaaagattgagtaagaaagatagaacatagttttgatactcgtgtccctcaggwgctatcactaggaactaacaagacagatgattttttccagaattttctctctagagctggtagtaggatctgtgtgtaaggcactggttccaggaaaggtgagattagcagatatctttcattataactatacctttatgtcaaagccagctaaatgaaactatacactaaagttaaaagtttaaaaatactatgattatgattgaaggaccacttataaccacctttaaagaatagttttgtggctgggtacagtggctcatgcccgtcatcctagcactttgagaggctgaggcaagaggattgcttgaacccaggagtatggacaatgtagtgagaccctgcctctatgaaaaaaaatgtaaataaataaagaataactttgagttgatattaactctggggactcacaacactgcttaatacagattagaaaatattatcaggcaacattttataacagtaactattattgcagagaaaacattttgggaaaggtgaacaccagtgagaaagaaaaaggtagttgggttatatgagc

SEQ ID NO: 589641 - DNA, 395 bp, Homo sapiens
gacaaacccacagacagtatcaygctgaatgaggaaaagttgaaagtattccccctaaggactggagcaagacaatgatgctcactcttaccattcctatttgacacagtactggaagtcctaaccagagcaatcaggcaggagaaagaaatagcgggcatccagattggaaaagaggaagtcaaatcatctctgtttgctaatgatgtaactgttttaccaagaaaaccctaaacactcttccaaaatactcctagacctgataaatgacttcagcaaagtttcagggtacaaaatcaatgcataaacatcagttacatttctatacaccaataacattgatgctgagaatcaaattaaaaactcaatcccatttatagtagccataaaaatgc

SEQ ID NO: 589642 - DNA, 478 bp, Homo sapiens
atcaatattgaaatgaagccaacctgtgttgacttccaatttgtgcctactttgtgaagttatcaatcatattccacttcagtcctctttttccagcccaagttyctacaaaacatgaattctagatgctttcccatttttgtcagtctctttctctatgtctttctgtaccttctctatctttttgttttttgttgcttggattgggtggtttaaatttgtttttgatatgattcgagcaccacaattttcttacacaattatgaattaaaccaaaagcttgtaaaactggcttataaaattacaggaggattttagaataaaattaatagacagtgaattctagttcaattcagggattaaacttgaaaaatggataaactcaagccacatgtgattcatactttaggatataattctttgccttgccttttctctgctgtaacttcatgcagcctattcttaatttttaaaaatt

SEQ ID NO: 589643 - DNA, 528 bp, Homo sapiens
ggctagtgcaactgaggaactaaattttaaattaaaaaaacataatttaaaatagtgaccactggctcctgtattggacagtgtaatttcaaaagatggaccaaggtacattcagaagtattgagctgttattagtaataccacctctgatggcatcttgtcagttttcttggtaaattcaagrtatttgaaaaggaacttgttttttttaaggagtctttagcaactcgtatacttatcaatggctccattgaactttgaactacttttagcctttggaccactgcaagtttttaaagtgttaattctcaattcatgaattaagctctgtccatttccttcatcattatatcactcattttagagaatgtgatttttgattacaaaaaatatatatatgttatatgcacatatacacatgcatatatagacatttgtgaagatcaagtgcaacaagggatggagtttgttaaacttgaatgttcctttagtctgaatgttactatgaatagacagagtaagcaaaca

SEQ ID NO: 589644 - DNA, 528 bp, Homo sapiens
ggctagtgcaactgaggaactaaattttaaattaaaaaaacataatttaaaatagtgaccactggctcctgtattggacagtgtaatttcaaaagatggaccaaggtacattcagaagtattgagctgttattagtaataccacctctgatggcatcttgtcagttttcttggtaaattcaaggtatttgaaaaggaacttgttttttttaaggagtctttagcaactcgtatacttatcaatggctccattgaactttgaactacttttagcctttggaccactgcaagtttttaaagtgttaattctcaattcatgaattaagctctgtccatttccttcatcattatatcwctcattttagagaatgtgatttttgattacaaaaaatatatatatgttatatgcacatatacacatgcatatatagacatttgtgaagatcaagtgcaacaagggatggagtttgttaaacttgaatgttcctttagtctgaatgttactatgaatagacagagtaagcaaaca

SEQ ID NO: 589645 - DNA, 599 bp, Homo sapiens
ttgttaaagagtttcatgtaagtcaactctctttaattaataccacctataaattttgatatacaagaacaatgacactgacccgtcagacactgtcttcatgccttactttttcatgatggtcttgatttgtctcataggttcataatctcttctttgcacacctcctcatttcaattgcacactttcaaatgtttaaacaattttacttttattaatatttcatactctttggaagtcatccttaaacttcttccaaccttagatggctctaaaaagcaggtttcctaactccttcccctgtgtgtgtatatgtatgtgtatgtgtaacattatcttcagttttatgtaaatgcrcactgacctgtcatgtaaatacataagcaagcatggtttctacttgctctcttattgctaaaccctttcaaactatttggcagagagaaacaactctttcttttctggggaagaaaagtgtagcatcagagagtatcattcttatgttcagcttcatagtaagaaatatttggaatgggattctgtttagtaaatttttactgaatatttgatttttaaacaggtattcttatattaattat

SEQ ID NO: 589646 - DNA, 511 bp, Homo sapiens
gtactatttgcatataacctacgtacattctcttgtatatttttaatcatttgtagattacttataatacctaatgcaatgtaaatgctaagtaaatagttctagtgctgtactgatttttaaatttatattacttttattgttgtactgtcattttaatttttttttttttttttgagaygaaattttgctctgtcacccaggctggagtgcagcggcatgatctgagctcactgcaacctccacctcctgaatttaagcaatcctcctgcctcagcctctcaaaatgctgtgattacaggtgcacaccaccacacctggctaatttttgtatttttagtagagatagggttttgccatgttggccaggctggtctcaaactcgtggagtcaagtgacccacctgcttcagcctctcaaaatgctgggattacaggtgcacgccaccacacctggctaatttttgtatttttagtagagacagcgttttgccatgttggctaggctggtc

SEQ ID NO: 589647 - DNA, 517 bp, Homo sapiens
ctcctgtttagtacattttccatcttattaaattttactctgcacagttaccaatgcaaatgacagcctaattgtttttcatacattaaaaatgttcatcaatgtcgtttgaacctaaaattagaaaatcatactctaacatrgcctccatgtgttggtgacgtttattcttttgtgtcttagcctttctctgtgatggacatatgatcacaaatgttgctgcacagaaacaataacacaagaattagataaatgacagatgacaatttcaaaatgaaaaatatcaaatatttctaaaagctacttggtaggattttttttactgctgtaactgtaaccaaaactctgagaagcatttttggaagccccagttaccagtatgaaagccaccagaatagagtcttgtacatgccacaaccccgaactctcattccgtcatcctggggaggtctgagatcccagcagagatggtctggtggccagtgaccttctatttgatttggtgcagagggactga

SEQ ID NO: 589648 - DNA, 585 bp, Homo sapiens
taagcattatgataggtacagaggagacagggaaagagagacctcrgccaaggagctgaaatctagggtgggaaggcagacaaattggaccattttcctgcaatgtagtaagtgctacacagaggaaagcccaaaagaagggcccttaatccagatgggaggcagttagggaaatagtcttaggagaggtgacactagagggtaaggattagtaatgggaagaggggaacaacatgcacaaaggcagaggcatgtgacagcatacaacaagagtcacagacaatcactcttataaaagcaggaagtgcacattagagtctttgacaaggttcattctagaagtattgggaacataaattgagggcttcacccagaaaacattcacctgtgccccacccactctcacttccctccagtgtcctgaacacacacgtacttctaccagtgggatttggctggtgccaaagtgccaagtacataaggggaaggcaaggagggtttgtcctagcccaggaagaatgagcggacttctttgctctgaggagagctgaagtattgaccctcccttccccattaacccatatc

SEQ ID NO: 589649 - DNA, 586 bp, Homo sapiens
tttctttaacctttctgagtccatattacgagaaggtttatgtatatgtatgtgtatatacatatatatacacatatgtatacatatatacacatacacacacacacacacacacacacacacacacacacacacayatatatatatatatatacagttttctttatggtcaaacctcagctccctttccttatcacttactattctcactctatttcagtaaatggattgtcttcatggccaaaatagttcaggtgaaaatgctcaattgtgttatccttcagcacatttgttttctaatttacatttttcccactgggcttatgtcttcaaatgtcatgctctaaaatgatgactttcaacctgaggcatgaagcttcttctttttctcaaaagaaacaaccttttctgcctatcaaacataaatatcagagagaaatggaattgtttgtgaagctatttcaacaggttcagggagtttccttctcacctattcacttagagccattaaacctgacagcttccagccttcaaatgattcctgtggcgctaaaagtctgcatgtatttcatgccatccagctaag

SEQ ID NO: 589650 - DNA, 655 bp, Homo sapiens
atctcaacatgaagttaaacactcattctgttgaaataatcataatttccatcttgtctcattaactactcattctttatatctcaaattagatgttactttattttgcaatctacttccagtagattagttactcccatggcrtatttctgtagcagtttgtatgtctgtgtcatcattatatacctctaaaattgcagaatttcctgaaagactgaagctcaataaagataagaataatggctgtctttattatcatatccccagtacttacagtgccagcacatagcagaagctcaaggcattgttgttgctgttgaaagattaagtgataaattaaggggaaatttttgtctgtcttctttggaggataaagggtttctgatgacataaatcaagagcagccactaattgtatttctcaaatcgaccccaccagctttatattataataagggaaattcctccaaatgtggcaataggttgtctcagaattaattttttgtaacgtcttcttctctgattcatggctagttttaaagaaatctagaaaggattcttatggagacagattgccagatgttattttagtctgaaagttgtctatccattgatgacgaagcttgtgtttgagcaatgaacacattcttctcaca

SEQ ID NO: 589651 - DNA, 655 bp, Homo sapiens
atctcaacatgaagttaaacactcattctgttgaaataatcataatttccatcttgtctcattaactactcattctttatatctcaaattagatgttactttattttgcaatctacttccagtagattagttactcccatggcgtatttctgtagcagtttgtatgtctgtgtcatcattatatacctctaaaattgcagaatttcctgaaagactgaagctcaataaagataagaataatggctgtctttattatcatatccccagtacttacagtgccagcacatagcagaagctcaaggcattgttgttgctgttgaaagattaagtgataaattaaggggaaatttttgtctgtcttctttggaggataaagggtttctgatgacataaatcaagagcagccaytaattgtatttctcaaatcgaccccaccagctttatattataataagggaaattcctccaaatgtggcaataggttgtctcagaattaattttttgtaacgtcttcttctctgattcatggctagttttaaagaaatctagaaaggattcttatggagacagattgccagatgttattttagtctgaaagttgtctatccattgatgacgaagcttgtgtttgagcaatgaacacattcttctcaca

SEQ ID NO: 589652 - DNA, 601 bp, Homo sapiens
cttttgtttgtctgggaaagtatttgtttctcctttgtgtttgaaggataattttgccagatatattattattgggtaaaaggttttcttcattcagcactttaaatatgtcatgacactctctcctggcctgtaaggtttccactgaaaagtctgctgccaaacatattggagcgccattgtatattacttgtttcttttatctctctgcttctagtatccttgatatttagaagtctgattattccatgtcttgaggtagtcttctttgggttaaatctgcttggtgttctctaaccttcttgtatttggatattgacatctttctctaggtttgggaagttctctgttattatccctttgaataarctttctatccctatgtctttatttgcctgctttttaaggccaataattcttatatttgccctattgaggctattttctagatcctgtagaaattcttcattgttttttattttctcctctgtgtattttcaaatagcctgtcttcaagctcactaattctttcctctgcttaatcaattacactattaaaaggttttgatgcattcttccgtatgacaattgtatttttcaa

SEQ ID NO: 589653 - DNA, 479 bp, Homo sapiens
gttttttattttctcctctgtgtattttcaaatagcctgtcttcaagctcactaattctttcctctgcttaatcaattacactattaaaaggttttgatgcattcttccgtatgacaattgtatttttcaagtacagaatttctgcttaatgctttttaattatcttcatctctttgttaaattgatcggatagaattctgaattccttctctgtgttatcttgaatttctttgagtttcttcaccactgctattttgaattttctgtctgaatgatgactttgaattttctgtctgaatgatcatttacctctgtttctccgggattggttcctggtgtcttatttacttcatttcatgaggtcatgttttcctgaatgatgttgatgctactagatgttcttyggtgtctgggcattaagttaggcatttattgtattcttcactgtctgggattgttttcagcagtccttcttggg

SEQ ID NO: 589654 - DNA, 617 bp, Homo sapiens
tcctgtggctactaccacaataaatgcactaggtcagatctgaagcctgcacagcactgggtctcacccaaggcctgctgtaaccactccctagctactgcctatgttcactaaaggccctggagctctacaatcagcatgtggtaaaaccagccaggtctgtgtccttcccttcagggtggtgagctccctcagtcctgtatgtgtccaggggtgctgtctaggagtcagaaactagagtcaaaaatcttagaagtctacctggtgttctattgtactgtggctgagctggcactcaaatcacaagatgcagtccttcccgctcttcccaccccttttcaaagacagagaagcctcactcacagccactgacactacaggccayggggagttctgccagctcaccaccaatatttccttaaggcccaagttctcttaagtctgcctgtgataaatgctgcctggcctgggactcacccttaaggggagtgggttcccctttggcccagggcaggtccagagatgctatccaagaatcaagtcctgaaactgggggctgcaagagcctgcttggtgctctactcccctgtggccatgctggtacttgaagctagcaa

SEQ ID NO: 589655 - DNA, 568 bp, Homo sapiens
tctgagacagaaagtcaacaaagaaatattggacttaaattggactttacaccaaatggatctaayagacattttcaaaacggtctacctaacaactgatagacattattctcatcagcacatggaaaattattcatggtagaccatatgttagaccacaaaaaagtttcaatacatttttaaaaatcaaaatcatattacgtatcttcttgggccacagtgagacaacactaaaaatcaataccaagaaaaactcttggaactgtgcaaatatatggaaattaaacaacagaatcctaaatgatctttgagccagtgatgaaattaagatgaaaattaaaaaatttttgagaggaatgaaaacacagacacaacataccaaaacctctgagatacagcaaaagcagtgctaagagggaagtttacagtgttaaaggcctacattgaaaaaataggatgattacaaattaacaacctaatctcacacatcaaggaactagagaaataagaacaaaccaaactcaaagccagcagaagaaaagaaataacaaatattagagcagaacta

SEQ ID NO: 589656 - DNA, 584 bp, Homo sapiens
attcacaataaaagccctcaacaaactaggcatagaaggaacatacttcaaaataataaaggctatagatggcaaacccacagccaacatcatactaaacaaagaaaagctgatagcaattcctctaagaattgaaacaagacaagtatgcccaatttcaccacttctattcaatgtagtgttagaagtcctagtcagagcaattagacaaaagaaagaaataaaaggcatccaaatctgaaatgaggaattcaaattatctctggttgaacatatgattttatacctgraaaacccaaaagacctccaaaacactcttagatttgataaatgaattcagcaatgtttcaggatcccaaatcaacatacaaaaagcagtagcatttctattcacaaataacaatcaagctgagaacaaagaagccaatcccatttaccatagctacaaaaaaataaagtaacaagagatatattagaccaagggggtaaaagatctctacagggataaattacaaaaaactgaggaaatcatgaagggcacaaatgaatgggaaaacatcccatgctcatggattgaaagaatt

SEQ ID NO: 589657 - DNA, 486 bp, Homo sapiens
atctgatacagttaatcaaccaattagtaaaaatgggtgtataaattgacagattattagaatgattttattcatcagtacaatataattcaaactaaatgtttagaagacacatggctatccacccagactgtaattttaacatcctcaatagtgctgtactgggtctttctacaacaggccccttgcaccactttccccaccaatgccttgtttattacagacaatcaataattactgaactatataaataatatgatattgtatcggtgaccctaacasctcatatttactgaatctgatttctgcacttctatataaccaggagtgttccttggatctactcacaattctctcaactgtgaaaaaaaaaaaacccagcgtgagaatcaaaatcatatgaaataaaatgaaaaaaggtgtttctctcagaaacactaagcttcaattctgtaataaatgttaacaaaagaaacaatatgaaaa

SEQ ID NO: 589658 - DNA, 580 bp, Homo sapiens
ttccctttcgataaataattttgacatcatgtacagcaagttctcacctaacatgatggatcagtacttgaaatctgcaactttaaacaaaatgacatatagcaggttatcaaataatgtcattttgttaaacatcttttcattatcatgttgattataaaaaatgatttcattagacatctttttgcttaaagtcacaatttccaagaatctattgccaacattgaggattaactttagaagcagcyttaatttctgcttaaaataaaacccatataaaccacagcaggaatatcaggaaggcactaatgatgagaattgttacacacagactagtttattgcacaatctgtggaatatttttctttagagaatgttaaaattagggctaagtagatgttcatctctctaggacaatataattatagctctgctggaagctatggctattaagatgtcacaagttcattccatctgtatgattttgtaattggtgattgagtaaaagaaacacggtgatattctctattgaaatgacaaaaaagagaacacttctgcttttgccctgaagaattaataa

SEQ ID NO: 589659 - DNA, 570 bp, Homo sapiens
cctactgaaactataactagcagctctgcaagctgttggccatggctcgattctctaccatcatcgcttctcctcawtcggctttttcattgaggagcagtattgtcctactctcagggcctgcctcagattgcaaccaaatcaaatgagagccagaaaaggaagccatccccagtaatgctggctttccctcacttccctgagttgtgcaggcactctggcttctagaaatttccattccagttaaaatatttgccatgcctaaaataaaatatgagttttaatgaaatgtgctctggcaaaatactagtgtagaaaattactttaagtgtattcccagtcatttgaacatagcttatcccagcaccattttcacctgtttcttcataatgttataaaaaaagaagatggagaatagggtattggaagcagaactgaacaaaataattacaaggtggttggaaataatttcattgtctttactaattgctcctcaacagagacttcttccattcatttaggaaaatcagtcgttttaaatacatgtgagtgcttgaataccaggaaata

SEQ ID NO: 589660 - DNA, 600 bp, Homo sapiens
aattgatagatggatgaatatatggctatatttgtaataaagcaaaaagattgatagactccaaatggtggctatatgagtgttcactgcgtaatttttcaattttcctgtattttgaaaattttcgtaataraatggtggaaaatgtaggtgaatacatgacaataatatatcatacatcaggcgggttgtgttagactgttcttgcattgctaaaaagaaatacctgagactgggtagtttacaaagaaaagaggtttatttggctcacagttctccaggctgtacaagaatggtactggcatctgcatggcttctggggagtcctcagggagcttttactcatggcagaaggaaaagggggagtaggtacaccacatggcgagagcaggagcaagagagagggtggggagaggtaccacacgcttttaaaaaccaggtctcatgagaactcagtatcacgatgacagcaccaagccataagggaatctgctatcataaccccgatatctcccaccaggctccacctccaacactcaggattatatctcaaggtgagatttggagaggacatccaaggtatattaagggagtaaatgg

SEQ ID NO: 589661 - DNA, 547 bp, Homo sapiens
aactgtgttattgtcatgagcacttcctatggcaatctgttaatctccatttggattaattatggttgtaggaaaggcttcaccccactagcgaactatatcaaaaattcccacaaggctatctgcattattattgcttgtctcrtttgttcactcattctttagcttgccttgagacatacccaatgggttatcctgaggcagacatttccagaaagcccactatagcttttaaagtagctgaatgaaaagctctgctcagggccaatctctgtatccccctctgagtatacggatgcttgtatcacattctgacaccgcattacaattctcttcctgtgcttttctccctttaggtcatatgtctgaatggaaatgaattatggatagaaaaggaatcaaagatgatgtgaaatgcattttaaatctttgtctttatgaaaacaactttactgtaaagcatagctgcagagggcaaggaggaaagtggctggcctgcccataccactttcccaaattaatttttatccttcttttgacaaattct

SEQ ID NO: 589662 - DNA, 610 bp, Homo sapiens
aaacttttgcttgcattaaaaggacttggagggctcctcaaaatgcagctgactgaactacacctctagagtttctgatttagttaacttggataggaayaatgaactggcaattttaacaattgcttggggatgctgatgcagccgatctaggtacacagggagagaaccatggagatagaaggatatgcctggtccagttcacaccataactcacttctctgaacagccccttgggactgctgaattccaggtcagactctcctaggctacacccactgttacaacaattggtctaaggaccagccaagggctgctctctgccttggtctgatatgttctgctgaatagcaggcaaagttgagtctccagagtgatttagcaggaggagtactaattgatcttatttggaaaaacattggaacaggttcagctcagctgtttcttctttttatttgagcttagcaggagaggttctttctttctttctgagaaagggtcaggaagtccaatactgaaacaattagagaactatcaaagcatggtttccaaaatttaaaaatctggatttactgcaaatacacagttaacatacatcaaagattcactt

SEQ ID NO: 589663 - DNA, 557 bp, Homo sapiens
aaaaaaaaaacatagttaatgacaaagaggtctagagaagaaacatgtggatgaatctctccaaataggcacatggtgtgaagatacatgtatcaaatgcaaatgttcaccaaaaagcattttcactacaagatcttaataatcagttagacaagatgactcattcagtagacattagtcrgtctctttccttagccaatgagctcatgaatgaagtggccattatggcagaaacaaaggttttccatctgctagagccactgctacagtggttacagctggtgctgtgaatctactctgccagcagagacttcaatatgataccatttcccagggtatcagtgagccaccaactggaaagttgataacaaacaatcacttctatcatgaaaggatagcattttgttttcactggaatagacacatcctggatactgatttcccatccctgcctgcagtgcctccagcaaaacctccatctgtgcatccaaggaattccttttacacatcttggtatttgtcacagcattgctctgaacaagaaactcatagcaaat

SEQ ID NO: 589664 - DNA, 557 bp, Homo sapiens
aaaaaaaaaacatagttaatgacaaagaggtctagagaagaaacatgtggatgaatctctccaaataggcacatggtgtgaagatacatgtatcaaatgcaaatgttcaccaaaaagcattttcactacaagatcttaataatcagttagacaagatgactcattcagtagacattagtcagtctctttccttagccaatgagctcatgaaygaagtggccattatggcagaaacaaaggttttccatctgctagagccactgctacagtggttacagctggtgctgtgaatctactctgccagcagagacttcaatatgataccatttcccagggtatcagtgagccaccaactggaaagttgataacaaacaatcacttctatcatgaaaggatagcattttgttttcactggaatagacacatcctggatactgatttcccatccctgcctgcagtgcctccagcaaaacctccatctgtgcatccaaggaattccttttacacatcttggtatttgtcacagcattgctctgaacaagaaactcatagcaaat

SEQ ID NO: 589665 - DNA, 387 bp, Homo sapiens
tgatgtcactgtaattggaaggttgattatttctgactaggaaaaattaggttgctgctacacaataaggagtaagtctgtaattcagaatayatttttgtatatacacacatatataagccactttttatccttcctcttctatttttattatctaacagaataaagaagtatgaatagtaattaaccttaaatatgtttttaagttacagactaccaaaggggaaatataactctgctacaagatgaaaaagaaaatgtatatcttccaatatggaagagtctttcagttttagaagggatagctatatcgtgttaggcagaagcattattttgcttgtgtctttatttgacagttaaattaagaatggctaaaagcagtatata

SEQ ID NO: 589666 - DNA, 557 bp, Homo sapiens
aaaatgtatgttttgggtggcaagccactggaaaaggtggcctggaccttccgccactcttcagaaacattgggtggtagytgggagcctagatcctggagccagactgcatatgtttgagtcctggctctgccacattctgtttgtagcaaattgctcaacctctcagcagaactatgttcccatctggaaaatggggttgataattgttatgaggtttatctatgtttgcgtttgcaaagtgcttaaaagaatacttggcacatagtaaatcaccatagtagataaatgtttgataattacggtaaatactttttgacacttttgagaatttactataggccagggtcaagtcaactgtcatctttgttagactgctttcaatgtttcaatcaacaaatattttttgaataactttcaagtttaaaatagttttctcagtctgagaatagagtggtgaagagaactgatactaagcctgacataacagagattgcattggtctaatcctatatgaccctatccattattttagagcattatattagagtgctatt

SEQ ID NO: 589667 - DNA, 416 bp, Homo sapiens
atgaacaagtggaaatgtatagctaagcagcagggtggaggtcagtggatggaaaattactaaaagaaaacattaggagtaagagaaattctggctaaatcaacctaaagggattcttgctgaagacaggcaaggtgaccaggcatcacctggaggatggtggagaaccagagacttaatctgatattatgtgtgataagatacrgagggctgtgagtttttgctaaactgacttaacttagcagggctctttgctaaaattggattttacaagaagtgcatagatgggcccaggagaaggttaagaagctggactaaactttggtcaagcaaagaatctttgtaagtgtgtaaaaaatattgtaaaaggtagtctgcaaattttttgttgaactaaatatatcagtgcttcctaa

SEQ ID NO: 589668 - DNA, 400 bp, Homo sapiens
tgctgcctcactgtggtggcctcaggggtaaggaatctggacccacccagtgtgacgaataaacacagactctcagcaacgcaggaagaggaggcctataaatgccacagkgatcaggtaactctgtgcacagaccaatgtaagaaaagccgtgggggcagggaagtacttccttggtggttgagacatcctggaggttaaaagtgtgtgattgagacacacaactgagtgtgaagtgaaagtaggggagtgcaagaaatttccactcgtgggggttgaggctccagggaaaatggtgcaagaaatctctagtaggagaggttgagccccacagagtctccagggaaaaagttgcaagaaatctctagtaagagaggttgggtcccatagactcagaaaa

SEQ ID NO: 589669 - DNA, 550 bp, Homo sapiens
tgcagcaaaagcgtttaaacagcaaaagcttatttctcatgcatacaaagtcttgcaccagtcaaatatctttccagagctgcttttctctaggtggtgactcaagctgcctacttttcaagtagcaccatttcaataaatggcctccacagtcactgccaaagaggaagagagattaaggaggtggcatgcttgctcttaaaagcttcagccagaaatgagatgcatcaatttcacttacatttcactggctagaactagtcatatggccctgaaggattctgggaagtagattcttcctgtgttctcaggaaagcgagaatacccacatataagaagcatctatagactttaccrcggttcccttgcaactatcgaaataacatttcttttactaaatatcaatttttccactgatttttctatcttataataattcaacattaaagcatttgctttcacttttcaatatgaaataaaaggatatttgacaagcttcagacttttacttttatctacaaattatatgttttaaacataatggcaatgc

SEQ ID NO: 589670 - DNA, 558 bp, Homo sapiens
aggctaaaactggaagagcataataaaaataccagaaatcttgtcgggaggcttactgtccaagctggagtagatgtccatccttaaacagctgtggccagagagaccaggagcatgaaacttcatcatcattagagtttatgaatgtgtggtcagatgtcttagtcacaaagatctactaggaaaagttaaggtgtataggtagaaacatgtgaaagtaaaagatcttctagtagtcagatcagaaattttctaataaaaaatagaaaaactgaccaatgaaattactactaattcagtctccagttgggacctatctccctaggtagtcttggagcacatacttctcatataaggcagatgattcagccattggttgagggcattttatagtattaatattagtcattgttattctacaataacagctctctgtgtctgttcatctgcctgtgtgtttgtgtgtatatgtacatgtacatatatgattatrtaatacacacatactcattcaacacgttcagaatggcaaataaattcacaattacatagatccat

SEQ ID NO: 589671 - DNA, 538 bp, Homo sapiens
ttgttggtcaggctggtcttgaactcctgacctcaagcgatccacctgtctcagcctccgaaagtgctgcgcttactggcatgagccaccatgcccagcctcccaaagtcacagagctactttgagaggcagactgtctaccacctgaaccaaagcacttaccactcaatcactctcccgtgcaccaccctggaccacttccccatctcacgcttcagccctcttgccccttttctgaattgcactattctttgtgcttgttttcctgatcttttaccctttgtgagatattctgcactaactaggctgagattgagtttagcaatctctgtttayacttcctgctagcagtggagcgcatggcagtgtgtacggcagtgagcacaggtctgcgtggctgttttgtgggtgatctctgtttgtgtgtctatgtgtgcgcctttatgctgtggccatatgcatgcatcgcaagcatgtgtgtgcatgtgttcgttttgttgggctgccataacaaagtgccacagacttacacaagcag

SEQ ID NO: 589672 - DNA, 538 bp, Homo sapiens
ttgttggtcaggctggtcttgaactcctgacctcaagcgatccacctgtctcagcctccgaaagtgctgcgcttactggcatgagccaccatgcccagcctcccaaagtcacagagctactttgagaggcagactgtctaccacctgaaccaaagcacttaccactcaatcactctcccgtgcaccaccctggaccacttccccatctcacgcttcagccctcttgccccttttctgaattgcactattctttgtgcttgttttcctgatcttttaccctttgtgagatattctgcactaactaggctgagattgagtttagcaatctctgtttacacttcctgctagcagtggagcgcatggcagtgtgtacggcagtgagcacaggtctgcgtggctgttttgtgggtgatctctgtttgtgtgtctatgtgtgcgcctttatgctgtggccatatgcatgcatcgcaagcatgtgtgtgcatgtgttmgttttgttgggctgccataacaaagtgccacagacttacacaagcag

SEQ ID NO: 589673 - DNA, 592 bp, Homo sapiens
aaactcatcctattctcaccctgattaactttctttctttctttattttttttttttttcaaaatggagccatgatctgtcacccaggctggagtgcaatggtgtgatctcagctagctgaaacctctgccttctggattaaaccaattctcctgcctcagcctcctgggtagctgggattacaggtgtataccacaacgcccggctaattttttgtatttttaatagagacagtgtttcaccatgttggccaggctggtctcgaactcctgacctcgtgatctgccctctttggcctcccaaagtcctgggattacaggcatgagccaccatacccagccactcttgattaacttaatggaaatatttacagagattctttctcttctgggttctaacgtcttatctgtaacctctgcaggtaatacattttccttcctgatgatagcatttctatggttgctttcacttgcaaatcctctaatrcttatttattccatttctgattggcattagacataattctcaatttttagtgacagcacttcttttaacttacatataaatcgactttgtcttgaaatgtgacatt

SEQ ID NO: 589674 - DNA, 603 bp, Homo sapiens
ggctatttactattctaccctttaattagcataatcagtgtttccagcagcaaargcaattggaaaatcgcttgttttgttaggttcattattctcccttagcatagtgtggcatcagcatggctattattcttaaattgcctctttaaaacaagagctggtgcttcttacaggcaattcctaactcttgggttttgtagagggtcacaactctttagaaccctataattcaaggaaaggctccactctggtgttacattttgtctggtctctttgggtgacagaatttatgtcacaaggtgcacatgttttggggaggctcatggacagcccatcgctcttgtgctttggtaggaaatatgtgcagttatggggaaggagttagttactcatctagggaacaattgggtagaaagagatggactccctgtatttgaaattcagaactcaagcttggctctaagtgtttccttgctttgctgtgctccacgggagtcactgagcagaaggaagcgagttgcctgagattcctcaaagcccgcagcccttttggaggttacattgttattctcagagcctttatgatacataataaagacctag

SEQ ID NO: 589675 - DNA, 588 bp, Homo sapiens
ccacggtcgcccagctgaggaaggatggagccggctgagatcctgttctggggatctaactctgcagcctgcattctgggctgctgtattctcccttgttgctatctgacgagcacagcatgggctcagagtacagacaggaggaaccagctaataaggagaggtctagggtgaaggctggtgccttggggaagaagagagaggtctcattctaaagggatggcattggaagttcatagtgataaagcaaagccaacaggttttggggctgagagttaaacacacagctctggtttctgcctyttcacagtggtgatgaaagagcactgagagcctctcgagctaaagttgtcatcattgctcttcatagtctgaaggtgcatgaaatggtcaactttcttccaaagggcttttatgcctaagtctgtggttagtgtataaacagatatttactgaagtcctgctgggtgcagacactgtggccagccctgaggctacagtcaagatgaagccagtctctgtcctcatggagacctgtctattgataagaaaagagaaagctcactgagcattgaccctgtgcccact

SEQ ID NO: 589676 - DNA, 588 bp, Homo sapiens
ccacggtcgcccagctgaggaaggatggagccggctgagatcctgttctggggatctaactctgcagcctgcattctgggctgctgtattctcccttgttgctatctgacgagcacagcatgggctcagagtacagacaggaggaaccagctaataaggagaggtctagggtgaaggctggtgccttggggaagaagagagaggtctcattctaaagggatggcattggaagttcatagtgataaagcaaagccaacaggttttggggctgagagttaaacacacagctctggtttctgccttttcacagtggtgatgaaagagcactgagagcctctcragctaaagttgtcatcattgctcttcatagtctgaaggtgcatgaaatggtcaactttcttccaaagggcttttatgcctaagtctgtggttagtgtataaacagatatttactgaagtcctgctgggtgcagacactgtggccagccctgaggctacagtcaagatgaagccagtctctgtcctcatggagacctgtctattgataagaaaagagaaagctcactgagcattgaccctgtgcccact

SEQ ID NO: 589677 - DNA, 447 bp, Homo sapiens
taataaatccttaacacaatgaaaactcttaatgcagagtgagaccaaaatgaaggtattaactgttttcttcctaatccttgctttacttgttatttccaccagaccgtcactttatttgaaggatattgtaataacacaaagccctcagctttrccattagagagatcttccttaaattatctttgttgtaataaaggtcatctggaggaaatactggtctgaatacaataataaatgttaagctttctagtattttccacttttagacacaaattgaaagaatcatttataatgtcaaaaacacttttttctaactaatctattctatgcctaagacactactagcaattaaagtagatagatcaaatctaaatgtggagagaaaaagtaatttctacttatgtttaaacagatgaaagcatgaataaattgaaagcctgaaat

SEQ ID NO: 589678 - DNA, 532 bp, Homo sapiens
cactcccccaaccccaggcagcacagcttgcagctccaaaaaagaccgcttccttctgctagaggagattagaggaaagagtaaaaaggactttgtcttgcatcttggatatcagttgagccacagtaggatagggcactggtcagggtcatgaggyccccattgtggatgtaactaactttttttttttaattttataggctgataggcagaagggacttgtctcaaataagactttggacttggagttttgagttatgctggaatcagttaagactttgggggactgttggaaaagcatgattggctttgaaatatatataaaagacatgagatttgggaggtgccaggagcagaataatatggtttggctctgtgtccccacccaaacctcatctcaaattattatccccacacatcgacagagggacctgtaatcgccatgtgtcgaagaagtttacttcatgttatcctcatgatagtgagtgaattcttaggagatctgatggttttaagagtaggtgatttttgt

SEQ ID NO: 589679 - DNA, 532 bp, Homo sapiens
cactcccccaaccccaggcagcacagcttgcagctccaaaaaagaccgcttccttctgctagaggagattagaggaaagagtaaaaaggactttgtcttgcatcttggatatcagttgagccacagtaggatagggcactggtcagggtcatgaggcccccattgtggatgtaactaactttttttttttaattttataggctgataggcagaagggacttgtctcaaataagactttggacttggagttttgagttatgctggaatcagttaagactttgggggactgttggraaagcatgattggctttgaaatatatataaaagacatgagatttgggaggtgccaggagcagaataatatggtttggctctgtgtccccacccaaacctcatctcaaattattatccccacacatcgacagagggacctgtaatcgccatgtgtcgaagaagtttacttcatgttatcctcatgatagtgagtgaattcttaggagatctgatggttttaagagtaggtgatttttgt

SEQ ID NO: 589680 - DNA, 532 bp, Homo sapiens
cactcccccaaccccaggcagcacagcttgcagctccaaaaaagaccgcttccttctgctagaggagattagaggaaagagtaaaaaggactttgtcttgcatcttggatatcagttgagccacagtaggatagggcactggtcagggtcatgaggcccccattgtggatgtaactaactttttttttttaattttataggctgataggcagaagggacttgtctcaaataagactttggacttggagttttgagttatgctggaatcagttaagactttgggggactgttggaaaagcatgattggytttgaaatatatataaaagacatgagatttgggaggtgccaggagcagaataatatggtttggctctgtgtccccacccaaacctcatctcaaattattatccccacacatcgacagagggacctgtaatcgccatgtgtcgaagaagtttacttcatgttatcctcatgatagtgagtgaattcttaggagatctgatggttttaagagtaggtgatttttgt

SEQ ID NO: 589681 - DNA, 532 bp, Homo sapiens
cactcccccaaccccaggcagcacagcttgcagctccaaaaaagaccgcttccttctgctagaggagattagaggaaagagtaaaaaggactttgtcttgcatcttggatatcagttgagccacagtaggatagggcactggtcagggtcatgaggcccccattgtggatgtaactaactttttttttttaattttataggctgataggcagaagggacttgtctcaaataagactttggacttggagttttgagttatgctggaatcagttaagactttgggggactgttggaaaagcatgattggctttgaaatatatataaaagacatgagatttgggaggtgccaggagcagaataatatggtttggctctgtgtccccacccaaacctcatctcaaattattatccccacacatcgacagagggacctgtaatcgccatgtgtcgaagaagtttacttcatgytatcctcatgatagtgagtgaattcttaggagatctgatggttttaagagtaggtgatttttgt

SEQ ID NO: 589682 - DNA, 338 bp, Homo sapiens
atctgcccccaagaatcataaatgccttttcactcatcctgyagaatgcactctctactttaatgatcatgtgggatgtgactttaatttctaggcatggggattgatcttaagaaaaagcagggaaagtgctttacctgtcctgggactctgctccacttgccaacatttgaatggattcatttgtgtggtagtcaagctacgggaaataaagggaccagtcagtcttccacacaatgacacagaggccaattatcacaagtccaaatctccatttgtcacccagctcacattcccgctgtggcacaaggtcacatgcactcgtgtccaactccaaa

SEQ ID NO: 589683 - DNA, 560 bp, Homo sapiens
cccataatcactgcaatcaaagtaaaaatgaatcttttaaatctaattagaactccttttaatacttaagktatgtacggatggagaagcctcccacggtcgatccatggacacagggatccacacgccttctcttgcccttactaacagaatagcattctgccaatcaaaagttgaatcaatgcaagtaaacaatctacaattttcactggttgtagtttgggaatctggtttaatagctatgttttctacaactagcatataagggggttttacacaactttgcaaaggaattttcagattggaatttaggttaatagttaatatggcttatgatttcttgttcccataacttgatttccagaccaaattctaatgtggtacgaggccacagtgagcttccataattctgggtgttcaggaccaaaaacaggactaactaaatttggtcggggtgatgaaatcctcttttcaccccatttccatggatagggtgattctagccttctataaacctggtctagccttttagttaaatcactatcacaggccggattagt

SEQ ID NO: 589684 - DNA, 560 bp, Homo sapiens
cccataatcactgcaatcaaagtaaaaatgaatcttttaaatctaattagaactccttttaatacttaaggtatgtacggatggagaagcctcccacggtcgatccatggacacagggatccacacgccttctcttgcccttactaacagaatagcattctgccaatcaaaagttgaatcaatgcaagtaaacaatctacaattttcactggttgtagtttgggaatctggtttaatagctatgttttctacaactagcatataaggrggttttacacaactttgcaaaggaattttcagattggaatttaggttaatagttaatatggcttatgatttcttgttcccataacttgatttccagaccaaattctaatgtggtacgaggccacagtgagcttccataattctgggtgttcaggaccaaaaacaggactaactaaatttggtcggggtgatgaaatcctcttttcaccccatttccatggatagggtgattctagccttctataaacctggtctagccttttagttaaatcactatcacaggccggattagt

SEQ ID NO: 589685 - DNA, 560 bp, Homo sapiens
cccataatcactgcaatcaaagtaaaaatgaatcttttaaatctaattagaactccttttaatacttaaggtatgtacggatggagaagcctcccacggtcgatccatggacacagggatccacacgccttctcttgcccttactaacagaatagcattctgccaatcaaaagttgaatcaatgcaagtaaacaatctacaattttcactggttgtagtttgggaatctggtttaatagctatgttttctacaactagcatataagggggttttacacaactttgcaaaggaattttcagattggaatttaggttaatarttaatatggcttatgatttcttgttcccataacttgatttccagaccaaattctaatgtggtacgaggccacagtgagcttccataattctgggtgttcaggaccaaaaacaggactaactaaatttggtcggggtgatgaaatcctcttttcaccccatttccatggatagggtgattctagccttctataaacctggtctagccttttagttaaatcactatcacaggccggattagt

SEQ ID NO: 589686 - DNA, 560 bp, Homo sapiens
cccataatcactgcaatcaaagtaaaaatgaatcttttaaatctaattagaactccttttaatacttaaggtatgtacggatggagaagcctcccacggtcgatccatggacacagggatccacacgccttctcttgcccttactaacagaatagcattctgccaatcaaaagttgaatcaatgcaagtaaacaatctacaattttcactggttgtagtttgggaatctggtttaatagctatgttttctacaactagcatataagggggttttacacaactttgcaaaggaattttcagattggaatttaggttaatagttaatatggcttatgatttcttgttcccataacttgatttccagaccaaattctaatgtggtacgaggccacagtgagcttccataattctgggtgttcaggaccaaaaacaggactaactaamtttggtcggggtgatgaaatcctcttttcaccccatttccatggatagggtgattctagccttctataaacctggtctagccttttagttaaatcactatcacaggccggattagt

SEQ ID NO: 589687 - DNA, 573 bp, Homo sapiens
atctcagtggagtaaagaataacaaggcagcattgctgcaaacatgtcttgcctcccatcacagggcagcttttctccgatctcagacttaaacaaatgtacaatcgggttttacaycgagactttgagttcccaggggcaggcaggagacagtggccttcctccatctcaactgcaagaggctttcctcttttactaattcacctcaccacagaccctttatgggtatcgggctgaagaacagtcaggtctttctcatcccacgaggccatatttcagattatcacatggggagaaaccttggacaataccctgctttcaagggcagaggtccctgcggctttccacagtgtattgtgcccctggtttattgagactagagaatggcaatgacttttaccaagtatactgcttgtaaacatttggttaacaaggcacatcctgcacagccctagatccctcaaaccttgattttatacaacacatgtttttgtgaactccaagttgggtcaaagtggttggggcaaagtggctggggcaaagctacaaatgaacaacatctctgcaaagcaa

SEQ ID NO: 589688 - DNA, 573 bp, Homo sapiens
atctcagtggagtaaagaataacaaggcagcattgctgcaaacatgtcttgcctcccatcacagggcagcttttctccgatctcagacttaaacaaatgtacaatcgggttttacatcgagactttgagttcccaggggcaggcaggagacagtggccttcctccatctcaactgcaagaggctttcctcttttactaattcacctcaccacagaccctttatgggtatcgggctgragaacagtcaggtctttctcatcccacgaggccatatttcagattatcacatggggagaaaccttggacaataccctgctttcaagggcagaggtccctgcggctttccacagtgtattgtgcccctggtttattgagactagagaatggcaatgacttttaccaagtatactgcttgtaaacatttggttaacaaggcacatcctgcacagccctagatccctcaaaccttgattttatacaacacatgtttttgtgaactccaagttgggtcaaagtggttggggcaaagtggctggggcaaagctacaaatgaacaacatctctgcaaagcaa

SEQ ID NO: 589689 - DNA, 573 bp, Homo sapiens
atctcagtggagtaaagaataacaaggcagcattgctgcaaacatgtcttgcctcccatcacagggcagcttttctccgatctcagacttaaacaaatgtacaatcgggttttacatcgagactttgagttcccaggggcaggcaggagacagtggccttcctccatctcaactgcaagaggctttcctcttttactaattcacctcaccacagaccctttatgggtatcgggctgargaacagtcaggtctttctcatcccacgaggccatatttcagattatcacatggggagaaaccttggacaataccctgctttcaagggcagaggtccctgcggctttccacagtgtattgtgcccctggtttattgagactagagaatggcaatgacttttaccaagtatactgcttgtaaacatttggttaacaaggcacatcctgcacagccctagatccctcaaaccttgattttatacaacacatgtttttgtgaactccaagttgggtcaaagtggttggggcaaagtggctggggcaaagctacaaatgaacaacatctctgcaaagcaa

SEQ ID NO: 589690 - DNA, 335 bp, Homo sapiens
ttagttaaagtgtctcagcctaataagggaactgggcaggtggggacaactaaaaaggagtgcttaaaagagtattgtctaagttggcaccagagttggggagttttaagaggtttagaagcctggctgtcaatactcacaacagttatggagacaagggaaacaggcccttgaaaagaaggtaatgtggagtggttagcctccgtattgattaagaaggggatggacttmtcctccactgtgagagttacctagagcgtctgtgatggtcctgtaggcttccgaggtgatctatcaggcagtgtcagtcttcagctgctaagccaagaagatct

SEQ ID NO: 589691 - DNA, 659 bp, Homo sapiens
ggtattactattaatattccttgctaggaaaagaatttagcgatctctctcctacttgcacatccgtttatagactctctgcaagaagaaacatatggctctttttgcccaaccctgcaggcaggcagaccttatggttgtcttcctttgttccctaaaaattgycgttattctcttctttttcaaggtgcactgatttcatattgttgaaacacacatgttttacaatcaatttgtacagttaacacaattatcacagtggtcctgaggtgatgtacatccttagcttatgaatataacagaattaagagattaaagacaggcataagaaattataaaagtattatttgggaactgataaatgtccatgaaatcttcaccatttatgttcctctgccatggctccagccagtccctctccatttggggtccctgacttcccacaacaagaaacaataagaggttaaggtggagaagagcaggcaagtccactttataaaggggtcagggaagagctgtctgtggaagcaccattttagctgacacctgaaggatggtctaatttggggaggtgcagggaaaatcattccaggctgaagcagcaagtgcaaaggccgtgttgtggaaaaaggtttgaaagtccaagaaaacaaaaggag

SEQ ID NO: 589692 - DNA, 389 bp, Homo sapiens
ccacgttagtgaaacatcagattgagctgctaaatttctcccacccctatgtcattttgtattttctgagcatcctagacgattgtgaytgtatacacaggacagaaacaccatgactcagggtactcctgctaatttccgatgcaggagattttaagggctagattagcaggatgggagtgttgaccctctaagtgaaataaatccctcaattcattatccccatcctaaaacagattttttttttttttgagacagagtctcactctgtcgccatcgctggagtgcagtggtgggatctcagctcactgtaatctctgcctcctgggttcaagagattctcctgcttcagcttcctgagtagctgggattacaggcaagcaccacca

SEQ ID NO: 589693 - DNA, 571 bp, Homo sapiens
ttggcttcctgttcctgagctaatttgcttagaataaagtcctccagctgcatccatgttgctgaaaaggacacaatttkgtcctttttatggatgcatagtattccgtgacatatatgtactacattttctttattcaatccactgttgatgaacacctagtttgattccataccttcactactgtgaataccactgtgatgaacatacaaatttaggtctttttacaagactgatttactttcctttggatatacacccagtagtgagattagtgggtcaaatggtagttctgtattaagtttcttgaaaagtggtttgaaaatataatgctcaatagaatcaggtatagtaaaatagtacacatgattcaaagacctgtgaaccgagagtaacaacaaatttccacacaaacatattgcaagttagaaaatagctgtattttaatcaattattccacaatcatttactgaatagctattataagacaagactttaatcagattctggaatatacatacagaggagaataagatatgattcctgccctcaagaaattcattatcaagaa

SEQ ID NO: 589694 - DNA, 571 bp, Homo sapiens
ttggcttcctgttcctgagctaatttgcttagaataaagtcctccagctgcatccatgttgctgaaaaggacacaatttggtyctttttatggatgcatagtattccgtgacatatatgtactacattttctttattcaatccactgttgatgaacacctagtttgattccataccttcactactgtgaataccactgtgatgaacatacaaatttaggtctttttacaagactgatttactttcctttggatatacacccagtagtgagattagtgggtcaaatggtagttctgtattaagtttcttgaaaagtggtttgaaaatataatgctcaatagaatcaggtatagtaaaatagtacacatgattcaaagacctgtgaaccgagagtaacaacaaatttccacacaaacatattgcaagttagaaaatagctgtattttaatcaattattccacaatcatttactgaatagctattataagacaagactttaatcagattctggaatatacatacagaggagaataagatatgattcctgccctcaagaaattcattatcaagaa

SEQ ID NO: 589695 - DNA, 571 bp, Homo sapiens
ttggcttcctgttcctgagctaatttgcttagaataaagtcctccagctgcatccatgttgctgaaaaggacacaatttggtcctttttatggatgcatagtattccgtgacatatatgtactacattttctttattcaatccactgttgatgaacacctagtttgattccataccttcactactgtgaataccactgtgatgaacatacaaatttaggtctttttacaagactgatttactttcctttggatatacacccagtagtgagattastgggtcaaatggtagttctgtattaagtttcttgaaaagtggtttgaaaatataatgctcaatagaatcaggtatagtaaaatagtacacatgattcaaagacctgtgaaccgagagtaacaacaaatttccacacaaacatattgcaagttagaaaatagctgtattttaatcaattattccacaatcatttactgaatagctattataagacaagactttaatcagattctggaatatacatacagaggagaataagatatgattcctgccctcaagaaattcattatcaagaa

SEQ ID NO: 589696 - DNA, 582 bp, Homo sapiens
gaggaatgaaagttattaaaaagaaacaaagttccatttgccttcaattcctggcctgctctcaaacactggattaaattaattgttatccccatattaaaatttcagtttttagggtgcccactagtgtgagtagtgaataaaaatatctagtagcaaaggaatagtctaattttctyaaataggaatacactgggagatgaagggtaggcacagacgggctgtgtaatttcagcctgcctgagtcacaatttccagtgaaattctgtgtgcctctcaattaggtttaaatgttagaggtccatttatagagtacagtatatctgcttttgatatcccaatcatatgtcatggaaaaagtaatagggacttggggaagtaaagaaaagaaaagaaaaagacaacattcttaagaaaaaaagttctgaaacatgacgtgagttgaagcttcctttgagtatctctttgctcccatcatattaggagaaactacatggaaaaactgatccattatttttaaaactggaaaattagaaaattactcttcaatgcttttatgaatatataactaatgagaaataa

SEQ ID NO: 589697 - DNA, 582 bp, Homo sapiens
gaggaatgaaagttattaaaaagaaacaaagttccatttgccttcaattcctggcctgctctcaaacactggattaaattaattgttatccccatattaaaatttcagtttttagggtgcccactagtgtgagtagtgaataaaaatatctagtagcaaaggaatagtctaattttcttaaataggaatacactgggagatgaarggtaggcacagacgggctgtgtaatttcagcctgcctgagtcacaatttccagtgaaattctgtgtgcctctcaattaggtttaaatgttagaggtccatttatagagtacagtatatctgcttttgatatcccaatcatatgtcatggaaaaagtaatagggacttggggaagtaaagaaaagaaaagaaaaagacaacattcttaagaaaaaaagttctgaaacatgacgtgagttgaagcttcctttgagtatctctttgctcccatcatattaggagaaactacatggaaaaactgatccattatttttaaaactggaaaattagaaaattactcttcaatgcttttatgaatatataactaatgagaaataa

SEQ ID NO: 589698 - DNA, 582 bp, Homo sapiens
gaggaatgaaagttattaaaaagaaacaaagttccatttgccttcaattcctggcctgctctcaaacactggattaaattaattgttatccccatattaaaatttcagtttttagggtgcccactagtgtgagtagtgaataaaaatatctagtagcaaaggaatagtctaattttcttaaataggaatacactgggagatgaagggtaggcacagacgggctgtgtaatttcagcctgcctgagtcacaatttccagtgaaattctgtgtgcctctcaattaggtttaaatgttagaggtccatttatagagtacagtatatctgcttttgatatcccaatcatatgtcatggaaaaagtaatagggacttggggaagwaaagaaaagaaaagaaaaagacaacattcttaagaaaaaaagttctgaaacatgacgtgagttgaagcttcctttgagtatctctttgctcccatcatattaggagaaactacatggaaaaactgatccattatttttaaaactggaaaattagaaaattactcttcaatgcttttatgaatatataactaatgagaaataa

SEQ ID NO: 589699 - DNA, 536 bp, Homo sapiens
taatcaaattcatttttttcaatattatgagtgccctgttatttttactacaatttatttttcttttttctacatcaaagtaaaatgggcaaatagttcaataggtttgtattatttttatggaatagcaatgaagtgcctacctctcccaaccccagttttctttcctggaagcaactactttattctcttttagctattgcctttattacttacctctgttcctttaaataatatgcttagtgttagttttggttttttaattttaagcaatacataytgactttctactatgaaaaattaacatttaacatttgtcactccacctctttctcattcattttttgtttccctagcctctcaatataattatatcataattttggttaaataggtgataagtattcacattattaaaaatagcatatatatgtataatgctatttaccgatgagctatataggataaaatgattattcttcaccatttatatagcattttattttcctagaattataaatttttctcattttttt

SEQ ID NO: 589700 - DNA, 464 bp, Homo sapiens
gatagtgatcgatatctacctaaaacattcacattagtttttaatgctatctttcctgaggcatttatctttctcccttgtatgctatttacatatttgtcagtttcttattctgctgtgaaacmtttgagcacaggatctctgcttgatatagttttgtactcttacatttcaatcttacatgatatattgtcactatttaataattaaagaataaatcatggcctcaaaaatggacatgctccagatggctttgatcagaacagagcacagtagaaccaccccttctttttgtccttgacactagacttctattaatgcagcctaaaattgtctttactattttagcagctaagtcatgctgcaagttcattctgaccttgcagtcaactctaactgctaagccctttcacatgagttactgttaatcctgtacgtgtgaggttaatctttttttttaacag

SEQ ID NO: 589701 - DNA, 464 bp, Homo sapiens
gatagtgatcgatatctacctaaaacattcacattagtttttaatgctatctttcctgaggcatttatctttctcccttgtatgctatttacatatttgtcagtttcttattctgctgtgaaacctttgagcacaggatctctgcttgatatagttttgtactcttacatttcratcttacatgatatattgtcactatttaataattaaagaataaatcatggcctcaaaaatggacatgctccagatggctttgatcagaacagagcacagtagaaccaccccttctttttgtccttgacactagacttctattaatgcagcctaaaattgtctttactattttagcagctaagtcatgctgcaagttcattctgaccttgcagtcaactctaactgctaagccctttcacatgagttactgttaatcctgtacgtgtgaggttaatctttttttttaacag

SEQ ID NO: 589702 - DNA, 546 bp, Homo sapiens
tgtaatgctctggaaagcacaaaaattataggtgaagcaattctgaatcgaaagggaagttgtgaaatgtatgtaaatagttaaaggaacgttcygggtttttgttaatacattgatatgcaagtactgcaggatttaacattaagtatattagatatgtgtctatgcaccaaaagctggttcatagtccaggaaattgcatttctttcttgagcaaaatttttgacacttggtagaataggttaacaatatgttccaaaagtagttgatattcaccatagaaatttagctgtggagcttcaacattatgacatttctaagctaatagaagataaagtattactctttagtaaatattgccagcacagcacatgagtgttcagaagtcaattaaaagtaaaatgcaacctatttaaggattccaacaccaccctcaaaaagaaaaaaaaaatagaggttgcataatatattattttcatctaaaaagttgtatacagtttttcttaaggtaatcagaatttttttaatggagaaggcaatatataa

SEQ ID NO: 589703 - DNA, 528 bp, Homo sapiens
tgatctgaggctttttgttctttcctagaactaaatctgctttgttagtctatttaaaagtagcttcaatcatattgatatttattttaaaacatatatttacaattgtatgcatacmaaattatatgagtaaaaaagtttttaaattaattttctgtgcagaaggccaaatgtggttaaatctcaagaagaaaccagtgatcctatgttcactgttggttaggaaacatagtaagacatgacagagggttgactttatacaaataaatcaggtttattttattagaattggtataattgacatactttatcttttgtacattttgaggtgtatcttttatacattttgataaacatacattgttgtgtagccaccgctacaatctccagttcatttccactagctcttaaagtacactcatatcccttgtagtccctcctagctccttagaccatgccaaaaatcgacctatagtctaccattacagttactgccttttccagaatctcttaaaaattaagtcatat

SEQ ID NO: 589704 - DNA, 623 bp, Homo sapiens
gtctcatatattattcaaataaacactttacttcaaagaacacatgaacatgtgggaaaacatttcttgatatctttgcatttctgtagaaattttaaattattgacagaatgaaatatgattttgagcatggtgcatagaggatatgtataatwgtgactttggtatgtgtgaattgaaattcaaatttgcaagaaaatgccttgatttgtggttatctttgcttattattaatacatgcaaatcattttcatataacaatacattataccgacagtaaaaatatgctttagtccatatgtataaaagagaacaaataaatatgttatctatgaaaataatggtatgtaataaaacgttgtgcactcatagatgcaaatggaaacaaaatcctaaagaattatagtgtcctatatcagtatttttttgttttaaataaaatctacacaaatgtgaaataagaaaaaaatgttgtcataaatttatggtgggttgtgtgagatatatttcttgctgttggagtggaagctaacagataagccatgagaggaggctagaatgatccatttggtaatttttctataaaaataactctataaggaaacttcttggagaaataaatg

SEQ ID NO: 589705 - DNA, 585 bp, Homo sapiens
atgcaaaaccaggtgtacgatgtcaagatggattctttgagagccagggtagatcatatgactgcctttctgtaaaattggatgcctagtacaaatgctctttgcctctaattcagtattccatttaataaaaacaatacagtggctggaaaggagcatcagaaacatgtgtcctgatctcttctttctgtcatgatatccattaactttttggtacaatgatgtcacatcatatgcatgtttaattaagatgaatcttaaaaatgagtttgccttttacagttgaatagaaggaagatgtggtatctagcctccaaggtagtctcccaaagatccctacctcctcatattctttcctttgtgtagtcccttcccacactgaatcagggctggtcttatgtgaccaatagaacacagcagaagtagtactacaaggctgtcttagtctattttctgtttctataacagaatatctgagactggttaatttataaagaaaagagatttattttgctgacaattctagaggctaggaagtccaagaagcatagcrctggcatttatttggcttctggtggtggccat

SEQ ID NO: 589706 - DNA, 530 bp, Homo sapiens
ttagagagagagagaggcagagagagagagatcctgttggtttggtttctctggagaacttctaatatattcttcctttttcaagaaaggcttctatcctacatcatgtagtcttttatctcccaacaacagacagcttcccacctaagtcttatacaagcagcttctgtttctctcccagttgtctttagatctatttcatctcacctatttcacataacagcatttgaagtcaacatcattagattatagataatgaagctgaggctcasaaaagatcagtaacttccccaggcttctacaattagttatactgccagatgtgaatccgtaataatgaagtgtcagacccatactctttctaattactgtcgaactattcatttttgtaagtatgcaatgtgtggcacaatgcctgacacctattagacactttatatgtgtaccttttggctttcaattacaataaaaattgtactgttaattccttcactggaagatgtcattctaaaaacttgtctttatagtct

SEQ ID NO: 589707 - DNA, 585 bp, Homo sapiens
accagctctgaaaagagtcctaagtccaggccatttacagagattgtttcaaaatatgaaaaagataaaaaacaaaagagaaagaaataatatattcacattttttttaaattatgtgattataatattaatagcaaaatttgatacagatcataaagatggcccaaaacagagaaacttagctggctttacttatgtgtatcagtataaaaattkttattaaaatattaggaaagacaatctagcagcacaaggaacaatacatactgactatgtaggttttttcaaggacggttcagtattaggatctgttagtatattctaccatatttgtataagtaaagagaaaaaacatacgattctctctgtagacaatgaaatggcatttgacaaaatttggcaaccattcttgatatgcataaatgaataaataacaaaaatattccatacaaatgtctaaatgtatactactctaacatgattaaagatgttcttttcaacccacatgccagcctcaagcttatagagaaacaccaagtcagaatgacgtgaggacatttactataaccactagcacattacatc

SEQ ID NO: 589708 - DNA, 520 bp, Homo sapiens
ggaattgcatggaatttgtagattgcttttggcaggatggtcattttcacaatattaattctacccatccatgagcataagatgtgttttcatttgtttgtgtcatctatgatttctttcagcagtgttgtgtagttttccttgtagaggcctttcacctctttggttaggtatattcctaagtatttcacttttttttgcagctattataaaaggggttgggttcttgatttgattctcatgttgatttcttttggtgtatagcagagcttctgatttgtttacattaattttgtatcctcaaactttgctgaatttattygccagttctcggagctttgtggatgagtctttaggattttctaggtatacaatcatatcatcagcaaacagtgacagtttgtcttcctctttatcaattgggatggacttgattttttttcacttgtctgattgctctggctaggacttccagtactatgttgaatagaagtggtgaaagtgggcatccttgtcttgt

SEQ ID NO: 589709 - DNA, 386 bp, Homo sapiens
gaaggtttgacatgggtaccrtcaggcctcctggggataaagccacattcctgcctcccttttgaaaacaaaacaaagcaagcaaacaaagagtgattttcctcttcttttctaattgcaaagtgaccaaagttattttaggaaatttagaaatcatagagaaacacacacacatcacaagaagaaaaaaagataaaagaagaaaagcaacactcataacccccccaaatcattaggatcataagtataacctttccgtactttttctgtgcatacaagcatagaaattttttatatatataagatatatgtaatatacacacatatatattacatatgagatttataacctaggaaaatatatgctgtgaacatgtgagcatgtt

SEQ ID NO: 589710 - DNA, 425 bp, Homo sapiens
ctcgctcttgttccccaggttggagtgcggtggtgcaatctcagctcactgcaacttccacctcccgggttcaagtgattctcctgcctcagcccccctgagtagatgagattacaggcacctgccaccacacccagctaatttttgtatttttagtagtgacggggtttcaccatgttggccaggctggtctagaacacctgacctcaggtgatccacccacctcggcctcacgaagtcctgggattacaggcgtgagccaccgtgcccagccattaaagctattattttttaaaaagacattcaytggatgtcatttaaaagtctttttcctttttcagagactcagttctttatatataaagaaagttcaacctgaccatcctaattccttgctttgagccaagtggtagcttattgcaagt

SEQ ID NO: 589711 - DNA, 425 bp, Homo sapiens
ctcgctcttgttccccaggttggagtgcggtggtgcaatctcagctcactgcaacttccacctcccgggttcaagtgattctcctgcctcagcccccctgagtagatgagattacaggcacctgccaccacacccagctaatttttgtatttttagtagtgacggggtttcaccatgttggccaggctggtctagaacacctgacctcaggtgatccacccacctcggcctcacgaagtcctgggattacaggcgtgagccaccgtgcccagccattaaagctattattttttaaaaagacattcactggrtgtcatttaaaagtctttttcctttttcagagactcagttctttatatataaagaaagttcaacctgaccatcctaattccttgctttgagccaagtggtagcttattgcaagt

SEQ ID NO: 589712 - DNA, 608 bp, Homo sapiens
ccctgcccaggtgtttccctcagcctctccmtttgcagtcagtttttcttgtcttctccagaggtctcaggacccatagcttcactaagagcccacaggagccttcaaaacataagacccgaaataaatctgaagcctccaggttatatagctccatacttaatggaatgggatttggcttcaggctgacctgggttgaattctagttctgttaggcaagttatttgacctctctaatacctaccatttgggattgtggtgaggattaaatgaggtaatacagcttttctaaacatatcttctgcagtaggtattatataagaagtttccctgttctccttccctatcaggtttgagaaatactgggtgaaacgggtacacaggtaacagcagggcttctcaaatcttgagtatatttgtcttggtctgctttgtgctgctgtaacagaagaccacagactgggtgattcataaagaaaataaatttatttattattgttctggaggctgggaagttcaaggtcaagggaccacacctggtgagggccttcttgctgtgtcattccatggtggaaggtaaaagggcaagagagcacgagagagcagga

SEQ ID NO: 589713 - DNA, 645 bp, Homo sapiens
aaaaggcctttttattttttaatttttatcatatatacttaagatgtacatgatgttttgatatacatagtgaaatagttattatagtcaagcaaattagcatagccattatttcacaagttctctgtgtgtgtgtgtgtgtgtgtgtgtgtgtgtgtgtgtgtaagagcacctaaaatctcgtttgttagcaagtttccagtatacagtayaatattataattagagtcctcctgttgctcattggatctctagataagaaggctttttttttttttttttagcaagcaatgggtttctggggaaaagaagaaagctttttcaaatgtgactcaaaatctagaaatcatgcaacaaagaactgctaaacttgactgaaaattgggagatgttggtcaaagggtacgaatgtttgcttatagagtgactacattccagacatctaatgtacagcacagtgactacagttaatactgtatcgtatacttcaaatttgctgagagagtagatcttcacacaaggagagtgctctcatcacactcataaaaaaagtaactatgtgaggtgataaatatgttagttagcttgattgtgggagtcattacacaggcatacttatgtcaaatcaccacatggcacacctta

SEQ ID NO: 589714 - DNA, 645 bp, Homo sapiens
aaaaggcctttttattttttaatttttatcatatatacttaagatgtacatgatgttttgatatacatagtgaaatagttattatagtcaagcaaattagcatagccattatttcacaagttctctgtgtgtgtgtgtgtgtgtgtgtgtgtgtgtgtgtgtgtaagagcacctaaaatctcgtttgttagcaagtttccagtatacagtataatattataattagagtcctcctgttgctcattggatctctagataagwaggctttttttttttttttttagcaagcaatgggtttctggggaaaagaagaaagctttttcaaatgtgactcaaaatctagaaatcatgcaacaaagaactgctaaacttgactgaaaattgggagatgttggtcaaagggtacgaatgtttgcttatagagtgactacattccagacatctaatgtacagcacagtgactacagttaatactgtatcgtatacttcaaatttgctgagagagtagatcttcacacaaggagagtgctctcatcacactcataaaaaaagtaactatgtgaggtgataaatatgttagttagcttgattgtgggagtcattacacaggcatacttatgtcaaatcaccacatggcacacctta

SEQ ID NO: 589715 - DNA, 511 bp, Homo sapiens
agtgtgtttgtacatttatctactggtgaacatttgcattgtttccagcttttggctattaaaaataaagttgctatgaatatttcagcacaagtctttgtggggatgtatgctttcttttctcttgtgtaaatactggagtggaataactgaatcatatattaagtgtacatttaactttttaagaaactgccgaactgtcttccaaagtgatgatactggccgggcgcagtggtttatgcctgtaatyccagcattttgggaggccaacttgggtggatcacctgaagtcagcagttcgagaccagcctggccaacatggtgaaaccccgtctctactaaaaatacaaaaatcagcccggcgtggtggcaggcgcctgtaatcccagctacttgggaggctgagacaggagaatcacttgaacccaggaggtggaggttgcagtgagccgagattgtgccaccgcactccagcctggacaacatagtgactccatctcaaaacaaaaca

SEQ ID NO: 589716 - DNA, 591 bp, Homo sapiens
tagaatttaagtttttcaaagcttctgcacagcaaaggagacaattaaaacatgaaaaggcaacttacagaatgggataaaatatttccaaaccacgtatctgacaaggggttaatatccaaaatatgtaagaactcatacaatttaatagaaaaaaaaactaaatagtccaattaaaaagtgggcaaaggacataaatagacattttctcaaaaatgacatacaaacagtcatcaattacataaaaaaagctctcaacatcattaatcatcatagaaatgcaaatcaaaatgaaatatcacttcacacctgtgatatacatatatatatgtatatatatacacatatgtatayacttggattttattggaaatgtgtgtatatatatatatatataagtatatatgtgtatgtgtgtatatatatgcataatatatatacacatacatatataagtatatatgtgtatatatacacatatatacacacatacttatatatacatatataatatatatacacatacatatatacacacatatatacatatatacacatacacatatatatacacacatatacacaaacaca

SEQ ID NO: 589717 - DNA, 591 bp, Homo sapiens
tagaatttaagtttttcaaagcttctgcacagcaaaggagacaattaaaacatgaaaaggcaacttacagaatgggataaaatatttccaaaccacgtatctgacaaggggttaatatccaaaatatgtaagaactcatacaatttaatagaaaaaaaaactaaatagtccaattaaaaagtgggcaaaggacataaatagacattttctcaaaaatgacatacaaacagtcatcaattacataaaaaaagctctcaacatcattaatcatcatagaaatgcaaatcaaaatgaaatatcacttcacacctgtgatatacatatatatatgtatatatatacacatatgtatacacttggattttattggaaatgtgtgtayatatatatatatataagtatatatgtgtatgtgtgtatatatatgcataatatatatacacatacatatataagtatatatgtgtatatatacacatatatacacacatacttatatatacatatataatatatatacacatacatatatacacacatatatacatatatacacatacacatatatatacacacatatacacaaacaca

SEQ ID NO: 589718 - DNA, 591 bp, Homo sapiens
tagaatttaagtttttcaaagcttctgcacagcaaaggagacaattaaaacatgaaaaggcaacttacagaatgggataaaatatttccaaaccacgtatctgacaaggggttaatatccaaaatatgtaagaactcatacaatttaatagaaaaaaaaactaaatagtccaattaaaaagtgggcaaaggacataaatagacattttctcaaaaatgacatacaaacagtcatcaattacataaaaaaagctctcaacatcattaatcatcatagaaatgcaaatcaaaatgaaatatcacttcacacctgtgatatacatatatatatgtatatatatacacatatgtatacacttggattttattggaaatgtgtgtatatatatatatatataagtatatatgtgtatgtgtgtatatatatgcataatatatatacacatacatatataagtatatatgtgtatatatacacatatatacacacatacttatatatacatatataatatatatacacatacatatatacacacatatatayatatatacacatacacatatatatacacacatatacacaaacaca

SEQ ID NO: 589719 - DNA, 591 bp, Homo sapiens
tagaatttaagtttttcaaagcttctgcacagcaaaggagacaattaaaacatgaaaaggcaacttacagaatgggataaaatatttccaaaccacgtatctgacaaggggttaatatccaaaatatgtaagaactcatacaatttaatagaaaaaaaaactaaatagtccaattaaaaagtgggcaaaggacataaatagacattttctcaaaaatgacatacaaacagtcatcaattacataaaaaaagctctcaacatcattaatcatcatagaaatgcaaatcaaaatgaaatatcacttcacacctgtgatatacatatatatatgtatatatatacacatatgtatacacttggattttattggaaatgtgtgtatatatatatatatataagtatatatgtgtatgtgtgtatatatatgcataatatatatacacatacatatataagtatatatgtgtatatatacacatatatacacacatacttatatatacatatataatatatatacacatacatatatacacacatatatacayatatacacatacacatatatatacacacatatacacaaacaca

SEQ ID NO: 589720 - DNA, 615 bp, Homo sapiens
aaatgagtaattaggagctaaaatcctgtcccatctataaaatattaaaatctgattttagcttagagcttgctagatgtaatagatatacaagaatagtcatggatttattaatgtagttggttgtattagtaatgacctcactaattttaaataacttgggagaaggccagcccagttatgggatacttttttaaagtacactttaattgctttcaaacatattcagtaactaaaataattctgaaaagaattgcctaggagaatctattatgtgatgcagtgacaaaaatgatttataattagtacatcasaagttagtatataaaatatcaggttaattatcatcatctatggtggaacaaaaaaggtcttgctgtcataccagaaaagctggcttctacatatccgtgcttatgaaataggagtgaaaatgcctaaaacatggcattactgtgtggcttaaaattaaatgagtgacagtgaagttacaaaccctgtaaggcagagtttatatgtagctcatgatggtatcccacaagagtgcctgacactgggcaatctctgcataaatacataaatagatgagtaagtgtgcaagtacataatacaaag

SEQ ID NO: 589721 - DNA, 593 bp, Homo sapiens
aaaaggaaatgaaaaagcaattcacagaagaactataaatgtccaataagcctagaagaattcatgagcctcagaaatgcaattaaaatttcactgggatttcattttatttattaaattggctaggatcataaacaayagtaaaactctgtgctaagcagcacaggaaaaaatggttgctttttttttttttttttttcttaaagacataaaaaatcagattcccatttagaattcttaatttttttttttttttgaaacagggtcttcctctgtcaccaaggctggagtgcagtggtacaatcatagtttactgtagctttgacctccctggctcaactgattctcccacatcagcctcctgcgtagctgggactacaggtgtgtgccactatgcccagctaatttttattttggagagatgcggtctccccatgttgccagggctgttctcaaactacttggcttaggggatcctcccacactggcctcctaaagtgctggtagtacaggaatgagccaccttgtccagcctcttaaactttttgaagttagccagattgtggcagtattcaaagagttgaatgttcatt

SEQ ID NO: 589722 - DNA, 576 bp, Homo sapiens
ggggtaggggtaagtggggtgatgggtttggtgtaggcttctcagtccctatagcccactgtaaagactttggctttcattttgagtgagatgggaaacaccaaaggatttttagctgaggagtggatgtgacctgagtcatcggttgagaatgatgacttcccacttccttaaccctgccagccaatcatcatgggctatcagttctatttccccaccccccactgtctctcagatctgtcccaccttcttttcccctcatcattgctgctaccacacactagtccaggaaaccataatttcttgcttgagttattttaatagcttcttagtagggcttcctgattcttatttgctgacttctaattcatttcccacaatgtttcyagagtaaccactctgaaaatttgatagatttacacttctggttaaagccataagtagccttcttttccctctgagaatagattgcaaaatcctcaacatgactttccatggtctattccccaatcttcagcttcacatgttccctgtcctcctatttcacattatacgttctggccatcctgaactttt

SEQ ID NO: 589723 - DNA, 592 bp, Homo sapiens
gattaatttagggctctttgggtcatgaggactctgctctcatgaatggcttaatccactaatggattaatggattaatgggttatcatgggagtaagactgctgactttatgcaaagataaagagagacttgagctaacatgctcaccgtcctcaccatgtgataccctgagcctctttgggactctttagagagtccccaccatcaaaaaggctctcaccaaatacagcccctcaaccttggacttcctagtctccataactgtgtgaaataaatttcttttctttgtaaattgcccagtttcaggtattctattatgtgcaacaaaatacagactaagacgcatgctgtttgtgttcacattcacaagacacagctgaaacgcagccagtagcaaggattaaaacaggaatttaaaagaattaagaaaatgtgtaatagattgcacatcttaaactatcaagtttgttaaatgttgagatagttatttttttcagtttgatgttgccttgttgccatatggtctatagctggcatttagtgatagcaggcagcccatttcttatcwttattgtgaacagcaggatgtaa

SEQ ID NO: 589724 - DNA, 595 bp, Homo sapiens
agccaacaaacatatgcaaaaatgctcagcatcactaatgatcagggaaatgcaaattaaacccacaatgcaataccatcttatgcctgcaagaatggctataatcgaaaaataaaaaaaaacagtagatgttggcatggatgcggtgatcaggaaacacttctacactgcgtgggaatgtaaactagtacagccactagggaaaacagtgtggagattccttaaagaactaaaagtagaactaccatttgatacagcaatcccactaccgggtatctacccagaggaaaagaagtcattttatgaaaagaatacttgcacacrcatgtttatagcagcacaattcacaactgcaaaatcatggaaccaacccaaatgcccatccatcaatgagtggataaagaaaccattatatatatatatatatatatattcgtgatatatatattttcatgatagatatatatttttgtgatatatatgtatatatatacgatggaatactactcggtcataaaaaggaatgaattaacagcatttgcagtgacctggatgagactggagactattattctaagtgaagtaactcaggaat

SEQ ID NO: 589725 - DNA, 578 bp, Homo sapiens
gatttaaatagtttaaatatgtgtgyatatgtgtagaatttttattgaagaaatctattaggaaaatgtgttggcatgaaattatcctcctagtttcctaggcatattgtttattactggtgggaaatagcacgatgttgtgtaccatctcacttttttcacttactctagatctgtgtgtgcttttgatcattcatgacttcaaagcccctcagatgttcatgatttcaggccttaactttagccaacgtgtttccccagctcaagatatattcattcaattgtctataggaggtcaccaccagaatttctgcaggcagctctcttttgtcacatccaaaactgaatctattgttttctcagaagccagctccttctttccttctccaagcaaacatttatgaatgtctagtgtgttcagggctttgtcttaagaactccaaccctcaaagggtacattgtagtgaggagacagataaagcaataactatagtgttgtggctagtacagtgctagttataagaggcaagtgtgtgatcttggacattttgcatgaactctccgtagtttagtttctt

SEQ ID NO: 589726 - DNA, 596 bp, Homo sapiens
attctttactcctttctaaatattttcttctgagctctcttcctgttcactaatattgccttcatccaagtctaatctactactgaaaccaggcactgagttcttaatttccattacagtttttgattatagggcctccattttattctttttcacattgactatgcaatgttttaataattaattcttgctacaatttgttttatgctgttataagtacagttattgtattagtccattttcacactactgtaaagaactgcccaagactaggtaatttataaagaaaagaggtttaattgactcatagttccatatgcctggggaggcctcagaaaacttacagccatggcagaagaggaagcaagcacgtcttacatggtggcaggcaagagagcaagttcaggaagaaggaactgtcaaacacttctaaaactatcagctgtcgtgagaaayctctcactatcatgagaacagcatgagggaaccacccccatgatccaaccacctcccactaggtccctccctcaacatgtggggattacagggtttataatttgagatgagatttgggttgggggggcacagagccaaac

SEQ ID NO: 589727 - DNA, 610 bp, Homo sapiens
gcaagtaatctctttcatgtaaacaatcttaatgttaattattaaaaagagagatactggacaatgaaaatgacacaaacatgcacatttctcagagtcattgagatgaaatatgagaaagagtaacttttatagggcacgtgacaagctttgatcgaatttcaaaggaaggctgtacatactgtrttgttttgtcattcaggtcacaaaattcttaaatctaataaatagaattcatttggttaagaaatttatattcaataataattgaaggagttcttcaattctggacttgtaaagcaaaaggatttgttaagaataattaaattgacactctgtaatgagaattgtatgctgttccgtaattatggtcagagtataaatggtcaacggcatatttgataataacagctataatttaattcatccttattattgtgggaattatactaagtgataatgatcttccccacaatcatttgataccacacctgtcccccaactcttaatagatggtcttgccaccagattccacatggagaaaatagaaatcaccttgatttcccaccactgaccctgcttatttttgtgaatctgtattcatcttttc

SEQ ID NO: 589728 - DNA, 565 bp, Homo sapiens
ttttattttatttgagatagagtctcactctgttgcccaggctggatcagggctcactgcagccttgacctcctgggcttaagcaatcctcctgcctcagtccctggagcagctgcatccacaggtgcatgccaccacacccgactaattgtgctttcccattgatgcctcacaacaacctgagaggtaggtttcatgtcctccatttcacagaagaagaaaccaaagctcaggttgggagatacccaaggacaattaggtggtaaacagaagaatcaagatctgaacctggackgtcttcatcacctgaagctgcctgagaaggagttcagggtctctaaagtagaagccaggatgactaatagctccatataattcatctgggttcataagaaagtgaggaagtctgtctggtaagagcttaagaattttgagagaaattttactagaaatatttatctcgtggtgattgggtctaggtagtcgggtagttactatcattgctgggatctacctctccctaatcatttagtgaacatttattaagcatctactatgtgtcttc

SEQ ID NO: 589729 - DNA, 282 bp, Homo sapiens
agggtcagaatcatcaatatcmctgtctttctccttcacatcttgtcccactggaaggttttcaggggcaataatacacatggagctgtcacctcctgtgataacaatgccttcttctggaatagctcctgatgaacctgcctgaggctgttttacagttaactttttttttgataagtagaaggagtacactctaaagtaatcataaaaaagcatagtatactaaaagttaggcaataggaatcttttagttccattataatcttatgggaccaccttcat

SEQ ID NO: 589730 - DNA, 623 bp, Homo sapiens
tgtttacttactgggatattgatgaagtaaatgtcctcttccctgagtaggtgtatgaatatgttatctgcatttatcygcttatctgtgtatgtgtaaacatcttttattttggcctttttcctgctttttagaatttggagttccagttcagcctccaagacctactgacccaaatttaatccctagtgccccatcaaaacctgaagtgacagatgtcagcagaaatacagtcacattatcgtggcaaccaaatttgaattcaggagcaactccaacatcttatattatagaagccttcaggtagagtgaaggagatgcttcctagttgttcttttttgattctccattaaatacgcatgttctaacctgtgtgtctatccttagccatgcatctggtagcagctggcagaccgtagcagagaatgtgaaaacagaaacatctgccattaaaggactcaaacctaatgcaatttaccttttccttgtgagggcagctaatgcatatggaattagtgatccaagccaaatatcagatccagtgaaaacacaaggtaaatattgatttacttaaacctgtgacacctacttatccttagatgttataattgcactgacaaatc

SEQ ID NO: 589731 - DNA, 604 bp, Homo sapiens
agatatttgagtacttaaaacctactttaaaatttctatcggtaatgccatgctctatcagcacaatattggcttcctcattagcaaattcactctaagtaaattcattgggggtaatctagtgatacagctggtaacctgtgacattaagttaaatgaccaakgtatctctagaaaattagttcaaaatgatgcatcattttgccaaaaggtcttaggaattagctaagatctctctttagaaatatgaatccccttgaaaccactcccacaaatagccaacattttaagtaactgctaagccacctggttttctccaagaaacatcatgaaactcacaagttagtaaagttttggaaagcctacaaaatccctatttttctgacaaagtttacatattttgtttcagtgactttatttccccttttctgagaattaaaaagtccccacatcagatttatagttcaagctacagacttatttgcaaaagaaggacttgtaagtagatgccaaagaacacttcttcatcactttagtctggacttggcacagtgtttcagatggtattcatttggaataaagagatcgatgatataccttgtcc

SEQ ID NO: 589732 - DNA, 601 bp, Homo sapiens
gaattctgctaaaacctgaataagcctaaaagcagattctcccccatagctttcagcttgcagctctgcggcatccacagcagataaacaagctgagcctaacaaatgtccagcctaaagaattgtgagatcataagtgttgttgttttaggccactaaatttatggccatttgtgatggcagctagtgataactaacaagtcctaaacagctgcctctgagctcttatgtttggcacacattgttaatgcttctcagaaaccacaattcatcccagtgggaaaaggaataggtaggaatttstctctgatggacccaggccccttctgagaggaaggccaagtctgtacctactccgggcttctgtcctttgagtcgttactgcgccatgttttgtaagacttacattatctgccttgacatatgtaagtcaaccctgtgtattactgcacaaactaataagagtgagtcattctctacacattcacacattcatttagttttccaggaagtctcaaatttaaaaaaaagaaaaaaaggcctcgtgatatttttggccaggtggggtggctcatggctgtaatcccagcacttcgggagg

SEQ ID NO: 589733 - DNA, 628 bp, Homo sapiens
agtgaatttgcactgtagttgaggaacactgagtttaggatccccactgctattaaagcaagcactaagcaaacacattctttgtctagaagaagaaactacctcatctctcaaatgtatccactgcataaataactctgagaagtggctcaggtaaaaggatgttcagagatttgcagttttgacacacccagcaagacatgtggaagtactgtatctccaaatggtcatatgatttggttattgatctcagctttcattttcttcttacagaagttcctcagggacgatccagtggttcgcctataccaaatgtattgaaacagaatgtacaagctgacaaaaaaatgaataaatgcataagagatatacatggataaactttgtttctctcttattttcttatgataaattttgaagtcagtaacttagccktatttaaaactagtgataaatcacgtatatttgggaattgtaaaatttgtcatttatgagatctagtgaggtgaactacttctttcaaatgctatatactaactggattctatgggaggatgaatgccttaatcagaacaatatattcaattatttaggtaacctagcatataactttacagtttttctttaa

SEQ ID NO: 589734 - DNA, 489 bp, Homo sapiens
ggcacaactgtttgtctgtttttgtttgtatgcttgtggcttttctttttctctctttcctcccccgtgatgtggatttcctccttggtgcacgggtgaggcaccctcgaagacctagcaggatcatggtagaatctaagaaaaaacaaccgtgaattsaatggcttaagctagctcttctctattatctcaaaaaaggtatgttgtttctaccttgtattcatcttcatgtttcctctaatctcatcagagaggtaagaccacaggagtcaagaataaggaaatatgtgccacattttctttatccagtctatcattgatggatatttgggttggttccaagtctttgctgttgtgaatagtaccccaataaacacatatgtgcatgtgtctttatagaatgatatataatcctttgggcatatagccagtaatgggattaccaggtcaaatggtatttctagttctagatccttgaggaatccccac

SEQ ID NO: 589735 - DNA, 619 bp, Homo sapiens
tgttctgcagcctctgctggtgatacccaggtaaatagggtctggagtggacctcccccaaactgcaacagacctgcagaagaggagcctgactgttagaagaaaaactaacaaacaaagcaataacatcaacatcaacaaaaggaaccctcacacagaaaccccattcaaaggttaactcaaagatcaaaagtagataaatctgtgaagatgagggaaatccagctcaaacaggatgaaaattccaaaaaccagaatgacccctcttctccaaatgatcatactcctctccagcaagggcacaaaactggacagagaatgagtttgacaaattgacagaaataggcttcagaagatgggtaataacaaactcctctgagctaaaggagcatgttctaacccaatgcaaggaagctaagaaccttgacaaaaggttataggaactgctaactagaaaaaccagtttagagaagaacgtaaatgacctgatgragctggaaaacacagcgtgagaacttcatgaagcatatacaagtatcaacagccaaatcgatcaagcagaagaaaagatatcagagactaaagatcaacttactaaaatgaggtgtgaagacaagat

SEQ ID NO: 589736 - DNA, 523 bp, Homo sapiens
ttattatgtttattcctgatattacaagaaatactattaaaatcactaagcatccatgtaactaaagtagtaagaacataactactcttgtctactatatttgcattcaattattaatagcctaccttgcttttagaatataaacattttgggagcgaagactataaaaagcaggctaggtcaatgtcaggtgacagtatgattaggtattgattttagccattgtgccccattaagtaggaacttcttaacaaaaagttaasacgatgcttagaagaaacaaagctaaaatttccagtaggtttagaagaagatatgaatgagcttccttaaaagttgtaaaaactaaaccttttagacaagaagctgtactggttatgagagagaatttgtgtagtattagcgcagtctgagtaagagtggcaaagcccagcaaccacattcatgtggttacgcacttgttcttatctatggcgacatcactcctagcctatttttatccagaattatgacctgatcctta

SEQ ID NO: 589737 - DNA, 607 bp, Homo sapiens
tcagggactgaaaacttcctggaaagctactggagttcagatccagccaaatggggaaatgttggcaaacaactgagaaactcagttgggactctaaaaattctcttaggagaggggcagtatcccaggagtgaggcatatgttctaagaggaaaataaatataattaccataacacagccttaaaactaggtcttgagagcagcaagatgatctgcaagtaattacaaattctgcccagaaaaaaaattcaaaattcttgagtagttctatatcatattatccataaattcagcatactttaaaaaaaataccaaatatacaaaaaagcaagtaaaacagactgataagaaataaatcagttattaaaaacaaactcatagataatccagatattggagttaacagatagggcatcataacatctatgatgaatataaaggaaagaaagaaaaaatgaaagacamaacaggttgtgtcagatttctttctggaagctttaaaatgctcactttattttcatagattctaatttcctaaattatgtttgatgtttcaagcaaaaatcatagcattgtctagtgttattctaaatggatgtaagacaa

SEQ ID NO: 589738 - DNA, 657 bp, Homo sapiens
gcttttatttattcatttaagtgcgcagtgaggtcagttcctctgaaggcactctcacacatgcacaatttctttgaacatgtgaaacatgtatgatccaaacttcttccttccagttatatgtattgatgcatagagaaaatttttctccaaatttatgatttagttgcagtttaaaaatcatttcctcagctctcatttagaagtgtataactactcactgaactctagaatatcctctccactagaatcagcaatttggttagtaaaaaatatattctcacacgtgtcatctatgtactccattttaatcgcccttctcaaagaatctttgtgcctcmattccagtatccaatgtttaaaatatgagtgtttccttttggaaaaaaaaaatgtttatttgtcaattttacacagcctaatacaattattcctctgtttcaaacataaggtccaattaacaatattaaagggcatgcaatataaatattttgaggataataatgtgttagcattcattgaatactgtcccagacatcatgcaaactgcttaacacaggagttctaatttaattcttacaacagtcatataaagaagcaacaattaataccttcattttgcagatgttgacactaaggtttagagatgctgtgtaa

SEQ ID NO: 589739 - DNA, 546 bp, Homo sapiens
ctccgcctcctgggttcgagcgattcttgtgtttcagcctccagagtagctgggattacaagtatgcaccacaacatctggttaatttttgtattttttggtagagatgggggggtttcaccatattgaccaggctggtctcgaactcctgacctcaagtgatccacccacttcagcctcccaaagtcctgtgataacaggcataagccactgcgcctggcccctgacaatattttcaattatatgaaatacaaaatgaaaatttagacatagccagaaatagcacagcaattaagaaaagaaaaaaaaatactacaaccaactattcactaatacgtgtgaaaacacagatgagctatctatctgaaaaaatatataaattaccgtggctgattattctttctataaacattcacaactgcttccagaagcttgccactcctccatggaagcaaagtctatttccactcctttgaacctgggcaggtatgtgcctgatctgaagagtagaatgtggctatasatagctatgggaattcccatgct

SEQ ID NO: 589740 - DNA, 599 bp, Homo sapiens
agattttcttctggggaaaatctggagaatgtcattctaccaaaagttaataacagtcaacttgaagtacagaagaacttgaaggaaaatgaaaagaaaccagacttgaaagataatcaaagaaaagtatctaggggagtcttttctccagtcaagaaggakgtactcaaagctttttaaaacagaggaacgagctgttagagtaataagaatagttgatacgaaagaatataagaatggtgtcaagggagtgagtcaggcaaggaagatgaagcacaaatgcacaagtgttcttaagggagagagaaactgaaaaatgtgtacaaaaagaaaggcaataaggtaggaaacttcagatatccctgtggttacacactaaaaagagagttctttatgtccatatctatctcagccactagactttagctccttaaagcaaggtgccatgtcttattcattcttacgtatccgcagcagctagctcagttccttgctcatggaaggtgctcaatggatgttgagttgaacatgaataaaagtcacctggaccgtagcttacaggctagctataaaacaaagtgaaaggaacaaagcaaaac

SEQ ID NO: 589741 - DNA, 599 bp, Homo sapiens
agattttcttctggggaaaatctggagaatgtcattctaccaaaagttaataacagtcaacttgaagtacagaagaacttgaaggaaaatgaaaagaaaccagacttgaaagataatcaaagaaaagtatctaggggagtcttttctccagtcaagaaggatgtactcaaagctttttaaaacagaggaacgagctgttagagtaataagaatagttgatacgaaagaatataagaatggtgtcaagggagtgagtcaggcaaggaagatgaagcacaaatgcacaagtgttcttaagggagagagaaactgaaaaatgtgtacaaaaagaaaggcaataaggtaggaaacttcagatatccctgtggttacacactaaaaagagagttctttatgtccatatctatctcagccactagactttagctccttaaagcaaggtgccatgtcttattcattcttacgtatccrcagcagctagctcagttccttgctcatggaaggtgctcaatggatgttgagttgaacatgaataaaagtcacctggaccgtagcttacaggctagctataaaacaaagtgaaaggaacaaagcaaaac

SEQ ID NO: 589742 - DNA, 599 bp, Homo sapiens
agattttcttctggggaaaatctggagaatgtcattctaccaaaagttaataacagtcaacttgaagtacagaagaacttgaaggaaaatgaaaagaaaccagacttgaaagataatcaaagaaaagtatctaggggagtcttttctccagtcaagaaggatgtactcaaagctttttaaaacagaggaacgagctgttagagtaataagaatagttgatacgaaagaatataagaatggtgtcaagggagtgagtcaggcaaggaagatgaagcacaaatgcacaagtgttcttaagggagagagaaactgaaaaatgtgtacaaaaagaaaggcaataaggtaggaaacttcagatatccctgtggttacacactaaaaagagagttctttatgtccatatctatctcagccactagactttagctccttaaagcaaggtgccatgtcttattcattcttacgtatccgcagcagctagctcagttccttgctcatggaaggtgctcaakggatgttgagttgaacatgaataaaagtcacctggaccgtagcttacaggctagctataaaacaaagtgaaaggaacaaagcaaaac

SEQ ID NO: 589743 - DNA, 622 bp, Homo sapiens
gagcatcttaaatactttgagtcaaaagctggtgaaaataaaaatttatttcttggctcaagacccatttagccatctttccctattgcgaaactcccaaactacagtcagcatcttcccactctcattgttccattcactctaaatttcaacaacatatgttactggcataatggaaatagatcaaaatgagttcccaactccacctatggctcagactccagcattaaattagtcaagtcattgggcttcgcattggttcaaagagtgttttaatgtgtgtaaaagaaaaacagatcataattacatttgctgtttcctattatttcatgcaaatttatggtatttcaagtatattgtgtatcaagtttgcttttatgagctggtctggaaacaattacaatttataatattttttctatggaaattattttagatgttccaaacacaaaatttacaagtgaacttccaaaacacarcctgctcctaaggtggaggcagcctgtacaggagatcttaatggcagagattttatgttttatttcctctctgattgttgtatcaagaatagagcaattttcatttttaaacttaattgtgtagaaattttctccgtgcagct

SEQ ID NO: 589744 - DNA, 491 bp, Homo sapiens
gcccctgctgggagacagggaaggggtgctgtaggcaattcaacactgtttttcagtgcctcttttagtgatatgaagttaacaccaggtactgtgaccactcacctgatttttagttcttataaaggtgatttttttttgtgcagatagtcgcttaatgtggtgatcctgcagagaggatgatagtggaggcatctatccagctatcttgctccacctcccttactatgcaattttgctaatgtctattttttaacacggtatcattgtttctctaaacatagcctttaaataaataagacaggtaaaaattttaggtgaaaatgtctagcatatgataagaatatgcaaaaggaaaataaatccagtcaatgtgccttttcttccaagttgcacctttttactgcatagtcaaatgttgtcctygaacattcttacagtataaacaaatactcaaatatgtgatttctaataaactctattatactctt

SEQ ID NO: 589745 - DNA, 574 bp, Homo sapiens
ctgtttgctaatgatatgattatctatatagaaaacccaaaataatctacarcaagatgttagaattgatgaacaaattcagtgaagtttcaggacacaaatcaacatgcaaaaatcagtaatgtatctctacactaacaacagaatttctaaaaaaggaatcaagagaacaatctcatttacaatggctataaaaaaattaggagtaaatttaatcaatgaagtgaactcagataaataagagatagcccatgttcatgaattaaaagaataaatgttgtgaaaatgtccatactactcaaagcaacatatgaattcagtaaaatttctatcagaatcccaatgtcatttttcatagatatagaaaaaacaatggaatatgattgagccttaaaaagggaagagattctctcatttgtgacaacacaaatggaattgaagaacaatatgctaagtgacatagaccaaatacagaaagacaaatactgcatattctcaactaactatggaatctaaaacaattgaactcatagaagcagagtgtagaatggaagttaccagaggctgaagactg

SEQ ID NO: 589746 - DNA, 612 bp, Homo sapiens
ctgcatgttctcactcataagtgggagctgaacaaggagaacacatggacatggggaggggagcaacacacaccagggactgttggtaggggacgaggggagggaaagcatcaggacaaatagctaatgcatatggggcttaatacctaggtgacaggttgataggtgcagcaaaccaccatggcacrtgtttacctatgtaacaaacctgcacgttctgcacatgtatcctggaacttaaagtaaaaataaacggatggcatcatctgcaaatagtgatagttttactttacacaatgggaaacttttatttctttttcttgcctattgtcccaggtagaccttctaacacaatgttaaataacagtaatgagagcagacctccttgtcatgttcctgatattagggtaaaagctttcaggtttccacaattgagtatggcgttgactgtgggtttttcatggcttccctttatcaggttgagaaagttccctagtttgttgagtttttttttattattattatgaaagcacgatggattttgccaaatgcttttttctgtatctattgagttgagatgatcatggggggctttttcttaattctattaaa

SEQ ID NO: 589747 - DNA, 640 bp, Homo sapiens
attgctaatctgctttcagtctttacaggcttacctattcaaaacattttatataaaagcaatcatgcaatttatagtcttttatgatggcttctttcatgtagcatagtggtttccaggtttttgtgttttttaatttgtatacatttaaggaggttttgttacatmgatatattttgtagtggtgaagtctgagcttttagtataaccatcccctaaatattgtactttggagccacaaagtaatttctcatccatcatctccttccaccctttgggatctccaatgactattatatcacactctatgtccatatgttcacattatttagcttcatcttgtaagtcagagcatgtggtatttgactttctgtttctgagatgtttcacttaatatattagcctccagattcatccatgttattgcaaaggacattatttcatttttttattgctgagtagtattcccatgtctacacacacacacacacacacacacacacacacaccacattttctttatccagtcacccactgatggatacttaggtcgatttcttaactttgctattgtgaacagtgttgcaataaacatacaagtgcaggtatctttttgatataatgatttctttccctttgg

SEQ ID NO: 589748 - DNA, 427 bp, Homo sapiens
gctagctagactaacaaagaaaaaagagagatgattcaaataaacacactgataaataacaaaggggacattaccactggccccccaaaatayaaaaaaccctcagagactattatgaacacctctatgcacacaaactagacaacctagaagaaattaataatttcctggaaatacaccacttctaaaggttgaattacaaagaatttgaaaaaatgaaaagacaaataatgtgttctgaaattaatcagtaataaaaagcctaccaaccagaaaaagccctggaaaagatggattcacagccaaactctgccagatgtgtaacgcagatctggtactatttctagtgaaactattccaaaaaagtgaggaggaggtattcctttctatctcattcagtgagcaaacatcattctgatgttaaaaa

SEQ ID NO: 589749 - DNA, 567 bp, Homo sapiens
aagcttccagacaaggatcaggcagcaatatttgctgttctgcaatatttgcggttccgcagcctctgctggtgatacctaggcaaacagggtctggagtggacctccagcaaayaccaacagacctgcagctgaaggacctgactattagaaggaaaactaacaaacagaaaggaatagcatcaacatcaacaaaaaggatatccacaccaaaaccccatcagtaggtcaccaacatcaaagaccaacggtagataaagcaacgaagatggggagaaaccagagcagaaaagctgaaaattataaaaaccagagtgcctcttcttctccaaaggatcacagctcttcgccagcaatggaacaaagctggacggagaatgactttgacgagttgacagaagtatgcttcagaaggtcggtaataacaaacttctccgagctaaaggagcatgttctaacccatcgcaaggaagctaaaaacctcgaaaaaaggttagatgaaaggctaactaaaataaacagtgcagagaagacattaaatgacctgatggagctgaaaaacatggc

SEQ ID NO: 589750 - DNA, 567 bp, Homo sapiens
aagcttccagacaaggatcaggcagcaatatttgctgttctgcaatatttgcggttccgcagcctctgctggtgatacctaggcaaacagggtctggagtggacctccagcaaacaccaacagacctgcagctgaaggacctgactattagaaggaaaactaacaaacagaaaggaatagcatcaacatcaacaaaaaggatatccacaccaaaaccccatcagtaggtcaccaacatcaaagaccracggtagataaagcaacgaagatggggagaaaccagagcagaaaagctgaaaattataaaaaccagagtgcctcttcttctccaaaggatcacagctcttcgccagcaatggaacaaagctggacggagaatgactttgacgagttgacagaagtatgcttcagaaggtcggtaataacaaacttctccgagctaaaggagcatgttctaacccatcgcaaggaagctaaaaacctcgaaaaaaggttagatgaaaggctaactaaaataaacagtgcagagaagacattaaatgacctgatggagctgaaaaacatggc

SEQ ID NO: 589751 - DNA, 580 bp, Homo sapiens
gcaacctgtgcctcctgggttcaagtgattctcctgcctcagcttcctgagttgctgggattccaggcacctgccaccatcccmagctaatttttgtattttttagtagagacggggtttcaccatgttggtcaggctggtcttgaactcctgacctctggtgatccacccaccttggcctcccgaagtgctgggattagaggcgtgagccactgtgcccggccagcaaagtaacttcaaacaaacaaacaaaccaaaaaaacccttctcctaggatgatctgttcgcaacagaaacaaaaacattttccagtttaacccatttctgactgaaagtcattgtagggctgaaccttaaggaaaactaagtttaaacttcctttgcatagtattttgtcttttttccttgggttagaggtgaggacaagaaaacatgacatagttttgaattaatacgaaagaggcaaaatttgacattttaaatggccccaaacatcccactgttcattttgctgacaggtgatatactctagagaatcaggagtagagggtttaatcataataagcatatatgctgtggg

SEQ ID NO: 589752 - DNA, 580 bp, Homo sapiens
gcaacctgtgcctcctgggttcaagtgattctcctgcctcagcttcctgagttgctgggattccaggcacctgccaccatccccagctaatttttgtattttttagtagagacggggtttcaccatgttggtcaggctggtcttgaactcctgacctctggtgatccacccaccttggcctcccgaagtgctgggattagaggcgtgagccactgtgcccggccagcaaagtaacttcaaacaaacaaacaaaccaaaaaaacccttctcctaggatgatctgttcgcaacagaaacaaaaacattttccagtttaacccatttctgactgaaagtcattgtagggctgaaccttaaggaaaactaagtttaaacttcctttgcatagtattttgtcttttttccttgggttagaggtgaggacaagaaaacatgacatagttttgaattaataygaaagaggcaaaatttgacattttaaatggccccaaacatcccactgttcattttgctgacaggtgatatactctagagaatcaggagtagagggtttaatcataataagcatatatgctgtggg

SEQ ID NO: 589753 - DNA, 449 bp, Homo sapiens
cccttgaagacatccagtcctcttcactccagcaagaagccccagcacagcttccacagctccttgaggaagaaccttcttcaatgcagcaggaggccccagctctgcctccagagtcctctatggagagtctaactctaccgaatcatgaggtgtcagttcaacctccaggtgaggatcaagcttattatcacttgcccaacattacagttaaacctgcagatgtggaggttaccataacttcagagcctaccaatgagacagaatcttcccaagcccagcaggagaccccaattcagtttccagaggaggtggaaccttctgcaacccaacaggaggccccaattgagcctccagtttctcctatggagcatgaactttccatcagtgagcagcagcagccagttcagccttctgagtcttctrgggaggtcgaatcttctctgacc

SEQ ID NO: 589754 - DNA, 595 bp, Homo sapiens
ctctacaaaaagacttttaaaaagtggaaacataaatataaataaataaaaacattcatatcatttggtttgtggaaaagagttgctgtagagtcctcaaacttgagccgttgagccagttcycactcagtctctccatggcccaggcacaaccttagtcaagaaaagaatgccttagaacaggaggaaaagaggataatatcgaatggccctatattttgatttcattagggacaaatgcaaagatcctaatgtcagctggagaagagcttcctagttcagaggtaatgctgagctcaaggctatggatgagctatcaagaaagagggaaggttggagagtgagagaattttggaggaaagataacaaactttgccaagttgtttggctacatactgccttacagtcattatttttggtgtttaaaaaaaaatagaaacagggtctcactttgttacccaggctggtctcaaactcctgggctcaagctctccttctgctttggcctcccaaagtgctgagattacaggcttgagatgctgtgcccagcctacattcatttttaatagctgggaggaaagtgggcagaggaaga

SEQ ID NO: 589755 - DNA, 595 bp, Homo sapiens
ctctacaaaaagacttttaaaaagtggaaacataaatataaataaataaaaacattcatatcatttggtttgtggaaaagagttgctgtagagtcctcaaacttgagccgttgagccagttcccactcagtctctccatggcccaggcacaaccttagtcaagaaaagaatgccttagaacaggaggaaaagaggataatatcraatggccctatattttgatttcattagggacaaatgcaaagatcctaatgtcagctggagaagagcttcctagttcagaggtaatgctgagctcaaggctatggatgagctatcaagaaagagggaaggttggagagtgagagaattttggaggaaagataacaaactttgccaagttgtttggctacatactgccttacagtcattatttttggtgtttaaaaaaaaatagaaacagggtctcactttgttacccaggctggtctcaaactcctgggctcaagctctccttctgctttggcctcccaaagtgctgagattacaggcttgagatgctgtgcccagcctacattcatttttaatagctgggaggaaagtgggcagaggaaga

SEQ ID NO: 589756 - DNA, 595 bp, Homo sapiens
ctctacaaaaagacttttaaaaagtggaaacataaatataaataaataaaaacattcatatcatttggtttgtggaaaagagttgctgtagagtcctcaaacttgagccgttgagccagttcccactcagtctctccatggcccaggcacaaccttagtcaagaaaagaatgccttagaacaggaggaaaagaggataatatcgaatggccctatattttgatttcattagggacaaatgcaaagatcctaatgtcagctggagaagagcttcctagttcagaggtaatgctgagctcaaggctatggatgagctatcaagaaagagggaaggttggagagtgagagaattttggaggaaagataacaaactttgccaagttgtttggctacatactgccttacagtcattatttttggtgtttaraaaaaaatagaaacagggtctcactttgttacccaggctggtctcaaactcctgggctcaagctctccttctgctttggcctcccaaagtgctgagattacaggcttgagatgctgtgcccagcctacattcatttttaatagctgggaggaaagtgggcagaggaaga

SEQ ID NO: 589757 - DNA, 661 bp, Homo sapiens
ttgagccaagccttgaaaactgtctaggatttctcagcatttcagcaaagtaaggcaatttctgtctaaaatatataggcaamgtttttattaaaaatacgagaaattaattaaataacagattatgaccacaatgcagatttaaaaactaaggtatgatgagtgccattgaccggttcatccagacagttcagagaacagaacatccatgtagatccttcttgtattacagaatacaaaggagcggaaaattttgcctcagtaactgccaggtcattctaattaaagtacctatacattgtaatataattcctccattaaggtaacagccaatcaggtggtacagagtctgtgccattcagtcaagaaattcactcccttaacctagactgtgctggaaattcattgacaaattttgttctttggttctccatttttcttcagaattcatgcagaccacttgacttccttagcattttcttttgtgggcgtatattaatgtctttggttaagcttcagcttccgtttgcatcaatcctgttgtaatcgtgcctcctgaggcatctttttgcttcccttgcatcagtttccaaaatcctactttctgcttggtaaggggagtatccattttctttaaagcagtggttttcaaacttgcctg

SEQ ID NO: 589758 - DNA, 661 bp, Homo sapiens
ttgagccaagccttgaaaactgtctaggatttctcagcatttcagcaaagtaaggcaatttctgtctaaaatatataggcaacgtttttattaaaaatacgagaaattaattaaataacagattatgaccacaatgcagatttaaaaactaaggtatgatgagtgccrttgaccggttcatccagacagttcagagaacagaacatccatgtagatccttcttgtattacagaatacaaaggagcggaaaattttgcctcagtaactgccaggtcattctaattaaagtacctatacattgtaatataattcctccattaaggtaacagccaatcaggtggtacagagtctgtgccattcagtcaagaaattcactcccttaacctagactgtgctggaaattcattgacaaattttgttctttggttctccatttttcttcagaattcatgcagaccacttgacttccttagcattttcttttgtgggcgtatattaatgtctttggttaagcttcagcttccgtttgcatcaatcctgttgtaatcgtgcctcctgaggcatctttttgcttcccttgcatcagtttccaaaatcctactttctgcttggtaaggggagtatccattttctttaaagcagtggttttcaaacttgcctg

SEQ ID NO: 589759 - DNA, 459 bp, Homo sapiens
acctttgtaaagaagaaaaacattttagaaggaaaaaggaaaatatctctgcatgccctcagctcagatgccatctcctctgggagctcctctggcccctgccaaggctggatcaggtgccctcaggcacacacgatgctgacccagggccatctgtggcccagactctgggtccctcatgcagctctcaccactgctcaggaggccacaggaacagaggaatcactggcccattttatagacgggaaagctggacccggagaagtgaagcaactttcctgactcacagtgggtgagggcctcccacrctctttcccctgccccatgctgtttccatgggacttccacaggcatgggaagcaggctgagcgcctagcaggagtacagcgctgctgcccagggatggagcaggagggtcagggagagagacagggctgcccctggtgcccacagagacag

SEQ ID NO: 589760 - DNA, 459 bp, Homo sapiens
acctttgtaaagaagaaaaacattttagaaggaaaaaggaaaatatctctgcatgccctcagctcagatgccatctcctctgggagctcctctggcccctgccaaggctggatcaggtgccctcaggcacacacgatgctgacccagggccatctgtggcccagactctgggtccctcatgcagctctcaccactgctcaggaggccacaggaacagaggaatcactggcccattttatagacgggaaagctggacccggagaagtgaagcaactttcctgactcacagtgggtgagggcctcccacactctttcccctgccccatgctgtttccatgggacttccacaggcatgggaagcaggctgagcrcctagcaggagtacagcgctgctgcccagggatggagcaggagggtcagggagagagacagggctgcccctggtgcccacagagacag

SEQ ID NO: 589761 - DNA, 459 bp, Homo sapiens
acctttgtaaagaagaaaaacattttagaaggaaaaaggaaaatatctctgcatgccctcagctcagatgccatctcctctgggagctcctctggcccctgccaaggctggatcaggtgccctcaggcacacacgatgctgacccagggccatctgtggcccagactctgggtccctcatgcagctctcaccactgctcaggaggccacaggaacagaggaatcactggcccattttatagacgggaaagctggacccggagaagtgaagcaactttcctgactcacagtgggtgagggcctcccacactctttcccctgccccatgctgtttccatgggacttccacaggcatgggaagcaggctgagcgcmtagcaggagtacagcgctgctgcccagggatggagcaggagggtcagggagagagacagggctgcccctggtgcccacagagacag

SEQ ID NO: 589762 - DNA, 565 bp, Homo sapiens
taatccctgctttatctgcagcctttctcatccctcatgctccttatttgtgtctgctctttttcttcttgatcagtctctttaatgcttttctatttcaaagaaccaacttttgacatttttgttcagaaacagaaaaagctctgttaaaagaaccttcacacccctttgragcattttagctcagttatttgtaagcctaaaacatctgtgtgagcattttttagctgaggagatctgtggccacgaaaggaggaaacagccatgtggttcccttggaagatcccgggctcaccctggctctgccactggtgactctattattcgctccgttatctttcctgggttatttaaattttcagagccccagttctcagatttattaagcagaataaagtccttacattcctaaccatgatatagagggctgaaattaattttaaagagatctgacaactcagaaagaacatcttagtaccttgaccttcttctctgcccagaccctgcaggcaaggacagatgaagggcaggggcccaggtgaccctttgttctgtttctttgttt

SEQ ID NO: 589763 - DNA, 537 bp, Homo sapiens
acactctcctctctccatagcgccataaactctctcagggagacactgctttgaggaatgcttccttacttgtgctaagtaataaaactcctattgattaaaatttrcattcttgtggattcgtttgttactggacaagtgagtgaattcattttttttcaggttagtcatcaaaataaactttgtggatatgattgtacattacttattcttttattctcatacctccatttatattcatgttctgttaattctacattcctaaagaattaaactttctcttccaaaagatctattatggcctttatacaatgtctttataattttctatgagaactattgaagtagctgcctaattaatatctccgtcttaggtttgtaacctttttgttcattttctagtcttctatcaaagtaatctttctcaaatataaatctggtcatatttgttccatgcttacatctctttgattacttcccattatctactaaaaaatgttcaaatgtctggctcgagaaacatgatcttcttgatga

SEQ ID NO: 589764 - DNA, 501 bp, Homo sapiens
aaatgaagcatagggtgttgtatgtgtatataagtagaacatccaaattaaactgggtgaatcttgagttaaatgttgaaggagttagatagatgaagaaggggagataaaactacaataccttatgaatgtgtttggagaaagtatattccataccttttaagcctatataccaaatataccgatatgcattttaagtgaaaacaagaacaattccattttacaacatttttaattcatgatcttatgagacttagtagagtttcatgtaagccaatgaagcccaatgtacaatccatgtaaaaatgatatccattctgcttaaggaactactagccagaagtaaatcacttttcagtatagtctgctttggatagttaacagrtgaaagtatggattctcctcagaattgattaactgattactattttcaggaagaagaagcaataaaagtagtacataaaagataaatatgcctgtcagaaaaacaaaaagaaacca

SEQ ID NO: 589765 - DNA, 573 bp, Homo sapiens
tttggggtggtgcccagaagtttatatttttaaaataacctaggtaagtgtttcccaaattgatgaaattatcttggaatcttgttagttatgcaaatactcaggaaccatgagactcattagatcagaacctgcagggaagggcctgtaaaattgtatgtttaacaagcttcctagatgtatctaatcatcagggaagcttgggcaacactgattagtttaatcaccttattttataagctgagtaaattgacaagtttagggtaacacagtgaggaagctggaaaaaatgacatttttttawtgaggtagatattttgattttcatgattttttgtgggaaagaaagaaaaacttaagcattcaaggcttgccagaataaagaaactagaaaataatagactgagaaattgtccccatcttttctgatcttctatgacttattctttcataatatagcttcccatgactttacaggcatatgttacaaaaattttgttactgttgatgcaatgttaaggtagtattgaattactattaaagcagtattgaattactattaaagcaacatta

SEQ ID NO: 589766 - DNA, 632 bp, Homo sapiens
ggaatgagctgcaaatgtggggcttgatatctcttccagctctctyggcctgttgctaattggtaaattagacctgatattctgccccagaaacacagactttttagtctaaaaggaaggatcaggataacttcctaagtagttttatccgcaccagagctactcaactgggtcatatatacatcctatgcaagggtatgcagataaagccatatatttgatgtatactataattttctataagtgcattgcaggaaaaatttgtgtttgaatatacccagtgatagaatagtattgcttcaagagattgcaattcattttttagagagctttgattgttaaaaaaaaaaaagatgtctttctgtaacacgctaatatctgccttggcttctaaattgggtactagttttattctctggaacttctgtcaattatatccctccagttattaaagttactgaagctattaaattgtagccctcctcacatcttactccaatcctcataacacccttcaatggattacttatctcaagttttaattccagacaagtatacacagagagatgaagagattttttaattttattatagtttttaaatgctagatttaattctaaaacccaggctaa

SEQ ID NO: 589767 - DNA, 566 bp, Homo sapiens
ttagcccaaaagaattaataggctctgatttcatttcagataatgtctctcaatgacaaaattatgaagtgatttttttaactgcagctccttctgttgaattactgttatttagaaaatttatactgacttacgattttytaacatagttaaaactaagttttctggtgcttacatgcagagatatgtcttacctggactcacaagtagaaagaaatgccaatggaataaatttgtagcagaggagaaaattggaatatataaaaacatcatagggcacatgtaaacatgcatacacagttcactactggcagttaaggtatttcagtgtcttctgttttttcttttaatttagaaagcatttcaattttttttgtctagtgtaattacaattctgtgtgtgtgtgtgtgattgctactatgttacttaaggaatatttcgagcatttattaaacaataagaaaataatattttgacataaaaattaaaaatattattttcaattttcctttttcagtctttgtcaattagacaagtttatgtagaacttaatctcaaaattatt

SEQ ID NO: 589768 - DNA, 566 bp, Homo sapiens
ttagcccaaaagaattaataggctctgatttcatttcagataatgtctctcaatgacaaaattatgaagtgatttttttaactgcagctccttctgttgaattactgttatttagaaaatttatactgacttacgattttttaacatagttaaaactaagttttctggtgcttacatgcagagatatgtcttacctggactcacaagtagaaagaaatgccaatggaataaatttgtagcagaggagaaaattggaatatataaaaacatcatagggcacatgyaaacatgcatacacagttcactactggcagttaaggtatttcagtgtcttctgttttttcttttaatttagaaagcatttcaattttttttgtctagtgtaattacaattctgtgtgtgtgtgtgtgattgctactatgttacttaaggaatatttcgagcatttattaaacaataagaaaataatattttgacataaaaattaaaaatattattttcaattttcctttttcagtctttgtcaattagacaagtttatgtagaacttaatctcaaaattatt

SEQ ID NO: 589769 - DNA, 566 bp, Homo sapiens
ttagcccaaaagaattaataggctctgatttcatttcagataatgtctctcaatgacaaaattatgaagtgatttttttaactgcagctccttctgttgaattactgttatttagaaaatttatactgacttacgattttttaacatagttaaaactaagttttctggtgcttacatgcagagatatgtcttacctggactcacaagtagaaagaaatgccaatggaataaatttgtagcagaggagaaaattggaatatataaaaacatcatagggcacatgtaaacatgcatacacagttcactactggcagttaakgtatttcagtgtcttctgttttttcttttaatttagaaagcatttcaattttttttgtctagtgtaattacaattctgtgtgtgtgtgtgtgattgctactatgttacttaaggaatatttcgagcatttattaaacaataagaaaataatattttgacataaaaattaaaaatattattttcaattttcctttttcagtctttgtcaattagacaagtttatgtagaacttaatctcaaaattatt

SEQ ID NO: 589770 - DNA, 566 bp, Homo sapiens
ttagcccaaaagaattaataggctctgatttcatttcagataatgtctctcaatgacaaaattatgaagtgatttttttaactgcagctccttctgttgaattactgttatttagaaaatttatactgacttacgattttttaacatagttaaaactaagttttctggtgcttacatgcagagatatgtcttacctggactcacaagtagaaagaaatgccaatggaataaatttgtagcagaggagaaaattggaatatataaaaacatcatagggcacatgtaaacatgcatacacagttcactactggcagttaaggtatttcagtgtcttctgttttttcttttaatttagaaagcatttcaattttttttgtctagtgtaattacaattctgtgtgtgtgtgtgtgattgctactatgttacttaaggaatatttygagcatttattaaacaataagaaaataatattttgacataaaaattaaaaatattattttcaattttcctttttcagtctttgtcaattagacaagtttatgtagaacttaatctcaaaattatt

SEQ ID NO: 589771 - DNA, 381 bp, Homo sapiens
cactggggcctgtcagggagggtgtcaggggaagggagagcatcagaaagatacagctaatgcatgctgggtataatatctgggtgatggtatgatctgtgctgcaaaccaccatggcacacatttacctacgtaacaaacctgcacatcctgcacatgtacccctgagcttaccgtaaaaattgaaggaaaaaaaacacaacaaaacaaaacaaaaaccaaacaaaacaaaccaaaamagaaacatattcctagtacctggcatacagtacttggaagctaagaggtgctaaataaatagttacaatttttttttcttcatgatgcaatctacgccatcttctttgttttctatttccttaatttctcttttaccttata

SEQ ID NO: 589772 - DNA, 597 bp, Homo sapiens
agtctgggagaagatggaaattagcctatgcatggcattctgggaaaacttgaaggttgtatggaaaaatgagcacatctaaaagatgcttggaagctcccaaaggaaggaagcatctgtgtttgggtgaagctaatggattatgcagctcaggcttctgtgccactatgtattctatacccacaacatttaatatctgtattaataattttttaggttcattaaacttcttaatataatgttatataaatttattctataaatcagatgttttaaagaataccaatttaaaagtggtgaaaatataccacacgttattaattgacaaaactaattacctggacaaattcgtgtaaatgaatgtattcasctgagtgctatgtaactattagtaaaaagtacttaactgctgcctctgcaaatgccccagatccctacttgaaattcagctattaccaattcattttaaaagggtctgtctccttctaatatgtttggcacatgctggctgcctgcattacttatgcatccaggaaagcatatgcgtctatacttagacgttgcattaaccatgtttcatgcttctgcaaacttgat

SEQ ID NO: 589773 - DNA, 597 bp, Homo sapiens
agtctgggagaagatggaaattagcctatgcatggcattctgggaaaacttgaaggttgtatggaaaaatgagcacatctaaaagatgcttggaagctcccaaaggaaggaagcatctgtgtttgggtgaagctaatggattatgcagctcaggcttctgtgccactatgtattctatacccacaacatttaatatctgtattaataattttttaggttcattaaacttcttaatataatgttatataaatttattctataaatcagatgttttaaagaataccaatttaaaagtggtgaaaatataccacacgttattaattgacaaaactaattacctggacaaattcgtgtaaatgaatgtattcacctgagtgctatgtaactattagtaaaaagtacttaactgctgcctctgcaaatgccccagatccctacttgaaattcagctattaccaattcattttaaaagggtctgtctccttctaatatgtttggcacatgctggctscctgcattacttatgcatccaggaaagcatatgcgtctatacttagacgttgcattaaccatgtttcatgcttctgcaaacttgat

SEQ ID NO: 589774 - DNA, 619 bp, Homo sapiens
tctgatcttgtgtcgggaccatatcaagagagaaacttttggtgaatgttcaaacccagaagaggaagataggtgcagagagrattttggtttttttttgttgttgttgtggtttttgttcttttggctttggttaattatattttgtgacataacttgcttataatgatgtagcagagaaactgggtagattcatttttctatcattgcaaaaattttcaagtatcagtacataggtctcccagcagacctatgcaagacctacccttgtacaaggtgctacttggaacagaatctgggatcgtgtgtcgaggagcctatagttcagatactattttcagaacaattttgccttaaatgccaacagatctttggaaagtctgtctctacccctcctaattttaggtagcagaaatccaagggcagaaagaggaactccaagacttacccattttggtagagtgattacaaaaaataactccaaatgtttacttcttcttctatctaaacttctttccatatggccctgcagatatgctaatcaagaggtagaatccattaccccaccctgaattggtgatttctttgaccaatagaatttggcagaagtgacgatgta

SEQ ID NO: 589775 - DNA, 619 bp, Homo sapiens
tctgatcttgtgtcgggaccatatcaagagagaaacttttggtgaatgttcaaacccagaagaggaagataggtgcagagaggattttggtttttttttgttgttgttgtggtttttgttcttttggctttggttaattatattttgtgacataacttgcttataatgatgtagcagagaaactgggtagattcatttttctatcattgcaaaaattttcaagtatcagtacataggtctcccagcagacctatgcaagacctacccttgtacaaggtgctacttggaacagaatctgggatcgtgtgtcgaggagcctatagttcagatactattttcagaacaattttgccttaaatgccaacagatcyttggaaagtctgtctctacccctcctaattttaggtagcagaaatccaagggcagaaagaggaactccaagacttacccattttggtagagtgattacaaaaaataactccaaatgtttacttcttcttctatctaaacttctttccatatggccctgcagatatgctaatcaagaggtagaatccattaccccaccctgaattggtgatttctttgaccaatagaatttggcagaagtgacgatgta

SEQ ID NO: 589776 - DNA, 591 bp, Homo sapiens
ttctaaatgaaaagagaatttgcagatcaatcttttataatgtaagcttggtgatgtgagtcctgtatgacaacattttaggggctccccatctactcagaataaaaaggcaaagtcctgaaaatggctttccagggtttctgtgatccgtgcactagctgctccaagccacaccactttctcgttctttcacctacatgtcaggcatgttcctgccttgggacatttgatcttgctatctctgccagaacactcttttcccagatagcttcatggctcactgattcttcaccatcaagtctttgtcaaaacgtcrttttcttcatgagatcttcctagaccagaccacattatttaaaaattcatctctgtagtttcatatatctattagctcctatttattgctgagaagtattgcattatataattataccacagtttattcattcttcagttgatgaagttatggggtatttccagcttaaaattacttttaataaagctgctaaaaacacgtttgtgtaatctgtttgtagacataggtttttatttctcctacataaatatctataccaattaggattctccaga

SEQ ID NO: 589777 - DNA, 521 bp, Homo sapiens
taggggctccccatctactcagaataaaaaggcaaagtcctgaaaatggctttccagggtttctgtgatccgtgcactagctgctccaagccacaccactttctcgttctttcacctacatgtcaggcatgttcctgccttgggacatttgatcttgctatctctgccagaacactcttttcccagatagcttcatggctcactgattcttcaccatcaagtctttgtcaaaacgtcattttcttcatgagatcttcctagaccagaccacattatttaaaaattcatctctgtagttycatatatctattagctcctatttattgctgagaagtattgcattatataattataccacagtttattcattcttcagttgatgaagttatggggtatttccagcttaaaattacttttaataaagctgctaaaaacacgtttgtgtaatctgtttgtagacataggtttttatttctcctacataaatatctataccaattaggattctccagagagacaga

SEQ ID NO: 589778 - DNA, 626 bp, Homo sapiens
aaatgttaatctcttccaaaaaaccacctccacagaaatatccagaatgtttgatcaaatgtctgggcactgtggcccagccaagtcaacacacaaaattaaccatcacaagcagttttatttttttcttcccaatctttataactttttgggggggttatttaatcacattagtcacagccatcagcctaatactgaatggaagaagtaaaatcagacatccatacacccttcctatcktatagggaaaatattcaatattttgcattgcatattacattagcaacacatatttatagatgccctttatcgtattatgaatgttctcttatattcctaacttgctgaggctcttttttttaaataagcaatgggtgttaagttttgccaaacttttttttccatctagtgagatgattatataactttttctttattctttgaatgcataaattgctttgattgtttttaaacattgaaagaactttgcatacctgagataaacttcagctgaacttgaggtactatatttttcatatattgctaaactttatctgttcatagatgtagcatctatgttcatataggactttgctttgcaactttattattattattttattata

SEQ ID NO: 589779 - DNA, 626 bp, Homo sapiens
aaatgttaatctcttccaaaaaaccacctccacagaaatatccagaatgtttgatcaaatgtctgggcactgtggcccagccaagtcaacacacaaaattaaccatcacaagcagttttatttttttcttcccaatctttataactttttgggggggttatttaatcacattagtcacagccatcagcctaatactgaatggaagaagtaaaatcagacatccatacacccttcctatcttatagggaaaataktcaatattttgcattgcatattacattagcaacacatatttatagatgccctttatcgtattatgaatgttctcttatattcctaacttgctgaggctcttttttttaaataagcaatgggtgttaagttttgccaaacttttttttccatctagtgagatgattatataactttttctttattctttgaatgcataaattgctttgattgtttttaaacattgaaagaactttgcatacctgagataaacttcagctgaacttgaggtactatatttttcatatattgctaaactttatctgttcatagatgtagcatctatgttcatataggactttgctttgcaactttattattattattttattata

SEQ ID NO: 589780 - DNA, 546 bp, Homo sapiens
ttactgcttatctaaaatccattaatgttaacattatataactgtagtacaattataacttcaggaaattaacatcccttattcaaattttaccagttttcccactaatgtctttttttttycttctattccaagagcctatctaggatcctgtgttgcctttagttcttatttctccttagccacctccaattttcaatagttcctcaatgtttctttttctttcatgatcttaacacttttggagaattatcagttattttgtagaatgtcccttaattttggatttgtctgatattttcttgtgatcagaatgagaagagtttatgcagtgtaggcaagaataacaaaaaaaaatgtatatcctttaggtggatcttacaaaacagttcatgagatcgatgtatcttatttgggatattaatctggaccaattggttatgatagtgtgtactggggttctcaactgtaagctactaaattaacctgtgtagaaaagaaagatatcttgcgggagctactttgagactattaaatcatgtttct

SEQ ID NO: 589781 - DNA, 546 bp, Homo sapiens
ttactgcttatctaaaatccattaatgttaacattatataactgtagtacaattataacttcaggaaattaacatcccttattcaaattttaccagttttcccactaatgtcttttttttttcttctattccaagagcctatctaggatcctgtgttgcctttagttcttatttctccttagccacctccaattttcaatagttcctcaatgtttctttttctttcatgatcttaacacttttggagaattatcagttattttgtagaatgtcccttaattttggatttgtctgatattttcttgtgatcagaatgagaagagtttakgcagtgtaggcaagaataacaaaaaaaaatgtatatcctttaggtggatcttacaaaacagttcatgagatcgatgtatcttatttgggatattaatctggaccaattggttatgatagtgtgtactggggttctcaactgtaagctactaaattaacctgtgtagaaaagaaagatatcttgcgggagctactttgagactattaaatcatgtttct

SEQ ID NO: 589782 - DNA, 546 bp, Homo sapiens
ttactgcttatctaaaatccattaatgttaacattatataactgtagtacaattataacttcaggaaattaacatcccttattcaaattttaccagttttcccactaatgtcttttttttttcttctattccaagagcctatctaggatcctgtgttgcctttagttcttatttctccttagccacctccaattttcaatagttcctcaatgtttctttttctttcatgatcttaacacttttggagaattatcagttattttgtagaatgtcccttaattttggatttgtctgatattttcttgtgatcagaatgagaagagtttatgcagtgtaggcaagaataacaaaaaaaaatgtatatcctttaggtggatcttacaaaacagttcatgagatygatgtatcttatttgggatattaatctggaccaattggttatgatagtgtgtactggggttctcaactgtaagctactaaattaacctgtgtagaaaagaaagatatcttgcgggagctactttgagactattaaatcatgtttct

SEQ ID NO: 589783 - DNA, 557 bp, Homo sapiens
tggcctcagttcaacttctttaacattagatgcacaccctatgccaggttgaaaatgatgtagaagacatgcccattggccacaggcaccagcaagtcctgtttcactctccttgagcaaacagtggacactgttgactccaaaacaaaaaakgaagagaatcagctcattgttgtgggaagtcagggaccccaaacagagggaccagctgaagccatggcagaagaatgtggattgtaaagatttcatggaaatttattagttccccaaattaatacttttataatttcttatgcctgtctttactgcaatctctaaacataaattgtgtagatttcatggacacttatcacttccccaatcaatacccttgtgatttcctatgcctgtctcaactttaatctcttaatcctgtcagctgaggaggatgtatgtcttctcaggaccctgtgataattgtgttaactacaaaaattgtagagcatgttggtttgaacaatatgaaatctgggcaccttgaaaaaagaacatggcaacagcaatgttcagggaataag

SEQ ID NO: 589784 - DNA, 557 bp, Homo sapiens
tggcctcagttcaacttctttaacattagatgcacaccctatgccaggttgaaaatgatgtagaagacatgcccattggccacaggcaccagcaagtcctgtttcactctccttgagcaaacagtggacactgttgactccaaaacaaaaaaggaagagaatcagctcattgttgtgggaagtcagggaccccaaacagagggaccagctgaagccatggcagaagaatgtggattgtaaagatttcatggamatttattagttccccaaattaatacttttataatttcttatgcctgtctttactgcaatctctaaacataaattgtgtagatttcatggacacttatcacttccccaatcaatacccttgtgatttcctatgcctgtctcaactttaatctcttaatcctgtcagctgaggaggatgtatgtcttctcaggaccctgtgataattgtgttaactacaaaaattgtagagcatgttggtttgaacaatatgaaatctgggcaccttgaaaaaagaacatggcaacagcaatgttcagggaataag

SEQ ID NO: 589785 - DNA, 557 bp, Homo sapiens
tggcctcagttcaacttctttaacattagatgcacaccctatgccaggttgaaaatgatgtagaagacatgcccattggccacaggcaccagcaagtcctgtttcactctccttgagcaaacagtggacactgttgactccaaaacaaaaaaggaagagaatcagctcattgttgtgggaagtcagggaccccaaacagagggaccagctgaagccatggcagaagaatgtggattgtaaagatttcatggaaatttattagttccccaaattaatacttttataatttcttatgcctgtctttactgcaatctctaaacataaattgtgtagatttcatggacacttatcacttccccaatcaatacccttgtgatttcctatgcctgtctcaactttaatctcttaatcctgtcagctgaggaggatgtatgtcttctcaggaccctgtgataattgtgttaactacaaaaattgtagagcatgtkggtttgaacaatatgaaatctgggcaccttgaaaaaagaacatggcaacagcaatgttcagggaataag

SEQ ID NO: 589786 - DNA, 557 bp, Homo sapiens
tggcctcagttcaacttctttaacattagatgcacaccctatgccaggttgaaaatgatgtagaagacatgcccattggccacaggcaccagcaagtcctgtttcactctccttgagcaaacagtggacactgttgactccaaaacaaaaaaggaagagaatcagctcattgttgtgggaagtcagggaccccaaacagagggaccagctgaagccatggcagaagaatgtggattgtaaagatttcatggaaatttattagttccccaaattaatacttttataatttcttatgcctgtctttactgcaatctctaaacataaattgtgtagatttcatggacacttatcacttccccaatcaatacccttgtgatttcctatgcctgtctcaactttaatctcttaatcctgtcagctgaggaggatgtatgtcttctcaggaccctgtgataattgtgttaactacaaaaattgtagagcatgttkgtttgaacaatatgaaatctgggcaccttgaaaaaagaacatggcaacagcaatgttcagggaataag

SEQ ID NO: 589787 - DNA, 549 bp, Homo sapiens
ttatgaaagccaatggatccctctggaactaatcaagaaacagaaagttgtagcttgaggcctaaactgagttgttggagaattgggagttctaaactgctagatgtgtgctggggcttggtgttcctctctcagttttaccataatcagggtcaccagtggaactaaatgtcctgtatgatatttatccaagccctgtgctatcccaggataagtgttgactgacrgccaaaggagcatttcctatggcacagtgcatctaaatcaaatgagagaggagcagaaaacaagtttttaataccatacaccttgtcctgaggctccagtgctaattgctcccaaagggacttcccaaccgatactgaaaagcccctggggcctacaaacctggcagacatggatttgaataaaatattttgaatgagtgatgactctgctatttagtaaggatgctacttcaagcaagttaattaacttctgacagtctcaggtttctgatctgtaaaatggggatggtgttacctgtctcatatggctgttgtaaggatt

SEQ ID NO: 589788 - DNA, 549 bp, Homo sapiens
ttatgaaagccaatggatccctctggaactaatcaagaaacagaaagttgtagcttgaggcctaaactgagttgttggagaattgggagttctaaactgctagatgtgtgctggggcttggtgttcctctctcagttttaccataatcagggtcaccagtggaactaaatgtcctgtatgatatttatccaagccctgtgctatcccaggataagtgttgactgacggccaaaggagcatttcctatggcacagtgcatctaaatcaaatgagagaggagcagaaaacaagtttttaataccatacaccttgtcctgaggctccagtgctaattgctcccaaagggacttcccaaccratactgaaaagcccctggggcctacaaacctggcagacatggatttgaataaaatattttgaatgagtgatgactctgctatttagtaaggatgctacttcaagcaagttaattaacttctgacagtctcaggtttctgatctgtaaaatggggatggtgttacctgtctcatatggctgttgtaaggatt

SEQ ID NO: 589789 - DNA, 532 bp, Homo sapiens
tactgcatgaagtgacagatcatatcatttggtagtgacatgttcttttatttataaatctacctgatagggaaaagcagcactcacattctactttctattatatttgcctcgagcttagttgacatgcttgtatgattatttttccagaagaatgttaaaataaaatttttagttttaaagcaaaatatattagtaagtgttgggttttaaggaaatttaacaaatatcattcctgatgggarcaacacatttaagcagatggtaataaataatatcatccttgctatgcatggtagctcacacctgcaatcccagcactttgggaggccaagacaggaggattgcttgagcccaggagttggagaccagcctgggcaacttagtgagaaatcatctctaattagaaaaaaagaaaaagaaaatgaaaaaattatatggccatggtagtgcacacatgtagtcccagctactctactactcaggagactgaggtgggaggatatcacttgagcccaggagttcaaggctg

SEQ ID NO: 589790 - DNA, 594 bp, Homo sapiens
tttgttaaactatttaggcctgccacttatattgagtttcacttttatcaaattttgattctttatggttcatgatagtttaggtcttctttttattcctcttgaatcatttgtaatttatgttttcctaaatattaccacaccatcttgatcataaaatttattggcatagaattgtacataatatttttccataattcttttaatctcttcatatctctggtcccttgttcacatttttatcttgacttacacttatttacaaattctataaactaaatgccatttgctttattcttctgtgtattctcagtgtctagaccttggtgcagggtagggacttaatacayatttgttgactatatttgttttcaaaactatattctagcatcagttaaaaaagatgagacaagtttgttctgtatgctttggcattggcaaggctcttataaaagaaacataagatttcacgctgattattcttcctacgttgtatacctgccaagtactattgttaaaggcaaaaataattctagcaatagggatgttgtatgagaaaatggacttgatgataaaatatttatgaaaccacta

SEQ ID NO: 589791 - DNA, 594 bp, Homo sapiens
tttgttaaactatttaggcctgccacttatattgagtttcacttttatcaaattttgattctttatggttcatgatagtttaggtcttctttttattcctcttgaatcatttgtaatttatgttttcctaaatattaccacaccatcttgatcataaaatttattggcatagaattgtacataatatttttccataattcttttaatctcttcatatctctggtcccttgttcacatttttatcttgacttacacttatttacaaattctataaactaaatgccatttgctttattcttctgtgtattctcagtgtctagaccttggtgcagggtagggacttaatacatatttgttgactatatttgttttcaaaactatattctagcatcagttaaaaaagatgagacaagtttgttctgtatgctttggcattggcaaggctcttataaaagaaacataagatttcacgctgattattcwtcctacgttgtatacctgccaagtactattgttaaaggcaaaaataattctagcaatagggatgttgtatgagaaaatggacttgatgataaaatatttatgaaaccacta

SEQ ID NO: 589792 - DNA, 597 bp, Homo sapiens
ggtacatgtgcaggtttgttatatatgcaaattgtatgtcatggggatttgatgtacaaattatttcatcactcaggtaataagcattgtacctgataggtaattttttaatcctcactttactcccaccctctaccctcaaataggccctggtgtctttttttccctactttggtccatgtgtattcaatgtttagctcccattgtaagtgagaacawgcagtatttggttttctattcctgtattagtttgcttaagatagtggcctatggcctacaagcttcatccttgttgctacaaagaaaatgatctctcacactttttaatggctgtatagtattctatggtgtaccagatttaagcttttcaatctagtttaatagctttaagacctaaaattctaaaatctggaggtattaagtgatatatcaaagttacaaaattagtgacaaacctcagactcctgattttacctagaaactttgattatacccagaaattttgatcatacttgtccaccagaatctccccagtaacatgtcatttcattcaattttattattccatagtggaaccctgacagataacaccaagtt

SEQ ID NO: 589793 - DNA, 597 bp, Homo sapiens
ggtacatgtgcaggtttgttatatatgcaaattgtatgtcatggggatttgatgtacaaattatttcatcactcaggtaataagcattgtacctgataggtaattttttaatcctcactttactcccaccctctaccctcaaataggccctggtgtctttttttccctactttggtccatgtgtattcaatgtttagctcccattgtaagtgagaacaagcagtatttggttttctattcctgtattagtttgcttaagatartggcctatggcctacaagcttcatccttgttgctacaaagaaaatgatctctcacactttttaatggctgtatagtattctatggtgtaccagatttaagcttttcaatctagtttaatagctttaagacctaaaattctaaaatctggaggtattaagtgatatatcaaagttacaaaattagtgacaaacctcagactcctgattttacctagaaactttgattatacccagaaattttgatcatacttgtccaccagaatctccccagtaacatgtcatttcattcaattttattattccatagtggaaccctgacagataacaccaagtt

SEQ ID NO: 589794 - DNA, 467 bp, Homo sapiens
aaagttacaaaattagtgacaaacctcagactcctgattttacctagaaactttgattatacccagaaattttgatcatacttgtccaccagaatctccccagtaacatgtcatttcattcaattttattattccatagtggaaccctgacagataacaccaagttaaacattgactgagttaattttcaaggatygcaatgttgtatagggaagtaaaagtaaatcatgaaatttataaaaataaaaacaaattactttaatgataaaagtaattttccaagggggagtttgcatttacacattatgtgcagataatttctttttcagagaagtatttcaggagtattttgtttagataataaacttggcatcagactgcttgggctcaaatctagacaatacccttgctagctctgtaaacttgggtgatttacataactttaccatgtctcagttctctaattt

SEQ ID NO: 589795 - DNA, 483 bp, Homo sapiens
tagaaactaaattccttccattcattcaaaaaacattaattaagcacccattatgtttcaggctaggtgctgtggatacagaataagaaaatatttagaaaatttttattgatagtttagaaagatgcaatatgtaatctcttagaaaygtgagcttctgtcattgggtacaataaaacataaaactatctctacaagaacaaaatgagagaataaagcaaaatagcaatatatgagagaaaattacaggtattcattgactatcactttgctgtaagtcaatggtggggtgaagttacctaaaatttaatatgattttagggtgagttaggttgtcagtagcagcttcctggtggtctcgtggttaggatttggtgatctcactgctacaccccaggttagattccaagtcaaggaaatctttcttgaaaagaagtcaagagaatgttgtaatagttttctccttgattagattacactgtg

SEQ ID NO: 589796 - DNA, 591 bp, Homo sapiens
aatcatgtcaatatatgagtcgaacattgcaactactataactgagcaaaacttaagagacttgtgaaaggtaaaaatgtgtgccctaatatttttgccctatgtgaaagagtgattgaacttcattgactcttgagggcagacaagaaataatgagataaatttatagcagtagctaatgttgagcttagctactttttttttttttttctcaraattgaggcaacacttcagctgctgggaatgatcttctgcaaggaccttctgctcctttgtaatcttcctaagctgaatacagtctcttcacccaagagtaagtcccctccctggggatagctcaagtctaatggtcagttggtaaggtaagtagaaccctcccatgttcttttgctcaaggcagggcaacttaaaaggcctattttagctccaaatgtccataatagaggcctcttgcaaccacagctaaactcctgccactgcccagtcctacttccttcactcccccagacttgttgatgtaggggttacctttcagtaaacctgtacacaaatctccatctcagagtctatttctgggaatctagcttaaga

SEQ ID NO: 589797 - DNA, 591 bp, Homo sapiens
aatcatgtcaatatatgagtcgaacattgcaactactataactgagcaaaacttaagagacttgtgaaaggtaaaaatgtgtgccctaatatttttgccctatgtgaaagagtgattgaacttcattgactcttgagggcagacaagaaataatgagataaatttatagcagtagctaatgttgagcttagctactttttttttttttttctcagaattgaggcaacacttcagctgctgggaatgatcttctgcaaggaccttctgctcctttgtaatcttcctaagctgaatacagtctcttcacccaagagtaagtcccctccctggggatagctcaagtctaatggtcagttggtaaggtaagtaraaccctcccatgttcttttgctcaaggcagggcaacttaaaaggcctattttagctccaaatgtccataatagaggcctcttgcaaccacagctaaactcctgccactgcccagtcctacttccttcactcccccagacttgttgatgtaggggttacctttcagtaaacctgtacacaaatctccatctcagagtctatttctgggaatctagcttaaga

SEQ ID NO: 589798 - DNA, 359 bp, Homo sapiens
gcatcctgtgatagtgctgtcaatgcttaataacaggtattctccctcaacttcaaattcacttctctgttctttgctttgagagttagagtttaacactcagcaaaccacctttctgctttgccagttggytcccaggtaggctatgttagcagtgaacacttaagaaaatgggaaggctggaggagaaagaagatacttgtttctttctgtttgtttctcatttctgtcaacatcactcagccccactttttcattcttgctatggtttgaatgtctcccccaaaacttcatgtgttggaaacttaatagccaatgtaaccatattaagagataagataagatgattgattcatgga

SEQ ID NO: 589799 - DNA, 658 bp, Homo sapiens
gcttaataacaggtattctccctcaacttcaaattcacttctctgttctttgctttgagagttagagtttaacactcagcaaaccacctttctgctttgccagttggttcccaggtaggctatgttagcagtgaacacttaagaaaatgggaaggctggaggagaaagaagatacttgtttctttctgtttgtttctcatttctgtcaacatcactcagccccactttttcattcttgctatggtttgaatgtctcccccaaaacttcatgtgttggaaacttaatagccaatgtaaccatattaagagataagataagatgattgattcatggattaagttattaccctcggaattaaagttagttccccagaaagtggattgttatamaagtgagctgggcttgctcttgcagcctcttttacatgcatttgcttgtctttctgctttttcaccatgttatgacacaatatgaaagtcctacccagatgctactaccatgcctttggacttctcagtcttcaaaatcatgagccaaatgaacttttatttataaattactcagtctcagatattctgttataacaatagaaaacaaactaagacagaaaattggtaccaaaaattggggttgttgctataacagataccttaaaag

SEQ ID NO: 589800 - DNA, 527 bp, Homo sapiens
ttgccagttggttcccaggtaggctatgttagcagtgaacacttaagaaaatgggaaggctggaggagaaagaagatacttgtttctttctgtttgtttctcatttctgtcaacatcactcagccccactttttcattcttgctatggtttgaatgtctcccccaaaacttcatgtgttggaaacttaatagccaatgtaaccatattaagagataagataagatgattgattcatggattaagttattaccctcggaattaaagttagttccccagaaagtggattgttataaaagtgagctgggcttgctcttgcagcctcttttacatgcatttgcttgtctttctgctttttcaccatgttatgacacaatatgaaagtcctacccagakgctactaccatgcctttggacttctcagtcttcaaaatcatgagccaaatgaacttttatttataaattactcagtctcagatattctgttataacaatagaaaacaaactaagacagaaaattggtaccaaa

SEQ ID NO: 589801 - DNA, 587 bp, Homo sapiens
taaattactcagtctcagatattctgttataacaatagaaaacaaactaagacagaaaattggtaccaaaaattggggttgttgctataacagataccttaaaaggtggaagcagctttggatctgggtaatgagtaggggctggaagggattggaggatcagcctagagaaaatctgtattgctgtaaacagaacattaagggcaattttggtgaggagttagaagaagactagamcagtgtgctcaggatgcagaaaaagcagtcagaggaaattattttccagctttaagactaaacattgttttgtctgttgggttttggacttacttggcctgctactcctttcttcttacctatttctcccttttggaatgggaatgcctatcctatgcctgtcccaccataatattttaaaagtaggtataatattttaaaagtaggtaacttgtttacatgtacaggctaacagctggaaggaatttgcaaggtgaatcatgccttgggtttcacccatatctgattcaatgagactctggaatttggacttttgagttttttctggaagaagttgagactttttgggc

SEQ ID NO: 589802 - DNA, 646 bp, Homo sapiens
gagtagtgaattacttcttgtgagagtaagttaactcttgagagagttggttattttaaaagcaagttcagcttgctgttttagttttctttgcaagcgctttcttgtgcttttgcttttgtgtatgttatgaaaaagtacaatacaaatggtcttacaatatgctgctgccatgaccttggacttgccagtccctagaatcataagccaaataaactttttaaaagtacatgagtctcatgaattctgttatagcaaaggacaaagataattccagcaattctcatttatttctgtatcaacaatttaatccaatttgcagattttcaacatctgcagaactgacctattgtactttctcataaacacaggaggagccagccaaaatgcctatggaaaacagttctatcaaaaaactaattctccttagccttactcaaatccattttgctgtttcctgytctagaactagaaacggattccaggttagagtatattccaagaaggcacttatataagccaagttagaaagagtaatatttcccctccccaagttacaagatttggctaattcaaaatacagaaaaatgtaaagaatactttgtgaatgaattctgctgtgttagatcaaggaagtagcaaactt

SEQ ID NO: 589803 - DNA, 503 bp, Homo sapiens
atcacattaattagctggtggtgtcagtcaaagcttctgatcaaggtagggactcaggtatctgatattatacatgcatagcataagatcagaagtaattttttagattttccaaagatgatttccttaatgaggattctagagttgatgggaatgttaatatgtctagcctgaagcaaaattcaagctgcaatatgttataatagctactgaaatagaactacctcccttagtggggaccttaaatmctagaggccccacataacaatttgggattgcagttttaacttgctgttaactgacctgaatgcccgtgtgagacccagcaaaagaaggttctacaggtggtccagtgtgtagggcaagctcctctgctgcttggcttttagaatataactgattcaaaagtagtcacaatgtttgtggcagatctgggtgctatattgggtctttccacagaatcacagcagtgattgtaaattgggataatgtcacagccatgc

SEQ ID NO: 589804 - DNA, 374 bp, Homo sapiens
atatcttacttacattgaagcctcaggagttccttctgatgagttgtctgaggagaaamgtattgaaccttcatttacacccatgtctatacagtttggcaccaggtcagaaagggagtagaaaaccttttaaaccacacacaatggtagccttgaagaatggtggggaaggaaaattccaccttagatgagaacttggaatggttctattttgtctgaaaggggatttggctcacgttatgggtctacaatattttgtttgcagttgtgaaaataaagaatgaaacatttgtgttacttttttgttgttttatatgtatgcatttttgttccttatcttttatgtgaaatatgttggtggttgtgaaatttgt

SEQ ID NO: 589805 - DNA, 374 bp, Homo sapiens
atatcttacttacattgaagcctcaggagttccttctgatgagttgtctgaggagaaacgtattgaaccttcatttacacccatgtctatacagtttggcaccaggtcagaaagggagtagaaaaccttttaaaccacacacaatggtagccttgaagaatggtggggaaggaaaattccacyttagatgagaacttggaatggttctattttgtctgaaaggggatttggctcacgttatgggtctacaatattttgtttgcagttgtgaaaataaagaatgaaacatttgtgttacttttttgttgttttatatgtatgcatttttgttccttatcttttatgtgaaatatgttggtggttgtgaaatttgt

SEQ ID NO: 589806 - DNA, 552 bp, Homo sapiens
ctgaattctatcagatattcaaagaagtattggtaccaattatattgacactattccaaaagatcataagaagggggaatccttcctaaatcattctatgaacccagtatcaccctaataccaaaaccagaaaagaacataacaaaaaaagaaaactatagaccaatatccctgatgaacatagatgtaaaaatcctcaagaaaatactagctgaccaaatccaacagcacatcaaaaaaaaaaaaaaaaaaaaaaaaattccacacgatcaagcrggtttcattccagggattcagggatcatttaacgtatgtaagtcaataaatgtgataaactccataaacaattaaaaacaaaaatcacatgatcatctcaatagatgcagaaaaagcattttacaaaatccagtatccttttatgattaaaaccctcagcaaaatcagattaaagagatataccttaaggtaataaaagccatctatgacaaacccataatactgaatggggaaaagtggaaagcattccccctgagaacaggaacaagacaagaa

SEQ ID NO: 589807 - DNA, 552 bp, Homo sapiens
ctgaattctatcagatattcaaagaagtattggtaccaattatattgacactattccaaaagatcataagaagggggaatccttcctaaatcattctatgaacccagtatcaccctaataccaaaaccagaaaagaacataacaaaaaaagaaaactatagaccaatatccctgatgaacatagatgtaaaaatcctcaagaaaatactagctgaccaaatccaacagcacatcaaaaaaaaaaaaaaaaaaaaaaaaattccacacgatcaagcgggtttcattccagggattcagggatcatttaacgtatgtaagtcaataaatgtgatawactccataaacaattaaaaacaaaaatcacatgatcatctcaatagatgcagaaaaagcattttacaaaatccagtatccttttatgattaaaaccctcagcaaaatcagattaaagagatataccttaaggtaataaaagccatctatgacaaacccataatactgaatggggaaaagtggaaagcattccccctgagaacaggaacaagacaagaa

SEQ ID NO: 589808 - DNA, 593 bp, Homo sapiens
ttgtccactgttgctctggctgtctgtgcttgtggggtattrctgaagaaatctttgcccagtccaatgtcctgtagagttccccaatgttttattttagtagtttcatagttcaaagtcttaaatatttaagtcttaaatatttaatttaataattaaatatttaatccattttgatttgatttttgtatatggcaagagatagcggtctaaattcattcttctgcatatagatatctagttttcccagcagcatttattgaagatactgtcccttccccagtgtatgttcttggcacctttgtcaagtgttcacttgacatgagtgaacttgaatgagctcactgcagatgtatggatttcactctattccattccattggtttatgtgtctgtttttatgccaatacaatgctgctttgtttactatagctgtgtagtataatttgaagtcaggtaacattatgtcagaaagttaaatcaagctaggtggaaatgtttttaagtctaaagatgaaaaaaaatggagtactaggaaatcaaaattgtgaaaattgagaaattcatcagtttttgtttgtttgttttttcag

SEQ ID NO: 589809 - DNA, 591 bp, Homo sapiens
aaaattaaattaaacagtaattaagtctataataaaattttaataacatatatatttacctttttgttgttgctgttagggtcctctctacccatcctatttttatttaataatcatagttttacactcgtgctttgaatttgtgcagttaggctaacttttacttaaatgtgacasaacaatccaaagtcatcattacttaataaaacatagactttacatttttatgtaagccaaattcagacaccaaagtaagtgtctttatagtgttagagattcaggcttctattatctagccactaggccacacttagcctatgactccatggcccagagctgtgagagtcccagccatcactttggtagtcagccaccatgaaagaagaaagaaaaaaaaaaaagtagcaaaggatttgtgccagcttatttttatgtttttcacaaaagtaacacacatttgcttaagttgcattgcctagaacttattcacatggtctcaccaagctggaaggaaggctaacaaatgggttttgtttgcttattacacactgtgctgaataaaacttgggttattttactaaagaaaaataa

SEQ ID NO: 589810 - DNA, 564 bp, Homo sapiens
agttcatgtcctttgcagggacatagatgaagctggaaatcatcattctcagcaaactaacacaggagcagaaaaccaaacaccrcatgttctcactcataggtgggagttgaacaatgagaacatatgggcacagggaggggaatatcacacaccagggcctgtcagaggtaggggtcaaggggagggataacattaggagaaatacctaatgtagatgacaggttggtgggtgcagcaaaccgccatggcacatgtatacctatgtaacaaacctgcacgttctgcacatgtatcctagaacttaaagtacaataaaaaataaatttaaaaaagtccctttagatttgaaatagttttaactatgttacagttaaatgtttaaaaaaaaacagcctagagactgtctctttcaatgtactctcttccttaaacttacattttaatgttgaggatttttttaggcactgctaattgccctccaatcatgtatgagaagtataagaagtagagttattgttgtagaacagcttaagtttgaaatcactgggaaggccttgtttt

SEQ ID NO: 589811 - DNA, 622 bp, Homo sapiens
agatgttcaatattttgaatacaaacattagtgcttggcagaatttatataacatggcacttcattttcccaagaataaaaacaccatgtacaattactgagaaactaatgaatgattgtagcaaaggggtttgtctagaaatgtttctgtagcaaagtagttgactcaagtaccgctctccaacactataccttgacacattcaagaattaactaatgatagagaagactaatagaaaaaatgaacttaccatagtatttttttattgtaacctgataaattcatagcccaacaaggtaattattttagaacttaagcaacttaaacataatattgatatgataaactctagctctaaatgctagctctaaattgtgtacaactataaaaaataatattgtcaataaatatgacttcacatgcaaggtttatgtagatctatgttctgtgggatagtcacttagtcacagtgyttcatcacacacacaaaaaaatcttgccaaaaaattaaaaaaaaaaaaagagctcgtcagctctcaactataagttggcttatatgtgagttatgcaaaggttaacattttaattttatgataatacggaaaataattatgagtgcgt

SEQ ID NO: 589812 - DNA, 490 bp, Homo sapiens
gcctcactagctctgtgctcctaagtcaaaacaaacagacaaaactgacccggaaccacacaaacaaacacaaatgcaagcaaaataccatttctcttctcataacctatttctgcaaatatttaatgcagggtgctttgtaattcaaytttccaaaccattcctgatgttgtaagcttccaatctttcacctattttcaaatatatgacctcagatctgtcactgattctgttcctacagtactggctgcttctgtctctctccatgactaccagtcatgcctgctttttagattgtgaacaaaacttctctgaaaaggaatttggaggaaagacactttattccagtgaacagtttgcaaatcagggagatggggccttggaatcttagaacctgtaacgtaaaatgaagaagtgttccagagaacaaagagagtgttagggttttgcagcaaaagttcttgcccaagttcccaataatgcttgttta

SEQ ID NO: 589813 - DNA, 435 bp, Homo sapiens
ttttagcattttgttgcatttctttctgaaaatgtatattacgtgtgttaaatagaattattttaattttaatgtttgcatttttgtagcttctttgtgatatcttcattcttttttttttttttttttgtattcctggagattgtaattttctgctgctagacttgtatgggccctttataacaggggtctcaacccccaggccatgcggacctgtaccagtctgtggcctgttaggaaccaggccacacagcaggyggtgagcagtgggcaagtaagcattaccatccgagctccacctcctgtcagttcagtggctacattagattcttacaggagtgcaaaccctattgtgaactgcacatgcaaaggatttaggggatttaggttgctctccttacaagattctaacgcctgatgatctgaggtggaacg

SEQ ID NO: 589814 - DNA, 565 bp, Homo sapiens
  misc_feature 32: n = A,T,C or G
aagtggttacagaaatcagaaaatataaaaancctcttccaatttgtcttctacgatcttcctgatctctaacctctttagattgccgtcattaaactattcaagaaaacaaacctctgacactggtggcagtaaggaagcagtacaatgaatgagcttatatagttatttcatcagaaataggcacagattaaaaaaactgatgagtatattytgaatttttcttctataacatattttatgttattaacatttgatttttctaatatattgaacattgattaggtgtatatactgtaagtatattatgtatggaattaattaggctttattatgagatacatttattactctttttctttactaaattaatggcttatattagatcgttttgctgcctagaccagctgatagattttagcttaatattgctcacagaaatcttatgattctaagcagtattacgtaaattctactatgtcagtgatagttcactatctcttcattttcattctaaaaaataaattattaattggaagcttttagcaatctgagcttaacttga

SEQ ID NO: 589815 - DNA, 536 bp, Homo sapiens
attaatctatgaactattacttacgctagaccttgtgttacaagctgctaattaagtattaggaaaagcaagtatcttctccatctacatgggatatactcttcctggaagaacagacaaaaattaatcagataacaaatgtagagtgtaaaaactgtaataagactcagaagacagaatactataaacacagcacattgggatctgacttagtttggaagaattggtgaaggttaattgtgataggagcattggasctggtatatgaaatatgcatgaatagtatagaactaggtgtatgtgtgtatgtgtgtgtttggggggatgagagaagaatgaggtcagaatgaaaactgcaggattccaggccatatgggacattgatagaccactggcagggtgaagtataaggattctaacaaacaatgctgacttggactgagaatggacaatgaaggtttggtataacatgcaagaacagtgttcagaagagattcaccagtttccttataagaaaatgcaatgattctgtattg

SEQ ID NO: 589816 - DNA, 551 bp, Homo sapiens
gaaaactgcaggattccaggccatatgggacattgatagaccactggcagggtgaagtataaggattctaacaaacaatgctgacttggactgagaatggacaatgaaggtttggtataacatgcaagaacagtgttcagaagagattcaccagtttccttataagaaaatgcaatgattctgtattgtattttttatctcaatggatatgggaatctattgaaaagtcagaagcaaagaatgccatgctctaatatttcctttgaagagaatactttatagtcaggaggaagcagtcaaggcaagatatgttggaaggtattgaagaaatccaggtaaagaataatagtaggcaatagtccggagaaaaactgacaaaacattaaggtggttttggtaaaaggacaaggaaaggattaaaaagagagagctgggygtgggggctcatggctgttgtaaatcctctcactttgagaggctgaggcaggaggattgcttgagcccagagtccaaggctgcactgagctatgatctcgccacttcacttcaac

SEQ ID NO: 589817 - DNA, 622 bp, Homo sapiens
aggtagctaatttctgtgggaatttttagatgttaaacctcagaaattctcagaaatcctgttttctttgcactatgtacatgaaaagagtgaaagcaaacaaaaacaaaaaatctctatttgtagtttagcacctctggcccctcctctttggctgagaagagatcagatgtccaaatatcctgcccctagagagagcacacagatggacctcagaaggatgttgaagtctgtgggctccccagaaagctgagatagttatatgtgagcccttttcaggcagggataggagagctttcaccaaaactagtgaaatcacctaagccagagacttatggatatccattctagggagacaactcatcttttggcctgaagttattagattatttttctccattactttgctgtttttgctcttgagaaaagggggttttttcatctttcctatgttatcctgagagtcaaatatggtgaatagtcgaatggggataacatctcacgaagtcattctgaggatcagataatttctggrtggatggcaggccagatacctctttgttgtttgcatgtgttttttcagttatagaactttcaaagatgagattggagtttagagata

SEQ ID NO: 589818 - DNA, 571 bp, Homo sapiens
caataaataagtgcctaagcctaccttctgagaaaataactgccttctgagaaatgcatctatagactcaagtctttctgtctccttaaatgtgtcccatagagaaaggtggaatgtcccagtggataagttaggcaagtgttatctgctctgtaaatgcaatcttgcttacaggcagatcccaagctccagacttgggagagtacatagagcagcatggaaagactgcttctggctagaattctaagttgcattttcctattcagatttagcacgttaacattaataaatgtattctctcccacatgacttccaaatctatctactaaaacttcaatatggaaaaaaatgtattgtgaatatggaaatatacatttttcttttaaattccttaaacaagagttcattgacataaacttggaaaagttaatcatagacacgtatttattatttatatagttattttttaatatgatgtaccaaaacattaacttgtggtaagataacaaattcacctatattatttrgttctatggatcattttgtgatataaaagcacacacacttgtat

SEQ ID NO: 589819 - DNA, 538 bp, Homo sapiens
tatatcattgaattttttttcccatttatatatgtgattctcaaaaaagtttgttatacattctctctgtattttcctcctgttttttttgtttttgtttttgttttttttaatccactctaatcagagttttgttctggacatgactctgaaatagcactggcaaaataactacatgacattaaactgccaaatacaacactgaattatccagctattgccaaattaatgctgcataacaacttcagaatctcagtgggttacaaaaaaatttattatcagggccgcatgttgcaggttgagtacagctggactaatttaggatgggcatagataagtggctttgctttargtggcttgtttatttggattggattcaagctggccatttctctcatcatccctagcccagctgctatccagagcatatctttttcatagtgaatgatggcatgtttttgtcagaataagtagcaagagcataagagattgaaccaaattgtgcaaatctttatggcatctttttatattgcatttg

SEQ ID NO: 589820 - DNA, 635 bp, Homo sapiens
aatgtccatgagccctatattaacaatgttaggaaaagaaattccactcactgtaggagtatactgttaagttatgctgcataggataggagaagtataattccaattcagagagagtgtggaaatttgcaaataataatccaatctatcactaagagtcaaatctcagtcttcatctaattgtttttatttttctgcacttgacttctggcatcccaccctcattattctctttctaactcaatagctgatcctctttagtctcctttggtgctttctttatatctttctttcttcttggatgacctcagaactaagttcttgracctcttctaggttatctcacctaatttcatatttctaaatattgtcagtatgattaaaaacctctccaagttaaatctctatcctgcaagtctctcttaaactttgaacttgtatagccaacagccaactcaatatttaccattataaatccaaggagcatctcaactttaacatagctgtctaagtcaagggctgctattacaaagtagcatacttaggtggcttataaacaacagaaatttatttctcatggttctggagactgggaagtccaagatcaagatcccagcagattcagagtctgatgt

SEQ ID NO: 589821 - DNA, 630 bp, Homo sapiens
agcattcttgtgggacacacatattttaacattttttttccttcagagatatatattcatatatctcttcccgatgtttctttctcagcagttttccaattacgtttcttcaaattccctgaccatccagtcaaaccattggctacagcccatgaactgggatagaagaactttttctcatttctcctttgtggcaaaatgtgtgcaaccaggtaccctgttcaaagatctactcactgggaagattttccatcatgactctccttcagggatgtccttgagaggggctgttgtgatgctgttgcccagttttggggggaatctgyggagtcactaacctggctaaatttatgataatcctctgtcattctccaagatccatttgtcttctgcataggccaaataggagagttgaatggagatacggtgtgaattgctatccttgcatcttttcttaacagtggcactaataatctctgcaatccctcaatgaatgttttattatcagtgatttactatgttcatgggtagaggccattctagtgttttcacttggcttttcccatcataatagccctaactacacagatcagagagcaaatgtggggattcttgcagctgctatgtatg

SEQ ID NO: 589822 - DNA, 622 bp, Homo sapiens
ctacactgaagattgtttttaatgttgggacattgcttcactaagaatttttgagatggaggaagccaatgaaaagactgaagtgggtagctgacaccaatatgtttagtatggactagatgagaaagagaagtgaggttgtcatagcaacgaagacactactgcagtggtctaattacatcattgcattcatttttctaaggatgatttttgtgtgtttgtaagaagagcattktttatactagttaattgttttgaaaatggacaaactgtagaaacagtagaacaggcacttctggttacaccaacatgaaacattactgatacattctttgcggagaatgtctaaatgtagcaaactaatctaaatagagatgtttcagattaaaatgttacatgatctccttattaatgttacttgagtgcatatttcagcactctaggaactgattttattattaaaactatcttttctaaatcttaatttctggatctccagtttcagagtcacttgttgataattgttgaaaatgtagattcctgactctcacttcatgcttactaaatcagaattactggaggtgggaccaggaatttgcatttatttaatgaaaaagataag

SEQ ID NO: 589823 - DNA, 603 bp, Homo sapiens
cgtacccaccaggaagaatgaacgactccagatgcaccacctttaagagytgtaacactcactgcaaaggtctgtggctttactcctaaagtcagcaagaccacgaacccaccagaaggaagaaactctggacacatctgaacatctgaaagaataaactccagacacaccatctttaagaactgtaacactcactgcgagggtccacgggttaattcttgaagtcagtgagaccaagaacccaccggaaggaaccaattctggacacattttggtgaccatgaagagactgtcaccaagtggtgagtaccgtcggaccccttttgctttctattctgtcctatttttccttagaattcaggggctaaataccaggcacctgtcggccacttaaaagcgactagcgtggacaccggactaaagacacgggtgtcaggctttctgggaaagggctctctaacaacccccaactcttcggagttgggagcattggtttgcctggaaccaacttccacttttcctgtacttccgggctgaactgagggtcaacagagaggaaagccattcagctctgggatcccaacaacaagttggttgaccctg

SEQ ID NO: 589824 - DNA, 603 bp, Homo sapiens
cgtacccaccaggaagaatgaacgactccagatgcaccacctttaagagctgtaacactcactgcaaaggtctgtggctttactcctaaagtcagcaagaccacgaacccaccagaaggaagaaactctggacacatctgaacatctgaaagaataaactccagacacaccatctttaagaactgtaacactcactgcgagggtccacgggttaattcttgaagtcagtgagaccaagaacccaccggaaggaaccaattctggacacattttggtgaccatgaagagactgtcaccaagtggtgagtacygtcggaccccttttgctttctattctgtcctatttttccttagaattcaggggctaaataccaggcacctgtcggccacttaaaagcgactagcgtggacaccggactaaagacacgggtgtcaggctttctgggaaagggctctctaacaacccccaactcttcggagttgggagcattggtttgcctggaaccaacttccacttttcctgtacttccgggctgaactgagggtcaacagagaggaaagccattcagctctgggatcccaacaacaagttggttgaccctg

SEQ ID NO: 589825 - DNA, 501 bp, Homo sapiens
aacactcactgcgagggtccacgggttaattcttgaagtcagtgagaccaagaacccaccggaaggaaccaattctggacacattttggtgaccatgaagagactgtcaccaagtggtgagtaccgtcggaccccttttgctttcyattctgtcctatttttccttagaattcaggggctaaataccaggcacctgtcggccacttaaaagcgactagcgtggacaccggactaaagacacgggtgtcaggctttctgggaaagggctctctaacaacccccaactcttcggagttgggagcattggtttgcctggaaccaacttccacttttcctgtacttccgggctgaactgagggtcaacagagaggaaagccattcagctctgggatcccaacaacaagttggttgaccctgcagccatgaacggaactttcaaagtcatgtcacccaagcaagactcgcccatctatcctatctatcctgacccttgcctcctgg

SEQ ID NO: 589826 - DNA, 501 bp, Homo sapiens
aacactcactgcgagggtccacgggttaattcttgaagtcagtgagaccaagaacccaccggaaggaaccaattctggacacattttggtgaccatgaagagactgtcaccaagtggtgagtaccgtcggaccccttttgctttctattctgtcctatttttccttagaattcaggggctaaataccaggcacctgtcggccacttaaaagcgactagcgtggacaccggactaaagacacgggtgtcaggctttctgggaaagggctctctaacaacccccaactcttcggagttgggagcattggtttgcctggaaccaacttccacttttcctgtacttccrggctgaactgagggtcaacagagaggaaagccattcagctctgggatcccaacaacaagttggttgaccctgcagccatgaacggaactttcaaagtcatgtcacccaagcaagactcgcccatctatcctatctatcctgacccttgcctcctgg

SEQ ID NO: 589827 - DNA, 603 bp, Homo sapiens
cgtacccaccaggaagaatgaacgactccagatgcaccacctttaagagctgtaacactcactgcaaaggtctgtggctttactcctaaagtcagcaagaccacgaacccaccagaaggaagaaactctggacacatctgaacatctgaaagaataaactccagacacaccatctttaagaactgtaacactcactgcgagggtccacgggttaattcttgaagtcagtgagaccaagaacccaccggaaggaaccaattctggacacattttggtgaccatgaagagactgtcaccaagtggtgagtaccgtcggaccccttttgctttctattctgtcctatttttccttagaattcaggggctaaataccaggcacctgtcggccacttaaaagcgactagcgtggacaccggactaaagacacgggtgtcaggctttctgggaaagggctctctaacaacccccaactcttcggagttgggagcattggtttgcctggaaccaacttccacttttcctgtacttccgggctgaaytgagggtcaacagagaggaaagccattcagctctgggatcccaacaacaagttggttgaccctg

SEQ ID NO: 589828 - DNA, 610 bp, Homo sapiens
ctttctgggaaagggctctctaacaacccccaactcttcggagttgggagcattggtttgcctggaaccaacttccacttttcctgtacttccgggctgaactgagggtcaacagagaggaaagccattcagctctgggrtcccaacaacaagttggttgaccctgcagccatgaacggaactttcaaagtcatgtcacccaagcaagactcgcccatctatcctatctatcctgacccttgcctcctgggtcctaacgcctgtcagacaaacttcctcccacctcccttctctgaggctagtactgcttctaaaaaccactccctgtctctggtgcttttctagtttctcctataagaatgatttatagtataaacttcaggattctgttaacttctttgggcacccaggctcaccaatcagaaagacttaatttttgcgcaaagccccattggaggggggcctatctggaattttaggatccctcctcagactagcaggcctaaaaaaagttattcctgaagctaggatatggggagcttcagaaatgatatccttcctattcaagtgaggacaaaaggcatcactcttcccactctggagttccctt

SEQ ID NO: 589829 - DNA, 599 bp, Homo sapiens
ttggttgaccctgcagccatgaacggaactttcaaagtcatgtcacccaagcaagactcgcccatctatcctatctatcctgacccttgcctcctgggtcctaacgcctgtcagacaamcttcctcccacctcccttctctgaggctagtactgcttctaaaaaccactccctgtctctggtgcttttctagtttctcctataagaatgatttatagtataaacttcaggattctgttaacttctttgggcacccaggctcaccaatcagaaagacttaatttttgcgcaaagccccattggaggggggcctatctggaattttaggatccctcctcagactagcaggcctaaaaaaagttattcctgaagctaggatatggggagcttcagaaatgatatccttcctattcaagtgaggacaaaaggcatcactcttcccactctggagttcccttccctccctcagggtatggctctccacttcacttttggggcataacatctttataggacatgggtaaagtcccaatacaaacaggagaatgcttaggactctaataggttttcaagaattcatcagtagggccactaaatatg

SEQ ID NO: 589830 - DNA, 599 bp, Homo sapiens
ttacatgaatatgggcaacaagttacccatttgctgtcccctacttgaggagggaatcaatcctgaagtctgggtattggaaagacaatttggaagggcaaaaaatgcccacccagtccaaatcaggctaaaagaccccactacttttccttatgaaaggccacatcccttaaggcctgaagcttataaaggattacaggatattgttaaatatttaaaagctcaaggcttagtaaggaaatgcgcagtccctgcaacaccccaattctaagagtacaaaaaacaaacggtcagtggagactagtgcaagatcttagactcatcaatgaggcagtaattcctctatatctagttgtgcccaayccctataccctgctctcccaaataccagaggaagcagaatggttcacagttctggacctcaaggatgtcttcttctatattcccctgcattctgactcccagtttctctttgcctttcaggatcccacagaccacacgtcccaatttacgtggatggtcttgccccaagggtttagggatagccctcatctgtttggtcaggcactggcccaagatctaggccacttctcaagtcc

SEQ ID NO: 589831 - DNA, 569 bp, Homo sapiens
aatatctctcatgaagagatgctttcactgtcaattggcaagtggacaatatgaggcagtaaatgaagatggtgtaggcaacatccatctaggaaaaaggggatatactcctttttgtactgatatttaaatgtggaaataagtctagcaacctgttggttagagtccagctggcacgtaccataaaggtagtctgagacttacccagagagmtagtctataagggactctgaggatgtgtgaagtattaccagaggatgagaacatctgtgcccaagagcatcctcataagcaccattatctgcagcaataccagaagcattcatggagatgtagaataaaacaattttagttgaagaacatgaaatacacacatctgagcacatataaggcaatgccatagataataattagtggagattttcttttaatgattattccttgctggaattgacatttataattttgattttagtattacgactactttttaaccccatattcgttagatctatgacttttggttagactttattatcttagtttaagttaagacataatacgatgac

SEQ ID NO: 589832 - DNA, 569 bp, Homo sapiens
aatatctctcatgaagagatgctttcactgtcaattggcaagtggacaatatgaggcagtaaatgaagatggtgtaggcaacatccatctaggaaaaaggggatatactcctttttgtactgatatttaaatgtggaaataagtctagcaacctgttggttagagtccagctggcacgtaccataaaggtagtctgagacttacccagagagatagtctataagggactctgagratgtgtgaagtattaccagaggatgagaacatctgtgcccaagagcatcctcataagcaccattatctgcagcaataccagaagcattcatggagatgtagaataaaacaattttagttgaagaacatgaaatacacacatctgagcacatataaggcaatgccatagataataattagtggagattttcttttaatgattattccttgctggaattgacatttataattttgattttagtattacgactactttttaaccccatattcgttagatctatgacttttggttagactttattatcttagtttaagttaagacataatacgatgac

SEQ ID NO: 589833 - DNA, 569 bp, Homo sapiens
aatatctctcatgaagagatgctttcactgtcaattggcaagtggacaatatgaggcagtaaatgaagatggtgtaggcaacatccatctaggaaaaaggggatatactcctttttgtactgatatttaaatgtggaaataagtctagcaacctgttggttagagtccagctggcacgtaccataaaggtagtctgagacttacccagagagatagtctataagggactctgaggatgtgtgaagtattaccagaggatgagaacatctgtgcccaagagcatcctcataagcaccattatctgcagcaataccagaagcattcatggagatgtagaataaaacaattttagttgaagaacatgaaatacacacatctgagcacatataaggcaatgccatagataataattagtggagattttcttttartgattattccttgctggaattgacatttataattttgattttagtattacgactactttttaaccccatattcgttagatctatgacttttggttagactttattatcttagtttaagttaagacataatacgatgac

SEQ ID NO: 589834 - DNA, 517 bp, Homo sapiens
tcctgaagggtgttttccaccttggtktcattctccatgtcactttcaggtacaccaatcaaatgtagatttgatctttctcatagtcccatattttttggaggctttgttcatttcttttcattcttttttctctaatcttgtctgcacactttatttcattaagttgatcttcaatctctgatatcctttcttctgcttgattgattcagcttgtatacttgtatatgcttcacaaagtttttgtgctgtgttttttggctccatcaggtcatttatgttcttctctaaactggttattctagttggcagttcctctaaccttttatcaaggttcttagcttccttgcattgggttagaatatgctcctttagcacgtaggagtttgttattactcaccttctggagcctacttctgtcaattcatcaatctcattctctgtccagtttttttcccttgtaggtgaggagttgtgatcctttgcagaagaagaggcattctttttttggaacttt

SEQ ID NO: 589835 - DNA, 517 bp, Homo sapiens
tcctgaagggtgttttccaccttggtgtcattctccatgtcactttcaggtacaccaatcaaatgtagatttgatctttctcatagtcccatattttttggaggctttgttcatttcttttcattcttttttctctaatcttgtctgcacactttatttcattaagttgatcttcaatctctgatatcctttcttctgcttgatygattcagcttgtatacttgtatatgcttcacaaagtttttgtgctgtgttttttggctccatcaggtcatttatgttcttctctaaactggttattctagttggcagttcctctaaccttttatcaaggttcttagcttccttgcattgggttagaatatgctcctttagcacgtaggagtttgttattactcaccttctggagcctacttctgtcaattcatcaatctcattctctgtccagtttttttcccttgtaggtgaggagttgtgatcctttgcagaagaagaggcattctttttttggaacttt

SEQ ID NO: 589836 - DNA, 592 bp, Homo sapiens
tttggtacttgagctaggaatttgaatcctagagcacattcttttctttaccaattcatccagtgacattttcaggtgagattkggtgtgttcagggtggtagggccatagacatatccggtgacattagaagtaaccaacgaacataattatattaattagttttccaaaaatgtttgaaagtatcatatacagagtcacctagctccttgtttcttatacgtggttgattagaattatacaatgcagatatgttgcatattttttataaacagttcatgccatggactatcagtgttctctttactaacaaaagaaagtcatcattgtctttaatcagattagggaatcagttctagataccccagaaacaattcagaaaactcatccttaaaattttgttttcctagaactactctaaacactaaaatctgtattagccagggttctccaaagaagttaagaaggctgagaagtctcataaccttccagctgtctgcaagctggaagcccagggatgccaaagtgctactttgaatccagcttaaatctggtggcctgggaaccatggaaaccagtagtgtaattcaca

SEQ ID NO: 589837 - DNA, 501 bp, Homo sapiens
agatccaattatcttaatgtgaaccaggctttacttttcattcacacccgggccagtgaccaatatcaggtttcaggtctcttgcctgtaacacgctctaacataatgttttcaaattcatgtttgagaggtaaacaagattaaccaactctgagtaattggaatagaaaaaaatrtacttcaaaacatgatatttctccaacaatgtttggtgatttatgaagcaaggttcatgaaaagggcaggaaataatggaaactaagaggttggaactacaaccaaaatcatgctttgggtccacccaatggtaagtttcccaaataaacaatgagtttcaaattcagagcatgagagaaagtgtgaaatatttactgttccaattgtttttttccttttccaccttcttcctaatcaatcagatgcccatattataaagttaactttagtgttactttttatttgtttgtatttagcaacgttgagtgagttatttaaattctt

SEQ ID NO: 589838 - DNA, 501 bp, Homo sapiens
agatccaattatcttaatgtgaaccaggctttacttttcattcacacccgggccagtgaccaatatcaggtttcaggtctcttgcctgtaacacgctctaacataatgttttcaaattcatgtttgagaggtaaacaagattaaccaactctgagtaattggaatagaaaaaaatgtacttcaaaacatgatatttctccaacaatgtttggtgatttatgaagcaaggttcatgaaaagggcaggaaataatggaaactaagaggttggaactacaaccaaaatcatgctttrggtccacccaatggtaagtttcccaaataaacaatgagtttcaaattcagagcatgagagaaagtgtgaaatatttactgttccaattgtttttttccttttccaccttcttcctaatcaatcagatgcccatattataaagttaactttagtgttactttttatttgtttgtatttagcaacgttgagtgagttatttaaattctt

SEQ ID NO: 589839 - DNA, 640 bp, Homo sapiens
gtttaggattattttatattaaaattaagatgctttcttctgtttcgtctcttataattctctttttgtgttttatctccatgccaattttacatggctgtgtgtgtggactcagagtgcctcttgaggaccagccaacttttttctctctgctgcatacctaagtattcagttccaaatattttaattggcatggggaagtaataaataaataaataaatctttcttagaacttaaatttaagtcatgttttaattctacatttttaccatgaattgaataaataaatatttaaatacattcatgaactaatggataaagaaaagtttatatattaytaatacattgatttgattcaactaggacaatataaagacctgatttgtttgtatttaattagcaagccattattccagcattatagattgttatagcaatagccctcaatttaatcatggctgtttgtatccatgctattgagaagactaaaatccatttatacttaacttggtcacgtgactcgctttggacagcaagccctggggtaacaggtatatgtgatagaaggagggacttcaatgtgcttctgctttggaatataccttactttgctgtttttttgaaaactatgatcaccccc

SEQ ID NO: 589840 - DNA, 605 bp, Homo sapiens
gcattttattaaaaaatagaaataattgcttttgtctttttgagatcaatgaattgaagtgagggtaaagatacatagacttagagttagcctaacttggctgtagataatatttacatagtcatagaagtggaaatgtggctattgggtttcaactttagaatttatggaagaatcaatgtttgaaaaacttggttatggttgcaggaaataaataaatattctagcaacgtgaatgatagaaaatagaagagggaaggaatacatttactaatagaaagaagaatagatgaaagtactaaaacccttattttctaatatgaagacatggtgagttaagagacactgtcataagttaatgggataattaattttttaattaagataggaaggtaatctacacaaaactaaacatagtacactattgactatgggagtayatcacaggaaaatagggcttagtatgatgcaggcttttctctatctttaattgttgagcattaatatatgtttttctaaatttgataaattcagaaataaagatgttaacacatgatgaagaattatgtggaaatcaccagatatattaaagtgacagaagtgga

SEQ ID NO: 589841 - DNA, 420 bp, Homo sapiens
cttataactgattataagatgcactaagcaaaaacagaaacactaaaagagaaaagaaaaggccccaagtaaattatgacctgcacacactactatttaatagaaaatagaagttaaaatataacttagaatatagtgttacaaaatactgtatgtagtatgtagaaaaatgcttttttttcacagacataaagcatgcctcctcatagagatacagtactctacaatttctagctayatgcataattctaaattttcatagtagtcattatttaaaaagtagaaaaaatgagtgaaattaattatatttcatgtaaccccatatattcaaaatattatcatttcagcatgcattctatgtaaaaatatattaatgctatatattttaattttgcactaagtttttgaaatataatctgt

SEQ ID NO: 589842 - DNA, 649 bp, Homo sapiens
aagcatgcctcctcatagagatacagtactctacaatttctagctatatgcataattctaaattttcatagtagtcattatttaaaaagtagaaaaaatgagtgaaattaattatatttcatgtaaccccatatattcaaaatattatcatttcagcatgcattctatgtaaaaatatattaatgctatatattttaattttgcactaagtttttgaaatataatctgtagtttatattacgatacattctgattaagaatagccatattttaagtgtgtcataaccatatgtggccagtagctaacctattggacagcacagatacagatccgttctatcttcacagaatattctattgaagagtgctgacctggaggggaagtgaaaataaaatagacattaataataaagtgtgataaatggtgtacagagcagaggcaacaaattcagccttggatgttaggaaatactcctagaaatgacatcyccttattctccatacatgatatatctgcaggaaacctctgattaattttgaaattttgatatttatgttcactggggtaaaagttcttacttccaattattattagcaaagataatttctatttatgaatctaattaatttcctaatataaattagtcaa

SEQ ID NO: 589843 - DNA, 543 bp, Homo sapiens
ctacatcattgaatttctatcatctattataggtgtaatattttcaaataatttcagaagtctggttaaacatgacctcccttaactgaagcagcagtgagtgtttgtcataaaatttttcttactatgaagaatttccacagtatcactttagtagtttccattcttcttcctactcctctaattatatttactcatcatatttttacataaaattataattggcagagattgatgaagaaaaagatgaaaaatataaaagacatgagatgttgacagtatttctaatcatttcttacactgaattaaaaacacagagaaaactgcataaaatctaaacgtgcagctaaaaagttattatatagttaacaccyctataaccactttcaaggtcaagatgtgaaataatatgagctccctgcacacccattcaaatcacaaactggtccatttcttctaaaggcaatcactatcctcaatgtaaaggtaataaccactcactttctttgtagtattactacctaaagaatgataactcaatgg

SEQ ID NO: 589844 - DNA, 508 bp, Homo sapiens
actattacatccagcaagacactaagaacgactacccaraaagcactgctgtacctgtgtggtggagatgactgaagcccaacatagcttgagcttccagaaacggtgctccccacgcttccagctaacaggtctagaaaaccagcttgtggctaacagtccctgtggccgtccctgtgaagatgacattagcattgcccccaacctcattttagttgcgtaagcatagcctggctttcctgtctagtctctcctgtaagccaaagaaatgtacattccaagcagttggaagtgaaatctatgatgtgaaacactttgcctcctgtgtactgtgtcataaacagatgaataaactgaatttgtactttagaaacaaaaaaaggaaaatgtttatataccttgaagttatgaatatatttatctatattaacttttggatcgtttagtattttgctttttgtattttattctatattgacatgactcacatttgagtcttttttttcca

SEQ ID NO: 589845 - DNA, 612 bp, Homo sapiens
agcaagacactaagaacgactacccaaaaagcactgctgtacctgtgtggtggagatgactgaagcccaacatagcttgagcttccagaaacggtgctccccacgcttccagctaacaggtctagaaaaccagcttgtggctaacagtccctgtggccgtccctgtgaagatgacattagcattgcccccaacctcattttagttgcgtaagcatagcctggctttcctgtctagtctctcctgtaagccaaagaaatgtacattccaagcagttggaagtgaaatctatgatgtgaaacactttgcctcctgtgtactgtgtcataaacagatgaataaactgaatttgtactttagaaacaaaamaaggaaaatgtttatataccttgaagttatgaatatatttatctatattaacttttggatcgtttagtattttgctttttgtattttattctatattgacatgactcacatttgagtcttttttttccaaataagcctatctaattttctcattaccatttactaaaacgattgtatgtatactaaatattgtaactttatattacaaaattgtatctgtagaacaagtcatgccacattgttgt

SEQ ID NO: 589846 - DNA, 555 bp, Homo sapiens
gacactttcatctgcacatcaactcagtatttatttgtctaatatggatgtgtgtaaatataatttcaccctctagcataatataaccagattaattgatcattcacttattttttttagtaaaagaaagcctgtaaaacaagtcactatgaaccacataaataacaatatcacaacatctctggtaaaattgtactaggaaggaattccttttccttagtttaagggtacgaaatgcacaagaatcaagagatgttcatagaacttcctgggtatagatattctcctgccttctgcttctcctatttcttctttttcccccttctrtatttctgtaaagccttcatgaccctccttctgaaggccatcactatcccctctttctaatgggctctctcacctaaattatgtcaggtgtctcctgaattgtttctcaaactgtgctccaagagtaggtatcagtgaagagttgctgcacatagtcgtaaaggtcctgaacaaacttaagaagaatcgtcacatagactaagagggaatttgagaatgttatggctt

SEQ ID NO: 589847 - DNA, 497 bp, Homo sapiens
agagcacatagttgtgtaggtaaaactaacctagtattccactgtggaatagtctgaaatgaagtttatgggtgatgggaggcgaggtggagccagataatgaacagcattgaaatccagccacaggaatttaacatcataatcctattgcatattttagtgctgtcataaatgaaatgaagtaatctacyctaatgttgatttaaaatttttgtattatagagattttccacaataaaattttattgagtgaaactttacaacaaacagtataataaccattcttatttggatatggcatcattattgattcaagttaacttgacaatagttcacaatggtagccattttaccaaaatatactaatactttccctttgaaatttagaacaatttgttaagtagtgctccattcattgacttatcataggaactaaagaataggaaagaaagaaaagaaaacctttacttgtgatatgaaacatacacatagagaat

SEQ ID NO: 589848 - DNA, 313 bp, Homo sapiens
cagacacgcaacaccacacagcctcattcttarcataaacaattctaatagtgatattttactgatttttaagttgtattttcccaatgactaatgatattgatcacgtatttgaaatttaaaacctgaataaaaatattttgagcatgtcattgattttcattttagatatttattcattttctgcactttttcttctatttctgctcattcaggaaggcaaatgttgtgctttatttcctcagagaaagtgtttgattggactgtaagcagaaggcactttagaaacttaccggcttgttttccccaaacc

SEQ ID NO: 589849 - DNA, 313 bp, Homo sapiens
cagacacgcaacaccacacagcctcattcttagcataaacaattctaatagtgatattttactgatttttaagttgtattttccyaatgactaatgatattgatcacgtatttgaaatttaaaacctgaataaaaatattttgagcatgtcattgattttcattttagatatttattcattttctgcactttttcttctatttctgctcattcaggaaggcaaatgttgtgctttatttcctcagagaaagtgtttgattggactgtaagcagaaggcactttagaaacttaccggcttgttttccccaaacc

SEQ ID NO: 589850 - DNA, 313 bp, Homo sapiens
cagacacgcaacaccacacagcctcattcttagcataaacaattctaatagtgatattttactgatttttaagttgtattttcccaatgactaatgatattgatcacgtatttgaaatttaaaacctgaataaaaatattttgagcatgtcattkattttcattttagatatttattcattttctgcactttttcttctatttctgctcattcaggaaggcaaatgttgtgctttatttcctcagagaaagtgtttgattggactgtaagcagaaggcactttagaaacttaccggcttgttttccccaaacc

SEQ ID NO: 589851 - DNA, 313 bp, Homo sapiens
cagacacgcaacaccacacagcctcattcttagcataaacaattctaatagtgatattttactgatttttaagttgtattttcccaatgactaatgatattgatcacgtatttgaaatttaaaacctgaataaaaatattttgagcatgtcattgattttcattttagatatttattcattttctgcactttttcttctatttctgctcattyaggaaggcaaatgttgtgctttatttcctcagagaaagtgtttgattggactgtaagcagaaggcactttagaaacttaccggcttgttttccccaaacc

SEQ ID NO: 589852 - DNA, 564 bp, Homo sapiens
ttattcatacagaattattcatcatatgaatattctgtaacgaattactaagtatccacctttattgaactacttaaatgagaaaaaagttgcagaatatcactaaagtgaagaaaattcaggaccgttggattaatgaacattcaccattgaactctacttcttaagggcaagggcaatcttttcaaatgcatacccccactttcaagcatccagcacaaaaagtgatagataaacgtttgctgattgaatgtttgagcagggtttagaggttaatgcgaagatatttcttcagagagatgagcagtttttttttttaagtgagtgttttagtgttgaagaagagctgcaaggctatttttaacctacttattcagttagcacggcaggcagttgtagacagtggagaatkatgtgtccagtcacacaagacattttaagacctatgagtcttcccccaacacaatgttataaaatgtcctttttctaaaaatactggaatcaagtaattatctacttttgaattttaatgaataggccatctgttcattcaaattgaaaaaa

SEQ ID NO: 589853 - DNA, 574 bp, Homo sapiens
aatgtgcggtcctttccaatacctcttctaatgaaagcagttgctgctctgctccagctgacagttgccataagcaaaatagccmggttttgttttatctttcaatttatttttttaaagaaaaacaacaaatcaggattttaggtgaaatttcaaaattgttcaatattagcaacgaatttagaaaaaaaaaacaccatgtgggataaacacacataaccagatatgacccataggtgcccgcttcatggcttgtattctactatgttgtcttttcagcagtgctagcagagcccaggctaccactagctgctgctaatgtttccagcaaacttttaacccttcatggtgagttcaacaagttctgatctaaaaataacttatgaacacataatatgatagtaatggccttcatttactgagctcctatcatgtatcaactgagacaaagcctctaaggtggatattcttattaaccttattttacagataacaaagctgaggaacttgagcaggtgtatactctgcccaaggtcacactggtagcaagaaatagaattagttgtttgtccaa

SEQ ID NO: 589854 - DNA, 574 bp, Homo sapiens
aatgtgcggtcctttccaatacctcttctaatgaaagcagttgctgctctgctccagctgacagttgccataagcaaaatagccaggttttgttttatctttcaatttatttttttaaagaaaaacaacaaatcaggattttaggtgaaatttcaaaattgttcaatattagcaacgaatttagaaaaaaaaaacaccatgtgggataaacacacataaccagatatgacccataggtgcccgcttcatggcttgtattctactatgttgtcttttcagcagtgctagcagagcccaggctaccactagctgctgctaatgtttccagcaaacttttaacccttcatggtgagttcaacaagttctgatctaaaaataacttatgaacacataatatgatagtaatggccttcatttaytgagctcctatcatgtatcaactgagacaaagcctctaaggtggatattcttattaaccttattttacagataacaaagctgaggaacttgagcaggtgtatactctgcccaaggtcacactggtagcaagaaatagaattagttgtttgtccaa

SEQ ID NO: 589855 - DNA, 442 bp, Homo sapiens
tacgtaacatagatgacaggttgatgggtgcatggcatgtgtatacctatgtaacaaacctgcatgttttgcacatgtatcccagaacttaaagtacatatatatatatatatatatwttttttttttgcaacctctgccagccaggttcaagtgattttcctgcctcagcctcctgagtagctgggattacaggcgccttacaccgcccccagctaatttttgtagttttactagagacagggtttcaccatgttagccaggctggtcttgaactcctgacctcatgatacacctgcctcggcctcccaaagtgctgggattacaggcgtgagccaccatgcccagccaaagtataattttttaaaaaacgaaaagagacagcatggataaagaaaaaaaagaaagaaaagaaacacctgcgttagtttgctgatgataat

SEQ ID NO: 589856 - DNA, 595 bp, Homo sapiens
ggattaaatttaataaaatatggacaaggctgatataaaaaacgataaaccttacttcattagaaataaccaatttcacttatagaacaccatcactagtaattcactagcagttccattagagatatgacagaggccataaccaacatgacatgaaatactgaaacacatgctgagttatccatatgttttttattatgtttctagcacttcaaacgtatagaaaactggaaatgatgcaggttttgacttttcttccatttcttccagtggcaatgtgtactggttgcctaggaaactsttacagcaggggacagaactggctgtaccatcaccctgagctgggcatagttttcagtggtagcttgttagttctcagcccccacggaagggcacctgtgcagctctacttggtaccagagtcaatcatttccaaaaagcagaggctgtatattttgctgttagcattttggcaaaaagaaagaagaaaggggttgatgatggtgactgaggaggaaagcctgagcaggggctgttgaaggtagaactaagatgtgcaggtgatgagactgcagaatacaaagaatgagatact

SEQ ID NO: 589857 - DNA, 539 bp, Homo sapiens
attcctttgctgcttgaatctgggattctttttcttgtacttagggtgtacggaatttacctttctttggaatcatccttttttatggagttctgcatctgaacatgacctggccacgcatatgcacactgagtagttccatttcaaactagacgttctgttgagctcagaccattctggaattatttggcaacatctgaaacattttttttttttttttacctacaacacttctagatgtgaygttttctggagaattgataaactgatctggtagctgttagtggctaccaagccaagttttacattgcaatctaaatatattgttccttgtcatgtaatgacatttattagagaatctggcaaaagcccaaataaaaatacaggttttcacactgtttaacaatctgaggttttatgtctttttggtgaggtcattgaataccagtctcatttttactgcctctatttttgaaaacagtaaacagtcatatttttattgtcctacgtggttgcacaaactgacacattgccaagtg

SEQ ID NO: 589858 - DNA, 591 bp, Homo sapiens
gctctttgagaaccactgttctaagaataagaacagttaattttagttccagagtatgacttttcagaagtcatttgacctcttagcctcactttctttatctgtacaatagggaaaatacctagatggctacctcatygacaggggagagccaattaatcaataaatttgataacccttaactgctgaccttaactctgcaatgataacctgttatactgataattcaaatgccattttatattatttttatacacagtgtagaaatgtttatttcctgtggtatcatgtgtctttgttgtcagtatttgtcagctttcatgtgatatttttcccacctccctgtgaactcagaaatgaggaaagtagtttgcattccgaatatgcatttgggcaatagtatagatgttcatctatccaataaaccaggttcttttttttttttttaatggagtcttgctctgtcgcccaggctggagtgcagtggcatgatcttggctcactgcaacctctacctcctaggtttaagcgattctcctggctcagcctcccgagcagctgagactacaggtgtgcgccaccatgcccagc

SEQ ID NO: 589859 - DNA, 591 bp, Homo sapiens
gctctttgagaaccactgttctaagaataagaacagttaattttagttccagagtatgacttttcagaagtcatttgacctcttagcctcactttctttatctgtacaatagggaaaatacctagatggctacctcattgacaggggagagccaattaatcaataaatttgataacccttaactgctgaccttaactctgcaatgataacctgttatactgataattcaaatgccattttatattatttttatacacagtgtagaaatgtttatttcctgtggtatcatgtgtctttgttgtcagtatttgtcagctttcatgtgatatttttcccacctccctgtgaactcagaaatgaggaaagtagtttgcattcygaatatgcatttgggcaatagtatagatgttcatctatccaataaaccaggttcttttttttttttttaatggagtcttgctctgtcgcccaggctggagtgcagtggcatgatcttggctcactgcaacctctacctcctaggtttaagcgattctcctggctcagcctcccgagcagctgagactacaggtgtgcgccaccatgcccagc

SEQ ID NO: 589860 - DNA, 557 bp, Homo sapiens
accagaggttgatataatttttgaaaagaagctcaatcccccaatttttagattaattagcttggtgggatgatgccaatcatgagcaaaaatctggaatcaattagtgaaaatatagtgaacactaagacaggttgcaggtgatcactgagaatcatcttgagtttactaagacagattataccaaagtgatttaatttctctcttggaaaaaagtgaattagatttggagggaggctggagacccggtgtagacatactggatttctgtgaatgtttcactaggtcttcaatggcatgcttgtgaataataagaattgatatggtgctaatacattgagatggacttggaaatgccccttaattagtagatatcagttagaaggaaggctttttggtgggggattgtaagccccttagccttagtgtgactgtgttcatcctttctttcctgacttggatgatgtatcagtgagagagcccacaggacacagacagctgacttaagcagggaaatttgagkagagtttattaaaaggactatttacatgtggaca

SEQ ID NO: 589861 - DNA, 459 bp, Homo sapiens
ggcctgtcgtggggttgggggagaggggagggatagcattaagagatatacctaatataaatgatgagttagtgggtgcagcacaccaacatggcacatgtatacatatgtaacaaacctgcacgttgtgcacatgtaccctagaacttaaagtgcaataaaaaaaaaaaaagaaaatttcatcttctttgctttaggcttttttcttcttcccgtaatacctttgttatatgctgcttcctctgattaaaatattctttctttcctttctgggccacttttacttgccttttctttagcaacaagaagcctttcctgatwtatcccagtcaacccaagatagagtaacgtcttgcctacagtgtcacaggtctcttttttgggggccatttgtcactctggttgtttttgaaagtttacttctctaagattgtatatacagggaatgtacctttttct

SEQ ID NO: 589862 - DNA, 550 bp, Homo sapiens
ctggttgtttttgaaagtttacttctctaagattgtatatacagggaatgtacctttttcttgtctcatcagctcctgccacagcagcttattgatatgtgctcgttaagtgaaattcacaggaacctataaaattaaattatattcttaaactgaatttaatttagaaataaacatatttgtatcatgtcaatgcatttatagcaytttcaaacttgacttaccagccttaaacgcactccctttgcacccaactcaccacgctatgaggaaatacattatgaaatgatgtgcaaagacattttccaaagaaaaattaggattttcccaatttcactgctttcagttgaaatcatttttaatagaaaaaagttttatgaacaaaagaagtgtgatttaccagtatattagtgacataaagatcattttcacattctggcttttatcttgaactctaaactgcataggcaattaaaattataacacataagagctgggaaagatgatggtagacaataaagacaactttataatgtgggaaaaaacatag

SEQ ID NO: 589863 - DNA, 556 bp, Homo sapiens
cttgctctattgtcactctgcctttcagcttccactgtgcattctgcttccacctctgtgaggtgtaagtcctgccacagtctagtcagtggaggatgggtcagtactcctgcttcagtgactgtgtggccacagtcagaaaatattttgtttggtcatcagagctctcaggaccattactggcatatagtaagtgctcaacaaatatatgtggttattaatattactgtcatgattcttattacaaatctacccacttggcaaatgccagctatcagtgcattactccatgaaggaaaccactcctttgtgatcttatttttctccaggaratgcattgtggatctcaagaaagagtgagtccctttagtgctagccagatcactgttctttgatgtgaacctcacgttcaatattttactttttgaatattccttcttgtttctgcttttagtcatttcaatgcattttggtttggttccacattttatagtttttagggctatatggtgccccctgccaagtgcttgtatgtttggcttatttcttaagacac

SEQ ID NO: 589864 - DNA, 409 bp, Homo sapiens
cttaaacgcactccctttgcacccaactcaccacgctatgaggaaatacattatgaaatgatgtgcaaagacattttccaaagaaaaattaggattttcccaatttcactgctttcagttgaaatcatttttaatagaaaaaagttttatgaacaaaagaagtgtgatttaccartatattagtgacataaagatcattttcacattctggcttttatcttgaactctaaactgcataggcaattaaaattataacacataagagctgggaaagatgatggtagacaataaagacaactttataatgtgggaaaaaacataggactttattttgacaagtgtggtcctcagataaataaggatgtcatgtccaatactttaccctttccactcttagagaacctcaaat

SEQ ID NO: 589865 - DNA, 409 bp, Homo sapiens
cttaaacgcactccctttgcacccaactcaccacgctatgaggaaatacattatgaaatgatgtgcaaagacattttccaaagaaaaattaggattttcccaatttcactgctttcagttgaaatcatttttaatagaaaaaagttttatgaacaaaagaagtgtgatttaccagtatattagtgacataaagatcattttcacattctggcttttatcttgaactctaaactgcataggcaattaaaattataacacataagagctgggaaagatgatggtagacaataaagacaactttataatgtgggaaaaaacataggactttattytgacaagtgtggtcctcagataaataaggatgtcatgtccaatactttaccctttccactcttagagaacctcaaat

SEQ ID NO: 589866 - DNA, 540 bp, Homo sapiens
tacaagcagcagaaaaatgtgatagtttattgatccaattctatcaaacattatataacaggcagaaaaaggagagcacattctaatgactacttagatctgagaattattggctttgcaaagattttagagatcctccttcttaacctaattgttttgtcagtgagaaatctaaaaccttgagtcattcaactcatttaggatcatccaatagctttaggatcatccaagagctgaggacctacatctcctatgtggccatacagctgtgaagaaaggaatgtctacacttgtaataaatgtctgtggtatgaagagaagctatatwtgactagatggttgggggggagtaaaaaagttcgcttattggctattttatcctattgaagaagaaatatgattttttttttttttacaattcttttcagcctggtcatcatctaaattctttccttgccaaaagtgtttagttccatctgtttcatctagtttcccatggatacagagctctaattgtataacaaaatccaaagggaaatt

SEQ ID NO: 589867 - DNA, 554 bp, Homo sapiens
gagagcacattctaatgactacttagatctgagaattattggctttgcaaagattttagagatcctccttcttaacctaattgttttgtcagtgagaaatctaaaaccttgagtcattcaactcatttaggatcatccaatagctttaggatcatccaagagctgaggacctacatctcctatgtggccatacagctgtgaagaaaggaatgtctacacttgtaataaatgtctgtggtatgaagagaagctatatatgactagatggttgggggggagtaaaaaagttcgcttattggctattttatcctattgaagaagaaatatgattttttttttttttacaattcttttcagcctggtcatcatctaaattctttccttgccaaaagtgtttagttccatctgtttcatctagtttcccatggawacagagctctaattgtataacaaaatccaaagggaaattgggtttgcttacggaaaatctctttgtgacaaactttgcaaaaagttttgtcctataaattgagatgtgcttatattagtaatat

SEQ ID NO: 589868 - DNA, 592 bp, Homo sapiens
ttaactcatttccagtgggtctgggtccttaggttcctcctagaattacggctgcacctgcttcatttgctgtgcctgtttcatgaacagttactgtcagtttcataagcgggggacggcttcagaactcttcacctctgtgcatatcactttgcctcagccctttcatctcccactatttgtactgctagtggtaacttttctaacatgtaaaccaatacactccccatcctctcatttgtccccttagtctcctacaattttgtcctagtcttcccttctcagaatctcagttcctagagcttattggtctcactcattgcaggacagaatcaagtcgtctcctacaacctacacattaccctctcttgtctaaaggaaaatatactgttttaacagatcatgttgcttttgcctgtgggygatatcttcttagagataaagcacctgtgcaaaggtcctgaataaaatattgaagccaaagtcataaaatttgtattaatgagggctgagccaatttttagcttcatttttcactaaaaagaagagaaacagaaaaaagttgtgaacctaagtaaacatactatatgaa

SEQ ID NO: 589869 - DNA, 592 bp, Homo sapiens
ttaactcatttccagtgggtctgggtccttaggttcctcctagaattacggctgcacctgcttcatttgctgtgcctgtttcatgaacagttactgtcagtttcataagcgggggacggcttcagaactcttcacctctgtgcatatcactttgcctcagccctttcatctcccactatttgtactgctagtggtaacttttctaacatgtaaaccaatacactccccatcctctcatttgtccccttagtctcctacaattttgtcctagtcttcccttctcagaatctcagttcctagagcttattggtctcactcattgcaggacagaatcaagtcgtctcctacaacctacacattaccctctcttgtctaaaggaaaatatactgttttaacagatcatgttgcttttgcctgtgggcgatatcttcttagagataaagcacctgtgcaaaggtcctgaataaaatattgaagccaaagtcataaaatttgtattaatgagggctgagccaatttttagcttcatttttcactaaaaasaagagaaacagaaaaaagttgtgaacctaagtaaacatactatatgaa

SEQ ID NO: 589870 - DNA, 472 bp, Homo sapiens
gaattcccttctcacaatttattcccccaatttaatgaatacttacatgtgacagtgaaatggatatatgctacccagggctttccaaacatggcctattattaagttggtcatttcttaaggcaatcatatttcattttgattttttttccaattattctccaggacaaacttagcattgcgctagatatcttttgtgggctattctgtgaaaatcatttgacaaaaaagtaggaacaaaatcctgtaccctattaaatatttcarcctcaggtaatatttatgactgtacaatctaattgaatcatagcatcactaatcagacatcccaaagatccccagatttatctgaaatgatgaagttcaattaagactaatgataactactttagaataaaagaaccaatatccttgactacccagttaatggcagcgctgcatgtaagcatctcattttacacaatccagggag

SEQ ID NO: 589871 - DNA, 567 bp, Homo sapiens
agactttatctcaaaaaaaaaatatgtagcataaatgaatttaaaagtgtacctaaattatattaaattctgatatagaagaagataatgactagcttgtaatgggacagaggaaaatattttggtaagtaatattttagaaaagtttaaaaactcagttttattcttagattcctaggtctgggaaaaacctcctttcatayaatgtgtcaaaaacaacagaactaaaatatacaaagatggtaagtaaaataagaagttgaccaatcacagaacattgataaactaaaatattacagatttagacagaggttttaaaatttgggggaattaagaaacctgacaagcggtgaaatcccgtctccactaaaaatataaaaaattagccaggcgtggtggtgggcgcctgtagtcccagctcctcgggtggctgaggcaggagaatggcgtgaacctgggaggtggagctttgcagtgagccgagatagggccactgcactccaactccagcctgggcgacagagcaagactccgtctcaaaaaaaaaaaaaaaaaaaaaaaagaaac

SEQ ID NO: 589872 - DNA, 591 bp, Homo sapiens
ttgttttgtaaaagaaggtaccattgctggggtccacagaaacagttatggttcttacctctgaaggagaactgtgtttaactgtggcttttagatttaacttactaaatttgtatttgctgcaaaagtaaaccacactcaagagtaaagcaaaattcatcagcaaggctataattttgcagagagaaataagaagggtgtataatatttaaatcggaactcagcatcccagcaaagagcttcttaatcaaaacaaaagagaaaaaatcattaaatacagtaacccactgagattcacatgaaggtatgtcccacaactttcataaatcccgaatttatgataccactataatatactattactccacaagaagtagatgtgaataacacccaaggattactgtgtatgatacagaaaaccaaagagaagaaaagctgcatggagagcagctgctctgactgtgtgtgcagtgsctcattcaccaacacacaattcaaattcaagcctcagcaaaataacttgtcgtaagccatgatcctctataaggtcatcttcaaatagacgaaatagtgacatttaattcataaaga

SEQ ID NO: 589873 - DNA, 526 bp, Homo sapiens
atgctgagtgctttctacataaagctgtttcatttaatggctcagcaacactgttgaaaaaggaagaacctggagtatggaaagactgaacaactcccaccaggttcatgtaatcagtaattggtggagctggaatttttaatcaggtccaactcagaacctaaatcttttaagatcacaagcttagtcataatattcaattcagtgccttttctttgyctataaaataaaccacattttttgaagtagtggcaatgtaactcttgaattagattgtgtgggttcagatttcaaatgtatcatttgccacctgtgcaaatttggacatcataattaatatccctaatcatgaatttatcatctataaaatggataatattagtttctttacacaccattgttataaggttaggagataattcatgtaaaatgtatacagggcctaatatagtaagtgcttaacaagaactgatgaaggaataatggttaggtacataaatgaatgagtgaatgaatttcctttaca

SEQ ID NO: 589874 - DNA, 598 bp, Homo sapiens
tcattctttcatgataaaaactctcaacaaaataggtatagaaggaaattgtttaaacacaatacaggccatacatgaaaagcccacagctaacataataatcattgaggaaaactgaaagtttttctttaatttctggtataagatatggatgtccattctcactacayctattcaacacagtactggaagtcctagccagaacaattagacaattagacaaaaaagaaaagaaaagaaaagaagaggaaaggaaaggaaatcggaatagaatgcatctaattaggaagggaagaaataagcttatctctgtttgcagatgacatgatcatatatgtagaaaactctatagactacaaaaaaagaaaaaaaatgttagaactaataaaacaattcagtgaagtttcagggtataaaattagtatacaaaataagtcatgttctatacacaaacaacaaactatctaaaaggaaaattaagaaaacaatcccattcataatagtaacaaaaagaataaaatacttaggatgaacttaagaggcaaaagacttacacactggaaattataaaatattgatgaagaaaatttaaaaagac

SEQ ID NO: 589875 - DNA, 604 bp, Homo sapiens
aaagtttttctttaatttctggtataagatatggatgtccattctcactacatctattcaacacagtactggaagtcctagccagaacaattagacaattagacaaaaaagaaaagaaaagaaaagaagaggaaaggaaaggaaatcggaatagaatgcatctaattaggaagggaagaaataagcttatctctgtttgcagatgacatgatcatatatgtagaaaactctatagactacaaaaaaagaaaaaaaatgttagaactaataaaacaattcagtgaagtttcagggtataaaattagtatacaaaataagtcatgttctatacacaaacaacaaactatctaaaaggaaaattaagaaaacaatcccattcataatagtaacaaaaagaataaaatacttaggatgaacttaagaggcaaaagacttacacactggaaattataaaatattgatgaagaaaatttaaaaagacacagacaaatggaaagacatacatggttatggattgtaagaattaawattattaaaatgtccatactacccacaataatctacagatttggtgtaatagctattaaaatcccagtggcattat

SEQ ID NO: 589876 - DNA, 581 bp, Homo sapiens
gtgcaccatgcagcttttgcctaataaggtgaattctatgatgggaggaaaaatgttattgtcatagcaaatacaggacttaaaaatgtgcaggtttagcaggatctgtctatataaagaagtgctaacattagcagtgctgtagctcaggcttttcccaccctttttcctgcagaaagaatctgcaatactctgtgaaaacatgggtgtcaagaagatcccattcacaacataaatgcgatggtggcatccacactcgcttctactactatcattgggaatatttgcaaagacaacattcatcaaagaccagccacccacattaaaaatcctaggcaatttttaatttatcttataattaaatagcctttataaacaaattcatgaccccactttatttttccaacttccactagacagtctttcatgaatgaaaaaaaaatctgggtgggcatcctttctaacaactgagaagaggtagggaggrcctgtcaaacacgctaagttatcgcgatggttacatcttcactgtggctattagatttcttttcagaaaagggaaaaagcaacaataaaagctt

SEQ ID NO: 589877 - DNA, 587 bp, Homo sapiens
ttattatgcaccaagtaccatgttaagcattttacttgtgtgttatttgatttcatgattaaacaatcccatgttgtatggayccatttatggatgagaaaattaaggcttagtcatgtcacaaatctgtaaaaagcatacagttaataaatggagaaatcagactctaatttatgcatctgagtctgaaatttgctatgccattcctatgcccagacatttgctaccatgctcagagggagggtcctccctataactgtcagcatctgagcctacacagcacagatgaaagacccttaatctgttttttgatatctttaatcaaaacagacaagtaacactggcttgtttatctcccccaccccaagccttcccatagacaacacagcctgtctcctttaaaagttttagtattatgaagacctggaaacaaagaagttttcttcagattcttacattgattagtaactatctcaaagcaatatgtgtgagacagaaaaattacacaacatggagaataaattaggacatctatccagttggaaacaggatgttagactattctgatgtacagtgtgtagttgatt

SEQ ID NO: 589878 - DNA, 592 bp, Homo sapiens
tgctgcaacaaacatgagagtccagttatytctttgatttactaatttcctttcttttgggtatacacccagcagtgggattgccagatgatatggtatcactattttcaggtttttgaggtaacttcaaactgttctccatagtggttgcattaatttacattcccaccaacagtgtatgagggttctcttttctccacatcctcgccagcatttgttattgcctgacttttggataaaagccattttaactgaggtgagatgatatctcattgtagcgtttgtatttctctgatgatcagtgatgttgatcactttttcatatgcctgtttgccattttgtatgtcttcttttgacaaatgtctattcagatcttttgcccatttttaaatcacattcttatacttttttcctgtagagttgtttgagctcattctatattctcgttattaatcccttgtcagacggagagtttgaaaatattttctcccattctatgggttgtatcctgactttgttaattgtttcttttgctgtgcagaagctttttaacttgatgtgatcccatttattcattttttgctttggttg

SEQ ID NO: 589879 - DNA, 406 bp, Homo sapiens
gttcagatctgcatattaaaatcccaaatcagttccttccagaagggtcgggaatgtgactgcccctgtatgtactgttggttgccagagcagctgggaagggagagggaaccatttatcataaatccctcctggggtgcctcatcacaccctctttgtgttgggcaaaygcttcacctctataagcgcaaaggcatggtaaagaccttatcacatagagtcatgaagaatgaatgatcaaggtgtcaattgggccaaaatctgcagtttaaaggaggaagactcaagacttggaagcaacaaacataaatactgctgggccactggaaccagtgaactgaacgggtgtgggtttcgagcagctttcccaacctcggcactgctgactttctggactggtgaattc

SEQ ID NO: 589880 - DNA, 486 bp, Homo sapiens
taaaacatatacagttttaaaacaccaacagttggactattgacatggcatgagagtagccagttaagttgggaaaaggtagataccatcaactagagaagccattgtctacaaaaagcaattgtcttaacgaaaaagccgtggaaaataaatatattccagtggctccaaagttattttaaattccatgtgtacagttcagcgaaaaacaagccaggccctaaaataattaaagccatcaatatgaaccacttgagtttgaaaggatccaatatttctcactcataaaaaatgaaataacgtgtgcaatttggttcyttgccatctgctacttgaattgcaaggtattgttaaaaagttaattgaacacccaaatataattattaggactatagaatgcctaatctttgccaaatcattcaagaatggcttccttttttactgtaattttaaacttcataaactaaaataacgaaagtaatttta

SEQ ID NO: 589881 - DNA, 542 bp, Homo sapiens
ttgggtgtcaatgtgactgaattaagtgataataattaacggatggtaattaagggaattaattatttattttgaatcactgcattaattattctcaatgcttcagcaggaccgaaccagcccctctcctgcagaaagagaaacccaggtgatttggcatttgattagaatgtttgagctgccccaggggtggggaagatctgtcctcagtggggcccagatgggacgaaaaggctgaagaaggatggattcttgctctctctcctggagctgcggcacccatcttctcctgtccttggatgtcaggactccaggtttcctggctttgggacttcaggaagaaaaccagtggccccccaggcttttgggcctttggcctcagactgactgagagagataccatcatcttctctggttctgaagcctctggacttagactgagttatgttatgggtttttgctgattctccagcctgcagacagcccatcatgggacttctcactgcacagytgaatgagccaattcccctgataaattcctt

SEQ ID NO: 589882 - DNA, 575 bp, Homo sapiens
acatcatttgtctttctctggctgactttccttgaaggtggtcaggaatattgacttgccttaatctcttacttcacaatggggcttgaatttcactttctcagatrtgtttgaggttagtatttgaaccaatttgatttatgaatattttactcaaatagacgtcttggtctttgaaatatcttcctattgccttttaaaagcatcttggctggacacagtggcctgcacctgtagtcccagcactttggtaacctgaggcagacggattgcctgagctcaggagttcaagaccagcctgagcaacatggccaaaccctgtctttaccagaaatacacacacacacacacacacacacacacacatgcacacacacacacatacaaataggcatggtggtgcatacctgtggtcccagctactcaggaagctaaggtgggaggattgcttgagcttgggaggtggaggttgcagtgagccaagattgcaccactgcactccagcctgggtgacaaagtgagaacccgcctcagaaaaaaaatatatatatctttttagggggcaatgaaataac

SEQ ID NO: 589883 - DNA, 481 bp, Homo sapiens
gtgcagctacattccattaaagtcatggcaatttcagtgagtgacactttgaagccacatcatttgtctttctctggctgactttccttgaaggtggtcaggaatattgacttgccttaatctcttacttcacaatggggcttgaatttcactttctcagatgtgtttgaggttagtatttgaaccaatttgatttatgaatattttactcaaatagacgtcttggtctttgaaatatcttcctattgccttttaaaarcatcttggctggacacagtggcctgcacctgtagtcccagcactttggtaacctgaggcagacggattgcctgagctcaggagttcaagaccagcctgagcaacatggccaaaccctgtctttaccagaaatacacacacacacacacacacacacacacacatgcacacacacacacatacaaataggcatggtggtgcatacctgtggtcccagctactc

SEQ ID NO: 589884 - DNA, 580 bp, Homo sapiens
tgagagctgtggaggaagagttggaaagaagctacgtgtgaccagcttcatgaactggtacagctttgactcaacttggcaacttcctctgtgtggcctcccaagaagggccacaagagccacttggcacaaacctcaccacacgtcttttgctttactcctgcctctcagggaacctattcagtgggaaatctcccttgagaatctcttaatgaaaaggccccagtcatgtggccttttggctcaggaactccgtgtccccattttaaggtacaatttgccactttggccctctgcctctggcttccgttcctgcccagggaagcccaaagttgggtaaaattgtgtgagaagagatagcccctacatggggccccacagccagaaggaaacagatgagaggatcctcgcatctccagagccagccagggcctcactgtcctgttggtttgtttgcttctctatggtgtgaagcctgaccttcccatcttccygctctgttctttatgccccacactactcacatttgtggcaatgttgcaggcatggtctaaacttcgggctgggattttattattat

SEQ ID NO: 589885 - DNA, 582 bp, Homo sapiens
acctctctgagaataataataattaaaaatatctatccttcattcagatttataacggagccaggcctgggccaagggtcaaacatagatcatctcaattgatcatttgacaagcctttgaggagtgtgccaatattactgtcaatttgctaatgaggaaatcgatacttgaagaggtaagtaacttgctcacggtcaaacaaatagttggtaagtaaagagttggtgtctccacccaagcagtccaactatcctattttacttctcagttatctcaactatgaaatatgggtaaaaatacttaatgtattgggctgtaaaatttaaatgattacttatgtaatcagttccrcagaggctggtaaatagcaggaactcaagaaatattagattgctaatactgttcaccctcctacagtggccaaaattgtcacaatacccataatcatcaaataaactctaccaacatgtacttaatggaagtatgccaaatcacacttctagatagtgatggtggtaactgaaatttataccaacaaaacccaatttaaactattgttgcaggaggctgggcgcagtggt

SEQ ID NO: 589886 - DNA, 532 bp, Homo sapiens
gccactgctgattttgagacggttgcacattcttaaccttttctcctactccacaggcatttcagtggaaagctggtagagtttgcttgatgggttacaagccagatgccattcttaataggaagttgagcagtctggaggcaaattaagttaagactttagggactgggattgattgactggaattctccctcaagtctcagaagactttatggaaagaggaatttttcttgaacatttgtacaagctcttcctgcattactaccttatctactcttccccttaaaacctaggctattattttttttcgattttattattattatactttaagttttagggtacatgtgcacattaaaagcctaatatttgcaaaagaaatgctttgmaaattgtattacttctcatctgttatttttatgatagatgagaagtaatacaacttgcaaggcatttcttttgcaaatactaggcttttaaaaatatttgaggttaagaagttggcaagaaccccacattgtaaagaaaggtg

SEQ ID NO: 589887 - DNA, 678 bp, Homo sapiens
aaaatgaagggacagggaggttaagtaatttgcctctgggttcatcctgatcagtgttggagctggggtatgaactcccaggaatctggctccagggcccacgtaaaccctgagccactcaaagagacttcttattttaaaactccttaatatcacctggaactcctctttcaaagtgtttatttggagtctgtattagttatctgtttatgcctcacatattgtcccaaaacttagtggcttgagatracagtcatttagtatctcagtttctgtggatgggaaattgggtgcagcttagcaaaacacttctgcttcaagatcattcctgaaggttgtagtgacgcatttgactggggctgcagtttcatctgaaggctcaactgggggatatttgcttccaagatcattcttgtcattgttggtaggcctacgttcagcactatgtggacctcccatagaggtgcctcatgacatagcagctggcctcccctgggttagtaaagcaagaaagaaggaaagagagcacaccccagacagaaactaaaatctttttataatcaaatcccagaagtgacactccttgacttctgctgtattgatttgtttctaattaatagtctattgaatagttagaaacaaatccataagtttatcccactttgaaagagaggggtt

SEQ ID NO: 589888 - DNA, 588 bp, Homo sapiens
tcccttggtcatccgcatttkgcacaagaggaaactatagaaaggacaaataacctgcccatacctcagagctgatacctcaccaacgaacccggagacctaaggccggtgcctatgctctcctcccatgctgacctgtgacccatgtcctccactgccactgatcccagcccaagcagcctaagaaaggtccatggcttcacttgctcctggggacccaagcgtaagtgtggttgtgcaatgtccatgagcaagcttgtgatgagtcattagtactcccatttcacagcttgaaaactaagagcctgaggcttttgtgcaagattccatattcaagggatgtaagagctcagaaggtctttgctgaccaaaggagactgtacttccagaaagatcgtgcctaattagaggctagtaaagtgaggcagagaaatcatcttttattgcttgaggagaaagagcattatagccatttagaggtggcaggaaatgactcatggtgcatcttaatggtcaaagtaagcctgaacattaaagagaactcagtattactgcggaaagagcacaggttttggagtcagacgaatt

SEQ ID NO: 589889 - DNA, 639 bp, Homo sapiens
tcccatgtgaaactcaagaatccacactctctcccattctcgcttttcctggcattagttcaagtccactttgtcgctcaattgtatgactttaatatctccttgttcagattcctttgcctcagattcacctcttctttcaatttattctccatatcatttccagcatgatatttctacatctgcactctgatcatgtccttccccacttaaaatcattgatgactatttgtagacttcaagataaagttcaaactccttgccatttattctgaagacatttcgtgtctgcccccagccaggatcttgacctctctttctctattcctttttgccttcctcatacccaaatgtcacatagttgctgggacgtgtgactctcccattgcattcatgtatgctgttccctgtacctggaacyactgtccactaccacttacctcacccacctataatcctccagaaccttcagctctactttagaagtctctgcacggtgttcctgtgctttatagcattttgactatttctctgccatcacatttatctcactgtgttgcaactgtttgtttattggcctttccaactaaactctaaacttcttgagagcagggactaggtggtatttacacacatatc

SEQ ID NO: 589890 - DNA, 587 bp, Homo sapiens
gtacctggaactactgtccactaccacttacctcacccacctataatcctccagaaccttcagctctactttagaagtctctgcacggtgttcctgtgctttatagcattttgactatttctctgccatcacatttatctcactgtgttgcaactgtttgtttattggcctttccaactaaactctaaacttcttgagagcagggactaggtggtatttacacacatatccacatatcctcagcacataccacaatatctctgactgagaccctcttaaaatctttttacaaagagaaggaatggaaagagaagagaagagaataggaagggaacaggaagggagggaagaggaggggagagggaaggagaaaggagaggagaagacaagacaagagacggaaaaaaaaaaaaaaaaggaagaaagccagttctttcttcttgggaaaaaagaaggccaaaggagtccaaaaaatagtcacagattttactctgaacaggccaaataactaaytgtcctgtctagatacagagtctgagttttaatgcattttcttgctagaaaattcaaagtatataaaaggatgt

SEQ ID NO: 589891 - DNA, 543 bp, Homo sapiens
tgcaatgtcttgccttattctttagctagcagtccatctcttccatgacacagaccctttagcaaaatatcaatccctcctttcatactcccacatttgccctccccaaccccacccttggcggtttaacatttcctcctgaatttcctgatgattttgttccctccactgggaagctactccttccctctcttccccagccaacatgatatacacttttcaaaatagcttaacgccattttctacaaaccatgtggactagcgttctagatctcacacacctgtccctgcccctgcctctgatttcttcaaatgccttgttagtaaataccataccttccatgtagggccctttctcaacatgcagtgtgacctaagcattttcagtacttcttatttctctaatgagatataagttcccaggcaagggccatgcactrtactcaccaaaattcctcccaaagcctggtgtgtgctaagctgccaggaagcagccaatcaataccttcattaccaaatatatcgagaagagtgcatgaagct

SEQ ID NO: 589892 - DNA, 577 bp, Homo sapiens
caagggccatgcactatactcaccaaaattcctcccaaagcctggtgtgtgctaagctgccaggaagcagccaatcaataccttcattaccaaatatatcgagaagagtgcatgaagctggagtctgctgaactccttcccaccccggggccatggcccaggttggaatgccccatccatgacttttcacccttgcctgcttcttgcagctcacccttcagttcaaatgcaacctcttctaagaaggcgtcctcagtcactcctctaaagctgtcttccaagcactgtctccaaataaccatttttaattctctatagggcactcatagttcttctatttattttcaatgtgttatttttatttttatttttgtcttttcccaggagagtgtaagcttgatgacaacagaaagactttctgtctggttcaccactgtatccctcctattaaaacagtgtccagaagagagtatgtgatgggttaaatgaatggatgaatgaatgaaacaaatgaataaagtatagagaaatactctrtacttatgaggcactcacaatctattaagaaaaacagata

SEQ ID NO: 589893 - DNA, 515 bp, Homo sapiens
gaaccacatggtcttggtagagcatgtttccgggacctttgattactaccaggctaaataccgtatgttccattaagcttcatattctggcatagaagccaatgagaaactgctacttgcaccagtaatgtatgttctccaaaccactattatactttgcaaagctgctgtacaattaatttttagcagagatgcactcatagctgccccatcatgtgtaaaatgcacgcattttgcctttgccagagagaacatattgcagcccatattttagtcatctcccttcaaagggtaagaaaattttgtgagttattcaagataggaatgcaaatttaaatttgctcataactagaatggctcacatggccacaggaacatctgtttttctaaaagcrttagctgattgtccagaggtggtcactcattgtccagagactgggatggagaaagacagaactgggcaacttgtttcttagatggattttgtctcatgtaagagttgcatgagatgaatt

SEQ ID NO: 589894 - DNA, 607 bp, Homo sapiens
catctcccttcaaagggtaagaaaattttgtgagttattcaagataggaatgcaaatttaaatttgctcataactagaatggctcacatggccacaggaacatctgtttttctaaaagcgttagctgattgtccagaggtggtcactcattgtccagagactgggatggagaaagacagaactgggcaacttgtttcttagatggattttgtctcatgtaagagttgcatgagatgaattcaggtagacaatcatttcatatctttttaagacaaaggaagggactactagtatatactgtgctatttgctttgggccaaaaatagcactacgaactttacatgcatatctggttgaattatcccaaatcttacatggtagctattattatcttattttacagacggtgagatttgttcaaactagcataaaatatttaggcaattgtgcttctccatttatatttattttgaggaaaattgaagccatgatttgggattcactgatgctktacctccctgactagttttgcagattacctatcatggtatacaagatgcacagacaactgtaatgggtatctatcctttttgcccttcctagcatc

SEQ ID NO: 589895 - DNA, 571 bp, Homo sapiens
cctacattcacataactctaagcaacaagtaaccctagagctgctgggcagaagaatctgccagcaaaatgaagtccacacaaagaaaagcagagccaagacatggcagagccagagaaacagggttcagatgccaccatgcaaagtccttgatccagcttctcctggagctcttttattcctgagactccctggtcacatcagtcagtaagtttccctttctgccaatgctagcagtttgagttagtctctgtcgattagactaacagaaacaggtccrgcagaaaatgaaataaaaatatatttagcaaaaaatcatctgagttagttttacagttatggatttcaaatttcaccatttgaaacagataaatttgtacactaaatagtaactaaaaatattaatagcaagatctcaaagatacccattgggaaattttaccttgggtgcaataatttaagcttaagaagggtttttgccactgacttggaggtaacaatgacatgaccatttctcagggactttttgacaattatcttacttatgaataaaccagaaagatagatgata

SEQ ID NO: 589896 - DNA, 448 bp, Homo sapiens
gaattcccattagagatctttcttttcattcttttgggttatgcattgtctgtccttttttttttaagagacagaatcttgctctgtcactcaggctggagtgcaggggtatgatcatagctcactgcagccttgaactcctggagtccagcgatcctcctgcctcagcctcccaagtagtgtctgtccatagtacgcatgtgtttgttaattcagcaaacctttattgaaatcaacatcttcagggcactgcagggcacataagatatagaaagcttaattctgctaaagcatatgcaacttggtgggctgcgtaggcaggttaataaataactatgcacagcaacataggttacgtgatgtaagtggtgaaggagggagctyggggaagctccagccaatctgtgggccctgtgtaaatctgatactgcctcctgaagccagtcta

SEQ ID NO: 589897 - DNA, 562 bp, Homo sapiens
gcaggcatgagccaccaatcccagtcaatattgtccatatttaaaatataaacatgctttaaaacatagcaagtcagtgatgaatttgctcatagtcatagaagctagacttctggaaataactcctgaggtttgttccttcccctgaactctcttttatattaaaccttgctaggcagtgtttggtcttgatgcttgttatggtttggttatgtcttcacccaaatctcaccttgaattcccagatgttgtgggagggacccagtgggaggtaattgaatcatgggggcaggtctttcccatgctgttctcatgatagtgaataagtctcacgagatctgatggttttataagggggagtttgccctgcacaagcactcttctcttgtactgtgcaccatgtgagacatgcctttcagccttaccacagtgattgtgaggcctccccagccatgtggaactgtaagtccattaaacctctttcttttgtaaattgtccggtcttgggtatgtctttatcagcagygtgaaaacagacaaatacaatgctccttgagggtct

SEQ ID NO: 589898 - DNA, 615 bp, Homo sapiens
ccctgtgtacgtgatatatgtttttcctctctggttgcttccaaaatattctctttatcactgatattgagcaatttgattatgaagtgccttggtgtagttttcttcatgtttctaatgcttagaatttgttcagcatataatctgtgaacatgttggctattatttcttcaactcaattttctgtgtgtctcttttttcaaggatacaaatgatatatctrtcaggctacttgaagatgtcctatagctgactgatgcttattttgttcttcgaatttttaaatattttccatgtttctaattaactttttgaatatattgaatacaatatattcaaaattgttttaataattaatgttatttaaacaataataattgttttaatattttctgctgactctaacatctatgttcattctggatgattttgattgatttgttttctatttagtgaccatatcttcctactttcttcgtacatggtaatttttatcagatgacattctagtttataaatctacatgtaaattatacacaatgtaaatttacattatagatttaacctcattgagagttggatatttttgtaattttataaatgttctttaagttt

SEQ ID NO: 589899 - DNA, 615 bp, Homo sapiens
ccctgtgtacgtgatatatgtttttcctctctggttgcttccaaaatattctctttatcactgatattgagcaatttgattatgaagtgccttggtgtagttttcttcatgtttctaatgcttagaatttgttcagcatataatctgtgaacatgttggctattatttcttcaactcaattttctgtgtgtctcttttttcaaggatacaaatgatatatctatcaggctacttgaagatgtcctatagctgactgatgcttattttgttcttcgaatttttaaatattttccatgtttctaattaactttttgaatatattgaatacaatatattcaaaattgttttaataattaatgttatttaaacaataataattgttttaatattttctgctgactctaacatctatgttcattctggatgattttgattgatttgttttctatttagtgaccatatcttcctactttcttygtacatggtaatttttatcagatgacattctagtttataaatctacatgtaaattatacacaatgtaaatttacattatagatttaacctcattgagagttggatatttttgtaattttataaatgttctttaagttt

SEQ ID NO: 589900 - DNA, 615 bp, Homo sapiens
ccctgtgtacgtgatatatgtttttcctctctggttgcttccaaaatattctctttatcactgatattgagcaatttgattatgaagtgccttggtgtagttttcttcatgtttctaatgcttagaatttgttcagcatataatctgtgaacatgttggctattatttcttcaactcaattttctgtgtgtctcttttttcaaggatacaaatgatatatctatcaggctacttgaagatgtcctatagctgactgatgcttattttgttcttcgaatttttaaatattttccatgtttctaattaactttttgaatatattgaatacaatatattcaaaattgttttaataattaatgttatttaaacaataataattgttttaatattttctgctgactctaacatctatgttcattctggatgattttgattgatttgttttctatttagtgaccatatcttcctactttcttcgtacatggtaatttttatcagatgacattctagtttataaatctacatgtaaattatayacaatgtaaatttacattatagatttaacctcattgagagttggatatttttgtaattttataaatgttctttaagttt

SEQ ID NO: 589901 - DNA, 373 bp, Homo sapiens
gcacatgcacacgtgcactcaaacatctgtaaaattcatgccwcacacacacacacacacacacacacacacacacacacactgttgtcttcacacctttattaaatgactggcttttgtggcattgagcttgtgatgtcaggaataaggaatcacatagtttctgatggagtagggagggaaaagtcaagagaaagactgaaaggagatgtgtgagagctccataaacaaacagccttctttataattttgtgagcaatactcttcaattgtttggaagcagaaactagctggtttgcatttgcagagagcagacaatttctccctcaaaagattttaaaaacgttgtatcaaaaatgaattagtctgttat

SEQ ID NO: 589902 - DNA, 581 bp, Homo sapiens
gatatgagatgtgaagaagcaaacgataattttattttacactggagcatagagggagcttattgacaaaggccyggggttgtatttgcatccttgcagtacactatttagtcgtgaagatttacttagtggaaagtcactaaccagcttattaaaagtcaaacaatacctggaaaaaaattcatgtatgccattgcaattacataaggccattttatttataaaataaaaaatttataaagcaaataatgaatcaatataaaaataaaagtttatatttgcaccgtgtttttatttctgttataccagttgattttagtctaataaatttatgaggaaaatttaaataaaaatgtgtttcccaagaacgtttatatttgcctctaccaagtggcctctgtgtttcccagtagggatgctgactcagcaaaatcagcattcatgactctagttgtccaatatagggagacaaaatggccaatttaagtcattgtgctttgtctttctctcacagacagacagacacacacgcacacacaaacacatgcacacaaagaaatgataaggttcaatgaaatact

SEQ ID NO: 589903 - DNA, 573 bp, Homo sapiens
ccatgtcattgtagtttgtgcataaaaatattttgctaggtgaggacagccaattctttattagcatgaaagctacaaaagaaaaaaaaaagataagtgacaggtatttccttaaatgcaaagcaaaagtacaaattctacacagtacaaaatggagaagggatatgagatgtgaagaagcaaacgataattttattttacactggagcatagagggagcttattgacaaaggcccggggttgtatttgcatccttgcagtacactatttagtcgtgaagatttacttagtggaaagtcactaaccagcttattaaaagtcaaacaatacctggaaaaaaattcatgtatgccattgcaattacataaggccattttatttataaaataaaaaatttataaagcaaataatgaatcaatataaaaataaaagtttatatttgcaccgtgtttttatttctgttataccagttgattttagtctaataaatttatgaggaaaatttaaayaaaaatgtgtttcccaagaacgtttatatttgcctctaccaagtggcctctgtgtttcccagta

SEQ ID NO: 589904 - DNA, 602 bp, Homo sapiens
aacaatcaattctgcagtggatagaagctgagtctcctccaattcaattctggcactatctacctaaagacagcatcagatctcaccagttgaaggctcagtccccacgaccacctcctgctccacttcaggtataagtcataagtctgggcatcaagaatatctgaccaaccagcttcaagttggggttgccacaataccctctttgagtttgattaagttgttcagcaactctcagaactcagggaaacatgtgcttacatttaccagttaattataaaggatattacaaagaatacagataaagagatacacaggatgaggtacaggggaaggggtgcaaagcttccatgcccccctggtctcaggaatctccccgtgttcagctatgtggaagctctctgaatcctggtttgggggtttttagggaggcctcattatgtaggcatgattgattaacctattggccatcggtgattaacttaaccttcagctcctctccctycagtctcaatccttccatcataccttggtcttccccatcctgaagttgcctatgagctgccaaccatcagtcaattattggcatgcaaaaggacatc

SEQ ID NO: 589905 - DNA, 609 bp, Homo sapiens
tttttgttataaatttcccttctgaaaaattttatcctccctgcctttaatcactacaaaggaagataggactttcttttaaaaaatactgaatattttagtgtctttaacatctttttgtttgtttgtttaaacgtaagccaacctggccaccttgttactcaagatggaacacaatgaggctgttgggagtttatgttgtgccctccagactctccttggaattggctctcttttcctccttccgcagttgggataaatgcaaagacttttattctgtgatttataaagactttagaagactcttgagcaattatctttttctgaattgggataaaagtcattctctcaagtgtcatctctcagagcatttcgttttttwtactttgtgtaacacttccaaaattgatgtcataaaagagacaacagattgcttcaggattcctcaaatcttaaaagaaatattaaacttagattttcaatctgatagttatctcgacaaaaaaaaaatgagtatattttggatcgagtttgacgacctccatttaatgaaatgccagcataggatatcaatgcctggtttgaagcttaaattatttcccaaaagag

SEQ ID NO: 589906 - DNA, 633 bp, Homo sapiens
agggttagactttctgtcattaaaatctccaaataaataacaagcagcagttaatgagcttttcctaacctattttaacctttcatattcctaccatctgcttttaataatatataatttataacttatttagttattataatattaatttacctgcattttaatgaataaaaatcttaaaggcaatctcttgctttagactagaaaacatcagtatatctcaatgtatcatccttggaaattttagatatatacatgagttttttttgtttttgtttttgttttggcaaaaagacaagtatgtcttctctctgatgttagtattgcctttcactttataggaacataaaattttagtcattagaacatttagagataggtgtattaatcaaaaagctagataagatgatggtatgagagtcctgtcctctgccctaatgaagtaaacttccagttatagcgagtgctgggcaaagcaggagtgtgattatcatcccaaaacgggcagtctatagggtctttctagcttcccattaccctatggagttggttgaggcatttgttgtgactgcattgtggccaattcctcckcctcccaatgttgcttcctttcctttctttactgttataaat

SEQ ID NO: 589907 - DNA, 618 bp, Homo sapiens
cttgttctgtcgcctaggctggactgcagtagcttgatctcagctcattgcaacttccgcctcccaggttcaagagattctcctgcctcagccacccaagtagctgggattacaggcatccgccaccatgcccagctaattttcgtatttttagtagatactaggtttcaccatgttgggcaggctggtctcaaactcctgagctcaagagatctacctgccttggcctcccaaagtgctgggattacaggtgtgagccactgccctgggcccagatttctatatctgagtttactttctgaataaatcaacctctctragtttgtaccaggaggagtcaataaaagtagatgctaagatgggattttgaagctgagctggatcacctgttggctagctgacaataaagaactttctgtaagcagtaggtagactatgaataaaccctggcccaatgtaacattataacttaaaagttcatctgggtttaacttagtggtgtaccaatagaaaaaacaaatgcaactagcaggtgaaaggtagcaagcttttaagaaatatgagaaaaatagtaactataaaagcaatgaaattgtctggctgtaggggcaagcgata

SEQ ID NO: 589908 - DNA, 591 bp, Homo sapiens
caaatctttagttgagcttctctgtgatttttttctatcaaatactatattttccaacttcacagtttttatttcattcttttttatttctatctttttatcattattctctctttgatgaaacatcatttgtatactttcctttagttctttaaatgtggcttatttctttgaaaatattgaaaataggtgattttaaagttttgactaatgatcaaaaattgtgaatctttaagggccatttcttgttgtctttcttttttgtatgggacttttttttgtattcctttcatgtcatgatttttaaaytgaagacttgacatttcatataatatatagtgttccaactctgaaatacagattatctcccatccttaggttttgttgttgtttctttttatagttatttgttgtcattgttaatatttattttgtgacaagtcatttttaaaatctgtattcattctcatgtgggtctgctaaaaatctctattcagttagcttagtggttgattaatgagtggtcagttaaagagattttcttaaatacctgcaaccagcgtttctcattctctgcaaaggaggtaggta

SEQ ID NO: 589909 - DNA, 585 bp, Homo sapiens
taagggccatttcttgttgtctttcttttttgtatgggacttttttttgtattcctttcatgtcatgatttttaaactgaagacttgacatttcatataatatatagtgttccaactctgaaatacagattatctcccatccttaggttttgttgttgtttctttttatagttatttgttgtcattgttaatatttattttgtgacaagtcatttttaaaatctgtattcattctcatgtgggtctgctaaaaatmtctattcagttagcttagtggttgattaatgagtggtcagttaaagagattttcttaaatacctgcaaccagcgtttctcattctctgcaaaggaggtaggtatgtattggggcataccttcaatgttcagtgaagctgttattctctctgttcttatctacaactaaacatttttcttgaaaaaaaattccaaggtttttgaaatcctttagttaatttcaagggccagcccaaaactttgccttaactttcaatttctatttgtacagggcctcaagttcagccagaaatgagaacttaggtgttttcttaatgtgcacacagccct

SEQ ID NO: 589910 - DNA, 541 bp, Homo sapiens
tttctttttctcattctgcactcttcacttgagtaaacttgttcagggccataacttcaaatattattgctccaatgacaaatttatatttagcccttatctttaaactagagacttggggattaaacaaatcacttgacatcaccaccttgatatttcttaggcattttacactttacacttatctctaccaaagcaaaattcttgatccctagctgtcttactaagctagggatcaattccctctggtcttctccatctcagtaaattaccaatcatatatcccgctgttggagtgaaaattwttttcttcatctcctgattcgcatctatcagcaaacctattagtttaatttcaaaatataactcatatctctccctacctcaccatcctttgagcaactatccattctattcctggtcattataatctctcataaatatttacttctaaaagaatctgcatctgaccacttcttacccctacccgaggcactgcaatagccttctagctctttcctgacttctactcttgtttcca

SEQ ID NO: 589911 - DNA, 582 bp, Homo sapiens
aaccgaggggttgcctctgctggctggggtggccagcttttattcccttatttctccacccatatactgctgattggtcacttttacagagcactgattggtccattttacagtgtgctgattggcacattttacagacctctagctagccacagagcactgattggtgcgttttacaatcctagctacggagtgctgattggtgcattacacaatcatcttgtaagacagaaaagttctccaagtctccactccacccaggaagtccagtgggcttcacctctcagaatgactaggaaagtagaagttaaggcagagggcactgtcacagtggccaggaaagaaagaagtacaagtagaagagttcggtacatggttgaacatggaactatgttgagattagaaaagacatgtctgttgaaggaaaaagagaaatcatgtttggcatcttgaatttcagtgataatcttagctagaacctatgcagtaaacaggtgaagaaaaattcagattatatgagatttggaggtaaataaaatatgacrgggaagagtatagacttcaattttaagaagcttgaca

SEQ ID NO: 589912 - DNA, 618 bp, Homo sapiens
ttttccccttgtgtgtttttagcaccctgtttgaagacaaattgactgtttattcctggatttatttctgggttccctaatctgtccaattggtctatatgtctgtgtttatgccagtatgtttgatttttattactgtggctttgtaatatgtttcaaaattagagtgtgatttttccagctttgttcttttttstcaaaggtcttttatccagattaaaacataaaccctcaaaactcaccataaaagaagaagcaacctatttttaatgggtaaaagatttgaacagacacattaccaaagatacacagcaaataagcatatacaaagatgctcaacatcattagtcattgagaaaattcaatttaaataacaataagaaaccactgcacacctattagaataattaaagactgaccatactgtgatggcaagggtatgaaggaactggaacactcatacgctgatggtaggaatgtaaaatgtgcaaacactttggcaaaatgttttagttccttaaaaagttaaacatacacataccatatatttcagccattccacttctaagtatttacccaaaagaaaaaatgtctttttatacaaagacttatacatgc

SEQ ID NO: 589913 - DNA, 618 bp, Homo sapiens
ttttccccttgtgtgtttttagcaccctgtttgaagacaaattgactgtttattcctggatttatttctgggttccctaatctgtccaattggtctatatgtctgtgtttatgccagtatgtttgatttttattactgtggctttgtaatatgtttcaaaattagagtgtgatttttccagctttgttcttttttctcaaaggtcttttatccagattaaaacataaaccctcaaaactcaccataaaagaasaagcaacctatttttaatgggtaaaagatttgaacagacacattaccaaagatacacagcaaataagcatatacaaagatgctcaacatcattagtcattgagaaaattcaatttaaataacaataagaaaccactgcacacctattagaataattaaagactgaccatactgtgatggcaagggtatgaaggaactggaacactcatacgctgatggtaggaatgtaaaatgtgcaaacactttggcaaaatgttttagttccttaaaaagttaaacatacacataccatatatttcagccattccacttctaagtatttacccaaaagaaaaaatgtctttttatacaaagacttatacatgc

SEQ ID NO: 589914 - DNA, 600 bp, Homo sapiens
ttttaaataatttcttaatttcttctttcattttgttgtttacccaaaagacactcaggagcagactgtttaattttcatataattgtattgttttgagtcattttcttagtatagatttttatttttgttgggctgtggtccaagagtatggttggtataatttcttttttgttttgaatatgctgaggattgtttatagctgattttgtggccgattttagactatgtgtcctttaggattagaataatgtatgttctgttttctttgggtgtagaattctgtaaatatcttttagattcaattttgtcaagtgtcaagttcaggycccaaatgtctttgttagttttctaccttgatgatctgtctaatactgtcattgtgttgttgaagtctttcattactattgtgtgattatctaactctctttgtaggtctctaagaatttgctttatgaatttgggtcctcccctgttgggtgtgtatatatttaggatagttagaccttcttgtcaaattgaactctttaccattatgtaatgatcttctttgtcttttttgatcattgttcatttaaagtctgttttgtctaaaattaga

SEQ ID NO: 589915 - DNA, 606 bp, Homo sapiens
tggaatgatatggcttggctttgtgtccccacccaaatctcatgttgaattgcaattctcagtgttggaggaagggctgggggggctctcactcaccatttccctkcagtgggggggcctccccttgctctgtgccactcccaattggcagttgttctgcctcagtcttcctttctcatgggccaaaattgcttccttgatgagtttgaatgtgtccacctggatgatccagttaaagagctagtgttgtctgggcttggtggctcatgcctgtaatcccagcattttgggaggctgaggcaggcatatcacctgaggtcaggagttcgtgatcagcctggccaacatggtgaaacctcgtctctacaaaaaatacaaaaattagctgcgcatagtagtgggctcctgtaatcccagctacttgggaggctgagacaggagaatcacttgaacctgggaggcagagtttgcagtgagccgagactgtgccattgcactccagcctgagaaagaagagagaaactctgtctttaaaaaaaaaaaaaaaaagatctagtgtttactcatcactcttccttctctccatgggagcagtgcacactagct

SEQ ID NO: 589916 - DNA, 606 bp, Homo sapiens
tggaatgatatggcttggctttgtgtccccacccaaatctcatgttgaattgcaattctcagtgttggaggaagggctgggggggctctcactcaccatttccctgcagtgggggggcctccccttgctctgtgccactcccaattggcagttgttctgcctcagtcttcctttctcatgggccaaaattgcttccttgatgagtttgaatgtgtycacctggatgatccagttaaagagctagtgttgtctgggcttggtggctcatgcctgtaatcccagcattttgggaggctgaggcaggcatatcacctgaggtcaggagttcgtgatcagcctggccaacatggtgaaacctcgtctctacaaaaaatacaaaaattagctgcgcatagtagtgggctcctgtaatcccagctacttgggaggctgagacaggagaatcacttgaacctgggaggcagagtttgcagtgagccgagactgtgccattgcactccagcctgagaaagaagagagaaactctgtctttaaaaaaaaaaaaaaaaagatctagtgtttactcatcactcttccttctctccatgggagcagtgcacactagct

SEQ ID NO: 589917 - DNA, 606 bp, Homo sapiens
tggaatgatatggcttggctttgtgtccccacccaaatctcatgttgaattgcaattctcagtgttggaggaagggctgggggggctctcactcaccatttccctgcagtgggggggcctccccttgctctgtgccactcccaattggcagttgttctgcctcagtcttcctttctcatgggccaaaattgcttccttgatgagtttgaatgtgtccacctggatgatccagttaaagagctagtgttgtctgggcttggtggctcatgcctgtaatcccagcattttgggaggctgaggcaggcatatcacctgaggtcaggagttcgtgatcagcctggccaacatggtgaaacctcgtctctacaaaaaatacaaaaattagctgcgcatagtagtgggctcctgtaatcccagctacttgggaggctgagacaggagaatcacttgaacctgggaggcagagtttgcagtgagccgagactgtgccattgcactccagcctgagaaagaagagagaaactctgtctttaaaaaaaaaaaaaaaaagakctagtgtttactcatcactcttccttctctccatgggagcagtgcacactagct

SEQ ID NO: 589918 - DNA, 474 bp, Homo sapiens
aggttcatacggctgctggatggccactgcccctaggcctcatcgtcttctcagctgacatggcagagaatgcatgtctgcacactaattcaattgcatgcatatatctgtaaactcagatgattctgcaggcctgctaaaagcagaaatgtgtctagcacttgggtgtcagaatacagggagccctggtacctgtggtcaactacaacacactcatcttttaagtgtagtgttaattgcttagctttttatttttatcttctctggaatataatattgaattgttcattcatcttcctacttattttgtattyattttaccacatttactccctaagccatttaaagtatgttttctaaagaaagagcagtgtcacccacaccagaaatagaaacctgaaaacgtgagcattagtagcagtgacaacagtgtccatgtggttaaagcacagagagtaagcacgtgcttctcat

SEQ ID NO: 589919 - DNA, 474 bp, Homo sapiens
aggttcatacggctgctggatggccactgcccctaggcctcatcgtcttctcagctgacatggcagagaatgcatgtctgcacactaattcaattgcatgcatatatctgtaaactcagatgattctgcaggcctgctaaaagcagaaatgtgtctagcacttgggtgtcagaatacagggagccctggtacctgtggtcaactacaacacactcatcttttaagtgtagtgttaattgcttagctttttatttttatcttctctggaatataatattgaattgttcattcatcttcctacttattttgtattcattttaccacatttactccctaagccatttaaagtatgttttctaaagaaagagcagtgtcacccacaccagaaatagaaacctgaaaacgtgagcattagtagcagtgacaacagygtccatgtggttaaagcacagagagtaagcacgtgcttctcat

SEQ ID NO: 589920 - DNA, 587 bp, Homo sapiens
taaaaaattggaagattcagtggcatagatacataagtggcaacagtttccaaaagaagagggttgtcagtgatttcagatgctgcacacaaattgcagaggacaaatagcaaagaactaaaagacctctaaggtcccttctcattattagtttcctttaaatcaggctcttaaaaggcaataactgttttttmaacccttgcattatgtctttgacatgtttggagggaagaatttgtctcctctctgccaaggcataaaattaagtttttgaacatattcttcgtaaacgtgtctttattaggaagaagcttattaaacagtaaatatgattattattactacctgtattagtcagggttctccagagaaatggaaccagtaggagatatctgtatttctatgtttacatgtaggtagatatatataaacagatataaaatgagaactgtcataaggaattgcctcatatgattatggagattaagtcccacaatctgttatttgcaagctggagacccaggaaagctggtcgtgtaagtctcagttcatgggcggaagaccagtgtctcagctcaagcagtcaa

SEQ ID NO: 589921 - DNA, 609 bp, Homo sapiens
aaatttgacttttaaaaaacaaaagactttgtacgatattgtgtttttattgcktttgcaatatttttatagtagcctttatgaactcagtataagtgcaagttgtttgaaaaggtgtttttattagtgcacaatagaattgtgaggttttcaatagatgtcatgagattttgtatatctacataaaatatcagtacatttttttctaatgctactggaaattttacttttcctttgcaacacataaatgatatgatgtacaaaataacagctctggttccaccagtacctaatgttgaaaacatttttaaagtaatttttaatactaactatttagtatactgtcagtactgtacatctgcacactggtgttaatagggtatatattaaattatataaagaaataagatattttgctgttattctttctacatatattattggtcagtacatcaaataatatttggctttgatatgggaaaaaacaaactttgcctatgtaatggaaataaaatattttcttttatgaaatatattagaatgcagattatactaatatcctgaaataaaactggtaatttatttggttcatggtataaagaattagat

SEQ ID NO: 589922 - DNA, 439 bp, Homo sapiens
gaattccatttgagtcttgtccctgttccaggagaagggctgggtatgtgtcccccaaaggggagagcattcgagaaggatggcgccagcctccccagaactgacctgtggtttaaaaaaaaaaaaaaattgtgctttttaaaagatgagttttatcagctcacacatccttgtagagtctaatgcagatcttttgtgtgtgtggaaatagtaatcataggtcattgatatccgcacagagtcaacaacaagattctcctttcatgggcagcactggaagggttgttactctggaatggtttaaaagaggcgtcacatggcttgtttgtgctgatgtcactgcctcgctgctctcctgtggcacctcctcggtccctggccacagggcacagagccaagcacatctcrtgctcttggcccagttacgcttctgcccagg

SEQ ID NO: 589923 - DNA, 524 bp, Homo sapiens
gaaactttgtctctactaaaagtacaaaattagccgggcgtggtggcatatgcctataatcccakctacttgggaagctgaggcaggagaattgctggaacctggaaggcggaggttgcagtgagcagagatcgtgctgttgcactccagccagcctgggcaacaggagtgaagctccatctcaaaaaaaaaaaaaaaaaaaagattaagattgacatttatgtattacctgaaatatacattttaaatgtttgaaagctttaaatgtgggaagaaattcagacttatgttatatttattatcacaaatagaattagctgcctaatcttggccattgagtatgctttttaaatattgagacaatacagaaaactctgctgttttaggaacttaattctatcaaccatacccctccccaccttaattatgtttatatcctaggacatgacaatttaactacatatagacattgttagcaagttttattgtaaataatacgtatgctgtctccctccctaaccttg

SEQ ID NO: 589924 - DNA, 616 bp, Homo sapiens
acttttctctattttacattgatattttccaaaatgttcttaaaaatgcctccatcattttgggtatagcattttcctcctcagtatatatttcttcctcctcactgtggcccaatgtatactgtttgtcttttactttctttttctttttttttttaggggaagggagatgttttgatttttggtgktttttcaaatttgccaatattctataatcatcataaaaataataaaaatacaagtaagaaaaaggaaataaagaaaaagcttcaataatcttacaatatgaatataaacattttttgtattttagactgtagcaaaatttttgtcttcagatgcaaatttgcttgtattaagttttagaaggacattttgccattatataacttggtagccagttttctttagtaacaagaaatagcaacaaccctaaaaactaaaactggtagatacctgccgtattatttattcattgtaggacacaattcaataatctaatatacaaaatttacatggctttcttaggcttttttttcttgcatataagtaatatggtcatagacatttcttttaatatattttaggcagttttaaaattattttaagatgaatt

SEQ ID NO: 589925 - DNA, 684 bp, Homo sapiens
tgtgaaaatcttactgcattctagctgctgagctcagtgctggggcttcagtggttaaagttacagatccttctggcatgaagttggaagtttaacaagagctataaatgtaactataatcataaatgtaatcataattatgaatatatggcaattataactgtgtctgtaattatgactataaatatacctataattagagyatttactattcaagattatttacaaccaccaataaagggtatacagaaaattttggtgtctgctatccctcatcaggaattagtgataacccttaataacttattaagttagcattctgggtagggaatattctgcttgaaaaaagggttattctcccaatgatggcagacagtaactgcatcttgttcacattcagagtttccatttccatattctctgatacattattactgagcattaatttcactcctttgaaaaacttcagccattattaccagttattaatgccttcatcttacagatccatcagagactaaccatcaccttaatatgatacagcattcctgaaattcattgacatgactttgatacattgatgagaattccaagtaaaagtgtcctttaaaaaatgagaaatatgggattagatttcataagataagtaaggtagagctggaacttagttctctgaggacttca

SEQ ID NO: 589926 - DNA, 517 bp, Homo sapiens
aaattctactgttctggggacctattacagattcaaaattcctttatccctattctctcacactaaagacctctgcttctcatgagactctcagaagccttctcagataaggctaatatgtcaggtgtaagtagaaaaattatgctccaaaacatgttactatttctgtagttagccttcaactgatatatatatatatatatatatatataaaaaaccttccagatagctgtggaaagaaatctaaagaacatttagattttgcaaaatgatagaacctttatgttgyatggggatcttgaggaaaaaattcaacttccttatttttaaattaagtccctggagtgtttatgtgacacaccaaaggtgatgtaggtggttagtaccagatttcctcaaatgactgaatcaccagatttcactcgacactactagtgatttccctatataaataacaaataaattgcctttcaactccattgttacatttgttattccttttcttgtcctccaaagt

SEQ ID NO: 589927 - DNA, 514 bp, Homo sapiens
cctgtaaatactaaattttttacatatttttytagtttttcatgcaaaaagatgtatgcagatagtgaagtggtaagatactcctgtacatttgggatactgctaacctctccatatttaactgcatttattcttctgtatattaactaaactactatcaaattctaacctcttctctgagcttaaaaagaaagataaaatttactacatgacttctcactagagtgtcttttataaatctcagacttatacagaaagttaaaaaaaaatcaattctagctctcttcctttcatacacaaatacataatcctcccccattcttcccattggctgagtaatataccattcattatacggatgtatgagactttgcttttctatttacctgatgaaaaatgtttgatttgtttgtagtatttagcaaaaaacaccataagcatttaaataagtattttatgtgtatgtgtgtgagaacattagttattttttcttgaagaaaagaaagaggcactg

SEQ ID NO: 589928 - DNA, 604 bp, Homo sapiens
gacttttaaaattttgataatgaaagactcatgtttttctataaaatgaaagaaacatttgcaaaaagacaaaatcacttttccttcagtccatatctttcctccatttctcttacaggaaaaacaaacaaaacaaaacaaatcttaagttccttgattattttctaaagttatctttcaaaggaatgggaaattgcacttaaattttattttcttgtaatttatttcaagtaccttaggaaaacattgttaagtatatagaaagcatctagttgacatcaaataagrtttgaaagaattatatcaacgtaatatactcttttgataaaatgaagaaatatatactattaatctctctagttttttatcattaacaaggtgaataaaatgaattctcacaggtcaaccaatttccatgttgatgactgaaacaggtctgacttccagagtaggttactccaactcaatttactaatcctattgtaatgaaacccaggctcaactgcttgctgctcaaaagccagacatgagagagaggagttggtgggaggaaaagcaggtttattcagagagcaagaaaactgagagatgatgaactagcatt

SEQ ID NO: 589929 - DNA, 578 bp, Homo sapiens
ccagctgtgtgaactatgttaaacataaacactattttggcagagagagctctcaactctggttatttttccatattttatatctaaagctgaattttagctgaatgcagaagaaatgttaatatttactgattctcatctctttctttctcctccctgcatcaaatgcaattcactcttttcaatttgtacttttgaaatataaaaaaggycttaaattttggacgtttattgagaccttccacatgtcaggtatagttgtgggcaagtgggataaacatcagaataagacaaggtctctgccctccacaagctcaaagtctggctactttggggaaggccaataaatcaacaaataatcacagcagaatgtgaccaataaatgctacacaggaatacagaagagaaagtcagaggtacagttactgtgtacaaactgttttcctgaaaatcccatacacttcattaggttcaccatgttaagaatcaaatttaggccaggcgcggtggctcacgcctgtaatcccagcactttgggaggctgaggcaggcagatcacttgaggtcaggagtttgag

SEQ ID NO: 589930 - DNA, 532 bp, Homo sapiens
ttgttaccacctgctgtgcatttttggtcatattttattcattcactcattcattcattgtttccccacaacattagaatataagctcctcaaaggcaggaacttgactttgttcacttccatacctgagtgcctagaataatgccttgggtatagtaagagctcagtaaatatttgatgaatgaaaaaacatgaatgcatatttgggagacccttgctagaaagaagaaaacttgaaaattacagaaacatttcattattttttctcagacatcagactattaggagctgaaaatgtttgtggttggcttacttccaaatttgaacctacactcccattctcttcattcctacatgcacatatttatgcttcacatatttgagcaccttatatgaggcctgacactggacttaaggrctgagaggtacaaagatgccatttgtcagttcctggatcagtgagggagacaagccctcactaaaggacttaagtgctctaatagacactatgatttggatgtggtttgctccc

SEQ ID NO: 589931 - DNA, 532 bp, Homo sapiens
ttgttaccacctgctgtgcatttttggtcatattttattcattcactcattcattcattgtttccccacaacattagaatataagctcctcaaaggcaggaacttgactttgttcacttccatacctgagtgcctagaataatgccttgggtatagtaagagctcagtaaatatttgatgaatgaaaaaacatgaatgcatatttgggagacccttgctagaaagaagaaaacttgaaaattacagaaacatttcattattttttctcagacatcagactattaggagctgaaaatgtttgtggttggcttacttccaaatttgaacctacactcccattctcttcattcctacatgcacatatttatgcttcacatatttgagcaccttatatgaggcctgacactggacttaaggactgagaggtacaaagatgccayttgtcagttcctggatcagtgagggagacaagccctcactaaaggacttaagtgctctaatagacactatgatttggatgtggtttgctccc

SEQ ID NO: 589932 - DNA, 598 bp, Homo sapiens
gggctctatgatccacaatgcaaataattgatatttgcctctatgaacacctggggacatatattacttatgtatatatgtcatacctcagggggctctggcaatatgactcgtgagaaaaatttaactcagtaattcaggaaacttacctaaaattggaaaaaaattaaatgttaattaagaagcttgactggctggggaatgtagcatcccagacacaagaagaaagaaaccttgtctgttttccagtatgtaggatcccctagcacagagatggcacagagaaggtacwcattttatacttttaaaaataaatcacagaacttccatcaagaaaaaccttaaaatatctcaaagaccctgagggacaatctacatttattgagaaacttctcagtattgtatattattatatataataataatattatatacaataacattaacatctacatccagtctgctcactgtcttgtttatttatttttatttatatatattttttgagacagagtctcactctgttgccaggctggagtgcagtggcctgatctcagctcactgcaacctctgccttccaggttcaagcaattctcct

SEQ ID NO: 589933 - DNA, 598 bp, Homo sapiens
gggctctatgatccacaatgcaaataattgatatttgcctctatgaacacctggggacatatattacttatgtatatatgtcatacctcagggggctctggcaatatgactcgtgagaaaaatttaactcagtaattcaggaaacttacctaaaattggaaaaaaattaaatgttaattaagaagcttgactggctggggaatgtagcatcccagacacaagaagaaagaaaccttgtctgttttccagtatgtaggatcccctagcacagagatggcacagagaaggtacacattttatacttttaaaaataaatcacagaacttccatcaagaaaaaccttaaaatatctcaaagaccctgagggacaatctacatttattgagaaacttctcagtattgtatattattatatataataataatattatatacaataacattaacatctacatccagtctgctcacygtcttgtttatttatttttatttatatatattttttgagacagagtctcactctgttgccaggctggagtgcagtggcctgatctcagctcactgcaacctctgccttccaggttcaagcaattctcct

SEQ ID NO: 589934 - DNA, 573 bp, Homo sapiens
aaacaattatttgaagcatgatgaaagtggtcttaacagtttctcaaagtagaaattcccaaacggtcttctaagaataagttacaggtggaccagagatgctgctctcttttaattgcaagggcagggaacaggccctaggccccagagctcctaaactaggcatttcggctggaagcagcttcaaccatttaccccattgagctgtaaacatgttattgtctgtgttagtgttatgtgagaagcatggaaaccactgtcgtagaaggagattggcccttcttagaaggagatagtgctgtagttcttactacttcgctcattcctgcaagagcttcagagagagtagcactgcagtgattagggcatgcttcctgctccaggctgttactggaaaggtagtctagacaacagaagaaarcacaattgctattgtctataaaaactacagtaagacaaaaaaactgaagccaaatctatggttaaagaaaattaagaatcctaaaatgctctcattatttaataaggaagaataaaactcaatgaacttaacatgtcattgaatagcctggg

SEQ ID NO: 589935 - DNA, 561 bp, Homo sapiens
actccagcctgggcaacagagcgagactccgtctcaaaaaaaaaaaaaaagtgaatacaaatgaaaagttaaaaaacactacataaaagtttcacaggtttcctggtagcaataaccctgccttagaagaaatagattatgatataccatacaataggtccataaaatgaaaaggggaagaagtcatcacaactatgatgacctttaatatacatgaaatgtgctcaaaataaatgcatctcytttggttttcctaagcgctactcaatcatgatgactcaatcacaattgcctattttaaaaaaaagcattcgagttatgaaactactcacgctccccctagtaacatggcctgggttggcacatttaaagatacaagttacaatcaatttttttttaatgtgaaacagggtaaagtttactttaagcacctgcacaccccactacttaatccaattaagaaaaataaaataagggcaggagagaaagcccacatataatacaaaataaaaatgtgcaaagaaaaaaacagaaaatcataaaaatcataagaaagaattc

SEQ ID NO: 589936 - DNA, 486 bp, Homo sapiens
cagaatagacaatgcagaaataaatccatgtatttaaagccaactgattttttacaaaggtgccaaaaacattcaatgagaaaaaggacagtatcttcaataaatggtactggaaaaactagatatccatgtgcagaaaaatgagactagatccttagtataaraatcaattcaacacagattaaagacttaaatgaaaaacccaaaacaatgaaactactagaagaaaatagagggaatgtttcaggacattggtcttctttaaaaacccaaaactatgaaactactagaagaaaataggagaaatgcttcaggacattgttctgagcaaaaaatttatgaattagaccttaaaagcacaggaaacaaaagcaaaaataaacaaatggaatcatatataactaaaatgcttctgcacagcacagaaaacaataaatggattaaagagacaacctgcagaatgggaaaagatttttgcagactaat

SEQ ID NO: 589937 - DNA, 615 bp, Homo sapiens
aatctgctctctggggatggaactggggaagatgacattacagtttctgggtaaagacttggggttatttgcaaagggaattctgggatcacagggtctggaaggggagagtgcagaatctaaatgggcctttttcttcactccacaggcattgtacagtggtgaagggtgtggccagagaagggccggagtgatacttgttggtttcttactgccactctcctggtcacatgagacacacaagttaacaaaccaaagtgcttgaacttatagggctatattctgggaaaaagagacaggttacgaatactaaatctgataaatgtatgaatgatatagtgtagtagaaggtaagaagtamtgggaaaatatgagaattgaagcaggtaaaagtgtaggggctacagtgttcaacaggtttatcagggttggcctcaactgagaaggtgatatttgagcaaaaacttgaaggtagtgagggagtttgccaagaagataacaagatgaagggaaactcaggtttttaagggtataatgcacaatttaaggtagaactatacttttcatgtgaaagagaactgatgactagatcatacactgcagttctaacataat

SEQ ID NO: 589938 - DNA, 615 bp, Homo sapiens
aatctgctctctggggatggaactggggaagatgacattacagtttctgggtaaagacttggggttatttgcaaagggaattctgggatcacagggtctggaaggggagagtgcagaatctaaatgggcctttttcttcactccacaggcattgtacagtggtgaagggtgtggccagagaagggccggagtgatacttgttggtttcttactgccactctcctggtcacatgagacacacaagttaacaaaccaaagtgcttgaacttatagggctatattctgggaaaaagagacaggttacgaatactaaatctgataaatgtatgaatgatatagtgtagtagaaggtaagaagtactgggaaaatatgagaattgaagcaggtaaaagtgtaggggctacagtgttcaacaggtttatcagggttggcctcaactgagaaggtgatatttgagcaaaaacttgaaggtagtgagggagtttgccaagaagataacaagatgaarggaaactcaggtttttaagggtataatgcacaatttaaggtagaactatacttttcatgtgaaagagaactgatgactagatcatacactgcagttctaacataat

SEQ ID NO: 589939 - DNA, 599 bp, Homo sapiens
tgaaaatgttttgccacaataagaagataaaaagaaacaactgwtattaactttaataatacattttatttaacttaatttatctcaaatgttatcatttcatcatataatcttcaaaatccagagtgtattttgtacttacagcacatctaaatttatgccagctacacttcagttgctcaggtcacatatgactagtggttattgcactgaatggcataaagattttgatacatcagtaaaagtattttgtctgttactctgagtgacttaggagatgtttcagagttttaagcactgaagtgttgtaatttgatttatgtctttaaaatatcttggctagcctgaattgagaatacaccatagggatcaggaatagactcaaggagacctattgcaataacctagatgaggaatgatgatggctcaggtgggagccatggatgacgtaagaggtagttgagtttctgatcattctgaacgtagaacaaatagtatggatcacacttggggtgtcagaggagagtcaaagatgactgaaattttggcctgaaagtcagaaaagatggaataacctgaactgagatgaggaaggctgc

SEQ ID NO: 589940 - DNA, 601 bp, Homo sapiens
cataatactgtatctcagctgaacaggagtaaactctggaaatgctctgtgactgaaaactgagatatgaaacatgctgtgtttggtggtttcaggtgaacagtggaccatatcatcaaatccttgcaataatgagataactatcattagagcttagtaatatccaagctgttatatctatttccatgaatctttagttttctgcacaatcaccttatttttagaaaatatatctaatttatacagttttgatttctcttattcagtagctcactaaatcccatcagcaattctttctcagaatacttcaataacatcagatcatcagagtaggtttttctcattaagattggaaatatatgatgtaagcaacctaaaattatcatccttctgtgaaaaacactcgataggaatttattttgtaagctggttcttgctatcccactgttacttttcagttcacatagctcagggtgcatgaaagttctgtgggaggctttttggtataatgaattttacttcatgaattttacttcatgtataccygtaatcaaaatgagctgcttattgagatcgcaccattgctctctaccctgggcaa

SEQ ID NO: 589941 - DNA, 584 bp, Homo sapiens
tatgtcaatttttctttactcaataagaaacaaaataacaacaatgctagtatcattcaagttaatgtttaatcatttaacaaaaaagtttcatcatattccatgttttaaaatatttttattattttatttcttagaatatttttattttaatcaaactagaacatgtctctcaataaaggcataactagatttttgaggaatatttaataactgatagtttacacttttctgacctataacagactttaataaataggaaaattagttttcccaaattagtcttcccaaataactctatgtctcttgcttatctgactgccttaattaacatggcagaatatattagtaattgattttgtgataaaataaataattataattaattggttttaaaatcattagcatcaatcaattttttgccagttctcatatttkcatttttagaattcatgctcttggggcatgatataaaacacagtagtgtgaattcccttgactaaataggtatacagaattccctcatttttctcatttttgcaggggtatcctgaataaatcttaaaacattctgaatagttcag

SEQ ID NO: 589942 - DNA, 625 bp, Homo sapiens
aagaataccagttggttgttgatattttaggttatttctttaaaaattatgattgcctgttctctacattaaaagaacattgctgggcagaataactggattcaaggtaatgtctttgtcttcacatagtctttactctcaagtgactccagtgagtcagcaaaacatgtgtgggcttcagaaagaacgattccaccataatttgcaaattagaacagtgggatatgctatgtactactttccaagtctgcacttcacatatcattttaatgacccatcaatagaaaatacgtgtcatgatttatctttccagtcatggcaatttaggtaaaaggttggaaaaatacctatamgaatagtggtattagaaaggaacagggacaaagataagctagggttaccttttgaaaaaaaatggggagaatcttgacaaaagattactgggaagcatcaaatttcaagtatttaaatctttaaaatgcatcctcatagtttcatattgtctttttttttcctttctatgtactctctggaccaaacagggtatgtctgtctgaataactccatgacttactcaggtaatcgtatcagaaaactttctggcaaagtttagatttaggggatc

SEQ ID NO: 589943 - DNA, 654 bp, Homo sapiens
gttcagccattgtggaaagcagtgtgggtgtttatcaaagaacttacaacagaagtaccatttgacctagcaatcccattactggctgtatacccaaaggaaaataaatcattctacatgattcatgcatgattcagttacatacatgtgtgttaatcacagcactactcacattggcaaagatatagaatcaaccaaaatggccatgaacagcagactggataaagaaaatgtagtacacatacaccatggaatactatgcagccataaaaaagaatgagatcatgtcctttgcagcaacatggataaagctggagaccattatcctaagcaaataattgtaagatcagaaaatcacatattgtactttctcacttagtagtaagagttaaaacattgagaacacatgggcacaaagaaggcagcaacagacactggggcctacttgagggtgggaggtgggaggaaggagaggattaaaaaactgccttatcaggtactatgcttattatctgggtgacaaaataatctgtacaccaaaccctcatgacatgcattttttctgtgtaacaaacmtgtacatgtacccctgaacctaaaagttaaaaaataaaaagccccctccaaaaaaaaaagtgccttaagtgctttagg

SEQ ID NO: 589944 - DNA, 384 bp, Homo sapiens
tgaattcctcaaactcttgcatatttaaaatgacatttttgagccttgatgcttgaagtgtagcttgggtaacrggtgggctttaagccaattttggcatgcaaggggttgagtttattaggcatcagcacctctgaaaatcgtggggatgcaggcttaatttcaacacgcttctaaatacttgaaagatattgtataattctttaataaactcctgtgtctacaaatggttcacattaactcaatatccatgattaaacatctataaaatcaaggcacttatttagtggagacttgctggctattctatgagaggaggtattgttattgtaatctcatcctctcataaaagtgtatcatattactcataaccagcccttcata

SEQ ID NO: 589945 - DNA, 393 bp, Homo sapiens
ttgatgcttgaagtgtagcttgggtaacgggtgggctttaagccaattttgkcatgcaaggggttgagtttattaggcatcagcacctctgaaaatcgtggggatgcaggcttaatttcaacacgcttctaaatacttgaaagatattgtataattctttaataaactcctgtgtctacaaatggttcacattaactcaatatccatgattaaacatctataaaatcaaggcacttatttagtggagacttgctggctattctatgagaggaggtattgttattgtaatctcatcctctcataaaagtgtatcatattactcataaccagcccttcatattctattcctattttggtattttaaaatatctttgaaacacttgaattcaaaga

SEQ ID NO: 589946 - DNA, 410 bp, Homo sapiens
tttaaaatgacatttttgagccttgatgcttgaagtgtagcttgggtaacgggtgggctttaagccaattttggcatgcaaggggttgagtttattaggcatcagcacctctgaaaatmgtggggatgcaggcttaatttcaacacgcttctaaatacttgaaagatattgtataattctttaataaactcctgtgtctacaaatggttcacattaactcaatatccatgattaaacatctataaaatcaaggcacttatttagtggagacttgctggctattctatgagaggaggtattgttattgtaatctcatcctctcataaaagtgtatcatattactcataaccagcccttcatattctattcctattttggtattttaaaatatctttgaaacacttgaattc

SEQ ID NO: 589947 - DNA, 369 bp, Homo sapiens
ttgatgcttgaagtgtagcttgggtaacgggtgggctttaagccaattttggcatgcaaggggttgagtttattaggcatcagcacctctgaaaatcgtggggatgcaggcttaatttcaacacgcttctaaatacttgaaagatattgtataattctttaataaactcctgtgtctacaaatggttcacattaactcaatatccatgattaaacatctataaaatcaaggcacttatttagtggagacttgctggytattctatgagaggaggtattgttattgtaatctcatcctctcataaaagtgtatcatattactcataaccagcccttcatattctattcctattttggtattttaaaatat

SEQ ID NO: 589948 - DNA, 393 bp, Homo sapiens
ttgatgcttgaagtgtagcttgggtaacgggtgggctttaagccaattttggcatgcaaggggttgagtttattaggcatcagcacctctgaaaatcgtggggatgcaggcttaatttcaacacgcttctaaatacttgaaagatattgtataattctttaataaactcctgtgtctacaaatggttcacattaactcaatatccatgattaaacatctataaaatcaaggcacttatttagtggagacttgctggctattctatgagaggaggtattgttattgtaatctcatcctctcataaawgtgtatcatattactcataaccagcccttcatattctattcctattttggtattttaaaatatctttgaaacacttgaattcaaaga

SEQ ID NO: 589949 - DNA, 302 bp, Homo sapiens
gctgggtaggcctcacaatcatggcggaaggtgaaaggcaggtctcacatggcagcagacaagacaagagagcttgtgcaggggaactcccctttataaaaccatcagatcttgtgagacttattcactatcagaagaacagcatgggaaagacctgccctcrtgattcaattacctccaacctgttccctcccacaacatgtgggaattcaacatgagatttggctggggacacagctaaaccctcttctcagctaccctcttctctctggatctgtgagtaataaaaccacttctgtgat

SEQ ID NO: 589950 - DNA, 302 bp, Homo sapiens
gctgggtaggcctcacaatcatggcggaaggtgaaaggcaggtctcacatggcagcagacaagacaagagagcttgtgcaggggaactcccctttataaaaccatcagatcttgtgagacttattcactatcagaagaacagcatgggaaagacctgccctcatgattcaattacctccmacctgttccctcccacaacatgtgggaattcaacatgagatttggctggggacacagctaaaccctcttctcagctaccctcttctctctggatctgtgagtaataaaaccacttctgtgat

SEQ ID NO: 589951 - DNA, 302 bp, Homo sapiens
gctgggtaggcctcacaatcatggcggaaggtgaaaggcaggtctcacatggcagcagacaagacaagagagcttgtgcaggggaactcccctttataaaaccatcagatcttgtgagacttattcactatcagaagaacagcatgggaaagacctgccctcatgattcaattacctccaacctgttccctcccacaacatgtgggaattcaasatgagatttggctggggacacagctaaaccctcttctcagctaccctcttctctctggatctgtgagtaataaaaccacttctgtgat

SEQ ID NO: 589952 - DNA, 550 bp, Homo sapiens
atatcccatagcctgaagcttagtcgtatgagtgacctaagctgcaaaagaggctggaaatctagtttttggctaggaaaccgtatatccaactaaaacctgagcagaaggttctagaaattctagaaataaattctaaatttacttatttaaaaagaagtaaatataagaatggatactgggagatattaaccatgtataacacagattatatatctgagctatttaaaaagagaaatgaattagtccatctaacctgagcataatcttgtattatggcaatctgagatttttgcagtgggtggtaaaactgaatacttgagatcagaaaaaaaaacaggtgcttcttaactaaaagtggggagaatttatggctactatcatttatcatgttagttaccacacaatgaaaaagccaactttcagaagattgattaaatcttgaatgtctatacttactatactaatggctatacttcctacttcttaattcaatacctctgataatgttttaagtacgtaacagkcaaatttggcaataatactatga

SEQ ID NO: 589953 - DNA, 499 bp, Homo sapiens
  misc_feature 394, 401, 427: n = A,T,C or G
gttttttgcctttctttcagagtacacacaaattctaaatttcaaatgtatcattttcacatatatcttaaataatctcattatattgataaaaatttcaatttaaatgccttcagtcaatttaaaacaatgttttgttgtttaaaacatttacataaatggcataatatacctaactttttgcaggtcagtttttctcaatattgatgttttttacatttgttcatgttggcttatgtatatctactaattttcaccttggtatagtgttaaattacrtaaataaataaatatattttcatttttccacagatataaaattaggttgctttttttgctattataaataatgttttaaagtatatctttgtatatgtcttttaatgctcaaggngaagctnttgaaatatgatttacctagaagtanaattgttagatgaaatagtacaattattaaactttactatacattgcccaattgctttgttgtaacaattca

SEQ ID NO: 589954 - DNA, 627 bp, Homo sapiens
cagactcccatgttctgttttttttttttttgcataatgtcagctcttctcagggmccccaaatggtaaaggacccccctttgtatctcccgaatcaatgcctagttgatgaattttagcacagaaaagcagacaacttctttaaagttactttttattatatggctggcagtccttttcactaactggcttcatcctttcttccccacctcccacccactccactccagaaaaaaactagacagctactccctagaatacaaaattgccacaccctctctaactctgatccagaaattgcttttctttcagatgccctcttgtatctcctgcaagttggctggtgaaacaccataccaatgggtgtctagaaatcaccattaggggtaaaccccggggagtttatatcatgctacatcttgagataacacaatgatacaaatacgatattggaagatgtcattcgatgttgttacatagttgtttgcacagaattagatttctgaaaatgttaatgtgcaacttttctctcccagcattaacgacacaacaacaacaacaactgcaaccacagcaaagttgcattgacttaatgtctggatgtttgttttatataaatgttttaat

SEQ ID NO: 589955 - DNA, 627 bp, Homo sapiens
cagactcccatgttctgttttttttttttttgcataatgtcagctcttctcagggcccccaaatggtaaaggacccmcctttgtatctcccgaatcaatgcctagttgatgaattttagcacagaaaagcagacaacttctttaaagttactttttattatatggctggcagtccttttcactaactggcttcatcctttcttccccacctcccacccactccactccagaaaaaaactagacagctactccctagaatacaaaattgccacaccctctctaactctgatccagaaattgcttttctttcagatgccctcttgtatctcctgcaagttggctggtgaaacaccataccaatgggtgtctagaaatcaccattaggggtaaaccccggggagtttatatcatgctacatcttgagataacacaatgatacaaatacgatattggaagatgtcattcgatgttgttacatagttgtttgcacagaattagatttctgaaaatgttaatgtgcaacttttctctcccagcattaacgacacaacaacaacaacaactgcaaccacagcaaagttgcattgacttaatgtctggatgtttgttttatataaatgttttaat

SEQ ID NO: 589956 - DNA, 513 bp, Homo sapiens
ctaggtgcctccacactgccctcctgggcttccaatcaccacaaatgtgtctctactctcctactacattctaatgatctcccttcaacactccagtcaaatcagctatggattctttgctttggttcattcttgtaggggggatgaatgccaagcgtctgtagctagccatcttgccgatgtcactcccccaatttctatcacaggttttttttttttttttttggcaagaacttctgaaagctatgctgtaaggcaacattggggggkggattgttttttaagctttttcaggtgagcttttgtttgtttttactgaaatatcacacaaatgtctagtaaaaaacaagtttcagttataactattttatttaaagggggagcagtgacctaaaaccgaattccttggccttcttctctcttaccctttggcacatttgagaatacataggcctttaccaaatgcaactgaaagctccaaaattgacatttgccagagaaacctggaattga

SEQ ID NO: 589957 - DNA, 578 bp, Homo sapiens
acacaatatatagtgcactaatttttatcagacccaatagtttcatttataaaaaataaaaataaagaacmagaaaaaagattcagatgtataattaagaactcttaatttttccatttgctctgcttgatattactaaaatttagatgtctgaagatttagccaaccaatctctagatatgtcaacaatcacaaaacaagtgttcacagagtacaaaccattttattaagtgaagaagattattaaaaaacaggcagctcccaccttcaaatattttaggaatcccttaccgacttaacataattaaaattcccactgggtttcaatatttaaatgccattttatacaacttggggttatccatgttaacatttaaaaatatttttcatccatattataaattaataaatttgtttcagtgcagataaatagaaggactacccatagtcttaccatcaagaaagagttaactgctcagaaaaatttgctgcatttctcttctgcgtgcgttatttttcagagtttagcatgtacaatatacacattttattatcttttttaacctgttttgtcgtag

SEQ ID NO: 589958 - DNA, 617 bp, Homo sapiens
  misc_feature 343: n = A,T,C or G
atcttcagcctgacagaacctccaccttgcagattttgaatttaccaagccccacaattgtgtgagccaattctttaaaatacctctctctctctttctttctctctctctctctmtatatagaatatatatattctatatatattctctctattctatatatattctctctctctatatatagaatatatatagagatatatatatacacacactgatatatatgatatatgaatcatatatgatgctatatatatttgatatatgatatatgaatatatatgattatatatacatacatatatatatccatatatatgcaaagagagagagagagatagcntatgtttctatttctctgaagaactctgattaatacccccccatgaaggaatgagagtggagccatcacttatttgctgtcccttagaaatctgggatgtattgccatttatgtgtgcttagctatatagacttagagaaaatattaatcagtttttaactacattcatcctcacaaaacagacaagtggtctaaagattctctcatataaaaactcaagttgagattatgttaaaattcagcacaaataagcctcaagacacttcataactac

SEQ ID NO: 589959 - DNA, 550 bp, Homo sapiens
agatcgtgaatgaggccatgaaagttaatattcataaactcaaatgtactttcatgatgttcaaatagagaaataaaaatatatcagcatttcagcaaaacatttgttattcctgcaagctttattattaatttatttagaaagatggttggcagagatacaaggaaaaagaccgtggaaacttgaactaggattacagacccattcctgtttttctctcaaggacttagtctaacacttctcacatgttttcttttcacacattttccagtcattcctcatcaggtttcaccactgtgtatatcatattttcatcaacccaaaacttattgtgacactttgaaaacactttttgaatcaaagagaaaccggcacagcttactaatgaaactagtaagttacctcaactctcataaatatcttttaatcacgagtaatcttttggktaaatccttgttcttcttataactcagaagtgatagttaattttttaattatcgaagttttgtgctcacattgattatatttaatttaaaccttaaatggaata

SEQ ID NO: 589960 - DNA, 487 bp, Homo sapiens
gaattcctgaaagtttactttcaatccaccatcctgaccttcttgctgtattttttttcttttttctcgcatgtgccatgctttctttcacttcagaaaatttgttctacccattccttctgcctcaagctctcttcccctacaacatctacaaggctaacccactcacctctattaagtgttctctcaatgttaccttcttaactaagcctatccttactacctgcgccctctcccagcactatagattctattttccttactttttttctcaatatgacatatatttaaagaatactatacttttactgtktattattcattgtctcacacacaagaatgtaagtttaacgagggcaaagatttatttttaacttttttaaaaaaaccttacatatcatcccaagtacctgacatgttctaggcattcagtgaatatttgttgaatgaagaaataaatttctttcctggcatatcttttctcccc

SEQ ID NO: 589961 - DNA, 602 bp, Homo sapiens
aggctaaaattctacaatttgacaaacaaggaagtttgaggtcctttgaaccaagtgggtactgtggaagttagctaggatgaggtcattctgaaagtactaccctacttacccccttataaaaaaattatgacttgccatggtgaagactttgtgtgatgttctgtcagaggtactagttgagaacaaactccaaaaggtcaattcaagattatcacattatcgtcagagaatatgtaatattgaaaggcactgtggggtagatagacaagggtgatccataaaaattctaacagcacatacttcataaaagtttgaaagtcttcatgtctgccatgacagaggggaataatctgccagttattgctacctaagaattgccaatagttccacctaataaaaaagaacwtttctttcttctccttttaatcttcttcattatgtttggtttttggaagaaccatgaagatgagaaggaagagtggcctacataacagagcgagactgtgtctcaaaaaaaaaaaaaaatgtatgtggcctacaaatggaatcgtggtattgattcagcctggatgttgttcatttcatttatgattgcaatg

SEQ ID NO: 589962 - DNA, 548 bp, Homo sapiens
  misc_feature 25: n = A,T,C or G
gttttcctgccatatccccttcacntataataggcagatacaggtgctcagaaaattcttactaaacgcccaagataatcaataaatatataatctaagatagtgctcttattgaaattaaagccatacattcagagctgccaagaaataatagttttttctttatttttatgagccagatttattttcagcaaagctacagatttttaaagaaaatatgtgtgtgtcttcaaaccacacacttggaaagcaataaatgacactgaatgtttcaggagtgaaaacatggctcgtgaaacatattttttcattagtattgtctctcaagcagttacaaaaggtgaatgacttgaatattcaaatacatggcgctttctgcactgaggctaaaggaaagaagcaccaagctaagaaccaagacgagtrgggttttgagtgtgtgtgtgtgtgtgtgtgtgtgtgtgtgtgtgttactattactagagagctgtttctctacttgcattaaaaaaaaaaaaagtgtggccaggcgcggtggctcacacctg

SEQ ID NO: 589963 - DNA, 612 bp, Homo sapiens
agtagaaaagaagatgctctccactccctaaagaacccattcccaggtaatagatatctgcagccaacttatagctgataattcaattaaaagagagtgatttccttatatgatacgaacaaaggtaaaacaattagcgatatgggcatacagactgtaataagtttatatttaaatttggactttaagctatcagataaagaccaaaaattctcaatgagtgttgaagacctggcatcaagacatagaaatttgtaggcaaaggacagatacttttgaaaagaagacacacactctgccaacaagcatatgaaaaaaagctcaacayaactgatcattagagaaatgcaaatcaaaacaacagtcagatactatcatctgcttttatactgttggtagaagtgtaaattagttcaacttttgtgtaaagctgtgtggcaattcttcaaatagctaagtctcaggatacaaaatcaatgtacaaaaatcacaagtattcttatacaccaataacagacaaacagagagccaaatcatgagtgaactcccattcataattgcttcaaagagaataaaatacctaagaatccaacttacaagggatgtgaagga

SEQ ID NO: 589964 - DNA, 553 bp, Homo sapiens
agaggctctttcagcttgtactgggaagtacaaggtgcaaagagctgggagagtgagaggcagattggggtagagtcagtgcaggggcggggtatggggtgaaggcccaggctcgggacttcagatccagcaacacagagctcgtggctcctgctcaggccctcactgctcttagccatcctctcrtcatcccttcacatcctgtgccaatcaagacagcagggggactgagcattggaggtcaagaattgccctcacttgcttagctgagtacctggcctcttcttcgtctctaccctcctgcattttcttcaggcttttttttttttttttttaaataaagaatatcccagctaggtgcagtggctcatgcctgtaatcccagcactttgggaggctgaggcaggcggatcacttgaggccaggagttcgagactggcctggccaacatggtgaaacctgtctctactaaaaagataaaaattagccgagtgtggtgacatgtgcctgtaatcccagctactctggaggctaaggcaggagaattgcttga

SEQ ID NO: 589965 - DNA, 479 bp, Homo sapiens
ttgaaaaaaattaaataaatgtattttctttttattgaaaaaatagtacatggtccttcttgacaaatgtaaacattttatatgcacaaaaatggaaatacttatattcccatttcagagataactactgtcaataccttggtgtatatcctttcagacatttkgtacttacctatttacactttatgtaaatattaacatgacatagctacataatctatgtatgtagttaacttgctctgtttacatacccaaaaactcaaatgtatgcattacacagatatatgcatctgaatacatgggcagactgggtattggagagaaacaacgtcctgattagcaaatatatcattgttaatctgaagatgctggtatggtttcccagcattgactttttaggctatctaagactcaggccccactttcatggattcattcatttataatctgttatatatcagactctgtactgggacctt

SEQ ID NO: 589966 - DNA, 570 bp, Homo sapiens
tttacactgtgaaataattggtacaatcaaacttcttaacatatttatcacctcacatagttaccttttctgtgtgtgtggtaacaatacttaagatctactctatcagcaaatttcaagtatataagacattgttactattcatggtcatcatgctgtacattagctctccaaaacttattcctcttgtaactacaactttgtaccattggatcacatctctttatttctcttagccccagaacgatggtaaccacccttcgactctctgtttctatgttctttgttctgtgtctatgttgctcattttagtgtagaaaaatgttaacctctgtattcagagaaagaaagaactctcagaaataataaaaaacataatcgagtttaaaggagaatagtagatatcagacagaaataacttaacatgatacatttagacagcaaaatttcttattttctatgggaaagaaataatggccagcataatctgataccagggaaattaggactaaaggatgtcacatcctttaaaactatgtgaaactacrttgagagtaaatggatgtgtat

SEQ ID NO: 589967 - DNA, 461 bp, Homo sapiens
ttccccaaaccaaacagctctgtgtcacaactcatcttggtaaggagtctctctgtacaattcccaagcaaaacccactttcaaatagagaagtctttttttcttacactctgccctagagaaattaaagactgtaggccttataaataaaggggccgatcaacaagcaacttgtaaagtggctgatagcttacattatagctatcaacagtgtttgaaatttcaatgtgatcattgtcttctatttaagtacgtaactgcttttaagaatatggcctctggaggcagactatcttattgtgaatctttgaatcttgatttagtccttttatgactttgaagaagataatttaacacctgtgtctcagtttygtcatttgtaaaaaaaaaaaaagtgtaaaaaactatacctattttgttttggccatatcaataattacattaaatatatataaaactca

SEQ ID NO: 589968 - DNA, 526 bp, Homo sapiens
atatctgtttaagatacaaaggagtaagtcactgaaaagaaaaacaaaaaatggggcatttcatagattttaaagcagtatattgatagcataatattataaacatcttgataataaatttaaaaaatatagtaagatgaacattttctggaaataaacacatttctgctaaaattgaacaaagaatagaaaatctgaataattatatatctaatacagaaattatatttgtttaaaaaatgcattggttacctctgaaaaaattaagagaaatatcagtaatcttctgcaaaatattctagtkataaaaaaagaggaaacagtttccaaaccattatatgaaaccagtatataattgatagcaaaattttacaagttataaaaagaaataaatattttcatgatgagataaaaactttttaaagtaacatattaactaccatcaagttaccaaaaggataatgtatctcaaatgaggtgtttgtcttttcaaaatgacactttgttttaatagaaaaaaaagtct

SEQ ID NO: 589969 - DNA, 553 bp, Homo sapiens
tgcaggtcaaaaaacaatcaaatttagttcaaattcatctaaaaaagtaaaaagagcacctttaaaaaatgtttttccatgaatacctgataaccattatcaataagcaaggtttttttyttcaggagaaatccatacagattttatgggagagcacatattttgttttaagagataacatgccttagcattaagttgtttaataataaaatgagctgtcttttgaaatcttactagtgatatttttccagtacaggcaggatgccttctctaggaaaagtattgttctatgaagaaataattcatgcaaaggtatggtagtatataatacactgaatatttagaaaatagaaaatgctaatggatagcttaatcacatattctagtgccaatggaaagtgctcagagattttgctatcacaatgaagacctgagacatatattggcattctaactaaatcctgctattatgacatagagtgttatagacctactaagtagtcctactcgaaataattccaggcagtgacaaaatttggtaaaatttgttcaa

SEQ ID NO: 589970 - DNA, 553 bp, Homo sapiens
tgcaggtcaaaaaacaatcaaatttagttcaaattcatctaaaaaagtaaaaagagcacctttaaaaaatgtttttccatgaatacctgataaccattatcaataagcaaggtttttttcttcaggagaaatycatacagattttatgggagagcacatattttgttttaagagataacatgccttagcattaagttgtttaataataaaatgagctgtcttttgaaatcttactagtgatatttttccagtacaggcaggatgccttctctaggaaaagtattgttctatgaagaaataattcatgcaaaggtatggtagtatataatacactgaatatttagaaaatagaaaatgctaatggatagcttaatcacatattctagtgccaatggaaagtgctcagagattttgctatcacaatgaagacctgagacatatattggcattctaactaaatcctgctattatgacatagagtgttatagacctactaagtagtcctactcgaaataattccaggcagtgacaaaatttggtaaaatttgttcaa

SEQ ID NO: 589971 - DNA, 562 bp, Homo sapiens
attgcacctatgtcagacaaaatagatttcaagacaaaaactatttgaagagacaaagaagcttactatataatgataaaggtgtcaattcagcaagataatataataattttaaatatatatgcaccaaacactggagcacccaaatatataaaggaaatattattagggctaaagagagagatagaccctaatacaatamtaattggagacttcaacacccctctttcagcattggacagatcttccagacagaaaatcaacaaagaaacatcagacttaatctgtgctacaggccaattggatctaataagtatttacaaaacatttcatcgaacagctgaagaatatgcattctttttctcggcacataaattattctcaagaatagaccacgttaggtcacaaagcaagtcttaaaaaattaaacaaaatgaaatactatcaagcatcttctctgaccacaatggaataaaactagaaattaataacaagaggaattttggaaactatacaaatacaagaaaattaaacaatatgctcttgaaggacaagtgggtca

SEQ ID NO: 589972 - DNA, 364 bp, Homo sapiens
ggtaggatggtttgtaagcctctggaccacattgtggggggtgggtaatcaytctgtggttctctccaagtacaggttaaatacatttacatgcttttcctccaaatatattgccctttgcaactgatttttcaatgaaccttcagagggcgaagggcaagtttcccttggcctctacaggtgcatatttttaacccaactttttaaatttagtattaaaaagctggctaattgtggaagacaatgtggcagttcctcgaagatctaaagacagaaattccatttgacccagcaatcccattactgagtatatacccaaagggacatgaattattctattataaagacacatgcatgtgtatgt

SEQ ID NO: 589973 - DNA, 494 bp, Homo sapiens
aatagcaggggggacgttttacgtgtggggaatggtcagagtactttgaaaacttcctgtggctatagtgggcattccaggattgggccttttttcctgccaacaaaatctgttggtgctgttgtgtagtccacagcagcctggaccctgaggcgatcctggcagggcctgtggggtgcgtgtgttgcctgggagggagcagagtggtgctcagccttggaacctgtttcttcgttcttccttccctgtgatccctgcgtggttcctggaggtttatttggctttcgggctgrcatctactgtgcttgtgagcagagcgcatgcatttcccactctttccctagagctggtgaccggaggctccggcctgtgtaactttgaaagcctggaattcatgtgacccctgctgacctaatcaagactccgaaagcacagccccatgtgctgggactctcctgaggagttattaaaaactcgcattagttcttcaagct

SEQ ID NO: 589974 - DNA, 433 bp, Homo sapiens
cccccagcccagccccgtgctttttgcgtcctggtgtttgttccttcccggtgcctgtcactcaagcacactagtgactatcgccagagggaaagggagctgcaggaagcgaggctggagagcaggaggggctctgcgcagaaattcttttgagttcctatgggccagggcgtccgggtgcgcgcattcctctccgccccaggattgggcgaagcctcccggctcgcactcgctcgcccgtgtgttccccgatcccgctggagtcgatgcgcgtccagcgcgtgccaggccggggcgggggtgcgggctgactttctccctcgctagrgacgctccggcgcccgaaaggaaagggtggcgctgcgctccggggtgcacgagccgacagcgcccgaccccaacgggccggccccgccagcgccgctaccgccct

SEQ ID NO: 589975 - DNA, 408 bp, Homo sapiens
cgggagcgtgacctgaacaatcagaaggctccaaggctgagactctataggtgccaacactatgagggccccacccctcagcagattctgcttgctgctttactgacattttctcctttactcccacaaatttaggtttaaaatatttccatcagttcatctccaatggctaggtccttccaatgaggtctcctgaaaacatgtggcctggatactcctgtcaccctgcaggccccgaccttccctytcattaacactgggaacccttcacggcaccaagcaacctcttgccctgtgcccttcacaagccagccctacctgccaggtaacatttgtaaaggcataatcattaaatattaagaaaaatgcttatggaaaaaaaaatttgagaacattttaatggacctg

SEQ ID NO: 589976 - DNA, 408 bp, Homo sapiens
cgggagcgtgacctgaacaatcagaaggctccaaggctgagactctataggtgccaacactatgagggccccacccctcagcagattctgcttgctgctttactgacattttctcctttactcccacaaatttaggtttaaaatatttccatcagttcatctccaatggctaggtccttccaatgaggtctcctgaaaacatgtggcctggatactcctgtcaccctgcaggccccgaccttccctctcattaacactgggaaccctycacggcaccaagcaacctcttgccctgtgcccttcacaagccagccctacctgccaggtaacatttgtaaaggcataatcattaaatattaagaaaaatgcttatggaaaaaaaaatttgagaacattttaatggacctg

SEQ ID NO: 589977 - DNA, 590 bp, Homo sapiens
gtaataatccccatgtgtcaatggccagaccaggtggaggtaattgaatcatgggggtggtatcccccatgtggtttccatgatagtgggtgagttctcatgagatccaatggttttataagcatccagcatttcccctgctggcactgsatttctctctcctgctgccatgtgaaaaagtacgtgtttgcttctccttccaccatgattgtaagtttcctgtggcatccccaaccatgtggaactgtgagtcaattatacctctttctgttataaattacccagtctgggtatttcttcatagcagagtgagaacgaactaacacaatttcctaaagttaaaaaaagatcatatgttgaaatcctcaccccaagatgatggtattaggagatggggtttggggaagattagctcacaatggcagatcttctataagggcacttggaatactgcccttacggaagaggccccagagagaccccttacccttcctccatgtgaagaaatgagaaagcactatgtatgaaccaggaaacaggacctcaccagacgttgagtctgtcgctgccttgatcttggacttcccatc

SEQ ID NO: 589978 - DNA, 590 bp, Homo sapiens
gtaataatccccatgtgtcaatggccagaccaggtggaggtaattgaatcatgggggtggtatcccccatgtggtttccatgatagtgggtgagttctcatgagatccaatggttttataagcatccagcatttcccctgctggcactggatttctctctcctgctgccatgtgaaaaagtacgtgtttgcttctccttccaccatgattgtaagtttcctgtggcatccccaaccatgtggaactgtgagtcaattatacctctttctgttayaaattacccagtctgggtatttcttcatagcagagtgagaacgaactaacacaatttcctaaagttaaaaaaagatcatatgttgaaatcctcaccccaagatgatggtattaggagatggggtttggggaagattagctcacaatggcagatcttctataagggcacttggaatactgcccttacggaagaggccccagagagaccccttacccttcctccatgtgaagaaatgagaaagcactatgtatgaaccaggaaacaggacctcaccagacgttgagtctgtcgctgccttgatcttggacttcccatc

SEQ ID NO: 589979 - DNA, 590 bp, Homo sapiens
gtaataatccccatgtgtcaatggccagaccaggtggaggtaattgaatcatgggggtggtatcccccatgtggtttccatgatagtgggtgagttctcatgagatccaatggttttataagcatccagcatttcccctgctggcactggatttctctctcctgctgccatgtgaaaaagtacgtgtttgcttctccttccaccatgattgtaagtttcctgtggcatccccaaccatgtggaactgtgagtcaattatacctctttctgttataaattacccagtctgggtatttcttcatagcagagtgagaacgaactaacacaatttcctaaagttaaaaaaagatcatatgttgaaatcctcaccccaagatgatggtattaggagatggggtttggggaagattagctcacaatggcagatcttctataagggcacttggaatactgcccttacggaagaggccccagagagaccccttacccttcctccatgtgaagaaatgagaaagcactatgtatgaaccaggaaacaggacctcaccagacgttgagtctgtcrctgccttgatcttggacttcccatc

SEQ ID NO: 589980 - DNA, 586 bp, Homo sapiens
catgccaaccctgcagattgttgtcccagagccagtcccttagctaagccaacaggtcgtgtcattgttgcgttgagcttgctccttccagctgatgggtataccaagggaaccctttgcagtgtgccattgtcagccctcccttttccataaaataggtccctcaagctgggaccatgttattcagaataccatgccagttctgtctgtccacagatagaagtgttggcagaaacaatatagatagagaaggcaaactcatatctacaggaggtaaaaatctaaaatgaacaaattgctgccccattagaagaagggtctgatgtaattaacctgtagtcaagtagctggcagccttccttgagcaataatgccttaacatagggctcaacatctgtctcaactttatgcttattgattggtggcaagtcttaatatactaattatattaataatttsccatctatgctacatttttccccattttattttacctttaagtctttattatgatggggggtttatagatatagaagtgcctagcttttgtttttagtgaaatctgttgatattcctgtatggcttt

SEQ ID NO: 589981 - DNA, 508 bp, Homo sapiens
ctttttttgaatcagatattaatttgagaagacagtttaatattttcaataaatattacatgttgctgtttcacacaagagggatttgtcttctctgaattaatttagtaacctgaaaggtttcagatggtagaacattcatttagatgcaaaatcacaaggtacwgtcagaagcaatggaaacctctctaatgctcagttgaggaccctgctgggctaaaatgtctctacacattttccttctcatatttaggagaactgtaaatcgctggaaacagctacttcatttctgttctctggccagtgcttgaatcccaggagacattccagggtgtatgggtttgatgtcttcagcacatcctccagaggactctctatacataccacagttgaactggctgcctttgtaagaagttttgatccagcaataagattgcattatctcttttccctggagagaaagatcccgtttgatcaagtttacagtcacctcagggtcagcagggag

SEQ ID NO: 589982 - DNA, 508 bp, Homo sapiens
ctttttttgaatcagatattaatttgagaagacagtttaatattttcaataaatattacatgttgctgtttcacacaagagggatttgtcttctctgaattaatttagtaacctgaaaggtttcagatggtagaacattcatttagatgcaaaatcacaaggtacagtcagaagcaatggaaacctctctaatgctcagttgaggaccctgctgggctaaaatgtctctacacattttccttctcatatttaggagaactgtaaatcgctggaaacagctacttcatttctgttctctggccagtgcttgaatcccaggagacattccagggtgtatgggtttgatgtcttcagcacatcctccagaggactctctatacataccacagttgaactggctgcctttgtaagaagttttgatccagcaataagattgcattatctcttytccctggagagaaagatcccgtttgatcaagtttacagtcacctcagggtcagcagggag

SEQ ID NO: 589983 - DNA, 569 bp, Homo sapiens
atttatatatacaggagccagttgatagaaggccttggtcttgataaatgtacgtagaaacatttcatttcctaaccagatgtatgttgcatctggaagtagttatgtctctccaagagaggttcatgttcaaaacgccatcgtgtaacattaggaaagaaayttttttcagtatgaatttattgatacaaattgattacaatattttttcagtcagtacagaatagctcatcattttagatatccttatgataccctaataaattgtcctttctttggtttttcatttatttgaatcaccacgggcaaaaaatttaaaaaccgaatagcaatatcaacaaaccttttagtgtttatccagctgagaaatttcaaacagtactgtcatttcaggccacactagtactatatcagaatttttcattcttagaaaaatggatctgcaaatggaaaactagggctatcacaacaaatttagggctttgggctcaatcagtgatatttaaataataagaatattcaagaattaaatatttctgacatcacatctgtgacagcagaaataaaaa

SEQ ID NO: 589984 - DNA, 607 bp, Homo sapiens
gtgcaaggatggcttgagcccatgaggcagacagtgcggtgagcctagattgtgccactgtattccakcctgggttacagagccagatcctatctaaagtaataataataataataataatgataataacaatagagtttggtatataacccatcatagttttgatgcttttggtcacagttctgtcactagaatgctagcaattggacatatgtaagaaataaccttaccactttaatacagtgtttcgaagtgtgcaggcagcaactactagacaccaaatgacagtgttttaatttgagatgtgttagagagaatgataggacttttgcagtgtaaatgtcatgcagttaagttataggacttcactcctgggtctgaaaaaggtacagactccagaaaaatcttgaatattggcattccaagcctctttttcagactcaggagaaggtgacaatcaaaatgaactgctttcatgtgacacagggccagaaattaaaatcatttaattcctctaggctcatagaagaggtgggtgtgtgagactgtaagggccaattctgagggacaaaattagttatgtaagttattttttagtggttgttta

SEQ ID NO: 589985 - DNA, 603 bp, Homo sapiens
cctgagatggggtaatttataaaggaaagagatttaattgactcatatttcctcattgctggggaggtctcagaaaacttgcaatcatgggagaagggcaagcaaacatgtccatcttcacactgtggcaggaaagagaatgagcactgcacaaaggggaaaaaaaaccccttatgaaaccatcagacctcatgagaactcactcactrtcatgagaacagcagcatgggagtgactgccttcatgattcaattacctctcactatgtccctcccatgatacctggggattatgggaacagcaattcaagacaaaatttgaatgaggacacagccaaaccatatcaacaactctatagcacaaaaggaaaccaagaaataaaataggcttgaatcaaatatttcagtaattattataaatataagtgagtaacctctttagttaaaatacaagaatttaagaccatatttttaaaaattggaaatatgttcattatgtgaaatatacctgtattatacagatacaggcagactttttgaaatatagaaaaacataaattctagttaaaagtatgcaggtataatcatcttaatattacaacaa

SEQ ID NO: 589986 - DNA, 580 bp, Homo sapiens
ctgtgcagtaaaaatagaaaccaatactaagaaaattgctgaaaacatgtattagtttgttttcatgaagacatacccaagactgggcaatttacaaaagaaaagtttattggacttacagttccatgtgggtgggatgcctcacmgtcatggtgggaggtgaaaggcatgactaaaatggctgcagaaatgagaagaaagcttgtgcttggaagttcccgtttataaaaccatcaaattttgtgagaactcactatcatgggaacagtatgggagaaacctcccccatgattcaattttctccaatggccctcatctttgacatgtgggaattattacagttctagacaagatttgggtggagacacagtcaaaccatatcattctacccctggcccctcccaaatctcatgtcctcacatttcaaatccaatcatgcctttgtaaaagtccccccaaatattgactcatttcagcattaactcaaaagtccacagtccaaagtgtcatctgagacaaggcaagtcccttctgcctattgagactctaaaatcaaaagcaagtaggttacttcccagat

SEQ ID NO: 589987 - DNA, 614 bp, Homo sapiens
aagttgataattctgctattccaggaagttctgtcaaagattcctacatttccaggggtttttaagacctgaaattattgatacaacatatttatgcaatctttgttttgttgcttctgaaagagtctttatgccatctctcgttatctacacctactcttcaatcctcgccaatagaaattttctatctatgctaaataggtgcttttctagcaacaacgaggctacatctaactacaccatctttttgrcagtatatgatttattaattttatcccacataaatctgttattctgtaggaataacccatgaagggaggaaggatctttgttttattctcaaataaaatttggatttattagtaattaatcccaagcaatctctgaatagattaggccctcaaaaatttttgttgaatgacataatacaagaatggatgtattatttcattaataacataatacaggaatggatgtattatttcattaataacatacaagtagatataagcaatatcataaaatgagttttccacaatgagataattttggcttttgcataaaaataaaaaagataattttttttgagatgaagtatcattcttgtcacccaa

SEQ ID NO: 589988 - DNA, 551 bp, Homo sapiens
aggaaaataaatgacaatttatygcttggagaaggactttatttagaatttataatggtagctcttttcaaaataagtgacatgaaaattctgtctctacttgtttcaaatcacatctgaaagtaaactctgggtattagaagactgtgataatgaacatacattcactagaggtggaaaaaaacaactagagatgggaataatatgtacttctaaatgtatcatataaatatactacatatgctatgcatataaaagtcagcacactaataattttctaatcaatttatattcagatgaaaagaatttggacaagaccatgaagcaatatgaaaaggaaaaaaaagccatacatgctaattctagatctgccaccaactaactctgatgtaaagcaaatatcaaattacctgatattcaatacttttatttataagatatgagaagtaacacctgactcaaattgggatatcaaatgagatgagacatgtggatgcttttgaaatgcatgtgcgatcaagagtgcaatagattataaaaaagataaaaaa

SEQ ID NO: 589989 - DNA, 551 bp, Homo sapiens
aggaaaataaatgacaatttattgcttggagaaggactttatttagaatttataatggtarctcttttcaaaataagtgacatgaaaattctgtctctacttgtttcaaatcacatctgaaagtaaactctgggtattagaagactgtgataatgaacatacattcactagaggtggaaaaaaacaactagagatgggaataatatgtacttctaaatgtatcatataaatatactacatatgctatgcatataaaagtcagcacactaataattttctaatcaatttatattcagatgaaaagaatttggacaagaccatgaagcaatatgaaaaggaaaaaaaagccatacatgctaattctagatctgccaccaactaactctgatgtaaagcaaatatcaaattacctgatattcaatacttttatttataagatatgagaagtaacacctgactcaaattgggatatcaaatgagatgagacatgtggatgcttttgaaatgcatgtgcgatcaagagtgcaatagattataaaaaagataaaaaa

SEQ ID NO: 589990 - DNA, 551 bp, Homo sapiens
aggaaaataaatgacaatttattgcttggagaaggactttatttagaatttataatggtagctcttttcaaaataagtgacatgaaaattctgtctctacttgtttcaaatcacatctgaaagtaaactctgggtattagaagactgtgataatgaacatacattcactagaggtggaaaaaaacaactagagatgggaataatatgtacttctaaatgtatcatataaatatactacatatgctatgcatataaaagtcagcacactaataattttctaatcaatttatattcagatgaaaagaatttggacaagaccatgaagcaatatgaaaaggaaaaaaaagccatacatgctaattctagatctgccaccaactaactctgatgtaaagcaaatatcaaattacctgakattcaatacttttatttataagatatgagaagtaacacctgactcaaattgggatatcaaatgagatgagacatgtggatgcttttgaaatgcatgtgcgatcaagagtgcaatagattataaaaaagataaaaaa

SEQ ID NO: 589991 - DNA, 509 bp, Homo sapiens
tgtcaccactcctggttatttatttttattttttttatagggacagggtctctctargttgcccaaggtggtctctaactcccagcctcaagcaatcttcctgccttggcctcccaaaatgttaggtttataggcatgagccactgtacctggcagtaaatttttttgaatgaaagaattttgagtatataattaacatatatttattgcttgttcaccaagtgtgcaatatgatttcagtatagacattttattactttttatatgccaaaaaaattagactactggttatgtaccaaattgactagaaaagagttttgtctacttaaaacagttagaataaaataccaataggtctttaatataatgccacatgtatctatttagtttatttattttaaaatttccatgaaaagtaaaatgaatacatacacatcacagttaaccagtctcaattatgtcttattaaagatatgctcttagactaaggctttcagtcgatgactcac

SEQ ID NO: 589992 - DNA, 584 bp, Homo sapiens
tttttatagagtcttcattacataggcatgatggatttaggcatgatggattaagtcataggccatgggttattaacttaaactttagcacctctcccttcctggaagttggggttaagccagaagttccaactctcaaatctttccctgacatgcagctcccattctgagaatactcaggagcccctagtcatcagtcatctcattagyttatagaatgacacttaccacttctgacattccaagggttttaggagctgtgtgttaggaatccaggaataaagaccaaaatagatgtcttcttatttctgctaattcctcatcaaagaattgtcaatctatctgcggctacttgagcccaaatagctatttctactcttctggagttgtttcatttgttcccaaactggcttcaggtgttgtcaggttgggacagttgatgattcccttcctctatgtgtgtgtttgttccttctaataggctagtctttgagaaaatggctacacatctgtctatatcacactaccctcttgagacaaggctgccctgaaaacatgcccctccatgctctaaggtaactttc

SEQ ID NO: 589993 - DNA, 584 bp, Homo sapiens
tttttatagagtcttcattacataggcatgatggatttaggcatgatggattaagtcataggccatgggttattaacttaaactttagcacctctcccttcctggaagttggggttaagccagaagttccaactctcaaatctttccctgacatgcagctcccattctgagaatactcaggagcccctagtcatcagtcatctcattagcttatagaatgacacttaccacttctgacattccaagggttttaggagctgtgtgttaggaatccaggaataaagaccaaaatagatgtcttcttatttctgctaattcctcatmaaagaattgtcaatctatctgcggctacttgagcccaaatagctatttctactcttctggagttgtttcatttgttcccaaactggcttcaggtgttgtcaggttgggacagttgatgattcccttcctctatgtgtgtgtttgttccttctaataggctagtctttgagaaaatggctacacatctgtctatatcacactaccctcttgagacaaggctgccctgaaaacatgcccctccatgctctaaggtaactttc

SEQ ID NO: 589994 - DNA, 655 bp, Homo sapiens
atttcacaagtgatttctcaattgtcaaaagaaagtttacttattccttatatatatttcttaatatatatattattaaatatatatttcttaatatatacattattaaatatatatttcttaagtatatatttcattatatactcttgattccccttgttcagtaccagttacaaaatagatttttataatctataatgttgatagtaaatgaaatactgagaagtggatttttttaatacaataatgaaaaaatagtttgattcaattttatcattagtgattagaaagaaataattaaagacaagatcaacccttcaaaacctttactatattttggatgtgctattaagatctggstacaaaattgattgccacatgttgaccttacaaatgatcaattcaattgaatatgaggtccacctctattttccctgtagtgtgttatcactccagtgaataagctctgactcactctcttggctgagactcaaacataaatatatttaatcaggtaaaattataaaatgctttaagaatgcccttagtataccagagactgtatctgaggctagtgaacataaatcagggataattttaatatccccttagaaatagccaatttcaacagatgtcccaaagatttcatggtgct

SEQ ID NO: 589995 - DNA, 596 bp, Homo sapiens
tgaataatgtgtattccgtggttcctgtctgaaagaaggtacaaactgccatctcccttcaggagagaactctgaggattccaaactcttggaagtttagctgctgataccactaagctctaatgcatcagctaatatgttttagccttggtgtgtcttttagacagtgataaaatgtcagtttccctttgggtttgagaatttgcacaagagaatgcaatctctctccactgagasgttttcctccagaaaccaagaatttctgactcgcagttgttttaccacctgcaaatgtcacctttcctatcaattattatcctaggtgacacatgacatctccatcttcagaacaacttcaccacattttctcctccatcaatataatgccattcagagtggcagtcattcactttgataatcctactgaattataagtttcctatagcctgtgactttttctttgaacccaacctttcccctgtcagaatcaacaatattgtcttctgtgttcttcaagtatattacacacactttagtttccttaaaatgaaagtgatctaatgcttatctttagcttctgccatagttaaaattct

SEQ ID NO: 589996 - DNA, 538 bp, Homo sapiens
aataaggacatacacaaaatttcatattccttctgaaatttatcatgagatctcttaaagataagtgttaactgcagaagtgtttggggtcacaattttagtgtgtgtaactgctgatgaacctgccattttgaatggtaagcawcacatgtaagatgacaaaggcactctagtggtgaaaaccatcaaagtagctaaattgctatagttaagccatattttactgatgagaattctccttaaatagtgacaggggcatactaaaacagatttttcttctttgttccacatcatggaattccaaactaaacggaactgttgaacatagaaaataccactgtcatacccaagagggttcattttgcctaactaaagatatttggaatctttatacttcaaatccaaggtacatattttatttacttctaggctaagctttccatgggtccttctctatcttccttgggggcttataaagcaggccacttacttaaaaatgctctaggctatggcctaagagatctaatttttaacacta

SEQ ID NO: 589997 - DNA, 587 bp, Homo sapiens
gagtgatcttaaaggcaaatgaaacaatgttagcttacagctaaactggaaagggagaggagttattgcctctgcatatttgaatgtttttagtctgtctaagtggacttgtttctgacatcatatatccgctatgattgtaattttgcagctctggggtgatccaggtgtttcacttaccagcyatctgtccaagaaaaaaatatgcttatcccgaattgacaggatatcacatgtatttagtgaagtttatcttcacagttgggcaagaataaataaaacagcagtgtagcccctatgaggatatactatgtgcttcaattattggtccattatatcactggcagatgttacattttggtacctaatggaaaagtttttgatcagcaaaaccaattattttggcatgcaacggcaattatcacaattctctttcaaaaggatctgcatggctttatattaccattttttagacataaaatttttatgataatatgcatcaaataattgtaccccaataggccagttttctagatgccagagatttattttttatcatctattattcacattctcctcacacatgt

SEQ ID NO: 589998 - DNA, 587 bp, Homo sapiens
gagtgatcttaaaggcaaatgaaacaatgttagcttacagctaaactggaaagggagaggagttattgcctctgcatatttgaatgtttttagtctgtctaagtggacttgtttctgacatcatatatccgctatgattgtaattttgcagctctggggtgatccaggtgtttcacttaccagctatctgtccaagaaaaaaatatgcttatcccgaattgacaggatatcacatgtatttagtgaagtttatcttcacagttgggcaagaataaataaaacagcagtgtagcccctatgaggatatactatgtgcttcaattattggtccattatatcactggcagatgttacattttggtacctaawggaaaagtttttgatcagcaaaaccaattattttggcatgcaacggcaattatcacaattctctttcaaaaggatctgcatggctttatattaccattttttagacataaaatttttatgataatatgcatcaaataattgtaccccaataggccagttttctagatgccagagatttattttttatcatctattattcacattctcctcacacatgt

SEQ ID NO: 589999 - DNA, 587 bp, Homo sapiens
gagtgatcttaaaggcaaatgaaacaatgttagcttacagctaaactggaaagggagaggagttattgcctctgcatatttgaatgtttttagtctgtctaagtggacttgtttctgacatcatatatccgctatgattgtaattttgcagctctggggtgatccaggtgtttcacttaccagctatctgtccaagaaaaaaatatgcttatcccgaattgacaggatatcacatgtatttagtgaagtttatcttcacagttgggcaagaataaataaaacagcagtgtagcccctatgaggatatactatgtgcttcaattattggtccattatatcactggcagatgttacattttggtacctaatggaaaagtttttgatcagcaaaaccaattattttggcatgcaacggcaattatcacaattctctttcaaaaggatctgcatggctttrtattaccattttttagacataaaatttttatgataatatgcatcaaataattgtaccccaataggccagttttctagatgccagagatttattttttatcatctattattcacattctcctcacacatgt

SEQ ID NO: 590000 - DNA, 535 bp, Homo sapiens
ttctttgtactcaatgaatattaaatatgaggatagatgagtgaaagagactgtacagatatattttgatctgatctcaattgtgtggctgatgaagattaaagactttttgagttgttattgttatttgtgctcctattttaagcagccttccatcttttaatgctaaaactctagcattataagcttgtggagatgacatatttatgaatatttatgggatattaaacatatcacttttcagtgatgcatatttttctttctaattttatttcactctactttgttatcatttgcagtgcttctttggcaatttgttacctgtcttttgagtttgtactttcaaatatacacacagtcataatggcttctgagatcaagcgcttccccttccccaacctaccctcagtgagagctacatttgtgcggatmtctcacaaaggtgaaagtatcaattaagaagagatcatcaggtgtcagggagccttaggctttggtaggaaatagccagccaagtaatttgattaacagaatt

SEQ ID NO: 590001 - DNA, 593 bp, Homo sapiens
gaattttagtaaataaaattaattccttaataaatgaattagaaaaaattaagagaaatcaactcactccagtctggtattagctccaacactactcttgcttaagttatcaatgacttttttactgccaaacctaacggaaacttttcaattcttaacctacttaacttttttaaagcagcatttaacacaaacactcttcttaatatactatattcgcctggttttcatgacaccatattctcttggctttttttttaatcatgatttcccactcttgctcctttgggtcccagtttaaatgtcacttttaagtctttcctgatggccttgaactaatttgaattttcctctttaataaaactgcagtttaccttcatagttgttactaatatttcctaattttgcatattttggggggttgttacgtgtttaatgtctttaccccatacataccagactgtaatctccrgaagagatagtactatgtttattttgttcagaaggatcttgcacttaattcaagaatatttgttcaatgattattggatagataaagagtcacattcctgttagtgtctttaaagatgcat

SEQ ID NO: 590002 - DNA, 593 bp, Homo sapiens
gaattttagtaaataaaattaattccttaataaatgaattagaaaaaattaagagaaatcaactcactccagtctggtattagctccaacactactcttgcttaagttatcaatgacttttttactgccaaacctaacggaaacttttcaattcttaacctacttaacttttttaaagcagcatttaacacaaacactcttcttaatatactatattcgcctggttttcatgacaccatattctcttggctttttttttaatcatgatttcccactcttgctcctttgggtcccagtttaaatgtcacttttaagtctttcctgatggccttgaactaatttgaattttcctctttaataaaactgcagtttaccttcatagttgttactaatatttcctaattttgcatattttggggggttgttacgtgtttaatgtctttaccccatacataccagactgtaatctccagaagagatagtactatgtttattttgttcagaaggatcttgcacttaattcaagaatatttgttcaatgattattggatagataaakagtcacattcctgttagtgtctttaaagatgcat

SEQ ID NO: 590003 - DNA, 640 bp, Homo sapiens
tacagtatgaccaggtctgtttgtatattcaggctctcatattgttaaaaaatattgacatgtactaggcacaataaaacggatgaaatgtagatcttacytaatctctggtcatgatgtattaatactagaaattattcatgaatacagatgctcctcaacttatcctagatttatgttctgataaacccatcctaaagtcaaaaaattgtaagtcaaaccattttaagttgagggccatctgtacagcaaaacaaacaaaagaaactgcaacctcaaaaatattaaaaggagaatgaatatctagttattattagattataatgaatatttaaaaattcgtaaacaattacaatggtatgccaaaagaaatccaaatgaaaattacttcttaggggaaaatataaataatagactcagtagcagaaattatttactgattaataaacatgagaaagcaaaatatggtgaaaatttaaactttaaaaatgtcctgggcaaaatggatttattggtaagatctgtgaagacttcagtgaatagataattattatattattcagtatgtattttaagatagaaacattttttaaagatggaggcacacacatgtatacaaacacacaagagattgatagac

SEQ ID NO: 590004 - DNA, 429 bp, Homo sapiens
cacacaggcaatgtcagcactgatgctcccataaagcccccatggtatccagttgtggactatgaaaacgtccatgcagagtggaggagaggaagatggatctccccatctcacgttacacccggttagagaactcccaaagaagtacaaaggtctcttgctgttttggcatccattatgcctgaaccccactattttagtgcattttattgaaacagctatttccacttctggttggacaccatctctttcttatttaagaagatgtggatctcaagaatagggctgggtcaggttctgtgtgatgtcaccacactckactcatagtcactccttttctctcatggcccacactttgtactggagtcagacttttctgcctgaccttgttttctttataagttatctccaaaaagactcctcagcccg

SEQ ID NO: 590005 - DNA, 575 bp, Homo sapiens
atgtgtctagcaaaaaaattatgcatccaggatgtaggggaaaatggtcttggggggataaattgtttccaccacatgaagtgactcaaaactgtattcctggatggtgtgagcccttagtgattctgatatttgagtaatttttcattacttttgaccaatgaacacaactaagctagaaggtttcctcaraagtgcccctggggtcaagacacactatttcctgccttcactgtgtgtcatcaatgtgttttgtccattgacaatcaggcgcattcaaacatgccagtcagttttctaaactctttttcaccctgtgaattatgtagaataagaaactcaaagaattcaggtggtaacctccatctcccaattaatttttttaataatgaaaaccttcctgtctcagggaccagatagctaagtcagcagagctgagtagctggaattagaaatcaaaattttataactgacttacttaatgtgatagtgaaggaaacaagtccactttcattttgtgtaacaatggactgcctcttttgtactcttgatttctatataaaaatattaaataa

SEQ ID NO: 590006 - DNA, 575 bp, Homo sapiens
atgtgtctagcaaaaaaattatgcatccaggatgtaggggaaaatggtcttggggggataaattgtttccaccacatgaagtgactcaaaactgtattcctggatggtgtgagcccttagtgattctgatatttgagtaatttttcattacttttgaccaatgaacacaactaagctagaaggtttcctcaaaagtgcccctggggtcaagacacactatttcctgccttcactgtgtgtcatcaatgtgttttgtccattgacaatcaggcgcattcaaacatgccagtcagttttctaaactctttttcaccctgtgaattaygtagaataagaaactcaaagaattcaggtggtaacctccatctcccaattaatttttttaataatgaaaaccttcctgtctcagggaccagatagctaagtcagcagagctgagtagctggaattagaaatcaaaattttataactgacttacttaatgtgatagtgaaggaaacaagtccactttcattttgtgtaacaatggactgcctcttttgtactcttgatttctatataaaaatattaaataa

SEQ ID NO: 590007 - DNA, 602 bp, Homo sapiens
cttggccggaatgacttctgtttcctattgtctttctgctactaatgtgcctctcgcactcatattctgaatgaggctatactgttgcagtattctatttctgtgcataactgggatgtgaggggttgtctataatgtgggctcattttctgcttcttgataactgatcctgggtattgagcaaaagkaagtccatctggcctcattataattcctagggtgccattttttcccccaaataattctttatctttcatataagaaatatagaaaggctttgaattcagcaactcacagctacccatggatttgaattttgagtctgtgtttcagctatctcagccctgtggctagaattgatacaaggttcttatcacttagacacagaaattccatgattttctatctttgccttgaatgtaagactttgtgcttgtcatcatttttaatttaagttgtccagaacagttagaagaaaccatctcacactagaatcctttaatttctcatgtcgttcatgtcagaatgtgtagtgtttaagagcatacaccctggagctagactgccagggtttgaatcttatctctgtcatcaactaggtg

SEQ ID NO: 590008 - DNA, 572 bp, Homo sapiens
tggctgggagagagagggcaagaaagagcatggtaggttgtggcatcagagatgtagaggggggtcagaactttagattgtgttctgaagtccctgggagatttttaaaagaaatataagatctaacttgtttttaaagaatcactctggcttcttgtgaagaatggactcaaagagatggttagtggcagtggcaagaggttattacgatagtcaagccaactagattagtacagtctgaggtagagcccattgaatgagtcagtggaagaatggagatcctacttgctaaaatgagaatgagtagaggaaaagaaagttcatggaaaaggtaagtttgcaaaatgcaagtgttttggagggggtcatattaaattggatatgtcatttatataactgttgaaatatcaagtagaaaggtaataggcgtttggaaataaggggagaagctccttttttattatgtatgtatgtgtgtttgtgtgtgtacacatatacatatatataacatatttstgtcatttcaataggaatttgagataaagcatagttaaattattttaaaatgattc

SEQ ID NO: 590009 - DNA, 487 bp, Homo sapiens
tacagttgtataaatgcataattgaaggctgacaatatctactcccaaatataatataaacccagagtaaccttactcgtcatagccaaaatactgaaaacaacttaactatacatcctcaaaagaagagagaaatcatggtttcttcacacaataaaattataagtagctgttaagagtcatgaattagcgctgtctacaacaatataaatgaatcttgcaaacataatagtaaaattgagagaagttatgggttatgtaggaagaaaacaaacccaaattgttttttctattccttcgctcaacaacaatcaatagagaaaatgtctgtgaccaaatgtgtggagatttcttcccaccaataagtaggcaatcagttctgcagtggacactagctaggtaggtgtccyccaatttaatccagacactatctacctggagacagcatcagaacccacaggttgagggctcagtcccacaagactgc

SEQ ID NO: 590010 - DNA, 529 bp, Homo sapiens
gcatcagaacccacaggttgagggctcagtcccacaagactgccccctacatcttatgccaatagtaggcctaggttgttttacctgtgcttctgaccaactggttatagattgaggttccaacaaccctctccctgtgtttgactaatttactagagcatcttacagaacccagggaatcacttatttacatttaccagtttattataaaggacaatacaaaggatagagatgaagagaggcatacggcaaagcatggcaaaaggggcgaagagcttccatgtgtgccagaaacttscagctattcagaagctgtctgaacccagtctttttgtgtttttatggaaacttccttctgtaggcatgatggattaagccattggccattggtgatcaacttaaccttcagctcctctcccctccccagaggatggggatgggaatgaaagttccaaccctctaaccctctaattctgcctttctagtgaccagacaccatcatgaagctacctaggaagtagtagccatc

SEQ ID NO: 590011 - DNA, 527 bp, Homo sapiens
ctgtctgaacccagtctttttgtgtttttatggaaacttccttctgtaggcatgatggattaagccattggccattggtgatcaacttaaccttcagctcctctcccctccccagaggatggggatgggaatgaaagttccaaccctctaaccctctaattctgcctttctagtgaccagacaccatcatgaagctacctaggaagtagwagccatcagttagcatcagttaactcattaggatacaaaaagacatcactttagagattccaaggattgggacgaagaccaaataaatacatttcacaatatcacaaggtaaaccttcggggttgatgccagtgtctatttcttgacctggttgatgggtataagggtgtttgcttcaacataattcagaaagctgtatgtttttgttttatttactattatttatgtgtgttacacttcagtaaggaaaagttttaaaagttgaatgcagaaatctacctgaaaggatgagttagtaaagttctagctatcagaaa

SEQ ID NO: 590012 - DNA, 571 bp, Homo sapiens
tatgacagtagggagtttttttttttttttaaagaatatttttgtttgcttcaaaaaaactcaaaaccttgttaggaataaaatatacttgagaaaaaatctgaagagcaattttaaatcaacaatatgtgcaaattaagacaatcagaatgcataatatagtcattatactagttgaaaaaaatctctttttaaaaataaccacagcatcgtaggcagtacaatatgaaatactacaaatacaatattctactggtaccaaattaatgacctgccacaaaatgaatggggaaaaaactaaccagttcatgtttttgttcaagcacaatgaatcctagaactgaacaaatattaattagcaatttaagtcataaaaagcaaatcagttttatttgtcatgtttgtaaagcttaatctctgacttcaccatgtcctgtaatgcattcatcttatctaacctccaactcttttgataaccacattatatttttgcaacactcacrttaacatagttgcatcaatggctaaattatttcccctagaaagcatgactctctaatgctcacactaa

SEQ ID NO: 590013 - DNA, 589 bp, Homo sapiens
ctcctttgtacctggaaagccaactctgagtcttgtcttcattttaaagatgaggtaactggggacaaggaatctaaaacattcatctggacaaagtccacggagggcacatgatgcaatccgagccaatgacacatcaggaggcatcgctgggaatcctggggcgaagacagacttttctcatttgactttaacatgggaggatatgatatgagttctggagctgctgccaccattacccttttgtatgaggctgatcctaaaatcagtaaagcagaagacagaaccaaactgaatctctgatatggttttaaattattggtcaagatatatttcatttggttttctcaattacrttagccccaacatcccatctgtgattgattccagcttgagttgggttttaggtttattacagacagaaaaatgcccccccattccaccccaccccacaaagatgtccaggtgctaaccgccagaacctgagactatgttaccttgcacggcaaaagggattttgcagatgtgattaaacaggatcttgagatcagaaggttattctagattatccaaacggacccaaaataat

SEQ ID NO: 590014 - DNA, 576 bp, Homo sapiens
tgggttttaggtttattacagacagaaaaatgcccccccattccaccccaccccacaaagatgtccaggtgctaaccgccagaacctgagactatgttaccttgcacggcaaaagggattttgcagatgtgattaaacaggatcttgagatcagaaggttattctagattatccaaacggacccaaaataatgacaatagtccttataagagggaggtacaagggtcaggatcagagaagaagatgtaatgacagaaatagaggtcagagtgatttgggtattacgacgcaaagaacagggagagcctctagaagctggaaaaggcaaggaaatgtattttcccctatatgctctagaaggaaccctcttgatttaattcagatctttgaccagaactataagatataaacttgtgttctttcatgtaacttaatgtgtggtagtttgttacagcagcaataggaaactaatataccatttatttcagaaagagtcctaaccaacacatatttataccaggayactaggtagaagatcatcatttatttaaatataaaagaaaagaagagctttct

SEQ ID NO: 590015 - DNA, 576 bp, Homo sapiens
tgggttttaggtttattacagacagaaaaatgcccccccattccaccccaccccacaaagatgtccaggtgctaaccgccagaacctgagactatgttaccttgcacggcaaaagggattttgcagatgtgattaaacaggatcttgagatcagaaggttattctagattatccaaacggacccaaaataatgacaatagtccttataagagggaggtacaagggtcaggatcagagaagaagatgtaatgacagaaatagaggtcagagtgatttgggtattacgacgcaaagaacagggagagcctctagaagctggaaaaggcaaggaaatgtattttcccctatatgctctagaaggaaccctcttgatttaattcagatctttgaccagaactataagatataaacttgtgttctttcatgtaacttaatgtgtggtagtttgttacagcagcaataggaaactaatataccatttatttcagaaagagtcctaaccaacacatatttataccaggatacyaggtagaagatcatcatttatttaaatataaaagaaaagaagagctttct

SEQ ID NO: 590016 - DNA, 564 bp, Homo sapiens
caccagcaagcgacaggaggccatggatatgatgctgttttctcggagagcagcctcattcatactcataatacagttttggagaagagcaaataactgagctttgaggtcataaatgggtttaaatattagctctaartgtttctggttatgcgagactgggcaagtcatttaacttttctctatttcattggtgataaaatatttcaagattcttccgagaatcaaaggcaaacattgaccttcctagcacagcatgagaataaagacacaggccttttacatctggtcattccaaagtttacattctagctcactctcctactgattgtgcctatgaattctgctcatgtcatctcaaactctagtttgtaaatattttttcgccataaaatggtgatgataatatctaccatctaggttcttttggggggataagcaaatatttgctacaacctaacagcttctgaatcttgacccattgtctagcattggacactcactgttacttcctatacccctttgccttaagtgtaaggtgctggggccgcatccttgaggacc

SEQ ID NO: 590017 - DNA, 564 bp, Homo sapiens
caccagcaagcgacaggaggccatggatatgatgctgttttctcggagagcagcctcattcatactcataatacagttttggagaagagcaaataactgagctttgaggtcataaatgggtttaaatattagctctaaawgtttctggttatgcgagactgggcaagtcatttaacttttctctatttcattggtgataaaatatttcaagattcttccgagaatcaaaggcaaacattgaccttcctagcacagcatgagaataaagacacaggccttttacatctggtcattccaaagtttacattctagctcactctcctactgattgtgcctatgaattctgctcatgtcatctcaaactctagtttgtaaatattttttcgccataaaatggtgatgataatatctaccatctaggttcttttggggggataagcaaatatttgctacaacctaacagcttctgaatcttgacccattgtctagcattggacactcactgttacttcctatacccctttgccttaagtgtaaggtgctggggccgcatccttgaggacc

SEQ ID NO: 590018 - DNA, 564 bp, Homo sapiens
caccagcaagcgacaggaggccatggatatgatgctgttttctcggagagcagcctcattcatactcataatacagttttggagaagagcaaataactgagctttgaggtcataaatgggtttaaatattagctctaaatgtttctggttatgcgagactgggcaagtcatttaacttttctctatttcattggtgataaaatatttcaagattcttccgagaatcaaaggcaaacattgaccttcctagcacagcatgagaataaagacacaggccttttacatctggtcattccaaagttyacattctagctcactctcctactgattgtgcctatgaattctgctcatgtcatctcaaactctagtttgtaaatattttttcgccataaaatggtgatgataatatctaccatctaggttcttttggggggataagcaaatatttgctacaacctaacagcttctgaatcttgacccattgtctagcattggacactcactgttacttcctatacccctttgccttaagtgtaaggtgctggggccgcatccttgaggacc

SEQ ID NO: 590019 - DNA, 448 bp, Homo sapiens
tctctttcccctgtcctgtgtaagtcatgagacctcgttcagcaaagttttctgttaatcatcagatggacagagattcaggtacatgaaggaaaacagggatctcagatttagaagtggaaagaagtcttcagcccacttcttagaagtattgcacaaggtcagaatcagactgagtccagatgatactcctctaataaacttgaccttgtgaatcattwcttggaaaacatcagtaaagcagggtggcacagaaatctaagctagcattaaaatcagaaaagggccgggtatggtggcttacacctgtaatccctaatttttacttctgagaaatgcaggactctatctgaactgggctattttttttttttctgaaatctcttatattctcttttttatttgaactgacttaatctccaaccaaattataaagaaggtgaacatg

SEQ ID NO: 590020 - DNA, 481 bp, Homo sapiens
atttgaacatgtgcatgctataagagccagaaattctgttcatatctatattctttagaaaatatattgtacatcataggtaaataccttacagaaaaaatcttgtgatatgtatatcagtgacacccacaagaatgcccataagagcagtgtctgtaagaacaaaaaacctgaaataattactgtgtccaccatcagtagaataataagtaaaataaatatttattcaatagaaaaaatagaaaaaagaatgggttgctagtgcatgcatcaacttgggttaaccttcaaaagataatcaccatttttatggctgcatagtattccatggtgcatatgtgccacattttctttatccagtctatcattgatgggcatttggattggttccaggtctttgctaytgtgaaaagtgctgcaataaacatacatgtgcatgtttctttagagtagaatgttttataatcctttgggtatatac

SEQ ID NO: 590021 - DNA, 510 bp, Homo sapiens
gtcatgtgttacatcaacaagcttggcatatcaaaaagaatgggaacaaaaatgtatggaaagaaaacatcagggatatcgtaatttagtagaattaatgacacaacaaaacaggatattcttttagtgtgatgtgttaaaattttcagtttcttagggaaaagataagaaaatgtaaaattagtggattggcctatcacagggtaaaatagatgagtataggtatcagatgagctttgggctaatgagatactttacagctgggttaaagggyggggagtagggggattcccacaaggctaatgaaccactgaccacccttgattacagctttcagaagaattgaactatagtaaatggcagagagtctagcacaattaagtatttctaaaccaggactgaaaatgaagaaatgatcaccataggtaaggaaggtgggttgaaagtacatatcaatgggatatgagaactttagaactggaagtgccttactgtgccctttcatgagag

SEQ ID NO: 590022 - DNA, 510 bp, Homo sapiens
gtcatgtgttacatcaacaagcttggcatatcaaaaagaatgggaacaaaaatgtatggaaagaaaacatcagggatatcgtaatttagtagaattaatgacacaacaaaacaggatattcttttagtgtgatgtgttaaaattttcagtttcttagggaaaagataagaaaatgtaaaattagtggattggcctatcacagggtaaaatagatgagtataggtatcagatgagctttgggctaatgagatactttacagctgggttaaagggtggggagtagggggattcccacaaggctaatraaccactgaccacccttgattacagctttcagaagaattgaactatagtaaatggcagagagtctagcacaattaagtatttctaaaccaggactgaaaatgaagaaatgatcaccataggtaaggaaggtgggttgaaagtacatatcaatgggatatgagaactttagaactggaagtgccttactgtgccctttcatgagag

SEQ ID NO: 590023 - DNA, 510 bp, Homo sapiens
gtcatgtgttacatcaacaagcttggcatatcaaaaagaatgggaacaaaaatgtatggaaagaaaacatcagggatatcgtaatttagtagaattaatgacacaacaaaacaggatattcttttagtgtgatgtgttaaaattttcagtttcttagggaaaagataagaaaatgtaaaattagtggattggcctatcacagggtaaaatagatgagtataggtatcagatgagctttgggctaatgagatactttacagctgggttaaagggtggggagtagggggattcccacaaggctaatgaaccactgaccacccttgattacagctttcagaagaattgaactatagtaaatggcagagagtctagcacaattaagtatttctaaaccaggactgaaaatgaagaaatgatcaccayaggtaaggaaggtgggttgaaagtacatatcaatgggatatgagaactttagaactggaagtgccttactgtgccctttcatgagag

SEQ ID NO: 590024 - DNA, 493 bp, Homo sapiens
cactcccttatttctatacctcctgtcttgattccagatacttgataagctgggaatttacaatttgatcagaattcttaaatgattagtttttttcattacataaattttctgttatggatattatttaacatttgtattcactcttgagctcacaactttactttttgcttcttaacatggctatcaccagaataattctggtgtggtgcagggctgagcataccagaagagccaattagtactcctcatgatatttaatgaaaaaagtccrttacaaggcactggaagacacatctctgcaggcagtctcctacatttctcctaataatttgtgtttctaactggagagaagagactatagtagatgcttttatttcagtatttcagcttccctaattgtggtgtcagaaagaatcttggaggcacagagataaattgcagactaatgtgaagggaagctgattaattcttgaacattcaataagttgag

SEQ ID NO: 590025 - DNA, 601 bp, Homo sapiens
gcttaactcaaatatttctggattttccttttggaactgttgcttggagaaagtgtgcatcctacccttattctacttcatccatttccttgtaaaaaactgatattttaaggtctatcttcttgctttcatgaatttctgaatttcttcagaatctgtagtcaaagggatatggctcattaggcctcccttaaactttaayatttctctcaggaattcagatcagagaaatgtaattgccatatttagaaaggtcaacctggagtattgttttttcttctttgttttataaagaacaagtatttacttagcttgcttgaataaagagaaaatggaatgggatctgaaaagtcattaaagatggaaaaagccctaaaaccttgcatctcccccattccccaccttctgctcattctagttcacttttagcttctatctcctctgtggatctctttccattagcagctttctatgcttacgcatagtttctactcaagtagtttaaacttgtgaaagagttaacctcagctggtctgattgatctcttgcttacttctggagctacagacccttggccaacagtatgaaatattttaactaa

SEQ ID NO: 590026 - DNA, 578 bp, Homo sapiens
gtaaccacaattaaatggtaagctgcttgaaggcaagccctctgtttattcactgagcccctgaatgtttccttcaacatcgttgttataatattgatgagaaaaaattgattccgggccagggccacggtctgtgtgcagttagcacattctccccttgtctgagtgggttttcttcgggtactctaatttcctccyacatcccagagatgttcccattaggtgaattggtttgtctatatagtcccattctcagtgagtgtgagtgtatgagtgcaccctatgatggaatggtgtcctggccagggctggttctgttcttgtgccctgatctgctgggataggccctggccacctccacctgaaatgaataagtgggtttaaaaatgaatacaaatgattgacaagtaaacatttgtcaagtatactataattctacaaatgcactacaataaacaatgtagtccaagagtgcttagcaagccaccatatttgttattggttgttttctagcttcttggtggaaggaagtgatctttaaaatttttgttttgtaaacaccgattccttgatttaat

SEQ ID NO: 590027 - DNA, 578 bp, Homo sapiens
gtaaccacaattaaatggtaagctgcttgaaggcaagccctctgtttattcactgagcccctgaatgtttccttcaacatcgttgttataatattgatgagaaaaaattgattccgggccagggccacggtctgtgtgcagttagcacattctccccttgtctgagtgggttttcttcgggtactctaatttcctcctacatcccagagatgttcccattaggtgaattggtttgtctayatagtcccattctcagtgagtgtgagtgtatgagtgcaccctatgatggaatggtgtcctggccagggctggttctgttcttgtgccctgatctgctgggataggccctggccacctccacctgaaatgaataagtgggtttaaaaatgaatacaaatgattgacaagtaaacatttgtcaagtatactataattctacaaatgcactacaataaacaatgtagtccaagagtgcttagcaagccaccatatttgttattggttgttttctagcttcttggtggaaggaagtgatctttaaaatttttgttttgtaaacaccgattccttgatttaat

SEQ ID NO: 590028 - DNA, 608 bp, Homo sapiens
atgttttttttacaccagttagcccatggtaaaattggttttgttttacattgtttcacttaaagttgttaattctgagactaaaatcagtgtgcaggaagtttgaactcagaatcagaacatgcagggaaggcagagagagaaatcaggttatggtaaaggcataacaagaattcagctgaccctataaggagctctgaaattcagctggagcataaaagctgttccccattgcagttgggagccgggcctttatattcccttacccacatcacaggtcacaggatgctggctaccccagaaagggacgtgatcttgggggagatagccaactctggccaaggctaaccaggtgagactgagagctgaggacagtctcccagaaattaarcaaacaggctgttacttcctgggtggggagtccatgcagcacatcacatcacttgtctaaccttccttttatatgatacattgttgtgaatgtcacctagtttgtttgtttgcttacatttaaactttcatttctgcattccattctccttttcgctttgaggtgacttctgagaggaaaagtaatagggccttctggagagtgaactactatagtt

SEQ ID NO: 590029 - DNA, 586 bp, Homo sapiens
agtttcatgctctgtaatgcattttctatctcttccatctatttggcctcacacacacataggccatactttttattgagggttaatgactttggggtcacgattctgcaagatggacgtgccaacagcattggagagcaagtagagcagtaacaagtaaatcattcattcattcattcattcwttcaacaagtgtatgttaagtacagcgtctgccatgtgccatgcactgtgctatgtgccagacacgcactagtgggcagagaatgaataacaattttaatacatctgattacagattataaaatgagataaacaggatgtcttgaggatatatgggaaaactatggaatccagagataactgagaggaagttcagaaaagacttcccagagtaaatgatatctcacttgaatccccaaaatagcaaaagtgttccacgggttgaaaaacagtcaaaatatttagaacatagaatggattgagagaagatagaatggggtaggagaaagccagatcaccaaaactctgccttttcattttaagggatttgcagtttacctaaggacaataaaaagaaagatac

SEQ ID NO: 590030 - DNA, 599 bp, Homo sapiens
agttaagacaagtagcttgtttaatattataccaccaataagtgtttgaaatgatatttgaacccatyattgtctgactcctctatcatgtacaaacttacgtagtaagatacagcaccatgagaaatatagagacttgtacttctgggttaaaatagtgtctccaatgcaatgcaatcatccccaaataaacactctcctgtcaattagaacaaggggaaaggcaaaaagtactatcaaaaaatactgctaaaaattaagatatatacatagaatagcactagactctaggaggatttcctttcaatgtaagattatttggattttgatttagaaagactcatgaaattgaatgtaaatcaaccgaagttcaaccaggccttactgccataagcctcctttgaagtcataaaaatgcatccctatgtaccccaaagctgtatttcattttgaaagataattagattgataagatatttgtgtaaacataaagcatttggattttagccagacattggacaaggcctgtttattagacttgtggataagttgaagaaacatgaatgagtaactttaaagtatacataattcaaccatac

SEQ ID NO: 590031 - DNA, 584 bp, Homo sapiens
tgtttgagtaattggatgtctgaattctggaaaaaaaaaaaaaagtcaattatttaacctggtagtattcaatccatgctagagctaacaaacaattgggaagtggagaggaaaataaagaaaggcaagggaatgtggggccactgattttttttttttaattttctgtggcaggaactgaagacacattttgtagaagttgatggattaagaaaaagaagttgcattttattacctatcctaaagatagaaggtgatctgaacattctaatatcacttgccaagactgttggagcatggggaagagaggtattagaaatgtagaygagctaaacttttgtatttcaaagtaaggagtccatagttactattagatattggttaaccaaaaacacatatggaaaacaatatattatttggagagaaatagttgaagatgtttacctctaaggaatgataattggaaagaacataagaattttgtaccatctgtttagtttgagtttgttgatttttttttatcatgtgcatttattatttattgtaaaagtcagagtcctgtcatgaagtgaaggcatattcaa

SEQ ID NO: 590032 - DNA, 626 bp, Homo sapiens
taagtcatagagtcactccgttcctcattcttctcatttgtaaaaaggagaggacaatttcactcaactcacggggttgttaaaaggattaaatgaatttatacatgtaaaatactgtgatcagtaagtgtcacagagaaggaactcaccaaatgtttgttattattatatctttttatccatccacagtccttaaccgagcttcttgcacacatttygttcaaatttttgatttagcaaatgtgtcctgcctctaagtaaaattaagtgaattaaatgtgattaactgaaggcacgcgcacacacacacacacacacactgtgtaaaagcaattgcggtttttgccattacttttcatctttacatgtacataatatgtatatatagagagtgtgcaagagtgctctcgaagtttcagacaatattctgaaacttcagttttcttaagcagtgcttaagtagttcttaaagactgagcaggatcttctggaagattatagggaggcagcagggatgaggagagggagcagaatgaaggttgagacacttcgattgttctctcattggcttcctacttggtgtctgaatgccaggctttgcaggtgcttcttggacagtagacatg

SEQ ID NO: 590033 - DNA, 589 bp, Homo sapiens
gaaatgagaaagtgatcacaacttattgaattgagggmaagatcaaaatttcccattaaggagagtatttctttggcttctgtgaaacatgctgattgctattattgcccatacattttgagttgtttggtttcttgactgttaattgaaatgtaatttcatttgcataatataagactagtatggcaattaacactcttcttactaattgccacccaattaacctgctttaggtgtcttggtgtcagtgcagcatctaaatattatcttcgcaccttagctgatttgtagggctgtgattaccttttatggcttataaaatttaaaattaattgcattgcagctagagctgtggctcaaccttatatctcaaaaaaggtccattaggtaattatttgataactaattaagttttaaccatctcactaaatcaacttaaaatgttcctcttataaagtagatttaaagggtcacaagagactcctgaatgttcagcctcagagtcaaccttacgactcaaattgtccctttatggcttttcaggaacacctatccatcatggttgaattccttgtcctagggttagaaa

SEQ ID NO: 590034 - DNA, 600 bp, Homo sapiens
aaatagatgcctactgtactagtgagccagataatgggagatgagattaggcctcactgctccagaaagaaagctgccttaagtgcagcacgccagcatggcacatgtatacatatgtaactaaccagcacattgtgcacatgtaccctaaaacttaaagtataataataattaaaataaaataaaaaaagaaaatgacatctaagctgagtctggaagaatgagaaataatgcattagatgggacacttggtggtgctggcagggcctctaggattggcaaggatgttacaggcaaagggagcagcaagccataactttggcccacagagagactgtggcacaggagcctagagtagtwcaatgtgacctcagagaagcctacaagggacagaggtgggagactgatgtggaggcgtagccagggccgccttatgctgggccgtataagccatgctaggagttacatggggttaaccattgctagcggttaaccctcaagtgtaaggcagccactgaaggattttaattccatatgtgatgtggttagaagtgcatcttgaaaggatagccttgactacaaagggagaaaatattagag

SEQ ID NO: 590035 - DNA, 600 bp, Homo sapiens
aaatagatgcctactgtactagtgagccagataatgggagatgagattaggcctcactgctccagaaagaaagctgccttaagtgcagcacgccagcatggcacatgtatacatatgtaactaaccagcacattgtgcacatgtaccctaaaacttaaagtataataataattaaaataaaataaaaaaagaaaatgacatctaagctgagtctggaagaatgagaaataatgcattagatgggacacttggtggtgctggcagggcctctaggattggcaaggatgttacaggcaaagggagcagcaagccataactttggcccacagagagactgtggcacaggagcctagagtagttcaatgtgacctcagagaagcctacaagggacagaggtgggagactgatgtggaggcrtagccagggccgccttatgctgggccgtataagccatgctaggagttacatggggttaaccattgctagcggttaaccctcaagtgtaaggcagccactgaaggattttaattccatatgtgatgtggttagaagtgcatcttgaaaggatagccttgactacaaagggagaaaatattagag

SEQ ID NO: 590036 - DNA, 595 bp, Homo sapiens
ttgcataaataagaaaaaaggaaaaaaaaggagcaaatagagagctctctcaagacagtagtgccttactagtccctctagtgcctccctcccctttatctcctcgcctgctcttatgaccgaaacctgaactgatgcaaatgttccaagcatatttcagtcctaactgtgggggttgtcggtcagaggtaatcagtagagaacaaatataaatcctagggagaaccctcataataactcatgctcatatgttgtctgactgcagtgtttctgttmagttcacaacaggtctaatgggtaaaacagactgtcagcaggttgaaagaacagcatttgagatagttgatgggcaggagagagcactttggtaactaacatcagtttgcccctcttaacgtgggtaaagaatgaatccacagagctgtgatgctggttttcctataactcataatatttgacaaaaactgtctgaaccccactttaaggatgtaaggaggatcaagcaaagtctccagaaatgtaaaaatattctgttgcttgaaagataaagactagactgaaaaattagagcaattgggctgctcttttatcaatt

SEQ ID NO: 590037 - DNA, 546 bp, Homo sapiens
ataaagtcaaaatgatcaattccaaaggaagttatgacaatcttaaaccagtttgcctcaagtaaaattattcaaaaggagaaataaaactattgttattgcagatgacatgattatatgcatagaaaatccaaagtcatctacatataacctattagactaaataaatgaatcaagcaaaggtcagtggatgtactgtaaacacataagaatcaattttatgtgtgtgtgtgtgtgtgtgtgtgtatgccatgaacaaagagaaattattgaaaaatagcattataagaccataaaaartgctgaacagctaaggacataactacaaaaattgtgcatgacttctatatagaaaagtatgaacaattactgaaaaaaaaaaactaaggaagacacaaataaatggagctatataacatgttcatggcctggaaaacacaatatttaaatctgtcagttcttctcaaattgatctatggcttcaaaacaattccaatgtgtatgtgtgtgtgcgtgtgtgtgtgtgtgaaaatcaacaggctgatt

SEQ ID NO: 590038 - DNA, 568 bp, Homo sapiens
ttaacatgtgctctgttctggagaatattctgtgtgtgcttgagarggatgtgtattctattgctgttggatgcaatattctgtaaatgtgttaggtatatttggtctcaagtgttgttcaagtgctgtgtttgcttgctgctgcttggtatggatgttctattcattactgacagaagggtattgaaatatcctattattagtagcttgctatctatctctcccttcagttctgtcaatatttgttttgtataactaagtgctgttacactagatgtgcatatatttacaatttttatatcttcctggtgaactgacacttttatcatgatataatggccttctttgcctcttttgacaagttttaacctaaaatctctttttttctgatataactgccctgctttcttttggttaccatttgcatgggtcatctttctcagtttttttttttttttaaatttcagcctatctaaagtgagtctcttgtatattgtatactacatatattggatcttcttggtttttgttttgttttgttttgtttttaaatctatttggccactgt

SEQ ID NO: 590039 - DNA, 593 bp, Homo sapiens
aagacttacagtaaatgttaaattagttcaatgacatgtgtaaatatgtaggaaatcatgaaactttatctaaaaataacatatatcatataaataataataatataggtgaaagtctctagattaatgatcacaatttcaagtgatcacagggcctgagaaataaggcagatatataaagagggccaggcttaatgaatagggagtggtggggaggactctgtactagagagcaaattcagttacgcacagcgtaacaacctttaggtcaatgatggaccacgtgtgacagtggacccgtaagatatggacatgtaagattccatatttttactgtayctttgcttttttttttttttttgagacggaatctcactctgtcgccagcctggagtgctgtggcgcaatctgggctcactgcaatctccgcctcccaggttcacgccattctcctacctcagcctcctgagtagctgggactacaggtgcccgccaccacgcctggctaattttttgtatttttagtagagacggggtttcaccgtgttagccaggatgctctggatctcccgacctcgtgatccgcccgcctc

SEQ ID NO: 590040 - DNA, 539 bp, Homo sapiens
tccactctgcttcatacgcctgaatttagagaccattgtaaaagggtatcagaccatgctaaaagggcacgctcttctcatggtgatcacaggagcactgcagcatgcatgagcagcacatgacgcctgtgaaggccttatctgagaactttckcttggtattttccacccacaatctattgccaaagcaagtcacaaagtcaaaccccactttcacctggcttggaagtgtctctaccctcagaaggaggttctgaaaaaaattagtataaattctaacacctggccaggcacggtggctcatgcctgtaatctcagcacttggggaggctgaggcaggcagatcacctgaggttgggagttcaagaccagcctgaccaatatggagaaaccccttctctactaaaaatacaaaattagtcgagcgtggtgtgcatgcctataatcccagctaatcaggaggctgaggcaggagaatcacttgaaccagggaggcggagcttgcagtgagtcgagattgtgccattgcactccagcct

SEQ ID NO: 590041 - DNA, 609 bp, Homo sapiens
tattatgtatagattttcatatattttacttctttgggaaaraaatgagtatcttgacaaatgaagtgaaaaggatttcacttcattgtgagtcacatgtatattacataagctgtcccttttttctgtgtaaggtcctaggaaccgggttgctaaaggaaattgaccttggtgctatataatgaacaaagcgaggatccctcttactaacattagtaaaactagatctctgctcacactctgcttttcagaattttactttcctttttatatttttaaataagctatgctcatcaaatttttaaaaagtgaaggcagtctattttagagcaaagcgttacttaacatttttatttacattcataatatatctgttgtttcttgttttttcttctctaggaaaaagaaatttatcgctggccaatcaaagaatctttaaaaactatgctggcttggggctggagaattgaaagaactcgggagggagacagcatggccctttacaaccggactcgtcgtatttctcagacaagccaggtaagaattcatcacggtgatgaatcaactgtttatgttatggattaaataattttttaaatttaattattg

SEQ ID NO: 590042 - DNA, 609 bp, Homo sapiens
tattatgtatagattttcatatattttacttctttgggaaagaaatgagtatcttgacaaatgaagtgaaaaggatttcacttcattgtgagtcacatgtatattacataagctgtcccttttttctgtgtaaggtcctaggaaccgggttgctaaaggaaattgaccttggtgctatataatgaacaaagcgaggatccctcttactaacattagtaaaactagatctctgctcacactctgcttttyagaattttactttcctttttatatttttaaataagctatgctcatcaaatttttaaaaagtgaaggcagtctattttagagcaaagcgttacttaacatttttatttacattcataatatatctgttgtttcttgttttttcttctctaggaaaaagaaatttatcgctggccaatcaaagaatctttaaaaactatgctggcttggggctggagaattgaaagaactcgggagggagacagcatggccctttacaaccggactcgtcgtatttctcagacaagccaggtaagaattcatcacggtgatgaatcaactgtttatgttatggattaaataattttttaaatttaattattg

SEQ ID NO: 590043 - DNA, 582 bp, Homo sapiens
cactgcaacctccttctcccaggttcaagtgattctcctgcctcggcctccccagtagctgggattacaggcgtgcactaccacgcccggctaatttttgtatttttagtacagatgaggtttcaccacattggccaggctggtctcaaactcctgatctcaagtgatccacccgcctcagcctcccaaagtgctgggattacaagcgtaagcctctgcacctggccacctaaaaagctttttttttttttaaacaaacaaacaaaactaaagtctttataggtatcatcttcacagaatgtttatgattgattttcctaccatatagccttatgaaaataaaacataagcttaacaaggttcatattaatgtaagtaattttgtaattctatatcaaaatgttttcttttagcaaatgttcccastattcaaaatattaagagagaaatagtcatctagttcttccctttaatgcaacaatgaaatcaatattgaaatcatggaatataatctccagttactaattgaagtgattactagcacaatggaaaagcaggcttctttccaatctcaccagcaat

SEQ ID NO: 590044 - DNA, 536 bp, Homo sapiens
ggaaacaatgatgacctgccatggaatttagaacggagattcatgctacaaacaaaaagttgaaattaatgaaatacacagattcttatccttttcagatgaaagttacttccctttattaaaattaaacatgaaaatcaggaaggatacttatttacctttgccataatatctgcataggccatatataaaaaatcttcctccagtttgctggggaaagcaagaagaaaacatcagtgtttaagcagaaggctaggcacatgcacacgtatcatcgctgcttaaaataacctttgttctttttctaacaagtatacctttttaaaattaaatgaacacaaaactaagacaatattaggatattcagaaatatcctgaaatcagaaagcaaagatcccggggatcctaaatagctgtcccatcttaccttacagaagggccttcaattttcacaaaataaactgtcttttggtttacayacaaatgtaataattttaattttcttcagactacaaaacttgaaacaagcaaactta

SEQ ID NO: 590045 - DNA, 541 bp, Homo sapiens
gtggtgggtgcctgtaggcccagttacgtggaaggctgaggcaggagaatggcgtgaacccgggaggtggagcttgcagtgagccgagatcgcrccactgactccagcctgggtgacagagcgagactccgtcaaaaaaagaaaaaaaggaccacagggaaaagataagccaagatactcttaagttggaaaacatggtaataggcctggcctaaaatattattagaaacctcgagagataaagacgaggctttaaagacaacattttctaagttaataatcacatgacaggttccaattgtcacttcatagggttcaaagataacctctctgtatatgcaattatagtttgtcacacagcatagaaaaatcactggtattttctctaactttattattctgttcaggatcaagtctcactctatcttactgagttgggaatgttttcttgtcctttaatatcataatctagactcagaatatagaatatagtgtttgcatcaaagttatatagtaatgtgatggatttttatagatgacc

SEQ ID NO: 590046 - DNA, 541 bp, Homo sapiens
gtggtgggtgcctgtaggcccagttacgtggaaggctgaggcaggagaatggcgtgaacccgggaggtggagcttgcagtgagccgagatcgcaccactgactccagcctgggtgacrgagcgagactccgtcaaaaaaagaaaaaaaggaccacagggaaaagataagccaagatactcttaagttggaaaacatggtaataggcctggcctaaaatattattagaaacctcgagagataaagacgaggctttaaagacaacattttctaagttaataatcacatgacaggttccaattgtcacttcatagggttcaaagataacctctctgtatatgcaattatagtttgtcacacagcatagaaaaatcactggtattttctctaactttattattctgttcaggatcaagtctcactctatcttactgagttgggaatgttttcttgtcctttaatatcataatctagactcagaatatagaatatagtgtttgcatcaaagttatatagtaatgtgatggatttttatagatgacc

SEQ ID NO: 590047 - DNA, 541 bp, Homo sapiens
gtggtgggtgcctgtaggcccagttacgtggaaggctgaggcaggagaatggcgtgaacccgggaggtggagcttgcagtgagccgagatcgcaccactgactccagcctgggtgacagagcgagactccgtcaaaaaaagaaaaaaaggaccacagggaaaagataagccaagatactcttaagttggaaaacatggtaataggcctggcctaaaatattattagaaacctcgagagataaagacgaggctttaaagacaacattttctaagttaataatcacatgacaggttccaattgtcacttcatagggttcaaagataacctctctgtatatgcaattayagtttgtcacacagcatagaaaaatcactggtattttctctaactttattattctgttcaggatcaagtctcactctatcttactgagttgggaatgttttcttgtcctttaatatcataatctagactcagaatatagaatatagtgtttgcatcaaagttatatagtaatgtgatggatttttatagatgacc

SEQ ID NO: 590048 - DNA, 541 bp, Homo sapiens
ctactcacatatgacattattttgtcagttatctttttacctaagacttctctaacaaagctatgtacaagctactttaatcgcaggaaatgtattttatagcattctgcgaatcctccatatcgcctaacatagttccttgtacatcacaatgttcaatggaatatcttttgttaatgatacttatcaccaattcaaataataagaatattgcccaccatttaccaaccctctgctatgcagagttgtttccacacatttaatatttcatttgattgtgacactagtctacsaggcaggaatataatctccagctcagagcctagaaatgttatccaagatcaaagggctgaaacacagagctggagctcatccccagcccttttctgttctgctcagaagctattggttataagaagagggcaaagcaaccagaaatctcattctgtgagattaatttttgaatgttccatccacatcagttaaaggtatatttatttctcagtccttattccctatgaatataaagaaaaataaatac

SEQ ID NO: 590049 - DNA, 669 bp, Homo sapiens
cctctcaaaacctcagtttgctcagctgtaaaatgaaggtaatacccaactcatagggttgtggtgagattaaataagatgatgcatgcaaaatgctaagcccagtgcctgacaaaaatagctattcaataaacgtcagcatcttgctcttgatctgtttaggaaacagaatgcaatgtgggccatttctgtatttctatattacattctactgcgatctaagggagggagagaaagcacagacaagtaatgcaagaatatataaaaatagactctccaagagttaaaacaagttattcctttgagaacatgtggctcaaaaagtagttgttttgtatccttgccactggaatcccatcccaggattttttttccatacccaatattagattttatgttgattttactctgctgcttggttttggaaatctctagacatgaattaatgtgtgtttattaaatccaaaccatcttcagattcactcagtaaattatattagttgcaaatttgaaaatataaaaataatgagtgttcatatatatacactattgtagtagtattgatattaatttataccagtaattttttctcaataacatcgaaactcttcattagcatgaataatcaaaatttctgtrtcattctaaaataaacttgtgggactagaa

SEQ ID NO: 590050 - DNA, 545 bp, Homo sapiens
gctctattggttttgtatcaattcactctctcccctccatccctcytttcagttctcacttcccctgccctagctgtactccttattacctctcacccaaacaattacagttgctgcctaactgatctccagtctctgtccattccaatacatatgagtactgccacccacattattttctgaaacatcaaaccaatgtcactccctgctggaaagcttttagttggcctccttcacatgctccataatgtcctgcttcctcgacctgtcatttaaattccttaataacacaggctttacttacatgtctagatttaattctcaatctacagcaatttttctcactattcttagaaaatgactttacttgcttaccttaacatccagtttgtttgtttgtttgtgtatttattttaaatttcactttaagtttcaggatacaagtgcagaacatgcaggtttgttacacaggtatacgtgtgacatggtggattgctgtacctattgactcgtcctctaagttccctcccctctcaccccccact

SEQ ID NO: 590051 - DNA, 545 bp, Homo sapiens
gctctattggttttgtatcaattcactctctcccctccatccctcctttcagttctcacttcccctgccctagctgtactccttattacctctcacccaaacaattacagttgctgcctaactgatctccagtctctgtccattccaatacatatgagtactgccacccacattattttctgaaacatcaaaccaatgtcactccctgctggaaagcttttagttggcctccttcacatgctccataatgtcctgcttcctcgacctgtcatttaaattccttaataacacaggctttacttacatgtctagatttaattctcaatctacagsaatttttctcactattcttagaaaatgactttacttgcttaccttaacatccagtttgtttgtttgtttgtgtatttattttaaatttcactttaagtttcaggatacaagtgcagaacatgcaggtttgttacacaggtatacgtgtgacatggtggattgctgtacctattgactcgtcctctaagttccctcccctctcaccccccact

SEQ ID NO: 590052 - DNA, 589 bp, Homo sapiens
attggcagaatcaatattgtgaaaattacctttctgttaaaggcaatctacaaattcaacgcaatctacaaaaacaattctaaaattcatgtggaaccaaatgagagccgcatagtcaaactaagactaagcaaaaagaatgaacctggaagcaacacacctcttgatttcaaactgtacaataaggacatagttaccaaaacagaatggtagtggtttaaagctaggcacatagaccaatggaacagaagagagaacctagaaactaacccaaatacttacagccaactgatcttcgacaaagtaaatgaaaacataaagtggggaaaggacacccttttcaacacatgatattgcgataatttgtgagccacacgtaggagaataaaactggattctcatctctcactttatacaaaaggctactcaagatagatgaaggacttaaacytaattcctgaaactataaaaattctagaagataacactggataaacccttctagacactggcataagcaaggatgtcatgacaaagaacccaaaagcaaatgcaataaaaacagataaacagagataaatagctggga

SEQ ID NO: 590053 - DNA, 643 bp, Homo sapiens
agtaaaacagagtttatacaatacccacgatttggtttcattttttgctgagtctcaggtttaatttaagccaatgggacctttggagattggtgttgaactgatttagtaacattcttgaatttctgcattccaaataataggtactgataatcatggtcacatgtgagttaagtcaattaatatgctcctcaagcttctcaagcttattgttcatggcctccaccaagctcaacttcctactaactcactccttcctggtctaattttgcagaaaactatcaagaaacctgcaaatcattcaaatcattatcatccactcataatttctagcgataagtaatgcagatttgttacattcctaaaggaattgctctgcagtagttaaccctattatttttttctcaagaaatcagagtggggagaaaaggaaatggactaaaatatccaggctcccttccgcagtaaggttctgagagagtcattgttagaattaaatcaattagtwgtacagataattcaataaattgtggttggagagtggatgttctcaaatcatattttagaaactaattatctcctggttcctcaaacgggtcaaagagcattcagggaccacaaatggagtgggtatgtcagtggt

SEQ ID NO: 590054 - DNA, 480 bp, Homo sapiens
accaccacatccagctaagtgttgtatttttagtagagacagggttttgccatattggccaggctggtttagaactcctgagctcagtgatctgcccacctcagcctcccaaagttataagattacaggcatgagcgaccacacccagtctgaagtcacygccaaccctaacacagcctcagaatttccatgccaaacgcgttctgagcaaggcagtcagcagaagattttaacacaaatagaacccttctctcaactgatgtcttctctgggaaatatttgctgccagagaagtcaagcctctctccccaagactgtgctctccttcctctccacttcctttatcatctagaagaacatacttcttcctcttgctatccaagtatcttcccgaaggtcacttctccttttgagtgactcactctgagctcttcatgcgcctaccattttgctatcagctgctgagaaaactgatatttt

SEQ ID NO: 590055 - DNA, 506 bp, Homo sapiens
ggccattcttgcaagagcaaggttgtatcatactgtggttttgatttgcatttccctgatgattagtaatgttgagcattttttcatatgtttgttggccatttgtatatcttcttttgagaattgtgtattcatgtccttagcccactttttgatggaactgtatcktttcttcttgctaatttgtttgagttccttgtagattccggatgttagtcctttgtcagatgcacaaaatgtgaagattttctcccactctgtgggttatctgttttctctgctgattgtttcttttgttgtgcagaagctttttagtttaactaagtctcatttatttttatatttgtctttgttgcatttgctttcgggttattggtcatgaagtctttgcgtaagtcagtgtctagaagtgtttttctgatgttatcttctagtatgtttatggttcaggtctcagatttaagtcctggattcatcttgagttgatttttgtataacgtgagaga

SEQ ID NO: 590056 - DNA, 493 bp, Homo sapiens
gtatgtgtttctcttcaaattactactgacatttaaatattcctagtcccttggtgatggatatttgggtcattgtaaatactttaatcccaaggctaaaacttctctaattttcctaatattttatttttaatctactctcaggactttttcatatttttcatgcctatgttcttgtttattccctgctgtatctcctgtctgtgtgtgtgtgtgtatgtatatgtatggtataaacaaatagtccatacatatacgcacatatatattttcctttagtgtaaatagcaacttarttaagtgtctcaaaacaactgatagatagaaacataagatgtctatatctttttttatttattgcaagatctgagtatgaaagaaaccatatcataattaaattaccatccaaggcttacttggacaactccctggagatggaagggcacattcataaaaagggatcaatgtaatttttaaatgcttaagcattcca

SEQ ID NO: 590057 - DNA, 495 bp, Homo sapiens
taatgtcatcagtaaatcatcttccccattggtctgtagtgctcatttcataaaatcattgtctgataatgcatgactttattttttagcattctagcccagtggttctgcaccagggtcaattttgtcccccagaggaaatttggaaataactggagaacttctggcttgtcaaaattgggagatggggggctgagatactatcaaagatctggtaggtagagacccaatgttcttacagtgcatataacagcccccaacccccacagcaacaaattaaatggctcaagctatagatagtcctgaggttgaggaaccctgctttagtctgttccaatgatctgtgtgctatggctgcctcagtgccaaattatttttgttattatgtatttctgtagtacattttcatatcatttagggtctaggctcctatctttaattttaaaataggyaatattatataaattctataagttgttgaatctttaaaaataa

SEQ ID NO: 590058 - DNA, 525 bp, Homo sapiens
tcacccaggctggagtgcagtggtgcaatcttggctcactgcaacttccaccttccaggttcatgcgattctcctgcttcagccttctgagtagctgagattacaggcacacaccaccacacctggctaatttttgcatttttagtagagatgggatttcttcatgttggccaggctgttctagaactcctgtcctcaagtgatctttttgcctcagcctctcaaagtgctgggattacaggcatgagccactgctcttggcctaaaaatttaacatttaatagactgtgaaacctcttacttgaaatccaacattttcycaatatatgaactccctaccatagccttcaaggcagtgcatataatcttgcccctatacaccttttctatctcatctcatgattcttcctggcttgcttcaccgacattacaggtccttttactgttcttcctggtatacatcatcccattgtgattctgtatgacaacttggccaggctatagttttcacacatttactcaaac

SEQ ID NO: 590059 - DNA, 582 bp, Homo sapiens
actttaatactctggtgcactcatttccaaaggcgtactttcaccttctgatgtgccctctgttagggccctcgggtttattgtatatattttggtggatcaggacatgctaagtcctgacctcagaggcaagcttggtggcgtgccctctgttagggccctcgggtttattgtatatattttgktggatcaggacatgctaagtcctgacctcagaggcatgcttggtggcgtgaccctctgttagggtcctcgggtttatggtatatattttggtggatcaggacatgctaagtcctgacctcagaagcatgcttggtggcaaaattcttagcaagggtgctgtttaatgaaaattaagcactccagactcctaccacttctgtctctttttttaatctgatgctgcttttacatcttgaattaattattcttccaaagctccatgacttgtttgtctcatgcagggagagacaggtgggagagttaattaaatatcttcttgtcagacagcggatgaaatcttcagtaccactggtcttggagtgtgtatatgtgtgtttgcgtgtgggtgttcttaac

SEQ ID NO: 590060 - DNA, 574 bp, Homo sapiens
aaagaaaacaaaacaatagagtaaagaaacagaatgagaaaaatatttacaagcaatgcaactgacaaggggttaatatctagaatataaaagaactcaaacaactcaacaggggataaaccaaataatcccattaaaatgtgtayggtggacatgaataagtgtttcttcaaataagacatacaaatgaccaaaagatacacaaaaatatgctcaacaccactaatcatcagggaagagcaaatcaaaacacaataagatataaccttaccccaattagaatgactgtaatcaaaaagacaaaaatgaatgttggcaggaatgtggagaaaggggaactcttacgcactgttggtgggaatgtaaagtagtacagtcattgtagaaaacagtattaaatttcctcaaaaaattgaaaatggaactaccatatgatccagcaattccatactgggtatatatccaaagtgggggaaaaatctgtttgtcaaaaagatatctgcactcctgtgtttactgcatcactattaataaccaagagatgtaatcaacttaagtattcatcaaacaatgg

SEQ ID NO: 590061 - DNA, 584 bp, Homo sapiens
gtatcacaaccaatgtaactttcttatttttctggggatttctctcttcaaactagtagtccttccaaaaaaaaaaaaacctggtggctagtatgaaatataacatattatatatataatatatgatatgttattatggtatctatcacaagaaaaaatagtctggtagttaatatatccctgcaacccaaattactagaggacactaagccttggggaatactaatgttaaaagggcataattgtatcacaaccaatttaactttcttatttttccagggatttctctcttcaaaatagcagtccttaaaaaaaaaaatacctggaaacaccaatctcgtacttttgcttkctgatttgtagaagtttttggactgtgttacaaatgcctacaaaatactcacactttcttctctcatcttgctgaagcaacccttaactttctttgaccatacaccttctagcatctattcttaccatccctctccatccattatcctcatagtgctcagaaaaatccttcaaacatatgatgaagtggataatactattgtcctatctgaaccatttcaataactttcagt

SEQ ID NO: 590062 - DNA, 462 bp, Homo sapiens
ttgtatcacaaccaatttaactttcttatttttccagggatttctctcttcaaaatagcagtccttaaaaaaaaaaatacctggaaacaccaatctcgtacttttgcttgctgatttgtagaagtttttggactgtgttacaaatgcctacaaaatactcacactttcttctctcatcttgctgaagcaacccttaactttctttgaccatacaccttctagcatctattcttaccatccctctccatccattatcctcatagtgctcagaaaaatccttcaaacatatgatgaagtggataatactattgtcctatctgaaccatttcaataactttcagttatacttcaatatgattccaggatcgtactaatgggtctgaaatggcctgcaagatacacttctcccatagccttagctcatatyattccccctagtttatggttctcaatgcagtaagc

SEQ ID NO: 590063 - DNA, 593 bp, Homo sapiens
tagctacgttatcaacctccctgaagaggatcaaaagaaaatggttgtgaactttttctttacacatatgacatgagttttaggatatttgaaagaacaggactgagttctaagtatattgctatcaaaaatatggtagcacgttctcttctacaccacccttcctccaactccaagacccaagcaaaattataaagtctgaagaattgcctgctccacaatgctcagacatccctgtctcatgtaccatgagcgttgacacctatttatccagggtctttctctggtaccctttactttgaacaatgcccacatcagtgcagcatatcagacgtcaaaattgtaggccattgcttccagacagaacrtgaattctctcttcaattaacagtgggtggagaactctctcgattccaccatctgatggccttctcattatattttaagaatcttctaagtttatagtattatggaattctagattggaaagagactgggaatatcaaataatccacactattatttcacagatgtggagagatcaaggccaacagtggtgaagtgactttcttaatccagaaggtgacactcat

SEQ ID NO: 590064 - DNA, 444 bp, Homo sapiens
aaggggaacatcacactctggggactgttgttgggtggggggagagggtagsgatagctttaggagatatacctaatgctaaatgacgagttaatgggtgcagcacaccagcatggcacatgtatacatatgtaactaacctgcacattgtgcacatgtaccctaaaacttaaagtataataataataataaaaagataaatattattaagacccttttttttactgattttttcttttaatgtaatatgaggatcctagaaaaggagtgtgaaatggagtcagagtttcagtttgaaccccaggtctgttttattgacctgttacatggatggtgtttattttctctctccacggctcagtttcctgttcttctgataccaagatagtacttgctatggtctatgtccccccaaaattctcatgttgaaatccagtcaccttt

SEQ ID NO: 590065 - DNA, 615 bp, Homo sapiens
atattattaagacccttttttttactgattttttcttttaatgtaatatgaggatcctagaaaaggagtgtgaaatggagtcagagtttcagtttgaaccccaggtctgttttattgacctgttacatggatggtgtttattttctctctccacggctcagtttcctgttcttctgataccaagatagtacttgctatggtctatgtccccccaaaattctcatgttgaaatccagtcacctttgtgatggtgttaggaggtggggcttcgggcggggattaggtcatggaggcaaagcactcaaagatgggattggtgtctttataacagagtccaagggagctccatcaccccttctgccatgtgaggacacaatgagaaggctctgttctgtgaaatagaaagtgggccctcaccagccacccaatctctcagcacgctgatcttgaacttccaggcttcrgaacagtgagaaacaaatttgtgttgtttatcaatttatggtatttttgtcacagcagcctgaatgaacgaagacagcacttgcttcctcacagggcgctgtgaagatcacagaactaagggacactaagatgcctactgcaggaccagga

SEQ ID NO: 590066 - DNA, 534 bp, Homo sapiens
aattgataaatatctggcaagcyttaccaagaaaaagataaaatacagattcgcaatcacagaaatgaaaagagatgtcaccacagattcttcagaacatgagaaaatgttatgaacaactttgtgccaaatttggaaatttaaataaaagataaatttcctaggaaaacaaagtttaccaaaattgacacaagaagtaataaaacaaactaaaaatactttatctaattaaattcctcactaaaaacatgtacaaaaataaaattccaggcctacatgctttaacagtgaattctttcaaacagttaaggaagaaataaaccattacacaaattctttcagtgcataaaaataaagggaccatttcccaaattaaattatgaggtcaatgtaatcataataccataacctgaaagggatattaaaagaaatgaaaattacctttcaatttcactgatgaacatagacataaaagtcctaaatagcatattagcaagtggaagctaacaacacataaacagagtactatatcat

SEQ ID NO: 590067 - DNA, 597 bp, Homo sapiens
tagctaaactggtagaaggaaaactgtagctttaaatgcattatacctgaagagctgaaagacttgaaatttgataatctacatactgtctcaaaaagtcagaaaagtacagcaaaagaaacccaaagaaaataaaagaaagaaaataaagacaatccataaattaatacagtagaaaacaaagaaatggagaaaatgaaccacacaacaaatcagttactttaagaaacagtgaaattgataaatatctggcaagccttaccaagaaaaagataaaatacagattcscaatcacagaaatgaaaagagatgtcaccacagattcttcagaacatgagaaaatgttatgaacaactttgtgccaaatttggaaatttaaataaaagataaatttcctaggaaaacaaagtttaccaaaattgacacaagaagtaataaaacaaactaaaaatactttatctaattaaattcctcactaaaaacatgtacaaaaataaaattccaggcctacatgctttaacagtgaattctttcaaacagttaaggaagaaataaaccattacacaaattctttcagtgcataaaaataaagggacc

SEQ ID NO: 590068 - DNA, 597 bp, Homo sapiens
tagctaaactggtagaaggaaaactgtagctttaaatgcattatacctgaagagctgaaagacttgaaatttgataatctacatactgtctcaaaaagtcagaaaagtacagcaaaagaaacccaaagaaaataaaagaaagaaaataaagacaatccataaattaatacagtagaaaacaaagaaatggagaaaatgaaccacacaacaaatcagttactttaagaaacagtgaaattgataaatatctggcaagccttaccaagaaaaagataaaatacagattcgcaatcacagaaatgaaaagagatgtcaccacagattcttcagaacatgagaaaatgttatgaacaactttgtgccaaatttggaaatttaaataaaagataaatttcctaggaaaacaaagtttaccaaaattgacacaagaagtaataaaacaaactaaaaatactttatctaattaaattcctyactaaaaacatgtacaaaaataaaattccaggcctacatgctttaacagtgaattctttcaaacagttaaggaagaaataaaccattacacaaattctttcagtgcataaaaataaagggacc

SEQ ID NO: 590069 - DNA, 601 bp, Homo sapiens
tgtcttcatataaaattaatttccccaaaatggtatttaagtacaaattcacagaaacggaccttgatatttcttttaataagatgtactgaactcatccttcacctaaagtaaaaaagggggagaggcagaaggtatttgtttttgtttctttcacttaggggctatatttaacctaagtgataaaccctaagttaacttagtctctaacaattagaattggaagatacttagaaatttcttcatcttatctttctctgttcaatggaatttgtcaatgttccagttaaaatatagtactcagaaatggacatgatgttatttcccaytatctgaatattatatttctgaatactaatactgcaggaagttggaattgtatttcatctttccttcataagatgaaaaatagattttctttgctagttttcattcatttttctcctaataacttcaagattatctggtcatgatttctgtatctgggtctacagtacacacaccctgagctcgttgcctcaactatttttgagacgtttctgaatttttctacgtttaagccattgctcctcttcttttttcttgctgtttccgtttctgc

SEQ ID NO: 590070 - DNA, 604 bp, Homo sapiens
tctcactctattgcccagctttgaacccctagacccaagaaatccttctgcctcracctcttgagtagctgggactacaggcacataccaccacatcctaattaaaaaaaaaaaattatagagataggaatctcctgctatattgcccaggctgctctcaaactcctggcctcaagtgaccctctaggctcggctccccaaagtgcttggattacatgcatgagccactgcaactggcttatttctagggactttgaatggagcctgcacaccaggggcaggtgaatggaggctgagtcagccagtcaggtgaaaactgaatgcttttaaactctgaagtgttccactggactgtgttgatggagctcctttcaaactggggcctgccttgcctgccagtcaaacagaactgtccacagtctagcaaatggctgtcatacatcaataggccattcattggaaatctaatgattggcaactgggaccacaggtacagggaatgcaatagaactcaagctgtggttgagttcttgttctgtctatccttttgagtgatgaaaaatgaggccagatctaggcaattttttctttacattgaaagctt

SEQ ID NO: 590071 - DNA, 534 bp, Homo sapiens
tttttttttgagacagagtcttactctgtcgcacaggctggagtgggcgtgatcttggctcactgatctccgcctcccgggttcaagcaattctagtgcctcagccctccgaatagctgggattacagacatgcaccaccacacttggctaattttttttatttttagcagacagggtttcaccatgttggtcaggctggtcatgaactcctggccttragtgatccactgccttggcctctcaaagcgctaggataacaggtgtgagccactgtgcccggcctaatccatttttaattaaattttgtgtatgttgtgagataggggtctaatttcattcttctgtatgtgtatatccactttcccaacaccatttattaaaaagactttccttttcccattgtgctttcttgatacctttgtcaaaaaccaattgaccataagaagcatgcatgtgggtccatttctaagctctctattctgttccattgattgatgtttctgtttttttggccagtgccatgttgttttgat

SEQ ID NO: 590072 - DNA, 594 bp, Homo sapiens
cattgagatacatatttagatcaatgacttcaacattttatgtatttytaaacttacttttcttcttttgttttatgctgggtgtattagtccatttacataccgctataaagaagtaccagagactgggtaatttataaataaaagagatttaattgactcacagttctgcatggctgcggaggcttcaggaaacttacagtcatggtggaagataaaggagaagcaagcacccttttcacctgaaggcagcaggagagagagcgagcactcaggggaaactgccacttttaaaaccatcagatctagtgagagctctctcactatcatgagaacagcatgcaggaaactgcccccatgatctaatcacctcccaccaggtccctcccttgatacatggggattacaatttgagataagatttgggtggggacacagaccaaatcatatcactgaatatttatattatttcatctactagctccctagtcctctcacctattatgtttaatttgctctttaaacactcatttggcacttaatttcagggttttatttagatttttatttgtaagtttaagttaacatttctta

SEQ ID NO: 590073 - DNA, 630 bp, Homo sapiens
ttatcatacaagctaaaatatatcctatttaaattttatgcagcataacacagctattattcatgaatatggccacagtttaacaagaaactgcataggcttaatatattttaacataatagggaatgctaaatataatttattatgtgtaccatatgtagggtctacaatgaaataagataataggcttaaaattgcccttaaattcaagaatgtaaaaagttaacttttcttgatttcttttaataaaacrtatgaatccagataccccttttgatgttccagtgtaaagttttacctcagtcattcttgggatatccacccctctaccaggggttgtactatggttgtaggaacttacatacaccaagattaccagtaaaaagaagagagccaattaaggctttagacattgttcatccatctacacatgaatttacaaagatatctattccaggctttaacgtggcctatcaggaattgctgctctctgtgacttctcaactgttcttgagtttcagaaatctttgatgaggcagcctaaacttttatccctctaaatacactgtacagttctttattttttttcctaaaagtttggtcctaagtctcctttgctctttctcactc

SEQ ID NO: 590074 - DNA, 630 bp, Homo sapiens
ttatcatacaagctaaaatatatcctatttaaattttatgcagcataacacagctattattcatgaatatggccacagtttaacaagaaactgcataggcttaatatattttaacataatagggaatgctaaatataatttattatgtgtaccatatgtagggtctacaatgaaataagataataggcttaaaattgcccttaaattcaagaatgtaaaaagttaacttttcttgatttcttttaataaaacgtatgaatccagataccccttttgatgttccagtgtaaagttttacctcagtcattcttgggmtatccacccctctaccaggggttgtactatggttgtaggaacttacatacaccaagattaccagtaaaaagaagagagccaattaaggctttagacattgttcatccatctacacatgaatttacaaagatatctattccaggctttaacgtggcctatcaggaattgctgctctctgtgacttctcaactgttcttgagtttcagaaatctttgatgaggcagcctaaacttttatccctctaaatacactgtacagttctttattttttttcctaaaagtttggtcctaagtctcctttgctctttctcactc

SEQ ID NO: 590075 - DNA, 555 bp, Homo sapiens
aacctctgcctctcgggttcaagtgattctcctgcctcagcctcccaagtagctgggattacaggcatgtgccaccatgyccagtgaattttgtattttaagtagagtatatgatagttctgctgatgttttgtttattgggcagacatatcttcaataagagtttttggaaaactcatcaaattcgatgaatacattttcttcataacccatttggaattattcctaataaaatgataaaatatgtaaaaaaaaaaaaaaaaaagtagagacagggtttctccgtgtttggtcaggctagtctcgaactcccgacctcaggtgatcctcccacctctgcctcccaaagtgctgggattagaggcgtgagcaaccattcccagctaatgtactacattttctttagccaatccatcattgatggggaccaaggctgattccatgtctttgccattgtaaatggagctgtgatgaatatacacatgcatgtgtctttatgataaaacaattaatatccctttgggtgtatataaagtaatgggattgctgggttga

SEQ ID NO: 590076 - DNA, 555 bp, Homo sapiens
aacctctgcctctcgggttcaagtgattctcctgcctcagcctcccaagtagctgggattacaggcatgtgccaccatgcccagtgaattttgtattttaagtagagtatatgatagttctgctgatgttttgtttattgggcagacatatcttcaataagagtttttggaaaactcatcraattcgatgaatacattttcttcataacccatttggaattattcctaataaaatgataaaatatgtaaaaaaaaaaaaaaaaaagtagagacagggtttctccgtgtttggtcaggctagtctcgaactcccgacctcaggtgatcctcccacctctgcctcccaaagtgctgggattagaggcgtgagcaaccattcccagctaatgtactacattttctttagccaatccatcattgatggggaccaaggctgattccatgtctttgccattgtaaatggagctgtgatgaatatacacatgcatgtgtctttatgataaaacaattaatatccctttgggtgtatataaagtaatgggattgctgggttga

SEQ ID NO: 590077 - DNA, 589 bp, Homo sapiens
gcctgtgggtacaaataaaagaattcagttattcttgcagtatatgataaagctaaacatacttaccttatgacccagcaattctgctcttgagtatttaactaagcataatgaaattatatgtccagagaagagacttacacaaaaatgttcataggagctgtatttgtagtagctgcaaactgaaaacaacccaaacctgaatcaacataagaatggataaaaaaccaactatacttacctaagaaaatactactccaactgaggcgagtggatcacgaggtcaggagttccagaccagtctgaacaacatggtgaaaccctgtctctactaaaaatacaaaaattagccgggcatgatggcgcaagcctgtaatcccagctactcaggagactgaggcaggagaatcacttgaacccgggaggcggaagttgcagtgagccgagatcgtgccactgcgctccagcctgggcgacagagcaagacyctgcctcaaaaaacaagaaaaaaaagaaaagaaaagaaaagaaagaagaaaaagaagacaagactactaatcagcaaaagaagggaacaaactgctactac

SEQ ID NO: 590078 - DNA, 589 bp, Homo sapiens
gcctgtgggtacaaataaaagaattcagttattcttgcagtatatgataaagctaaacatacttaccttatgacccagcaattctgctcttgagtatttaactaagcataatgaaattatatgtccagagaagagacttacacaaaaatgttcataggagctgtatttgtagtagctgcaaactgaaaacaacccaaacctgaatcaacataagaatggataaaaaaccaactatacttacctaagaaaatactactccaactgaggcgagtggatcacgaggtcaggagttccagaccagtctgaacaacatggtgaaaccctgtctctactaaaaatacaaaaattagccgggcatgatggcgcaagcctgtaatcccagctactcaggagactgaggcaggagaatcacttgaacccgggaggcggaagttgcagtgagccgagatcgtgccactgcgctccagcctgggcgacagagcaagactctgyctcaaaaaacaagaaaaaaaagaaaagaaaagaaaagaaagaagaaaaagaagacaagactactaatcagcaaaagaagggaacaaactgctactac

SEQ ID NO: 590079 - DNA, 541 bp, Homo sapiens
caattaataaaacaagttcttagagacctacaaagagacttagactctcacgaaataatactgggagatttcaacaactcactgacagtattagacagatcactgaggacacaaaaaatcagcaaagatatttgggatttgacttgacacttgactaaattagcctaacaggaatatacagaacactccaccccacaacaagagaatatacattattttcatctacatatggcacatattctaaaattggccacatgcttggatataaaacaactctcaataaattaaaaaaaactgaaatcataccaaacccttcttgaaccacakggtaataaaaatagaattcaatgctaagaagatctctcaaaacatacaattgcattaaaattaaacaacctgctcaaaaatgcctacagtgtaaacaatgacattaaggcagaaaccaagaatttatttgaaacaaatgaaaacaaagatatgacataccagaatcactgggacacttataaaacagttttaaaactaacgtttatagagcaaa

SEQ ID NO: 590080 - DNA, 513 bp, Homo sapiens
tagtcaattcatattatgtttggtatttgaatcaaaggtccacagatcttatttattatttataaaatatattctcaattttctggctctctattatcagctgctgaactttgctatttgctgaacatccagacatgctcctgcctcaggagaagcatttgctgattctttccggctggaaatctcattttccaggtagctgcatagctcctttcctcatcttcattaagccctttctcaaatatcaccttctcrtggaggcctttcctgagcctgatagataaaactgcacagaattaacaactcaccccacactgctgcaaagcaagtaaaaccaacgaaacagcatcatccctcccttttgctatgtatttatttctttttattaaccttgtctttcattaaaatatcagatttaggaggtcagacatttttgtgtcattttttcttttcctgtaaacaacacttaaaatattgtctagtatgtaataggcaccctacaaatatttgatg

SEQ ID NO: 590081 - DNA, 513 bp, Homo sapiens
tagtcaattcatattatgtttggtatttgaatcaaaggtccacagatcttatttattatttataaaatatattctcaattttctggctctctattatcagctgctgaactttgctatttgctgaacatccagacatgctcctgcctcaggagaagcatttgctgattctttccggctggaaatctcattttccaggtagctgcatagctcctttcctcatcttcattaagccctttctcaaatatcaccttctcgtggaggcctttcctgagcctgatagataaaactgcacagaattaacaactcaccccacactgctgcaaagcaagtaaaaccaacgaaacagcatcatcyctcccttttgctatgtatttatttctttttattaaccttgtctttcattaaaatatcagatttaggaggtcagacatttttgtgtcattttttcttttcctgtaaacaacacttaaaatattgtctagtatgtaataggcaccctacaaatatttgatg

SEQ ID NO: 590082 - DNA, 560 bp, Homo sapiens
tgctacatgcctgtaatcccagctactcgggaggctgaggcaggataatcgcttgaacctgggaggcagaggttgcagtgagccaagatcatgccattgcacttcagcctgggcaacaagagcaaaactccatctcaaaaataaataaataaataaaataatgttgacctaaaaattcataaatggtgtatyatatctagaaaacaataatattattagaaacaatttaatttgtcatttcaactgcacaactctgaaaataacattttccatatcttatcgatgagaaaactaaagataaaaaacttaaataataagtctaagtttatgaagttgatgcaaacaactcgctcataggttcctggccctatgctcaaaagggttattttttattgtgtggaacaagtatgcaagaatgttttcttatgaattatgaactataccataaagtaacagaaactaccaataaactctatcataaattgacactctcagtaatggtaggtagcattgtggtttcagcagtttgggcctttttctttccttttagtaacttccaa

SEQ ID NO: 590083 - DNA, 494 bp, Homo sapiens
ggctgactgaatctggattatgagaatataatgttaaggtgtacaatatgtcttttacgtcaatcagcacaattttttgagatgttatttgattaatgtagttgtattagaagctttcaatattagttaagaagtagacaaaactrctgaatggatttcagcacaaagatacagaatccaatgattcattgctttgtcattacgttgttatatatttagaatattttttgcaaggccatagatgtgagttatggatttttttattgatctgtccaattgaaaatcatgatgatgaaatcttgaattttataaagagcaatcaaacaaaagtgcttctatgaattgaatagcttaatctaaatgttaagtttattgatgcataggatgcattatacaacagagtctgagtaatgtatgtaggaaagcataacgtggcagatgataaagatgttgagatgtctgtctgagatttacagagtctttggattactgag

SEQ ID NO: 590084 - DNA, 348 bp, Homo sapiens
cagcttgcatcctgagttctgtgtctccctcacataagcagatattaacccccaggccaaacagaaatttttctcaggcaaggtttaacagactcaaggctcaagcaccgcaagggagcaatctacaagaaagagatcccagtgctagctctccaaagggtttgatcttgtcattttaaggaatccagaaaggagcgatgtgtagccatatagaggtaaggaatrtagcacccgcacagtttgataacatgtttcttcaggcatgatgtgtttcattagcatgttaaatgtctacccctgggtgtgatttgtagtattataattgaaatttgtagtattataattgaa

SEQ ID NO: 590085 - DNA, 600 bp, Homo sapiens
tgtatagatgggattaaagccatggcccatgtctcccactcaaactgactttttgcctgcaagctatgtcatcttcttggaggaactgaatgttatagactcatcatttccccacttccttctctccctacctgacaacatccttgagagaatgagacaaacagcaactcatctcagataggggagaactgagagacagagaaagtagaagaggtttttttcaagtcacatagaagaacagaggccaaactagaattccggactccatgagctactttatttggaacccatggacatggttttcaascaagacacagatacacagataataacaccaggtagagtttcttttccctccctcccttcctccctcccttccttcgttcctccctccctccctcccttccttcctttctctctctctcttcctttttttttttttttgacagggtctcgccctgttacccaggctcagtagcaggatcatgattcattgcagccatgatctcctgggctcaagcgattgtcccacctcagcctcccaaatagctgggactatcagcatgtgccaccacgcccagttaatttttttttaatttt

SEQ ID NO: 590086 - DNA, 600 bp, Homo sapiens
tgtatagatgggattaaagccatggcccatgtctcccactcaaactgactttttgcctgcaagctatgtcatcttcttggaggaactgaatgttatagactcatcatttccccacttccttctctccctacctgacaacatccttgagagaatgagacaaacagcaactcatctcagataggggagaactgagagacagagaaagtagaagaggtttttttcaagtcacatagaagaacagaggccaaactagaattccggactccatgagctactttatttggaacccatggacatggttttcaaccaagacacagatacacagataataacaccaggtagagtttcttttccctccctccctycctccctcccttccttcgttcctccctccctccctcccttccttcctttctctctctctcttcctttttttttttttttgacagggtctcgccctgttacccaggctcagtagcaggatcatgattcattgcagccatgatctcctgggctcaagcgattgtcccacctcagcctcccaaatagctgggactatcagcatgtgccaccacgcccagttaatttttttttaatttt

SEQ ID NO: 590087 - DNA, 600 bp, Homo sapiens
tgtatagatgggattaaagccatggcccatgtctcccactcaaactgactttttgcctgcaagctatgtcatcttcttggaggaactgaatgttatagactcatcatttccccacttccttctctccctacctgacaacatccttgagagaatgagacaaacagcaactcatctcagataggggagaactgagagacagagaaagtagaagaggtttttttcaagtcacatagaagaacagaggccaaactagaattccggactccatgagctactttatttggaacccatggacatggttttcaaccaagacacagatacacagataataacaccaggtagagtttcttttccctccctcccttcctccctcccttccttcgttcctccctccctccctyccttccttcctttctctctctctcttcctttttttttttttttgacagggtctcgccctgttacccaggctcagtagcaggatcatgattcattgcagccatgatctcctgggctcaagcgattgtcccacctcagcctcccaaatagctgggactatcagcatgtgccaccacgcccagttaatttttttttaatttt

SEQ ID NO: 590088 - DNA, 548 bp, Homo sapiens
tgggcaacatggcaaaaccccatctctacaaaaatacaaamattagctggtcatggtggtgagcgcctggagtcctagctacatgggatgctgagcgcaggagaattgcttgagcccaagagattgaggctgctgtgagccgtgagcacagcactgtactccaggctgggtgacagagtgaaacaaacaaacaaacaaacaaacaaatctcaaataaaagataaagattttggttgatggagcactttcttattgctgggacaaccaggaaggttttgtggagaaggggcacatgaactcaactgtgacttcagaggacgttagaaggtggaaaaggagatggggaattaggtgtgtggcagggacagtatactttttatttgaaaattgtgaatacctctgatgacagtgtggagtaaaatgggtgtaagctgacataagcctagaaaaggaagttggaaatttattggaaagactcttaagtgccaggctctggaaactggatgtgagttagtagtcaatgggatcactgaaggttctctaatagg

SEQ ID NO: 590089 - DNA, 542 bp, Homo sapiens
ctcttttaacatatataacctttcaaagggcacctcccctctacaactgacccctaagatcttactggtcatgacttctccagcttgctttcagccccagttccataagagagctctgggtatttgaaatggggccrtggatagcatgacctgggaggaaaagtgagtaatgagagacaaggaggcccagaaaggagatgaggaaggctgaaacacccttcctggctccatctagggaagccccatcctaagctaggcacgaatgggcaaaagtggcttaaaaaaatccctttttttagaataaggcacacagccttatttctacatgaagtcttcggatgtttgattctgacaacccttctgaatttctctaagttattattataaggcagcataaacttgaagaaggtgtttggatgatgtctatgtcccgtgtgtgcacacacatgcataaacacttgcatgcttgtgcaactgctccctctgaggtgaggttgacttccctatagcctctgaaataaaatgagtccgaagttttgcaa

SEQ ID NO: 590090 - DNA, 542 bp, Homo sapiens
ctcttttaacatatataacctttcaaagggcacctcccctctacaactgacccctaagatcttactggtcatgacttctccagcttgctttcagccccagttccataagagagctctgggtatttgaaatggggccatggatagcatgacctgggaggaaaagtgagtaatgagagacaaggaggcccagaaaggagatgaggaaggctgaaacacccttcctggctccatctagggaagccccatcctaagctaggcacgaatgggcaaaagtggcttaaaaaaatccctttttttagaataaggcacacagccttatttctacatgaagtcttyggatgtttgattctgacaacccttctgaatttctctaagttattattataaggcagcataaacttgaagaaggtgtttggatgatgtctatgtcccgtgtgtgcacacacatgcataaacacttgcatgcttgtgcaactgctccctctgaggtgaggttgacttccctatagcctctgaaataaaatgagtccgaagttttgcaa

SEQ ID NO: 590091 - DNA, 544 bp, Homo sapiens
tgtctattcaagtctttcatccatttaaaaaattggattgtctttttgttattgatttgtaagaatttttttaagagacagggtctcactccattgcccaggctggagtgcagtggcacagtcaaagctcagtgcagcctccaactcctgggctcaagtgatcctcctgcctcagcctcctgataactgggactacaggcatgatccaccatgcctggctaattttttatttaagagatggggtctygctatgttgcccaggcttgtcttgaactcccagcctcaagctgtcgtcctgtcatggccttccaaattgctgagataacaggagtaaaccaccttgcccagcctgatttgtaagaattctttgtatatttcaactgtaagccctttagcaaatataaatatttcaaatgttttctcctattcttggcttggctttttattttcttaatggtgtcttttagtaagtagtttttaatttgatgaaagacaatgtatcatttttctctacttcatgctttttatgtcttgtctaagacat

SEQ ID NO: 590092 - DNA, 556 bp, Homo sapiens
gaacccctgtgtcatcacatgtaaaactccctacatcttcaaccttcagaaaactatttccttgttttcactgaaattcttttgagtgaaggatactcatattctgataccccatgtgccattttgctggggaatagctggggcattttcctcattgttaactgtctgtttcaggccattatgatatgtacaattctttctccctttgatgttaacaccacatggatatatcaccctctacctgtcgttatcattggcatgtgtaaatttccaagtcactcccaaattctcttcaagaattcagatacttggagtggagccaagatggccgaataggaacagctccagtctacagctcccagggtgagcgaggcagaagacgggtgatttctgcatttccaactgaggtaccgggttcatctcactgaggagtgtcrgaaagtgggtgcaggacagtgggtgcagtgcaccgagcatgagccgaagcagcgtggcatcgcctcacctgggaagcacaaggggtcagggaattgcctttcctagtcaaagaaagggg

SEQ ID NO: 590093 - DNA, 617 bp, Homo sapiens
ccattgacaacctcaaatgagctgccagccaacaaccagcatcaactgccagtcaggtaagtgagtcctcttggtcattcagccaagttgagcttttggatgactacgtcctcaactagcaattgactacaaatttataatataccccgtggtaggcagaaaatgtctcccaaagatgtcaatttcctaatctccataatctgtgaatgttatgttacatggcaaagggtattctgatcgctaatcacctgaccttaaaatagggagattattytgaattatcagagtgggcttaatgtgatcacaagagttctgagcagtggaagagggaggcaaaagaggagtgtggagtgctgggatgtcagaaggattaggcctgccactgctagctttgaagataaaagaaagacagcatgagctaaggactataggcagcttctagaagctggagaaggcaaagaaaccgattatctcctagagccctgagaaaggaatacagccctgtcaacactgtgattttagcccaatgagattaaattctgatttttgaccttccaaaactataagatagatttacattgtttaaaccattaaatttgtggtaatttgttacagca

SEQ ID NO: 590094 - DNA, 617 bp, Homo sapiens
ccattgacaacctcaaatgagctgccagccaacaaccagcatcaactgccagtcaggtaagtgagtcctcttggtcattcagccaagttgagcttttggatgactacgtcctcaactagcaattgactacaaatttataatataccccgtggtaggcagaaaatgtctcccaaagatgtcaatttcctaatctccataatctgtgaatgttatgttacatggcaaagggtattctgatcgctaatcacctgaccttaaaatagggagattattctgaattatcagagtgggcttaatgtgatcacaagagttytgagcagtggaagagggaggcaaaagaggagtgtggagtgctgggatgtcagaaggattaggcctgccactgctagctttgaagataaaagaaagacagcatgagctaaggactataggcagcttctagaagctggagaaggcaaagaaaccgattatctcctagagccctgagaaaggaatacagccctgtcaacactgtgattttagcccaatgagattaaattctgatttttgaccttccaaaactataagatagatttacattgtttaaaccattaaatttgtggtaatttgttacagca

SEQ ID NO: 590095 - DNA, 590 bp, Homo sapiens
gtgtacacatgcatatacatatatttgcrtatgcatatatgtatgtatgtatatgcacaaatgtatttaatttgctatatatgggcatgcttaatttaaccagtaacaaactctatatagttcattttatatttttagtttttctctattaactctttttgttgtgcttataaagtctgaagctaaaagatatccttctgtattattaataagagctcccattgacctaagaattgtatatcagtttgtggccgagcaggtaaacacctccctttaaacagagatgagaaagggggcaatttcttgagtggatgatctcttataattgcatgaggtatggagaatggaggattgggtataatacatgtcacaataaaggcacttggtatgtacttattgaacaagcaaatgaatgaatgatcattttgtttggacccttaatgccccctttggaattatacacaatcttattgtgaatgtatcttactaggagttgataccattatcctatgttaaagggtggggaggctattggaaaggaggcaaatgccacatagtactatgtgctggaggacattcgtaccaatact

SEQ ID NO: 590096 - DNA, 590 bp, Homo sapiens
gtgtacacatgcatatacatatatttgcgtatgcatatatgtatgtatgtatatgcacaaatgtatttaatttgctatatatgggcatgcttaatttaaccagtaacaaactctatatagttcattttatatttttagtttttctctattaactctttttgttgtgcttataaagtctgaagctaaaagatatccttctgtattattaataagagctcccattgacctaagaattgtatatcaktttgtggccgagcaggtaaacacctccctttaaacagagatgagaaagggggcaatttcttgagtggatgatctcttataattgcatgaggtatggagaatggaggattgggtataatacatgtcacaataaaggcacttggtatgtacttattgaacaagcaaatgaatgaatgatcattttgtttggacccttaatgccccctttggaattatacacaatcttattgtgaatgtatcttactaggagttgataccattatcctatgttaaagggtggggaggctattggaaaggaggcaaatgccacatagtactatgtgctggaggacattcgtaccaatact

SEQ ID NO: 590097 - DNA, 590 bp, Homo sapiens
gtgtacacatgcatatacatatatttgcgtatgcatatatgtatgtatgtatatgcacaaatgtatttaatttgctatatatgggcatgcttaatttaaccagtaacaaactctatatagttcattttatatttttagtttttctctattaactctttttgttgtgcttataaagtctgaagctaaaagatatccttctgtattattaataagagctcccattgacctaagaattgtatatcagtttgtggccgagcaggtaaacacctccctttaaacagagatgagaaagggggcaatttcttgagtggatgatctcttataattgcatgaggtatggagaatggaggaytgggtataatacatgtcacaataaaggcacttggtatgtacttattgaacaagcaaatgaatgaatgatcattttgtttggacccttaatgccccctttggaattatacacaatcttattgtgaatgtatcttactaggagttgataccattatcctatgttaaagggtggggaggctattggaaaggaggcaaatgccacatagtactatgtgctggaggacattcgtaccaatact

SEQ ID NO: 590098 - DNA, 482 bp, Homo sapiens
ggggaaacaggtggtatctggctacacgaataagttctttagtggtgatttgtgagattttggtgcacccatttcccgagcagtatacagtgaacccaatttgtagtcctttatccctcactktcttcccaccctttctccctgagccccaaagtccattggtcattcttatgcctttgcatcctcatagcttagctcccacttacgtgtgagaacataaagtgtttggttttccattcctgagttacctcacttagaataatagtctccaatcccatccaggttgctacaaatgccattacttcattcctttttatggctcagtactagcattccagtacatatatgtgtgtgtgtctgtgtgtgtgtgtgtatttacatatatatatatttatttacatatatatatacacacacatatatacatatatatgcacacatatatatgtgtgtgtgtatatatatacacacacatatatata

SEQ ID NO: 590099 - DNA, 482 bp, Homo sapiens
ggggaaacaggtggtatctggctacacgaataagttctttagtggtgatttgtgagattttggtgcacccatttcccgagcagtatacagtgaacccaatttgtagtcctttatccctcactgtcttcccaccctttctccctgagccccaaagtccattggtcattcttatgcctttgcatcctcatagcttagctcccacttacgtgtgagaacataaagtgtttggttttccattcctgagttacctcacttagaataatagtctccaatcccatccaggttgctacaaatgccattacttcattcctttttatggctcagtactagyattccagtacatatatgtgtgtgtgtctgtgtgtgtgtgtgtatttacatatatatatatttatttacatatatatatacacacacatatatacatatatatgcacacatatatatgtgtgtgtgtatatatatacacacacatatatata

SEQ ID NO: 590100 - DNA, 549 bp, Homo sapiens
ttattttaagtgaagtaactcaggaatggaaaaccaaacaccatatgttctcactcataagtgggaggtgagctatgaggatgcaaaggcataagaatgacacaatggactttggggactcagagggaaagggtgggaagtgggtgagggataaaagactacaaatagagtgcagtgtatactgctcgggtgatgagtggaccaaaatctcacagatcaccactaaataacttactgatgtaaccaaacacctcctgttcccccaataacctatggaaataaaaaaatttwaaaaaaactttttgaaagaaatatgaaaagacaagtttgcttcgaatgataatgttaatgatgatgatgatgatgatgatgatagcatagcactgaccacacactccacactctatttttgcaaataactcatttaatcctcataacattatagtattataattgtgttatgaggcattattattttcccattttatagttgaggaaactaaaggacagtgaagttaagtaacttgccttgggtcatagatctaataa

SEQ ID NO: 590101 - DNA, 510 bp, Homo sapiens
tagctgactatctctcagggtaattttatccaaatgttatcacctgaacaagtcttcaggtcgacatgtatatattagtcaatataatttgcttttgtattccattttcattcccaaacatcagcacaggaaacagttaagtttaatcattgcttagaaaaactcartctgtaatccaaaatacacaaaataacatttttgacttatttttatcagctatagaatgttacctagtgtgttgcatcctgtagaggcttcatacgggaggtaaactatcaacttcaggaatataatagtttgaattttatttattccttttacaaacacagttttaacatttgggattcattttggagacccctgataaaatctatgaacccgatcttcaggaaaacacacattcatacatatgcccccaaatctgcatacaatttcctgggtttgtgcaccctccttaggtcaggttgtggcaggacactgtgtcctctaccaaaggccatagggcctgtg

SEQ ID NO: 590102 - DNA, 646 bp, Homo sapiens
tttgtcaggcttttcaacttttagtcatcttgctaggtaagtggtggtgaggagacaggccatttctcttactgtctcttgtctctgaagagaaagaggaagtaaaagctgaaaaacacaggaatgaagtcagtggcaagamcagccggcgccactgatgaccaggtctgaggttaaaagattaaccccccattctaaccacatgtgctatctacagatctcaatctattatgaccctttcacgtggaacccctcacagctctaagcccttaaaagggccaggaactgtttctttggggacctcagttcttgagatgcaagtctgccaatgctcccagccgaataaagcctcttccttctttaacccgggtgtctaaggggttttgtctgtggctcgtcctgctacaatggtatctgtggttttgtgtttccttgttggtactaaggagattaagcaccttttcatatgttaactagctatttggatgcaatgcaattttaagatacataaaagtgttcaaatctaatccagaggactgaagttcattgacctctttaaaattcattgactctggaatgtgaggaatgatggcagagactggaaataagtcagaaaattatgacattttggttaaaattgtagttg

SEQ ID NO: 590103 - DNA, 564 bp, Homo sapiens
aagaaggaaggaaggagagaaggaaggaaggaagggagggaaggaaaataagtttcaagtaagaatgtagcagtaagcctaagaaatgcccaacagattctttacaactgacaattattgagtcgtaggatctctgagctgggaatgacctttatttgtctaattccccagttgaagatttgaagagaaatttcaatgcagagagactaagtggcacatagctagttaaaacataaccaagataagaactcaggtttcctaacyccaaatctataccatgcaggttccttctggcagagaactaataggctgaaactacagtcacacaaatctgattatttggggcaagtacaagagggtttctagtaactttgcagttgcaaaccctgatgcagctgaagcctcttgatgaagccctgagaatctatacgaatcaaatccaagagctgtgtgccctgcatgagctcatcccacttccagtctcttgctgagaggctgtcaagctctctgcagaagagtggcgtctgggtgtttatacatggatgtgcagcagtgacactgtag

SEQ ID NO: 590104 - DNA, 533 bp, Homo sapiens
ccattggtcccagctacccaggaggctgagatagggggatcactcgagcccaggagtttgaggctgcagtgaggtctgattgctcctctgcattccagctgggtgacagaatgagaccctgtttaaaaaaaaaaaatgaaaagaaatcagtctctctttaggtccccaggctgtcagatgagtctggatgccatccatggccatcttatgggcctcagaaataagaagcagcaataacactaatgccacccaggtccctgatcctactgttcctgagatgcaactcagtgtcatcatcagcatcatcatcaatcatcactaccccttttctctaatatggyctgcattaagtttctgtcatttgtaatcaaaagggccctactaataaaatacactattttttaaaaaacttcaaagaataattagactaaaaagaaaaaaatgagactttcctatatgcacttcttattgcctaaaatgtctcttattctggaaactatccaataatgccaacttctaaaaaaaaagtggta

SEQ ID NO: 590105 - DNA, 533 bp, Homo sapiens
ccattggtcccagctacccaggaggctgagatagggggatcactcgagcccaggagtttgaggctgcagtgaggtctgattgctcctctgcattccagctgggtgacagaatgagaccctgtttaaaaaaaaaaaatgaaaagaaatcagtctctctttaggtccccaggctgtcagatgagtctggatgccatccatggccatcttatgggcctcagaaataagaagcagcaataacactaatgccacccaggtccctgatcctactgttcctgagatgcaactcagtgtcatcatcagcatcatcatcaatcatcactaccccttttctctaatatggcctgcattaagtttctgtcatttgtaatcaaaagggccctactaataaaatacactattttttaaaaaacttcaaagaataattagactaaaaagaaaaaaatgagactttcctatatgcacttcttaytgcctaaaatgtctcttattctggaaactatccaataatgccaacttctaaaaaaaaagtggta

SEQ ID NO: 590106 - DNA, 293 bp, Homo sapiens
tgaggtcaggagttcgagaccagcctggctaacatggtgaaaccccgtttctactaaaaatacaaaaaattagcygggagtggtgatgcacgcctgtaatcccagctactcaggaggctgatacatttctttttaccaaatatattttttaaactacgggattttacaaataaaataaaaatctatagctttgaaagaggtagacagttgaccctggaaatcaaggtgagaggcttcggggaggaaaatggaatggcaaacagtgctgcaagttgagtccaccaataaccaca

SEQ ID NO: 590107 - DNA, 575 bp, Homo sapiens
aaattgctgtcttagttagttcaggcttctacaaaaaaataccatagactggctgacttaaacaacagaaatttatttctcacagttctggaagctagatggtccaagatcaaggtgttaagagacccactctctggtacaggctcacgacctagcattgctgacagacatctcactgtatctacacctggcatagagcagagagagagaacacattgtaccaattgctccagtgattttgcactacatgtttccaatgctgttgattttttgacataaatcatgtcattttataatggcactaatgtcaatcatgatggctccaacctcatgacctaattaccttctacaggccttacctcctaataacatcacatggggccttgggtttccacatgaatattggggtctcataaacattcagcctatagcactcatgcatttaattccaaaacaaacttattaatgaaatatggacgtgtatactttaaatcctcttatttttaaaagggaataaaccataaagttcctattcacaggctgaaatatytcactttttaaaatccaattacaaa

SEQ ID NO: 590108 - DNA, 541 bp, Homo sapiens
cactgtgcacttgcaccctagaacttaaagataaaaaaaaatacarccacatttcattgtgtgaaattattcagaacttcaaaacaaatatttgtttccacagttctactggtgctttgcaagaggcaccaggagcctgtctgtttggccagtttttcttttttctttttttttttaaactagcctgccaaaattgtaagaaccacgacagtgagcccaagacacatgaggctaatgtgcttaagtgctgctataataaaaattctgttctcaaatagcacccccttttattctaatgaagaacactttcaaaattaagcacaacaaaacttttattcctattattgttctgagcattggaagtcttcattgaagtcaagtgaccccaaagaagtagaaagttcacaagcatatgaatgtgaatggaaaagcagaggatagacttggatatttggggcaagtttttaccctcagctttatgcaaatgttagaaataacaagagcatatagcactaattccagtcaaaatagttgaaccaac

SEQ ID NO: 590109 - DNA, 577 bp, Homo sapiens
acctagtttgtgctatctatattatggcacccctagcaaatcaatacaaatcgaatcaagaaaaatgagagaaaaacacaaatgcaaaattagactaagggggaaaaagtaaatatactttttctacagtacacgctatatttctgtgttaataaatttggtgattaaaaattgataacytctgtaaaaatatttagaaataggcaaaattaaaagacaaatagttactacagatctttaaaataatcaaaatacttcctgtttaagaggcttcagagctagattgttttaaccataaattgcattaatctctcaagaaacatgtaattccgtttataaaaaaatcagctgccaatcaagtaattactaggtttattgtataacattgatactaaaatctgttaatatatttattaagtactcctataaatatgcatgtaaaactcaaccttcacaaaaaacatatagaatttatgtgggaaaaatatctataaattttttgaatgatacgggagaattgtattactccattttcacactactgacaaagacatacccgacactgggaagaaaaaga

SEQ ID NO: 590110 - DNA, 540 bp, Homo sapiens
tttcctttggtatcctcccacatacaccaaaatttatagatggtcagtccctgatataaaatggtatatatttgtctataatccatacacattctcccgtatactttaagtcatcttacttataatatctaatataatagaaatgttatataagtagttgtcttactatattgtttggaaataaggacaaggaaaaaattctgtacatgttcaggcacattattttttgaatattkctacccaagattgagtgaatccatggatgtgattgtattcctcagggttctccagagacacagaatcatgagagatatacacacacatgcacacacacatacacacatgttaagtgattatacaattgtgttaaatgacatagagacacaaaagagagtgtactgtacaattcgtagtttaaaatcagacacaagaaatctatggtgatagaaatcagaaagcccttgcctctagggcatgggaagtgactggaaagggaactgatatggttttgctgtgtccctacccaaatctcagcttgaa

SEQ ID NO: 590111 - DNA, 609 bp, Homo sapiens
atggtcagtccctgatataaaatggtatatatttgtctataatccatacacattctcccgtatactttaagtcatcttacttataatatctaatataatagaaatgttatataagtagttgtcttactatattgtttggaaataaggacaaggaaaaaattctgtacatgttcaggcacattattttttgaatatttctacccaagattgagtgaatccatggatgtgattgtattcctcagggttctccagagacacagaatcatgagagatatacacacacatgcacacacacatacacacatgttaagtgattatacaattgtgttaaatgacatagagacacaaaagagagtgtactgtacaattcgtagtttaaaatcagacacaagaaatctatggtgatagaaatcagaaagcccttgcctctagggcatgggaagtgactggaaagggaactgatatggttttgctgtgtccctacccaaatctcascttgaattgtaactggtacaattctcatgtgtcatgggaggaacccagtaggaggtaattgaatcatgggggcaggtctttcgtgtgctgttctcatgatggtgaataagtctc

SEQ ID NO: 590112 - DNA, 553 bp, Homo sapiens
gcatcatctattttactaatgatgtttatttgagagaaggttgttttagtggacaagaccaggacaattttaggaggctatctatatgggaatataatggtttctttgaaagttcctagtttttatttcaccattaggattattgccaaatgatgtttgctgcataaattagagaagaaggagagcagagataattgtgtaatacctactagcaatggaaatttttccattatttgttcttctggttgctgatgcaggaaaagctaaaagggatataggaaggggaaaataaaacctgaaatgaacaaaagttactgagttccaaatgaaataaatgcattttttatattgggtcaaatgaagttaaattactttaaaattaaaagcatatatggaggcttattaaagttttagaagtacatagttcatatgatatggttgaggctatttggcataagttatgttmttgttgaaatctgaaaaattgagtactaataagaactatcacatatgaaaccagaggaagcagtaaaagatgagatactgtaagatg

SEQ ID NO: 590113 - DNA, 584 bp, Homo sapiens
atagaaggtaaaaaaaataaaaatcrccaagtgcatatttcagttttataaaatgataacttaaggtgtaaaaaatactcaataatatagtcctgaatttccaatacttggaaattttatttccttttatcagtgtacataagcttttgcaggctactgtcattaatgtgcactaaaattgaggatacatgatcttgttctgtttttatcttcatggtttatgaaataatattaaaagcttagaatctctgccactaccatttataaactcttcattgagcatatattgagttttcttaatgtgcttgatgacctttaatatcctgactatatattaacgggttctctggtccttcaatgaaaaattgcaagggctgtgagagggcacataacaaacaaaattattatgtccttttagtttggttattttaaacatctgaaatcattattgttattaattcaattctaaaagaaggacttgaacatctttaagagcctttctatctcaaaaatgtgattctgcagttcaatcactttaaattattttcttttggaggaaagcagaaacaggaatctcacaacac

SEQ ID NO: 590114 - DNA, 607 bp, Homo sapiens
caagggtattgattggggaagtgataagtgtccatgaaatcttcacaatttatgttcagagattgcagtaaagacaggtataagaaattataaaagtattaatttggggaactaataaatttccatgaaatcttcacaatttatgttcttctgccatggyttcagctggtccccccgttcagggtccctgacttcccacaacaatgtatttttagtgaattgaatgaggcagaggtgagggagattcagaacttgtgctaatgctcttgatagtgatatatagatgtgagggaacgtggtactttcacaagtgtctgagattatgttttagaagattgtggtttctctcttgaatgttttctctccttctcctgcttgcttgatctgagggaagacagcttccatgagctaccttgtggagaagtccacatggcaagaaactgagagaaggttctggccaacaacctgtgaggaactgtggcctacagtctgacaacgtgtaaggaaatgaatcctgccaaaaaccacatgagggagcttggaataggatcctcccagttgagtcttcagataagactgtagccctaattggtggcttaactgcaac

SEQ ID NO: 590115 - DNA, 598 bp, Homo sapiens
gccatcttcttcctatgtcttcatatggttttctctctttatctctgtaaagaccctatctcaaaatagtctgacatcctgaggtactggggattaggacttcaacataatagtttctaataataatggttaatgtttagtgggcattaatgtattatctcatttatcacaatasctccatatgatacatgcaattattactttggttataagaagaagaaaactaaggcttaaagaggctaattaatatgcttgaggttatacatctaatgtagtcagttttcatgctgctggtaaagacatacctgagactgagtgacttatacaggaaaaagggtttaatggatttacagttccatgtggttggggaggcctcacaatcatggcagaaggcaaggaggaaaaagtcacatcttacatggatggcagcaggcaaagagagagttagtgcagggaaactccccattatagaaccatctgatctcgtgaaatttattcactatcactgctttcatgggctagcattaagcgtctgtgtctcttccaggtgcaaagtacaagctgccagtggatcgctatcattctgatgtctggagga

SEQ ID NO: 590116 - DNA, 597 bp, Homo sapiens
gtcctgcctacaggacccactggggctgcagcttttcctctgcagttctgcctggtagaggtctgaagccartggctctgtgcagtgtcaccctcatggctccattgagtgttggtccatgtcactctcatggctccactgagtgatggtcccaccccttgaaattgaggtagcaacagccctatccctacacctatttactctggttctgtggtgggagtggcaggcttgatagcctctgcatcaccttctaggtccttctttccttgtcttaaacaatagcatgttcagagataaatagttgtatggtatgttcctataaagtctaagaagttcaacagtctttcctcatttgggcccattttccctgcttaattatgtcccaggtagcagtgtttctgctaccataatcccatatctattcctggcttctgttgtgatggtcatttaagcctgtggttcacagccacactaatcttcttaccaaatatgccatctaccatatccttagcattatcttcctaacactctttcacatattttaaaatataaaaagcctgatgagaattttctaaatctttaagttctgactccttt

SEQ ID NO: 590117 - DNA, 612 bp, Homo sapiens
agtgcagtggcatgatctcagctcactgcaagttctccctcccgggttcaygccattctcctgcctcagcctcccgagtagctgggactacagacccccaccaccacgcctggctaattttttttttttttaatgtttagtagagatggggtttcactgtgttagccaggatggtctcgatctcctgacctggtgatccacccacctcggcctcccaaagtgctaggattacaggcgtgacgaccacgcccggcctacactcctgtcttaactttttaattttagtgaacttggtagggaggaatcacttgcaaattagttattttaatctgcatatccctggctattatggagcctaaacgtcttttcatatagctactgaccattccgatgttctcttctgacaattatgctcatgacttgtactcatttttttattgttttgtttcccccattgatatgcgagcattttgaatatcttgtgaacattaattgttaattacaggtgtgacaactacctcctccagatttgtaaatcatggccaaggtacaactgtggaatgcacagccctagaggcacccttcacatcctggatgtttgaatctttatca

SEQ ID NO: 590118 - DNA, 612 bp, Homo sapiens
agtgcagtggcatgatctcagctcactgcaagttctccctcccgggttcacgccattctcctgcctcagcctcccgagtagctgggactacagrcccccaccaccacgcctggctaattttttttttttttaatgtttagtagagatggggtttcactgtgttagccaggatggtctcgatctcctgacctggtgatccacccacctcggcctcccaaagtgctaggattacaggcgtgacgaccacgcccggcctacactcctgtcttaactttttaattttagtgaacttggtagggaggaatcacttgcaaattagttattttaatctgcatatccctggctattatggagcctaaacgtcttttcatatagctactgaccattccgatgttctcttctgacaattatgctcatgacttgtactcatttttttattgttttgtttcccccattgatatgcgagcattttgaatatcttgtgaacattaattgttaattacaggtgtgacaactacctcctccagatttgtaaatcatggccaaggtacaactgtggaatgcacagccctagaggcacccttcacatcctggatgtttgaatctttatca

SEQ ID NO: 590119 - DNA, 612 bp, Homo sapiens
agtgcagtggcatgatctcagctcactgcaagttctccctcccgggttcacgccattctcctgcctcagcctcccgagtagctgggactacagacccccaccaccacgcctggctaattttttttttttttaatgtttagtagagatggggtttcactgtgttagccaggatggtctcgatctcctgacctggtgatccacccacctcggcctcccaaagtgctaggattacaggcgtgacgaccacgcccggcctacactcctgtcttractttttaattttagtgaacttggtagggaggaatcacttgcaaattagttattttaatctgcatatccctggctattatggagcctaaacgtcttttcatatagctactgaccattccgatgttctcttctgacaattatgctcatgacttgtactcatttttttattgttttgtttcccccattgatatgcgagcattttgaatatcttgtgaacattaattgttaattacaggtgtgacaactacctcctccagatttgtaaatcatggccaaggtacaactgtggaatgcacagccctagaggcacccttcacatcctggatgtttgaatctttatca

SEQ ID NO: 590120 - DNA, 587 bp, Homo sapiens
tcctcttccttggcctacttgatgtgaagacaayggggatgaagacctttttgatgatccacttccacttaacagaaagtgtgttttcttatccttaggatttccttaacattttcttttctctaccttactttattggaagaatattgtatataacgtatgtaacttacaaaacatcttaatcgccagtttatgtaactggtaaggcttccggtcactaacaggctgtcagtaaaacttttgaggagtcaaaagttgtacttggatttttcactgtgtgagggtcagtacctctaacccctgtgttgttcaaaggtcaactatatatgattcttctggacagtgaaaatcactaaaactcgagtgaaaagaaaggcaattaactgacaggtaaagtaatcataaatgtgagtgagtagctaaaatccagaacatgtgtagaattactacccagttcccactgtacccatcttcacaggatataaggaaacacagagagagtaaaataaatagggatcgggtgctgtggctcacgtctgtaatcccagcactttgggaggcagagggggaaggatcacttgagccca

SEQ ID NO: 590121 - DNA, 503 bp, Homo sapiens
cgaactcctgacctcaagtgatccacccgcctccgcctcccaaagtgctgggattacaggcatgagccaccactcccggccccacttagcaaagtttctaagtaaggaaaactagagaatccgcgaagaagccactgccttcaaggaagggtgtgggatccatagagtagaaatgtggcaggggatagtatgagattaaaagccaagatgataaaaatagcaacaagcatttctattctccttgactttaaaaaacccttccaagtacatctgccattctggctgttaacatctatctgaaaggctgtcttggggaagaaaggttagcgtcttctctctgcccacagtgcaaaaccagaatgagcaggtaaatgctccagcacggcagatcatggcttagacagcagggaagcctgcctgcaacagggctgttcagaggaaaaaggtgcyggctgccttgctcacccctgcttcacttgttccttcactctgtcagtaaagtc

SEQ ID NO: 590122 - DNA, 503 bp, Homo sapiens
cgaactcctgacctcaagtgatccacccgcctccgcctcccaaagtgctgggattacaggcatgagccaccactcccggccccacttagcaaagtttctaagtaaggaaaactagagaatccgcgaagaagccactgccttcaaggaagggtgtgggatccatagagtagaaatgtggcaggggatagtatgagattaaaagccaagatgataaaaatagcaacaagcatttctattctccttgactttaaaaaacccttccaagtacatctgccattctggctgttaacatctatctgaaaggctgtcttggggaagaaaggttagcgtcttctctctgcccacagtgcaaaaccagaatgagcrggtaaatgctccagcacggcagatcatggcttagacagcagggaagcctgcctgcaacagggctgttcagaggaaaaaggtgccggctgccttgctcacccctgcttcacttgttccttcactctgtcagtaaagtc

SEQ ID NO: 590123 - DNA, 508 bp, Homo sapiens
tgactttactgacagagtgaaggaacaagtgaagcaggggtgagcaaggcagccggcacctttttcctctgaacagccctgttgcaggcaggcttccctgctgtctaagccatgatctgccgtgctggagcatttacctgctcattctggttttgcactgtgggcagagagaagacgctaacctttcttccccaagacagcctttcagatagatgttaacagccagaatggcagatgtacttggaagggttttttaaagtcaaggagaatagaaatgcttgttgctatttttatcatcttggcttttaatctcatactatcccctgccacatttctactctatggatcccacacccttccttgaaggcagtggcttcttcrcggattctctagttttccttacttagaaactttgctaagtggggccgggagtggtggctcatgcctgtaatcccagcactttgggaggcggaggcgggtggatcacttgaggtcaggagttcgagat

SEQ ID NO: 590124 - DNA, 503 bp, Homo sapiens
cgaactcctgacctcaagtgatccacccgcctccgcctcccaaagtgctgggattacaggcatgagccaccactcccggccccacttagcaaagtttctaagtaaggaaaactagagaatcygcgaagaagccactgccttcaaggaagggtgtgggatccatagagtagaaatgtggcaggggatagtatgagattaaaagccaagatgataaaaatagcaacaagcatttctattctccttgactttaaaaaacccttccaagtacatctgccattctggctgttaacatctatctgaaaggctgtcttggggaagaaaggttagcgtcttctctctgcccacagtgcaaaaccagaatgagcaggtaaatgctccagcacggcagatcatggcttagacagcagggaagcctgcctgcaacagggctgttcagaggaaaaaggtgccggctgccttgctcacccctgcttcacttgttccttcactctgtcagtaaagtc

SEQ ID NO: 590125 - DNA, 553 bp, Homo sapiens
catgcataaagtaggattgcaaatgtgacatttccagtgaaatttaaaaaaaaaaaaaaaaaaaagaaaaagaggtccattaaataacataacttaaaaagctaagaaactaactgcaagtcccacaaagatattggccaatgactctctatgattttaagaaatgctgataaagaatgtcttaatgcagtgaaatataacaggaagtacatgtaatctcttacctttagtgtggcaagtaggaaataattagttcaagtcaagaaagaataccaagaaatgttatagtagccagtacaatggtggtctaacagctagtaaaacagtcctgatatgatgagagttttttcaaaaggagttcgcrgagtcaccctgtaatgtaacaataattcctatcattgtgtacaaaaaccctgacatttccttcccatgactggcaagtaattatatgaagaataaattacttctttcatgaaaaagaaaatcaacactagtgtattttcttcagccactaaaattctgcaggaacacagatatagtaggaaactcaatc

SEQ ID NO: 590126 - DNA, 435 bp, Homo sapiens
tacaggtgtgagccgccatacctggtctgcacttgaagcttttgaactgtttactgcttgatgtccagaaatggccacattctcagtattggtgctttcgctattgtcactttgccacctcctcttcctcttggtcatcttggggacttgaacacaggacagaggagccaaggctgtcttcctggttcacacgctctccttgtcagggggcagtaggctgtgtatttgagttgctaaccrctaagaaggaatacagcaatgacgggagggggtccctgaagacttagctaacacagtgaagctggcagggcgctgtggttcatgcctataatcccggcactttgggaggccgaggtgagcagatcacttgaggtcaggaattcgagaccaggctggccaacatagtaaaaccctgtctctagtaaaaatatgaaa

SEQ ID NO: 590127 - DNA, 616 bp, Homo sapiens
tggtggctcatgcctataatcccactgctttgggaagccaaggagggaagattgctcaaggccagkagtttgagaccagcctgggcaacatagcgagatcctatctctagaaaaaatttaaaaattggcaggacatggtggcacacacctgtggtcccagctactcgaaagactgaggtgggaagatcaattgagcccaggaatacgaggctgtagtgagctatggtcacaccactacactctagtctgggtgccagagtgagaccctatctctgaaaaaaaaaaaaaaagagagagtagaaatgggtaaatagaggtagataaatgtgataaggggttaatgtggtgagctgagtagaatccatgaggcttaaagaatgtttgaaaccatctggaaagttgatttcttaaaaccatatttaattttacatgtaagttacattcactagtatatacacaaaagagaattatacagttgcaaaaaagggaaaacctctatgaactgatttggagtgataaccaagatatactgttaagtgaaaaaaaacaaaatacaaaaaaaaagtatatgtagataaaatccaaccccttcacaataaaaacattcaacaaactt

SEQ ID NO: 590128 - DNA, 616 bp, Homo sapiens
tggtggctcatgcctataatcccactgctttgggaagccaaggagggaagattgctcaaggccaggagtttgagaccagcctgggcaacatagcgagatcctatctctagaaaaaatttaaaaattggcaggacatggtggcacacacctgtggtcccagctactcgaaagactgaggtgggaagatcaattgagcccaggaatacraggctgtagtgagctatggtcacaccactacactctagtctgggtgccagagtgagaccctatctctgaaaaaaaaaaaaaaagagagagtagaaatgggtaaatagaggtagataaatgtgataaggggttaatgtggtgagctgagtagaatccatgaggcttaaagaatgtttgaaaccatctggaaagttgatttcttaaaaccatatttaattttacatgtaagttacattcactagtatatacacaaaagagaattatacagttgcaaaaaagggaaaacctctatgaactgatttggagtgataaccaagatatactgttaagtgaaaaaaaacaaaatacaaaaaaaaagtatatgtagataaaatccaaccccttcacaataaaaacattcaacaaactt

SEQ ID NO: 590129 - DNA, 407 bp, Homo sapiens
tattaccagtggaaaaccagggatcatctcctgccatctgccttgctcctgatacmcctgcacagagctccctggtaacctggactgggtccttcccagcctgaaatgcagcatgagcactgacccccgcccaactgccctggaactgcgcctgagtgcagaagggcagagagaggaaccgagaggccccacctggcccagggaggcaggctctgctcagcttggcccttctgctgcctgggcaaatggtagaagtcagggaagggcagccctcaagtctgggcctgacctcataagaagggaatgtggccccagaaactgacaatctaacccatcagactcacaacccacttctctctctctctctctctggggggtgtgtgtgtgtgtgtgtgtgtgtgtgtgtg

SEQ ID NO: 590130 - DNA, 407 bp, Homo sapiens
tattaccagtggaaaaccagggatcatctcctgccatctgccttgctcctgatacacctgcacagagctccctggtaacctggactgggtccttcccagcctgaaatgcagcatgagcactgacccccgcccaactgccctggaactgygcctgagtgcagaagggcagagagaggaaccgagaggccccacctggcccagggaggcaggctctgctcagcttggcccttctgctgcctgggcaaatggtagaagtcagggaagggcagccctcaagtctgggcctgacctcataagaagggaatgtggccccagaaactgacaatctaacccatcagactcacaacccacttctctctctctctctctctggggggtgtgtgtgtgtgtgtgtgtgtgtgtgtgtg

SEQ ID NO: 590131 - DNA, 407 bp, Homo sapiens
tattaccagtggaaaaccagggatcatctcctgccatctgccttgctcctgatacacctgcacagagctccctggtaacctggactgggtccttcccagcctgaaatgcagcatgagcactgacccccgcccaactgccctggaactgcgcctgagtgcagaagggcagagagaggaaccgagaggccccacctggcccagggaggcaggctctgctcagctkggcccttctgctgcctgggcaaatggtagaagtcagggaagggcagccctcaagtctgggcctgacctcataagaagggaatgtggccccagaaactgacaatctaacccatcagactcacaacccacttctctctctctctctctctggggggtgtgtgtgtgtgtgtgtgtgtgtgtgtgtg

SEQ ID NO: 590132 - DNA, 582 bp, Homo sapiens
ctggccccaacagtgaagccatagtgtattttcacacacccccaggagaaactccccataaacagctgctgccactgtgggctgccacagcctggggctgaagaccaagtgaagtacatgctccccagcaccctgcacatatctgctaccattaaaagcaaccccgccctctccaatagcagggctgcagtgcasgaactgctgccttcacccaagcattctgccttgggcctggggttaccctgccactgcctaacacagccaatgcctgcaagcaccaccagggtccctgaggacagatacacctgacccagatctaccccaccagtcctcaagttttccatccaggggcctggaaaccacccagcccagtccaccactattggtacctgaacactctacccagggtcctgagatgaagcacatccaaatgccactacccccacagcagacacccgctcacatgttccacttgcaattagaagaaagaagttctcatgtctgagagcagagtagggtgactatagtgaacaacaatgtattatatatttcaaaattgctagaagataagacttgaaatgc

SEQ ID NO: 590133 - DNA, 578 bp, Homo sapiens
ttaaatcaacagtttgaagcattcttatcaaatttaaagatgaaacaaaactgagaaaaacagctaacatgttggctgacaggctaaggagccataaaaatctcaacaaccttgaaggataggctgcaaccagcatgatacaattaatagggataaatttagactctaacttttgtgtttaaaggatcagctgaaaccagaccaagggagactttgtttaatagtttataagagcaagagaaaggctcaggagtgttagctgactgtcagcttaacataagccaactgggttaaggctgccaaaatgctaatgtgacctgaggtcatgtgatggaaatagagagtccagaaggaacgagataatcatccaaatgtccttgtgctggtcagayaacatcaaggaagttgtgctcagttcttggcctgcactttacaaatgacagatctacaaaaaggttaataagagggacaaaattctggaaatcatgtcatctgaacgatggtcaaagtactagagatatttagtctggaaaagaggagaccagtctggtatagatttggagtggaaagtgggtggt

SEQ ID NO: 590134 - DNA, 483 bp, Homo sapiens
agccaggagccagaacccagatatcctgactcttggtgatggttcttgcattaactccttgttaagatggaaacaaaacaaattttcactcttttgggggggactatttaaaccaattcttttagaagtaggccagtaatgtgggtaagaacaacyctttttttttttttttttttttttttttttggtcttttgccttttactcattgctgagagacacttcttctctcaaatctttaagttcagaaattctctgagattttggtttaagtaggaaaaaatagttgaaatactactgattcactattgtgtcttccccttcctcctcatatttctctatgtcctctcccttacatcctcattttttttccttttgttttgctggcaagctgcagaacctcactgtgttaaataccttcttcctaaattatgacttagctgcccctttcatggagaagagaaggaaatagcacgtgtgtttca

SEQ ID NO: 590135 - DNA, 483 bp, Homo sapiens
agccaggagccagaacccagatatcctgactcttggtgatggttcttgcattaactccttgttaagatggaaacaaaacaaattttcactcttttgggggggactatttaaaccaattcttttagaagtaggccagtaatgtgggtaagaacaaccctttttttttttttttttttttttttttttggkcttttgccttttactcattgctgagagacacttcttctctcaaatctttaagttcagaaattctctgagattttggtttaagtaggaaaaaatagttgaaatactactgattcactattgtgtcttccccttcctcctcatatttctctatgtcctctcccttacatcctcattttttttccttttgttttgctggcaagctgcagaacctcactgtgttaaataccttcttcctaaattatgacttagctgcccctttcatggagaagagaaggaaatagcacgtgtgtttca

SEQ ID NO: 590136 - DNA, 455 bp, Homo sapiens
gatcatccgagtctttctggtttcctggactcttctggtccactggctgtgaattattcaagggcaaagagaccatgtcattcatttgtaaaccgtgcgccttgaccagtgctgaaaacacagtcaaatgtccactaagcctggctggtggttcttatcccatagttcctctgaattaattcattatcatttgaggtactgtgtcaaatgcttaacctccagtgctaatgtgtatctccagcccttcgtttggaattctcttctagtataaaagcgatcaatttttttcctggcgtggtggctctttataaatgcttgctgtttattgtgtctgctcccattattctctctccttccacatttaattcactcttatactttattttgttttgttaratgctattgccaaatcacaaaatacatacagatagaatatgagtgtaacactttcccac

SEQ ID NO: 590137 - DNA, 555 bp, Homo sapiens
agcaatataggatccaagagaagagaaaaaagaatttgggaaccaaaataggaataaatacatggaacaacaacaacaacaacaaaaaataagcgaggagaataaaaaattaggagttagagatgggtttttgtatcacttctttcaccatccatgtgcccttagactactctgtgaattatatatagtcatacttaatcyactcatatcttgcgattgtggtaaggataatagatatagaaatatactgaaaaattaatgatggaatataaatataagataatactctttttttccctttcccatctcaacccacacactctaaagcaggatcaattactcctgttgctgccttcctaccacataatattctttttattttttgtagaaacagggtcttgctatgttgttccaggctggtcttgaaatcctggcctcaaataatcctcctaccttggcctcccaaagtgctgggattacagatgtgagccaccgtgcccaaccaatgatattcttaattattatttgttagctatccttttttctttacctttc

SEQ ID NO: 590138 - DNA, 615 bp, Homo sapiens
ggaactgccgctctgaggttttggtcttcctgtccagctattaaggytctctgcttaactgcagtggtagaaaagtcacttatctccatgcttgtgagaagagtcacttccagcttgaattcagggtagaaactacacccaatgatgacacctcaggtagaatacaattaagcatttcttgtttgttgtggccacattttaatcatttcatgctcagtatctgagcattggttccagaaaaccaatgtacaagccagctttttctcattttctaccctacggtacatgaactgccactctagctgccacccagcattgagagaactggtttcatgatgagttttccccacagtacttcttttcttggtgttgaaagtatttaaagaaccaggcagtcaattacagactcctacctagaatgctttaattggagagcactgcacagaaaaatataacacaacctgtaaatgtcaagctatatttttaaatacattttgacattaaaatcatgcagatttatacaatgcttgataaaaagggacaagggacagcagttcatttttattttgctatagttaagaaggccttggtttcacacagggaggaaaaaacagg

SEQ ID NO: 590139 - DNA, 604 bp, Homo sapiens
taagtatttttaaatactcgtataaaaaacatcaaatttaataagcttctgatcttcacaacaggggaatcaaagattttataaattcctaataccttgatctcaagtatgttttgattttgagaattccaccaagtcctatttttactatacagatgaaagatgtttcctgatggagaaatatgtaactaagaattttaggctgagagtggtagatcatgcctgtaatcccagcacttagggaggctgaggcaggagaatcgttgagttcaggagttcaagatcagcctgggcaacatggtgaacctcatctctacgaaaaatgaaaaaattagccaggtgtagtggcatgtccctatagtcccaactactcaggaagctgaggcaggaggctccattgagccmcggagttccagaccatcttggggaacatggcaaaactctgtctctacaaaaaacacaaaaattagctgggtgtggtggagtacatctgcagtcccagccactcaggaggctgagtggtaggattgctttaagcctgggaggtcgaggctgcagtgagctgagattgcaccactgcactccagcctgagcaacagagtga

SEQ ID NO: 590140 - DNA, 604 bp, Homo sapiens
taagtatttttaaatactcgtataaaaaacatcaaatttaataagcttctgatcttcacaacaggggaatcaaagattttataaattcctaataccttgatctcaagtatgttttgattttgagaattccaccaagtcctatttttactatacagatgaaagatgtttcctgatggagaaatatgtaactaagaattttaggctgagagtggtagatcatgcctgtaatcccagcacttagggaggctgaggcaggagaatcgttgagttcaggagttcaagatcagcctgggcaacatggtgaacctcatctctacgaaaaatgaaaaaattagccaggtgtagtggcatgtccctatagtcccaactactcaggaagctgaggcaggaggctccattgagccamggagttccagaccatcttggggaacatggcaaaactctgtctctacaaaaaacacaaaaattagctgggtgtggtggagtacatctgcagtcccagccactcaggaggctgagtggtaggattgctttaagcctgggaggtcgaggctgcagtgagctgagattgcaccactgcactccagcctgagcaacagagtga

SEQ ID NO: 590141 - DNA, 509 bp, Homo sapiens
aaccttggaaagcgaaaccatgaataaggaaggactagtgtcccgaaaaactcactatccaggaggatagtggacagctcagggagtggtcctcacatttcatgttgcggctcctcataggtacagggtgtagtgcarctggtatagtcatttggtttgctcatttataattatagggtagaaaacaacgcttgtattgtgtttgagcctggagaatgggcctctatttgggaatgtgaggtggggagacagatacccagaaaacgtaattaggcttcctaaatataagatagactagaagagtctgaatgtgggctctttgtgccctggtgtgagtagctgcagaacaactcctagcaatgatgctcatgatcttgaagtcaaaattctgaggaaagtgaaattttgtactcaaaaggttccaagcctatggggtaattgtgcattcagtgatcctctcatcctatctctaaatgcaaagtcggtcttcgtgtggacatgatgctaat

SEQ ID NO: 590142 - DNA, 564 bp, Homo sapiens
aagtagtgagttatgttctaccaccttgagggcagagtatctatataaattatttggaattcttctacagagatatatttattctcctctaattatttattcaatcatttatgtatagcaatatggactcatggatatttattttatactttgggttatacatcaatacttctttatttattttgttgcccaaattattccaggtttggccattgggaactcattcasttggctcctgtgtctctttgacaaacacatttttgtggttaaaaactttttttttgagaactttttacttgtgacaccacaagatgctccaggctcatcttctgtgtttcctgcctcagtcttagaatcagccatttctccaaagagctctaattccctttattggagaataatattttaaaccaagatctgggcactatatgctgccagcagggttttaatggtttaagggaagatgtatagtgaagcctcataactttattcaggagtgaaataatctgcttttccttaaacaaatataattttttttcttttaaaatgttagtgtagactgca

SEQ ID NO: 590143 - DNA, 555 bp, Homo sapiens
atcagatctcatgagacttattcactatcatgacaacagcacagaaaagaccaaccctcatgattcaaatacctcccactgggtccctcccacaacatgtgagaattcaagatgagatttgggtggggacacagccaaaccatatcagggcatcaccttaaatgagaaaagagcaaaagtaagtccatagccactagcatatcaatttgatattaacatgcaagatttagcagcacaaacagctaatcctgttcttaatcctccactcataatatttctttcatctagatcttcaacctatcagtcccctgtagctaaacctccatagtgaaatacactcaatattagatatggcttcattttgtattatttcttgtaaatcacttgtcaaagatttgctagaaaacctagtagaaaataaaaattatatccaaacaatttattctagagaatgttcaggccagaaaaaaaggtaaaatacatttatcaaagtaactcacaaatatggcyactgatttttaacaaaagcacaaaattaatgagtgttttcaacaa

SEQ ID NO: 590144 - DNA, 577 bp, Homo sapiens
ttactatgtatccacacttgactgaccttgaattgaatgtattgatacagaaactaagcatgttgcaatgtcttcttaatgcttgatgaactccatcaggtgtaatcacttcttggcagattagaaacgtcttactcttttctcggctcaacacatcttccaggcattctttaaaacatgtamttgtgctgtatgcatatctattgaactctgtctaatattctgaggtgcctgtgcctatggaacaatagtacaatactctttggagctgcatgcctgaccaaccttttaagagaaaattctttatagaagctcagttggtacacgggcttaggttggggattctatcagaaacttctattagacttttaaatgtttgccactttgggactactacactcaggcctgcctttggcaatagagagcaagagtactggcatcactttcccgtaaaacacctacaagcccatattttgaaacatttttaaacttataataataactgaatacatttgtagtttgtaacttataataattggatacatttgtagtttgtaacttataataataattggat

SEQ ID NO: 590145 - DNA, 622 bp, Homo sapiens
atgtattaaattaaacatattatatattaaattaaatattatacatatatcaaattattatacatatatcaaattaaaccatcttgataatatctccagagtaaaatatagtcttttttctgggttgttttccaaatatggtttgttgatgttacatttaaaaaattaaggagtcgttcaacagcaaatccttctctaaaatgcatacagtaataaaatattaagaagtcaatagtgaatgaaagaggtaatataggtgcaaataataattagaacagatagagattctttgagtacattagcaaatatttctgaaaatcaagtataaaatagatcctttacattttgaacttttattttcaaaaattgctcagaaacaacagaaaaagttggaaaaagagaaaaaggaagaaaagtagaaagtggcaagctttcataaagtagttcgttctaaattctaaagaaacgttaaaaattttctactttaacttttgttattttatgtcacaggttatttttcttgacttactgaaatgtataagaccaataagtgttgaaatytcacatcggtttgtcaactaggcaatgtaggctggacaaattatctttgaactagaattac

SEQ ID NO: 590146 - DNA, 547 bp, Homo sapiens
aaacttcactaatgagttatgcctttgaatttcatgtgttattttttctcactcttacaacaagataactgggctatttggtatttcctgttgctatctatataatttactcaccatactggatcagatgatcaaggtctgcccactatataaggtaaaggaggacagttgtcatagccaatgactagttagccagtaaggatgtactgccgtctctgccaggtgaaggcaaaccacttctacttgtattgactaattgagttcggggaaaagtgtattcctagtaartattagcataccaggtgctaggggttgtgttggtctcttcaataaatacattacttttaaatcacagcttgactaaatttataacaactcacagctattcttttttttttttttttttttttgagacggagtctcactctttcacccaggctggagtacaatggcacagtcttggctcactgcaacctctgtctcccaggttcaagtgattcttctgtctcagcctcccaagtagatgggattacaggcatgtgccact

SEQ ID NO: 590147 - DNA, 630 bp, Homo sapiens
tttttatagtctcaacatacttcccaccaagtatgtgctaattgcaaaggaaaataaataactttaatgaataactttaactttagtatattacatactagacaatgtttgtgcaatagtttatgaacacaaagtactattattatggcagcactaaatactccatctgcctgtggagtagactggtagatattattttaatcaagtgatccaactacacattatcagtaatgggacatatcaaagttgggcacctcctcttatgatgcagtgagaaaagaaagcaaagtgtctctttttcacggtgtttccaccatgtttttagtggcatttctaccagcgatgcgtatcttgtatataatcatgaggaaacatcaaacaaatccaaattaatgggcattccacaggcattggcctgtccttttcaaagttgtcaagataatgaaggtcaaggagaaaatgaggcacttttccagagtgaaggaaatgagaaggctgcggtactcccttgacatgtggggattacaatttgagatgagattcgggtggggacacagagccagaccacaccaacatttaagtgcaacagggatttccgracttgatacgtttgctatgaagaataatatt

SEQ ID NO: 590148 - DNA, 587 bp, Homo sapiens
attctttgcattgtgcttataacttttagaataaaaactataaaaattgtgttaatgtataaattatttctagtaactgataatcagtcttttctggagaaccaactatactgattctctgtgtaaactacttttactaagtattagcaataagaccttttgattttctttctttttctcttggcatatttggtgcatgtttttaattgtaaaaaatcaaatatatgtttacttcataaatattgtatttttttaaacttctgagtatgagtatagaatttttatgctaagaaaaataattgcgttttggtttggtttcagtgcttttttwaaaaaaaatactagtagtaatagcaaaaattaatttctttaacaatctcttttcctagatccacatttggttttcggatgtttgtgaatggataaaagtagtttggtccctgttgcctcagggtgttttaaaaccgaaatggaatatatcaaagcagtcaaccacaaacacatacacctgtgccctcagaagaggcacatggagctaagtgatgaccctacgccatgcaggtacaaacctgacctcccagctcctt

SEQ ID NO: 590149 - DNA, 608 bp, Homo sapiens
aactgtctcagcttttaatatgccaccattttgttgctactggtgagcttcagagctctttttaagaaacctgtccttggtgcctttcccatgactccgcttgtttacttcttttttcttgtcactcccatcaatccctcagatatcagcaatctcctgttgttattcccattaaggcctgtcttccatacctttctctgctaacaaaaccttcsttttcatgttcttatttcaccactgctcccagctatctcccactgtagacaagatcgttgatcgaatcaccctaagttataggctgcagctgtgtccagcaccgtgtcagccacaaagggcgaggaaaacaaggcccttgttctcagcaagtccacagggtgctgggggataggcatacaactctcattgacaattgtcttttctcttccccttaagggtccctgtcatggatttgaagacagatttgtgggccaccagccttgagttagtcatttggccaccacttctccaagtcctgtgctttcccctgcatgactgtggacccccagtcgctttgctagtagttgtggtctggaattaaggatatacaccccctcacagccattgtgata

SEQ ID NO: 590150 - DNA, 608 bp, Homo sapiens
aactgtctcagcttttaatatgccaccattttgttgctactggtgagcttcagagctctttttaagaaacctgtccttggtgcctttcccatgactccgcttgtttacttcttttttcttgtcactcccatcaatccctcagatatcagcaatctcctgttgttattcccattaaggcctgtcttccatacctttctctgctaacaaaaccttccttttcatgttcttatttcaccactgctcccagctatctcccactstagacaagatcgttgatcgaatcaccctaagttataggctgcagctgtgtccagcaccgtgtcagccacaaagggcgaggaaaacaaggcccttgttctcagcaagtccacagggtgctgggggataggcatacaactctcattgacaattgtcttttctcttccccttaagggtccctgtcatggatttgaagacagatttgtgggccaccagccttgagttagtcatttggccaccacttctccaagtcctgtgctttcccctgcatgactgtggacccccagtcgctttgctagtagttgtggtctggaattaaggatatacaccccctcacagccattgtgata

SEQ ID NO: 590151 - DNA, 571 bp, Homo sapiens
tcttccatacctttctctgctaacaaaaccttccttttcatgttcttatttcaccactgctcccagctatctcccactgtagacaagatcgttgatcgaatcaccctaagttataggctgcagctgtgtccagcaccgtgtcagccacaaagggygaggaaaacaaggcccttgttctcagcaagtccacagggtgctgggggataggcatacaactctcattgacaattgtcttttctcttccccttaagggtccctgtcatggatttgaagacagatttgtgggccaccagccttgagttagtcatttggccaccacttctccaagtcctgtgctttcccctgcatgactgtggacccccagtcgctttgctagtagttgtggtctggaattaaggatatacaccccctcacagccattgtgatagcactgcatgaaactggggtagggcgggcatgtgtgactatacggcaggtgtcacttctcctagtgaaccccagcgtcctgtctcagggtcaccatcattcacagttatgtaaagaagccagaggaattgcagtgcacttaagt

SEQ ID NO: 590152 - DNA, 608 bp, Homo sapiens
aactgtctcagcttttaatatgccaccattttgttgctactggtgagcttcagagctctttttaagaaacctgtccttggtgcctttcccatgactccgcttgtttacttcttttttcttgtcactcccatcaatccctcagatatcagcaatctcctgttgttattcccattaaggcctgtcttccatacctttctctgctaacaaaaccttccttttcatgttcttatttcaccactgctcccagctatctcccactgtagacaagatcgttgatcgaatcaccctaagttataggctgcagctgtgtccagcaccgtgtcagccacaaagggcgaggaaaacaaggcccttgttctcagcaagtccacagggtgctgggggataggcatacaactctcattgacaattgtcttttctmttccccttaagggtccctgtcatggatttgaagacagatttgtgggccaccagccttgagttagtcatttggccaccacttctccaagtcctgtgctttcccctgcatgactgtggacccccagtcgctttgctagtagttgtggtctggaattaaggatatacaccccctcacagccattgtgata

SEQ ID NO: 590153 - DNA, 533 bp, Homo sapiens
ccgtgcctggcctcacttattactcttgacagcacaattataggtacttagtagacatttagttacttarttgttagaattcaaggagattctgaggggtataattagttgaaactgcaattcagcaatgactgtatcagaagaccattttcattgaacttacttctaatgactgagatggaggagctgtaccagggttgcatcccaagtgaggtccacatcagagaatctggggcgggaccatccagccacttcccttacagggaaataggtttctctttctggtgaacttcctgacaggccctttaggctggtgcttttggtaaatccaaggaatggagtctattttggaatcctgaaatactcaaagatggctttgtctcccaggaagggcatcacaagtggcatttgagaagaagcagatgcaggcaggtcactctctgaccccccaggagcagatcataagacctcatttgagaggaagagtccttatacccagaagaaagaaacatccttatctctgaagacacagg

SEQ ID NO: 590154 - DNA, 533 bp, Homo sapiens
ccgtgcctggcctcacttattactcttgacagcacaattataggtacttagtagacatttagttacttaattgttagaattcaaggagattctgaggggtataattagttgaaactgcaattcagcaatgactgtatcagaagaccattttcawtgaacttacttctaatgactgagatggaggagctgtaccagggttgcatcccaagtgaggtccacatcagagaatctggggcgggaccatccagccacttcccttacagggaaataggtttctctttctggtgaacttcctgacaggccctttaggctggtgcttttggtaaatccaaggaatggagtctattttggaatcctgaaatactcaaagatggctttgtctcccaggaagggcatcacaagtggcatttgagaagaagcagatgcaggcaggtcactctctgaccccccaggagcagatcataagacctcatttgagaggaagagtccttatacccagaagaaagaaacatccttatctctgaagacacagg

SEQ ID NO: 590155 - DNA, 573 bp, Homo sapiens
tcatcactgatcccgacacgtgggaggaaggagaggaggacagtgaagaccatcagcaagggagagcaggttccctgccctggatccctgccctggtcccctgccctgattccctgccccatgttgtaggtctttgggctacatttctacccattggctgaacataaaaactgtcctatgaactatttggcagcaagttcacagcaaagaatattaactctgtgaggcaccttagacaatgcctggcttaacccccacttgacaaataaagacacatgttctgactcacccaccatcccaggagcaactgaccaggctgaggaactctgtccactgcctgcagcccacttggccttccactgtgaygtccaggctgaggaactgtgtctgccacctgcagcccacttggccttccactgtgatgtcctttccaggactctgagcagagatgggtttataacaagcctaaattgttattttgtctcgatctgcacatcaatttatatatttttgaaaattaaaagaaatccaatgataagaatttttctcacaagttaattaaggaaactaggt

SEQ ID NO: 590156 - DNA, 643 bp, Homo sapiens
cacttggccttccactgtgatgtcctttccaggactctgagcagagatgggtttataacaagcctaaattgttattttgtctcgatctgcacatcaatttatatatttttgaaaattaaaagaaatccaatgataagaatttttctcacaagttaattaaggaaactaggtcaatggaaatttcttaggttatgaaaatattgatgtgaatatgttatgtgagaatcatttcaaaatgagttaaaggggctgggcacagtggttcacacctgtaatcccagcactttgggaggccaaggtgggtggatcatgaggtcaagacattgagaccatcctggccaacatggtgaaaccctgtctctactaaaaatacaaaaattagccaggcatggtggcacatgcctgtagtcccagctactcaggaggctgaggcgggagaatagcttgaacctgggaggtggaggttgctgtcacgcgactgcactccagcctggtgagagagcaagagagcaagactcygtctcaaaaaaaaaaaacaaaaaaaaaaacaaaccaggagttacaggaatctaggatattttgctttctgtccctaaactttggggcttaatttggcagaaacttgggagtgggagggtgaagt

SEQ ID NO: 590157 - DNA, 558 bp, Homo sapiens
  misc_feature 81: n = A,T,C or G
cttgaatttgtggtggccacagaatgcaggcttgayttcatgcaggttctcatacatcattatggagaacatctttttgtntttacttcaatatttattttgtagtgaaaataaaagcaataccagttttctgaagggtttcttaaatcaattcctttgtgtcctatagggcaatactttgctcctagagaagtctgtgaaccattggtgtctttgatttgtctcattagaacgcccaccctcataccatatgctatccctcatgtatgctggaagataatagtctgcagagtagcctttatggtgaagccagcttccggtgctctgctactctgcaaaaatcacatctggatagagaagaaaccggtggcaagatgtctctctctcagtccatgcaatgaactgactcctactggtgggggtgagggggatggtgtcagcaatggtgagatatatgtttcaaatgtcagcagcaaaagaagagagagaaagagaggaaacaaaaacagctgctaaccccttgagtttgctttctgggacaagttaacagccacatta

SEQ ID NO: 590158 - DNA, 581 bp, Homo sapiens
tgaaacttggagaagttctggttgatttgggggctgatcattggagaagttctgggtgatttgggagctgaaccttggggaagttctggctgatttgggagctgaaccttggagaagttctggttgacttgggggctgatccttggagaagttccgggtgatttgggggctgatccttggagaagttctgactgatttgggagctgaamcttggagaagttatggttgatttgggggctgatccttggagaagttccgggtgacttgggggctgaaccttggagaagttctgactgatgtgggagctgaaccttggagaagttctggttgatttgggagctgaaccttggagaagttctggttgatttgggggctgaccattggagaagttctgggtgaattgggggctgaaccttggagaagttctggttgatttgggggctgatccttggagaagttccaggtgatttgggggctgatccttggagaagttctgactgatttgggagctgaaacttggaaaagttctggttgatttgggagctgatccttggagaagttctggttgatttgggggctga

SEQ ID NO: 590159 - DNA, 581 bp, Homo sapiens
tgaaacttggagaagttctggttgatttgggggctgatcattggagaagttctgggtgatttgggagctgaaccttggggaagttctggctgatttgggagctgaaccttggagaagttctggttgacttgggggctgatccttggagaagttccgggtgatttgggggctgatccttggagaagttctgactgatttgggagctgaaacttggagaagttmtggttgatttgggggctgatccttggagaagttccgggtgacttgggggctgaaccttggagaagttctgactgatgtgggagctgaaccttggagaagttctggttgatttgggagctgaaccttggagaagttctggttgatttgggggctgaccattggagaagttctgggtgaattgggggctgaaccttggagaagttctggttgatttgggggctgatccttggagaagttccaggtgatttgggggctgatccttggagaagttctgactgatttgggagctgaaacttggaaaagttctggttgatttgggagctgatccttggagaagttctggttgatttgggggctga

SEQ ID NO: 590160 - DNA, 581 bp, Homo sapiens
tgaaacttggagaagttctggttgatttgggggctgatcattggagaagttctgggtgatttgggagctgaaccttggggaagttctggctgatttgggagctgaaccttggagaagttctggttgacttgggggctgatccttggagaagttccgggtgatttgggggctgatccttggagaagttctgactgatttgggagctgaaacttggagaagttatggttgatttgggggctgatccttggagaagttccgggtgacttgggggctgaaccttggagaagttctgactgatgtgggagctgaaccttggagaagttctggttgatttgggagctgaaccttggagaagttctggttgatttgggggctgaccattggagaagttctgggtgaattgggggctgaaccttggagaagttctggttgatttgggggctgatccttggagaagttccaggtgatttgggggctgatccttggagaagttctgactgatttgggagctgaaacttggaraagttctggttgatttgggagctgatccttggagaagttctggttgatttgggggctga

SEQ ID NO: 590161 - DNA, 636 bp, Homo sapiens
caaacacaaaattaggtatttattagttgtaaagctttgtaatattagaaattaagattatatgtgattctaaaaaacccaactgaaaacctagaaaataaagaaaaatagctttaataaaaaaatcaattagtaaagaataatatggaatatttagtttattagtatagatcagtgtttggggctctgtgaagaagaatccatccttttctgaataaaaatgaaagttattcatatataaagttgataattttttcttttttgctccaaaacagtccctaacaatgacactgcaacattaatgaagaggaaagtcaaactaggggcagtaactactgagaaactagaacrtaaaggggtaggtaacagagttactgaagataagacttagatatgcaattaccttctagtcctataggtggcaggtgctgtggagctggcacagagtggtagacgaggaagcaggccagcatgctcagctgtgattcctccaagggctgcccgctgaggtaggcgtgcacacacatatcacccccgactgtgagagaaacaaatggaacggaaccaactgatgacagaactgagaggcacaagaaatatcttctattactttttcatcaagaacttattgaacgc

SEQ ID NO: 590162 - DNA, 591 bp, Homo sapiens
gagagggacctggttgggggtgactggatcatgggggcagatttccctcatgctgttctcatgatagtgagtgagttctcacgagatctgatggtttaaaagtgttgcacctctctgtctctctcttgctgccatacaagacatgccttgcttcccctttgccttctgccatgactgtaagtttcctgaggcctccccagccaggcagaactgtgagtcaattaaatcccttttctttagaaattacccagtctcaggtagttctttatagcagtgtgaaaatggactaatacactttcttaaactaaatcttatgttaatataccaagagataagtccattactstcacaaggaagtcagtgcaagtttctcaataaataaatatttagggttggagtttgaaattaaaactttcattttctaacacaagtcctgtttcaaagatacagactgttttacagaagacataccctacatatagtcttgaatgagattaaagggtgatgagtcacattccagataataatctataatttataccttcttatatacttctattcacttcctaaaaggtaaatttgagaaattta

SEQ ID NO: 590163 - DNA, 579 bp, Homo sapiens
acattaagttatcaaccataaaccaagggtctgaagagaacccttctgttttcctggaaaaaactgagagaggctttaattaaacacmcatctctctcctgactctataaaaggatagttaattttgaaagacaagtttataacccaagcagccccaaatattggaagaatgctgcaaaaagttagctattgcaccagacagtactctaaagaaaatcctgaaagtcaccaccttggtcttttataatcgggaccatgaggaagcccaagaaaaagggagaaaaggaacgagaaaaaggcagaggcactaatagctgccatacaggcatataaacctctcaatcccagggagcttctcattctatgaccggctgttatcagtgtgggagcactaaaagagagtctgcccccgaaatcagaagcagcccccacggccctgtccaatctgtaagggagactactggaagacaaactgcctccagaaacatacgtcccaaggttcagagccggcttctcaaatggtccagcaggactgatgggtcccagggctctcctccccagctctgacagcccaggctg

SEQ ID NO: 590164 - DNA, 579 bp, Homo sapiens
acattaagttatcaaccataaaccaagggtctgaagagaacccttctgttttcctggaaaaaactgagagaggctttaattaaacacccatctctctcctgactctataaaaggatagttaattttgaaagacaagtttataacccaagcagccccaaatattggaagaatgctgcaaaaagttagctattgcaccagacagtactctaaagaaaatcctgaaagtcaccaccttggtcttttataatcgggaccatgaggaagcccaagaaaaagggagaaaaggaacgagaaaaaggcagaggcactaatagctgccatacaggcatataaacctctcratcccagggagcttctcattctatgaccggctgttatcagtgtgggagcactaaaagagagtctgcccccgaaatcagaagcagcccccacggccctgtccaatctgtaagggagactactggaagacaaactgcctccagaaacatacgtcccaaggttcagagccggcttctcaaatggtccagcaggactgatgggtcccagggctctcctccccagctctgacagcccaggctg

SEQ ID NO: 590165 - DNA, 579 bp, Homo sapiens
acattaagttatcaaccataaaccaagggtctgaagagaacccttctgttttcctggaaaaaactgagagaggctttaattaaacacccatctctctcctgactctataaaaggatagttaattttgaaagacaagtttataacccaagcagccccaaatattggaagaatgctgcaaaaagttagctattgcaccagacagtactctaaagaaaatcctgaaagtcaccaccttggtcttttataatcgggaccatgaggaagcccaagaaaaagggagaaaaggaacgagaaaaaggcagaggcactaatagctgccatacaggcatataaacctctcaatcccagggagcttctcattctatgaccgrctgttatcagtgtgggagcactaaaagagagtctgcccccgaaatcagaagcagcccccacggccctgtccaatctgtaagggagactactggaagacaaactgcctccagaaacatacgtcccaaggttcagagccggcttctcaaatggtccagcaggactgatgggtcccagggctctcctccccagctctgacagcccaggctg

SEQ ID NO: 590166 - DNA, 298 bp, Homo sapiens
tgggcatggtggttcacgcctgtaatcccaacgctttgggaggccgaggcgggyggatcacctgaggtcgggagttcaaaaccagcctgaccaacatggagaaaccctatctctactaaaaatacaaaattagctgggagtggtgccacatgtctgtaatcccagccactcgggaggctgaggcaggagaatcgctcgaacctgggaagcagaggttgcggtgagctgatattgccccattgcactccagcctgggcaacaagggagaaactgtctctaaataaataaataaataaat

SEQ ID NO: 590167 - DNA, 298 bp, Homo sapiens
tgggcatggtggttcacgcctgtaatcccaacgctttgggaggccgaggcgggcggatcacctgaggtcgggagttcaaaaccagcctgaccaacatggagaaaccctatctctactaaaaatacaaaattagctgggagtggtgscacatgtctgtaatcccagccactcgggaggctgaggcaggagaatcgctcgaacctgggaagcagaggttgcggtgagctgatattgccccattgcactccagcctgggcaacaagggagaaactgtctctaaataaataaataaataaat

SEQ ID NO: 590168 - DNA, 298 bp, Homo sapiens
tgggcatggtggttcacgcctgtaatcccaacgctttgggaggccgaggcgggcggatcacctgaggtcgggagttcaaaaccagcctgaccaacatggagaaaccctatctctactaaaaatacaaaattagctgggagtggtgccacatgtctgtaatcccagccactcgggaggctgaggcaggagaatcgctcgaacctgggaagcagaggttgcggtgagctgatattgccccattgcactccagcctsggcaacaagggagaaactgtctctaaataaataaataaataaat

SEQ ID NO: 590169 - DNA, 298 bp, Homo sapiens
tgggcatggtggttcacgcctgtaatcccaacgctttgggaggccgaggcgggcggatcacctgaggtcgggagttcaaaaccagcctgaccaacatggagaaaccctatctctactaaaaatacaaaattagctgggagtggtgccacatgtctgtaatcccagccactcgggaggctgaggcaggagaatcgctcgaacctgggaagcagaggttgcggtgagctgatattgccccattgcactccagcctgrgcaacaagggagaaactgtctctaaataaataaataaataaat

SEQ ID NO: 590170 - DNA, 449 bp, Homo sapiens
atttcttgtaaaagaaccaaactattttcctttgtaggaaaacaacagagacagagaggaaaacaaaacaaggatcctgatgactgactgcaggaggcagagaaagccaggatccctggtcagattttaccgaaggagaggagagtccttcctcgtctacagtcctccacctcccaagccagagtccatttggagtttgtagaggtgccaagagaagaaaaatagagtccatagcaggacagcaaaaactattgtcagggtttctgaaaactgtaccatggagtctgaaaagaactataggctatggactaagaatagcaaggccagccctcagtcaagtggactttcccactgtcctaccacagagtgatcagcggctcacacaagctaatgacacatttaggaattaagagcgtcaatgcatmctagctgtctgataaaattccatc

SEQ ID NO: 590171 - DNA, 617 bp, Homo sapiens
gtattgtctaacctgcttaaaaaaaaaactatgaattatattgttttctagtttgcagagtattggctagaaattgtattgagtatttktccttttcactaaaatttatcatttacatacctgcctagccctcagtgtcacacatatcacattaatggtccaggtttgactttaggcaaaaggttggttaaaaaatctgacttaacactgggagactttcccagagtaagcagatgggataagggttcttctttctccaggcctgttgaatgcacaccagtctttaagttaactaatcatgggggtaccactctggtttatagttctagcatgaggtgaactaataggaatggttctttatcaaatgacacttagctgagtgtcagctgagacctcttggccctttatgaaatactcatatttatattgaactaaaaaaaggtttctggttagtctacccgggaatgtcaacatcaatgagtcataataaaggaagtttccttggttcataaaaaacataatacttaagcaagatgtttcattagcttttattttctttcagagcagtctcctctgttctctgaaccactaatgacctgctgcaaaactctgtacct

SEQ ID NO: 590172 - DNA, 597 bp, Homo sapiens
atcttcaatcctctgtgctatttaatcctagacctacaccaagggagcttctccctaaggaataaaacagtttggtctctttctcagtctggggctgaataggcttgagctctaacctcaaaatactacataatggctgaaaatttccaaactgagcaatcaatgaacaaaaatattcaagaagtaaatcctttccctaaagggcttattatctaaaattgttggttaaaacatagaaaaaatattctrtcacacagttagacagcattcacgttccacttctgaaaaaaaatggggatttgtttacagttctttatatattgtttaatgttctaaattttaagatctcaaaagaattataactaaagtatgaatactttaaaataaatatttcttcaaatacctcttataccatttaatatttaaaatctgaatctggattatttgaggggataattttgttgttactattaaaaaattaaccagagaatagaaaagaacgtgatgtataaaaaggtacccctttacgtagttttgatattttgtgttcagtacgacttttttccttcttaggccacatcaagaaaaacatcattt

SEQ ID NO: 590173 - DNA, 593 bp, Homo sapiens
tatattaaacttccaaatatcttttggcaaaaaggcagggagaacagcattcttatacatggttgaggggagaaaattgcttccaaactgtaatctggaaatatattaaaatgtattttaccctttgacccagcagtcctacatagaggaacccaacacacagagaaaagcaacaagaacaagttgtttgctgaatatgttttgtgatttcaaaaatctaaaaaaaatccataagaaataattacattaattattgctcagtcatacaattaaattgatctataagtgttgtctaacaatgatgcaaattatatcttgattagtgataaaaagccatctatctgttatgtacgcactgagcttatatctttaaaagacaaaaaagataaatccttatctaattgtgtttattttcatatgggcattgagatatagtaagcagagttccattctataccattgatattggtgaatttgaacaaggtatgaggtatgagtgatgttgtcaagagttctagtaattctatttcattgtattttctcagttgtgacaataaacacatttttttwaaatttcaaaattaaacaagctt

SEQ ID NO: 590174 - DNA, 572 bp, Homo sapiens
tgtactttaactctgcccagcactaactacattctagtctgtggcctgcatggaaatgaagttgttctttcagacactgctgtgtgggactcagtctggctgcaggtgcctgcaagcactgtctgatttgagatattttctataattactggaatgatgaaatctgtcatgcagtaaggtagcaggcaggagacacaaattcattcctagcttcctgaattaaaaataaatggttatcaagtccaattgaatttgttttaattagctgggttttttttttttaagtcacaattttcgcagctcctttatcaaactgactcttccttaatactaaagaggaaacttttcacacctaaaatattcctgtaaagacaaacttgctgggtcttgttcatgtccctgttggcccctaagtatattttacttatttgtctcatccattgcctcatgyctttccaatgtgaactccataaagaaagtgatttttgtgcatgtaatgaactgctgtatccccagaacttaaatcagggtctggcccatagaatgagctcaatggatgctggtggaatgaa

SEQ ID NO: 590175 - DNA, 572 bp, Homo sapiens
tgtactttaactctgcccagcactaactacattctagtctgtggcctgcatggaaatgaagttgttctttcagacactgctgtgtgggactcagtctggctgcaggtgcctgcaagcactgtctgatttgagatattttctataattactggaatgatgaaatctgtcatgcagtaaggtagcaggcaggagacacaaattcattcctagcttcctgaattaaaaataaatggttatcaagtccaattgaatttgttttaattagctgggttttttttttttaagtcacaattttcgcagctcctttatcaaactgactcttccttaatactaaagaggaaacttttcacacctaaaatattcctgtaaagacaaacttgctgggtcttgttcatgtccctgttggcccctaagtatattttacttatttgtctcatccattgcctcatgtctttccaatgtgaactccataaagaaagtgatttttgtgcatgtaatgaactgctgtayccccagaacttaaatcagggtctggcccatagaatgagctcaatggatgctggtggaatgaa

SEQ ID NO: 590176 - DNA, 572 bp, Homo sapiens
tgtactttaactctgcccagcactaactacattctagtctgtggcctgcatggaaatgaagttgttctttcagacactgctgtgtgggactcagtctggctgcaggtgcctgcaagcactgtctgatttgagatattttctataattactggaatgatgaaatctgtcatgcagtaaggtagcaggcaggagacacaaattcattcctagcttcctgaattaaaaataaatggttatcaagtccaattgaatttgttttaattagctgggttttttttttttaagtcacaattttcgcagctcctttatcaaactgactcttccttaatactaaagaggaaacttttcacacctaaaatattcctgtaaagacaaacttgctgggtcttgttcatgtccctgttggcccctaagtatattttacttatttgtctcatccattgcctcatgtctttccaatgtgaactccataaagaaagtgatttttgtgcatgtaatgaactgctgtatccccrgaacttaaatcagggtctggcccatagaatgagctcaatggatgctggtggaatgaa

SEQ ID NO: 590177 - DNA, 582 bp, Homo sapiens
acattcttgccaacattcagcgttgtcagtgttttggagtttggccattctaataggtgttaatggtatttcattgttagtttaatttgtaattccctagtgagatatatgtcaagcaccttttcatattcttatttgccaggcctttccttttagccatatctatgccaaagcccaagtcccactgaatcttgcacaacagaataaaaacaaggtcttcaatgatgagttagttgtgatttgatttaatcaatgaaccagccatggttttcacattctaccctgcagagctactattcctgggtcactgaaatagctcatagcaaatacatgctagagcaaagaaagctgtgtggaaatgtaaagtaatgcaatgactggataatttaatcagcatttacacccatgcaccttaactacatatatgtaaaagcatcaaacgagttctcaaattccctgcttaggtcatgacactgaggggttcamatagaatcatcagtgtttgcttgaaagtccacaaagtaaggagatttattcttgattgaagttttcacagcatgttaccctgaatatttagggatg

SEQ ID NO: 590178 - DNA, 576 bp, Homo sapiens
ttgttcctgctacagaaagtgcatgcttcaacactgcacttaataacactactgcaactgtggatttgcctgactattcctgttagtctcagtttgttgaggaaagaagcactgttcctcctttccatgttctagtgcctaacaccaaacctggcacttacaatgccatcagttaatgcttattgaatgatactatttaattaaatgtatagattgaatttatgtagataacattcaccctttttagggtgtcaagacacctagtttgtttttactactcgagtcaaacagccagtcacttaagtgagagaaaacaaaaaggtcaaccatttgtttaagttatggragtgtcaaagttgcttatccattcattcatttctttattcagaaggcactgtgctttgttaaatcactttccacagttattatagtgtgatagtgcttactgttgataaattcattgagggatctctccgaaggatgagcatttatattgtagtggagaactcagaaagtgttcctggggaaggttttgaaggaaaactcatagttacatgaggaacatagagcaagggg

SEQ ID NO: 590179 - DNA, 309 bp, Homo sapiens
tatgggactctaacagttgctgctcaatgayacctgcagacactgagttcagctttgtccctccgctggatcagtctccactcctccaacccctacatattccaaaaatgtgtggacacctctagcccactcctgactcctcacctcttcactattgaccttgtcttttctgtcttttactggcatttacatggacttgtggaagggggcagagagaagccacatgcccaatgccccatgtttaactagaaacctgtactgttactttacaaatgtgattcctcatttattggtttagtacgtgcataa

SEQ ID NO: 590180 - DNA, 309 bp, Homo sapiens
tatgggactctaacagttgctgctcaatgatacctgcagacactgagttcagctttgtccctccgctggatcagtctccactcctccaacccctacatattccaaaaatgtgtggacacctctagcccactcctgactcctcacctcttcactattgaccttgtcttttctgtcttttactggcatttacatggacttgtggaagggggcagagagaagccacatgcccaatgccccatgtttaactagaaacctgtactgttactttacaaatgtgattcytcatttattggtttagtacgtgcataa

SEQ ID NO: 590181 - DNA, 619 bp, Homo sapiens
ccactaactataagtttgaagacatgataggactttctctttagcaagattgggtatctgcacattgtcaagactctgaaaatattgttctccttaacagcccagccaccaaacttctaagctctggaaatctctatctacttgtcagtccatctgttagcttttttttttgagggagatggagttctcagggaattgttttttgttcatttgtttgttttgtttgtttgcttggttttggtctagtaccacttctagctttgtgtgcctccaagyagtgctctctcttagcattactgtctgactgccagcctttagggtctctatggtgtgttctgtgaagaccaatattactttggtggaattattctcagctttcctgcccaactctagccctcataggacttctgcagtgtacttggtgaggcctaaagtgcctcaaagggatttctttcctctctcctgctctacccctagacttcagcagccctctgccttgtccttaaaaaaagtccctcatatctcagggtaaattagttcagcaaagctgctctgattccatcatttggcactgtaccctgtgcatttagtgaaggtccctggaaaagagtgggcagac

SEQ ID NO: 590182 - DNA, 530 bp, Homo sapiens
gacaatttcaaagctcacagatgaaccacatagtctagaaatataaaaaaaaataagaaaaagttaggtatgccataaatgcataaaatatatgtagatactagtctactttaacacttactaccataaaatatacacaagtctattaaaaagttgaaatttatcaaaatttgcccacacaaacacttacagatggtacgtggcaccattttcagtcaaaagaaatgtaaacaaacttaaagatgcagtattaaattataattgcataaaatcaactgtactccatactgtactgctgtgataattttgtagccaccttctgttgctattgtggtgagctcaagtgttgtgagtatccacttaaaacgctctttgtccccacacagccagttcgtctctccagtaaattgcctatcacagcaaaaagtgatagtttctggttcttgggtatttttcatcatgtttagtgcaaacygtaaacgctgaataacaccatgggacccacatgaaatatcactagtgatgccaga

SEQ ID NO: 590183 - DNA, 550 bp, Homo sapiens
tgaaatctcagcaggctttttcgtagaacctgacaaattgattataaaatttatatggaaatgaaaaaggtctggaattgccaaaataattttgaaaacagacgtcaaagttaaggaatttatactactgatttcaggacttattgtaaagtaagcaaaacggtgtagtattggcataaaaatagaccaatatttcaagggaacagtagtctagaaatagatgacatatatgagcaatgacttttgacaaaatgctaggacaattcaatggggaaaggataaattaggtatagtcaaatgccaaaaaaaaaaaaatcttgacctttaccataaaccacatacaaaaattgactcaaagtgaatcatatagtgaaaatcgaaacctgaaactataaaactatagaagaaaatcttagagtccttaggtttcacaaagttttcctgcatgcaacatgaaaagcacratctataaaccaaaaaaaatcaataagttatacctcacgaaaattagaaacttttgctctgtggaagaccctgtgaagaggatgaa

SEQ ID NO: 590184 - DNA, 570 bp, Homo sapiens
caggtaaagtcatgcttagaaagaaatttatatttaatatatacatgagacaaaggctgaaaaatcaacgattaagcactaaactcaaaaaatcaacaaagagcaaattaaatgcaaataaagtgaaaactagaaaacaataaaaaataagagtggaaatcaatataactgaagcaaacacataatagaagaataactaagaaaaaaggtggttctttgaaaaggctaatatagttgatgataacttgtcaataccctgatcataaaaaaggcagaaaaaaatccataatgaacaatragattattacagctcacataggcattaaaaaggtaatagaatattttgaatagctgtatgccaatgcatttgaaaattgacataaaatgaacaaatttctgaaaaaacacaagctaactaaactgacacaagaaaacttgtatcatttctaaaaatatgaatatttctatatttgtgaaagaaaatacatttataattttaaaacttttcataggaaaatctataacctcagtgttgttactggtaaattttaccaaacacatttggaaaaa

SEQ ID NO: 590185 - DNA, 575 bp, Homo sapiens
gatcaagaccatcccagccaacatggtgaaacctcatctgtactaaaaaaartacaaaaattagctgggtgtggtggcatgcctatagtctcagctgcttgggaggctgaggttgcactgagctgagattacgccactgcactccagcctggcgacagagtgagactgtctcaaaaaaaaaaggactttatttatttagtaaacagtatctagaaataacttccagcaaacattatacagaatggtaaaatattaaaaatttttcctctaaaatcaagaacaaagtaaaaaatgccagtgttatttacatttgacatgtacaagaggtcctagtcaatgcaataaggcaagaaaaagccaaaacatgtgaggattttaatggaatgaatgacagaagtctagtcctcttccctttcaaaataagctgtggcttccagaaaaaaaaaaaaaaaagagaaaggatgatgggaatgaaaacaacagcagatatctactatgtttctctagatgaaaataaatatagttactctgtttttagctgacaactagtcagtgtcaggatattgatgaacctc

SEQ ID NO: 590186 - DNA, 575 bp, Homo sapiens
gatcaagaccatcccagccaacatggtgaaacctcatctgtactaaaaaaagtacaaaaattagctgggtgtggtggcatgcctatagtctcagctgcttgggaggctgaggttgcactgagctgagattrcgccactgcactccagcctggcgacagagtgagactgtctcaaaaaaaaaaggactttatttatttagtaaacagtatctagaaataacttccagcaaacattatacagaatggtaaaatattaaaaatttttcctctaaaatcaagaacaaagtaaaaaatgccagtgttatttacatttgacatgtacaagaggtcctagtcaatgcaataaggcaagaaaaagccaaaacatgtgaggattttaatggaatgaatgacagaagtctagtcctcttccctttcaaaataagctgtggcttccagaaaaaaaaaaaaaaaagagaaaggatgatgggaatgaaaacaacagcagatatctactatgtttctctagatgaaaataaatatagttactctgtttttagctgacaactagtcagtgtcaggatattgatgaacctc

SEQ ID NO: 590187 - DNA, 575 bp, Homo sapiens
gatcaagaccatcccagccaacatggtgaaacctcatctgtactaaaaaaagtacaaaaattagctgggtgtggtggcatgcctatagtctcagctgcttgggaggctgaggttgcactgagctgagattacgccactgcactccagcctggygacagagtgagactgtctcaaaaaaaaaaggactttatttatttagtaaacagtatctagaaataacttccagcaaacattatacagaatggtaaaatattaaaaatttttcctctaaaatcaagaacaaagtaaaaaatgccagtgttatttacatttgacatgtacaagaggtcctagtcaatgcaataaggcaagaaaaagccaaaacatgtgaggattttaatggaatgaatgacagaagtctagtcctcttccctttcaaaataagctgtggcttccagaaaaaaaaaaaaaaaagagaaaggatgatgggaatgaaaacaacagcagatatctactatgtttctctagatgaaaataaatatagttactctgtttttagctgacaactagtcagtgtcaggatattgatgaacctc

SEQ ID NO: 590188 - DNA, 477 bp, Homo sapiens
gagtcaaataagcacatcaatttgtggcacctcaatatataaaaaatagctacacaacaaagcaaaatatgagcattcttgccatcacataatgcatgtattccttttaaaaatctcacattctgaaaaatcactcactaaaaataactgacgttttgaggaaaatagaattggaacagattactcaaaacattttaaacactcaaaacatttaatgttataattaaacactaaccaaaacaatagtgagcttatgraaaatactagcacaattataagaacatgttaatgtccctgcaaataaataatccagtaaataaaagagtttacctttcaaattgaaggggaaggtaggttggtggaagagtatgtacggaagtactgagttgcctgagttatgaaaatgaagtcagaggagcattggcaccagaatttgcaggtggaggagcagtgacaggcttagtataaaacggttct

SEQ ID NO: 590189 - DNA, 480 bp, Homo sapiens
ctgtaggacctttgacaggtcatatagcatgtctagcatttagatcyttcatctgcaaaatgtgggtggcagaagtacttgcttcctctgcctgtatgaggattaaataaaattatacaatgtaataaccctaacatataaatacaaaataaacgttagatgaattttactgaaattattagtaacaactccaaagccttggttccttcagttaaggcgaccactgaagttaatctcatgtgaaaataaattataccccaaatttaacacaaacaactataacaggggatctggaactgaaaataataacaaaaaattaatgaagcttacattaatgagatatttaaatattaccttacttttttcaaaaagtgttccttttctctctctttcccatgatttttttaaaaaaagcttttaattgctgcaaactggcagaaaaatacttatttatatcttaaaggtactgctcaatgaatt

SEQ ID NO: 590190 - DNA, 480 bp, Homo sapiens
ctgtaggacctttgacaggtcatatagcatgtctagcatttagatctttcatctgcaaaatgtgggtggcagaagtacttgcttcctctgcctgtatgargattaaataaaattatacaatgtaataaccctaacatataaatacaaaataaacgttagatgaattttactgaaattattagtaacaactccaaagccttggttccttcagttaaggcgaccactgaagttaatctcatgtgaaaataaattataccccaaatttaacacaaacaactataacaggggatctggaactgaaaataataacaaaaaattaatgaagcttacattaatgagatatttaaatattaccttacttttttcaaaaagtgttccttttctctctctttcccatgatttttttaaaaaaagcttttaattgctgcaaactggcagaaaaatacttatttatatcttaaaggtactgctcaatgaatt

SEQ ID NO: 590191 - DNA, 480 bp, Homo sapiens
ctgtaggacctttgacaggtcatatagcatgtctagcatttagatctttcatctgcaaaatgtgggtggcagaagtacttgcttcctctgcctgtatgaggattaaataaaattatacaatgtaataaccctaacatataaatacaaaataaacgttagatgaattttactgaaattattagtaacaactccaaagccttggttccttcagttaaggcgaccactgaagttaatctcatgtgaaaataaattataccccaaatttaacacaaacaactataacaggkgatctggaactgaaaataataacaaaaaattaatgaagcttacattaatgagatatttaaatattaccttacttttttcaaaaagtgttccttttctctctctttcccatgatttttttaaaaaaagcttttaattgctgcaaactggcagaaaaatacttatttatatcttaaaggtactgctcaatgaatt

SEQ ID NO: 590192 - DNA, 589 bp, Homo sapiens
tccccaattttctaggacaccttgaaagaaaaagaatcttctgtctgatccccagttagtccagatgggaaaattactttgtggcagagcccaaggttacctgtcagcaagctaaagtaagggaagttataatgtatacctccattttcaataatttgtccagtgtcatatatttttattttttcattagaaaatatggcccctgcatttgcccaagcctgacagttatttgctttagaaaagggcaagatcttgattcctcataatgtatatgatatttacttagaagtccctctgtcgtgtgtgtgtgtgtgtatgtgtktgtttgaatgtgtgtgtgtgaagtaggtatctatagaattaaggataaccagagaggtcttcctttgcctaagaccattacacgaggcaggacagcttgtgggttacaaaaaaataaaaccgggaaaagtagatccagggcgtgttagtctgttttcacactgctaataaagacatacctgaggctgggtaatttataaaggaaagaggtttaattgactcacagttccacatggctggggaagcctcataatcatggcagaagaca

SEQ ID NO: 590193 - DNA, 642 bp, Homo sapiens
cagaaatagctcacctatgaaacaaacacaattttaattcattttcccatcccctaataggaaaatagttctttctgtgggggccaagggaaaacttccctgtcacactctgaaggttcactgaaaatcactgacraaaggcagattaacaagagaaaaggcatacaaatttatttggtcatagttttgcatgacacgggagccttcagaatgaagagccaaagagacaggagaaattgtccatttttatgcttagattcaacaaaggatgaacagctgtgttgaaacacgattgggcaaaaagggaatgatctaatggtaacagactgagtggggaagctcagcaacgcctgtctgtttagatttctgggcctctctgaagctttccttccttctgggtatgaggcaggcccctctctggaatgcaggtgttatgacctacagtcaaacaagtcagataagttctttacggctagtttttatacagaagtggggaggagtgtagggggcagttagagtagtatttttaggtttttatggctggctttaggggaaaggggttctggcttctatgacccaccttcaggaaggggaattctagtttctatgcctaaccttgggggagagtaagaggccagagac

SEQ ID NO: 590194 - DNA, 642 bp, Homo sapiens
cagaaatagctcacctatgaaacaaacacaattttaattcattttcccatcccctaataggaaaatagttctttctgtgggggccaagggaaaacttccctgtcacactctgaaggttcactgaaaatcactgacaaaaggcagattaacaagagaaaaggcatacaaattyatttggtcatagttttgcatgacacgggagccttcagaatgaagagccaaagagacaggagaaattgtccatttttatgcttagattcaacaaaggatgaacagctgtgttgaaacacgattgggcaaaaagggaatgatctaatggtaacagactgagtggggaagctcagcaacgcctgtctgtttagatttctgggcctctctgaagctttccttccttctgggtatgaggcaggcccctctctggaatgcaggtgttatgacctacagtcaaacaagtcagataagttctttacggctagtttttatacagaagtggggaggagtgtagggggcagttagagtagtatttttaggtttttatggctggctttaggggaaaggggttctggcttctatgacccaccttcaggaaggggaattctagtttctatgcctaaccttgggggagagtaagaggccagagac

SEQ ID NO: 590195 - DNA, 604 bp, Homo sapiens
tccttttagtcctcacagcagtcctcattgtatatggtagatgaggaatatcagttacagacttagccaagattataaacatggaaacatgaacccaattttctaactcacaaagtagttcttgtcccagctgaagtctcttcttatccgcctggccttatctagatgtcattttgaatacatctgttctaacagacttgaaataaaaattggaatgacccaaatgggacatatctagttactgctagattccccatggcagatttccacatgtgaactttctctcatttaaacaatcccatctcacaacagagtgttactctatcaaaaccagtagtctagcagggcttgagaggaaagtggtagagaaagctaagggaggcaaatgacaatattgtagcagtcgatgcctttaaggagcacctgggtctggctctctattgatctgcttttgaagtctgttctaaactacaacagctgcttttcctgtccstgaaagacccttcaaaaacaaaataagaccttgtatttgttatccctttccctccaggtggggagtgaattgagacagagtggagggctcagcccgacatcactgttcatc

SEQ ID NO: 590196 - DNA, 606 bp, Homo sapiens
aattgcccttacagcattttcagctgagttggtgttgtagaatgaacatttgtgtcctaccacaaattcatatgttgaagttctaacctccagtgtggctgtatttggacacagggcctttagggaagtaatggaggttaaatgaggtcataggggtggggccctgatccaataggattgstgtccttataggaagagccactgagcttgctttctctctccaggtgcacatattgaggaaaggccatgtgaggatatagtgagcaggccacctgctatgagccaggaagggaccccctcaccagaaacagaattttctggctccttgattatggacttctaggtttcagaactgtgagaaaataaatgtctgttgttgaagctacccaacctgtggtttttgctgtggcagctgagcagactaattcagttggggtcacttaaaactatgagtctccagtcatccaggaagtaggggtgcaaaggcagatttgtactgtgaccctgtcatggcaattcattctactggcaaaaatttccctcaattaaaacccaaatgatttcaaaacaccccataataggatcagcaagagactccaccaagac

SEQ ID NO: 590197 - DNA, 506 bp, Homo sapiens
ttggtgttgtagaatgaacatttgtgtcctaccacaaattcatatgttgaagttctaacctccagtgtggctgtatttggacacagggcctttagggaagtaatggaggttaaatgaggtcataggggtggggccctgatccaataggattggtgtccttataggaagagccactgagcttgctttctctctccaggtgcacrtattgaggaaaggccatgtgaggatatagtgagcaggccacctgctatgagccaggaagggaccccctcaccagaaacagaattttctggctccttgattatggacttctaggtttcagaactgtgagaaaataaatgtctgttgttgaagctacccaacctgtggtttttgctgtggcagctgagcagactaattcagttggggtcacttaaaactatgagtctccagtcatccaggaagtaggggtgcaaaggcagatttgtactgtgaccctgtcatggcaattcattctactggcaaaa

SEQ ID NO: 590198 - DNA, 520 bp, Homo sapiens
aactctgctaataaaagaaacttttaaaagaaacaatcttggcctaagtaaggaattcttacccttgttacataaacctagagatctaaagaagtaattattagccctggttgcattcacttaaagatctttttaaaaatactgacgcctgaaccatactgcaggccaattaaatcacaatgtctagagagatagggtccaggcacagaatgttcttaaagctccccagataattctaatgtagagccagcgttaagaacttttgaaactaaagtmtatcactgagagaaaattatttttccttcctgtcacccttcctccccttctccttttttttaagaaagaaaatactgggaaagaaatcctaggctgtaattatgtgggttggttacagctttctttacaaacactcctgggttatcagaagaactgctctaaccttggggcaggtggactcttcctataatgacatgtaattattagtattattaatacttttgcaatcatattaataattaag

SEQ ID NO: 590199 - DNA, 585 bp, Homo sapiens
tggtctttaccccgaaattacgatttctttggtttctgaggtatagcccaggcactggaatttctaaattctctccaggtgattctaatatgtcaataatttgaagaactactgttatacaggatgactgagaccagagttaaaagttcatggataagagaaaccaagagggttctgttggtgaaaggcttcatctggatgaatggtatgattttctggcctcaaagcagagctcttgagctatataattatkgttattattaatagtaccaagaggatacatgcattatcttactaccttgctaaattctcacaataaaactcttccataaatattatgattctcacattttaaatgagagaagcaaagctcaaacagagattaaggtaacttgctcaaagtcacacagctaaggagtagagcccatgctcccaactctaacctgtaatacctcccattatcctaaagaaaatgctatcccacccccagccccccaccccctgacaggccctggtgtgtgatgttcccctccctatgtccatgtgttctcattgtttaactcccacttatgggtgagaacatgc

SEQ ID NO: 590200 - DNA, 593 bp, Homo sapiens
tagtaacaatggggttcaagcaattaaacaattttgattccacagatgaaaaagctgatgttcagagaggtgacacaactaattccaggccacacaaacattgaatggcagatctgatgtcagaacccagataatctracttccaacttggtactctcagaatcagttagagtgtctttggttgtcaagagcagactaactaacataagcaaaaatccttttaaaatcttagaatttacaggatccaaagcttggaacaggcaggaaccaggcagctctgttcctgcctggtttccatggcaacatcagctacagagctcatactgatttagctgacggaatgaatgaataaactccaacaacggttattgttctgtttttcattctgattgtagaatgcttctttttcttttcttttctttctctttctttcttcctttatttttctttctttcttcctttcttcttttccctttcctctcttcttttttctcattctctttctttctctttctctctttctttctctctttccttctctctctcccttcctttcctttccttctctttctctctctctctctctcttcact

SEQ ID NO: 590201 - DNA, 593 bp, Homo sapiens
tagtaacaatggggttcaagcaattaaacaattttgattccacagatgaaaaagctgatgttcagagaggtgacacaactaattccaggccacacaaacattgaatggcagatctgatgtcagaacccagataatctgacttccaacttggtactctcagaatcagttagagtgyctttggttgtcaagagcagactaactaacataagcaaaaatccttttaaaatcttagaatttacaggatccaaagcttggaacaggcaggaaccaggcagctctgttcctgcctggtttccatggcaacatcagctacagagctcatactgatttagctgacggaatgaatgaataaactccaacaacggttattgttctgtttttcattctgattgtagaatgcttctttttcttttcttttctttctctttctttcttcctttatttttctttctttcttcctttcttcttttccctttcctctcttcttttttctcattctctttctttctctttctctctttctttctctctttccttctctctctcccttcctttcctttccttctctttctctctctctctctctcttcact

SEQ ID NO: 590202 - DNA, 593 bp, Homo sapiens
tagtaacaatggggttcaagcaattaaacaattttgattccacagatgaaaaagctgatgttcagagaggtgacacaactaattccaggccacacaaacattgaatggcagatctgatgtcagaacccagataatctgacttccaacttggtactctcagaatcagttagagtgtctttggttgtcaagagcagactaactaacataagcaaaaatccttttaaaatcttagaatttacaggatccaaagcytggaacaggcaggaaccaggcagctctgttcctgcctggtttccatggcaacatcagctacagagctcatactgatttagctgacggaatgaatgaataaactccaacaacggttattgttctgtttttcattctgattgtagaatgcttctttttcttttcttttctttctctttctttcttcctttatttttctttctttcttcctttcttcttttccctttcctctcttcttttttctcattctctttctttctctttctctctttctttctctctttccttctctctctcccttcctttcctttccttctctttctctctctctctctctcttcact

SEQ ID NO: 590203 - DNA, 593 bp, Homo sapiens
tgttggcattgtgccaatggttgaggaagacacccagcaatatgatctttgactcaggtgaccatacttctgggtttgcctaggacagttctgtttatctttgttgccctgctgtagttaattgtagtacccccgccgccacccttttcacgatctcaaaagagttctggtttggatgataaattatacggtcaccttacctgtggtagaccttcaagaggcttgcaaactcactggtgagagaaaaaatataaatatttagaaatattcactaatctctttctgtctttggtaggcagctcctgtaatggctcccrgtgatctctgtctccttgtattcatgtctttgtgtaatcgcttcccttagagtggggttgaacctagtgacttgcttctaattaatgaaatttagtaaaacttatgatatttcacttctgagattaggctgtaaataaaactgccagcaaaaatatagaatgccaacttgaatgtaaacttcagataaacattgaataattttttggtgtagaatgtcccatgcaatatttgggagatatttatactaaaaaagtattcactgtttatttgaaatt

SEQ ID NO: 590204 - DNA, 286 bp, Homo sapiens
agctgctgcttgcagttactacctctgccatacccttgagctctcttttattctttcagttaccttggtaacaactttatatctagttaacaattctttatattaaatactctcttcaagtaactggtgtgatttctgtcccctgaatgcactctctctctctttctctctctctctctctctctcacacacacacacacacacataacrtgcacacgtaccagggaaagcaaacaactgcagctctccccttccactggaagataacttatttgtcatgtccacc

SEQ ID NO: 590205 - DNA, 487 bp, Homo sapiens
tgtccttgcaaataaacacacacacgcatacacatttttaaagtgaaatgtatattaaatatttcacctgggacattttacaaatttttccctgttttaaaacaaatgcctatttattataaaaaatttgagaggacgtttaagatgtttttactcattaaagacatcttaaagaaagtaaaacaacaaattaccaactgcaagaattaatttgtaacacaattaattgataagtgactagaatcaagaatatataaagagtacataaaaagttcctttargccaggcgcagtggctcacgcctgtaatcctagcactttgggaggctgaggcaggcggatcacaaggtcaggagatcgagaccatcctggccaacatggtgaaaccccgtctttaaaaaaataagtaaatagctcctttagatacaaaacaaaaagacaaaataccctaatgaaaaatggattttaaaagtatgaacaggaacaaa

SEQ ID NO: 590206 - DNA, 632 bp, Homo sapiens
ttctattcctaatttgataagtggttttgtggtttttgtttggtttggttttgttttagcataaaatggtgttggatyttgttgggttacatttttccacatctactgagatgatcttgtcattttgccctttattctattaattagtgtattagattaattgattttcatatattgaaccaaccttgcaatcctgagataaatcccacttggtaacggtttataatccttgtatgtgttcctggatttagtttgccggcgttttattttttatcactcaaatggacacagtatagtttgctaggattttattgagaatttttgcatctatattcacaacagtgttaatctgaagttttcttgtgatatctttttctggttttggtacaatttggtactttctacgaggccagtattattctggcctcatagaatgagttgttacctcctcttctattttttggaagggtttatgaaggattggtgacaattgtaaacatttggtagaatataccagttatgttatctggttctgggatcttctttgttggcaattttttttaattgctaattcaatcattttacctgttataagtctattcagattttaatttattttccagtcagtttca

SEQ ID NO: 590207 - DNA, 632 bp, Homo sapiens
ttctattcctaatttgataagtggttttgtggtttttgtttggtttggttttgttttagcataaaatggtgttggattttgttgggttacatttttccacatctactgagatgatcttgtcattttgccctttattctattaattagtgtattagattaattgattttcatatattgaaccaaccttgcaatcctgagataaatcccacttggtaacggtttataatccttgtatgtgttcctggatttagtttgccggcgttttattttttatcactcaaatggacacagtatagtttgctaggattttattgagaatttttgcatctatattcacaacagtgttaatctgaagttttcttgtgatatctttttctggttttggtacaatttggtactttctaygaggccagtattattctggcctcatagaatgagttgttacctcctcttctattttttggaagggtttatgaaggattggtgacaattgtaaacatttggtagaatataccagttatgttatctggttctgggatcttctttgttggcaattttttttaattgctaattcaatcattttacctgttataagtctattcagattttaatttattttccagtcagtttca

SEQ ID NO: 590208 - DNA, 611 bp, Homo sapiens
gaatataccagttatgttatctggttctgggatcttctttgttggcaattttttttaattgctaattcaatcattttacctgttataagtctattcagattttaatttattttccagtcagtttcagtagtgatgtctttctagaaagctgtccatttcatctaaattatggaatttgctggcctacagttcataatattctgtcacccaggctggagtgcagtggtgtggctaattttttgcattttcagtagagacagggtttcaccgtgttagccaggatggtctcgatctcctgacctcgtgatccacccacctcggcctcccaaagtgctgggcttacagacgtgagccactgcacccagcccatagtattctttttataatctttatttgtgtcgggttgatggtaatgtcctctctttcattcttgattgtagtaatttgagtcttcctgtttccaagttagtctgtgaaaggtttgccaactttgttgatcattcaaataataactttgttttcttgatttttctctactgtttttctatttatcttatttattttataactcttatttccyctcttatgcttgttttgggtttagtttgctc

SEQ ID NO: 590209 - DNA, 640 bp, Homo sapiens
ttattactattcatattttattaaagattagaaaactgaaaaaaaataagtagaaagaaaaggagaaaatgagtgcctagcaattccaccatgccagtagtaacttttgttaaaatttttttatgtatatatcactttttgctatctgatcttcatttgtggctaaaatataatgaaaaggaagggaaaagtacaagtttctatatgttgtaggtatctaaaataaatgctaatattattttaaaagatttaaaatctcatgtttttcatctatttagggaagagaaaacacagaagaatcagtgttggaaatctctcttcatagatacttactctgatgtaggaagatacattgaccattatgctgctattaaaaaggcctgggatgatctcaagaaatatttggagcccaggtgtcctcggatggttttatctctgaaaggtactgggaattcagggtccctttccccgtttccattactgttagtataaataggttagtttaaacaactttgaatctctgtcatctacgcaactgtgttaacccaactttgtctgtgatttactgttsatatttggccatggaagtaggaccttcactctagtgcttaccctgttttttctcatccttgggacccac

SEQ ID NO: 590210 - DNA, 550 bp, Homo sapiens
caattacatttaggtctttaaaataattcatccaccctggataagataactttcacattcagatggcaaagtaatgcattataatatctaagaaggcattttttaaaaaaagaagactgataagttgtcattatgatgttacactaytaatataatcataatgagatccatgtggcactggcattgaaatagatgagtggagcagagccacagaatacaacatacagaaatagatcttgaatgtattatatgaaaagtgatagtttaattcagtgaaaaacagtgtgtcaaatagttgggcccaaatgactatacatcaagaagaaaatgaagttttgtccctctattacactataaatgaaagatattaaggatgataaaatgcacatcattaaaaaatctaaatcaatactcacaaggtcttggatgtagaaaacattactaaccaaaactagactactagaaacaaaaatgtatataagcatacctatataggaaaatcatatacacatttgcatatgtgtgtgtatttcaatatagaaattattta

SEQ ID NO: 590211 - DNA, 550 bp, Homo sapiens
caattacatttaggtctttaaaataattcatccaccctggataagataactttcacattcagatggcaaagtaatgcattataatatctaagaaggcattttttaaaaaaagaagactgataagttgtcattatgatgttacactattaatataatcataatgagatccatgtggcactggcattgaaatagatgagtggagcagagccacagaatacaacatrcagaaatagatcttgaatgtattatatgaaaagtgatagtttaattcagtgaaaaacagtgtgtcaaatagttgggcccaaatgactatacatcaagaagaaaatgaagttttgtccctctattacactataaatgaaagatattaaggatgataaaatgcacatcattaaaaaatctaaatcaatactcacaaggtcttggatgtagaaaacattactaaccaaaactagactactagaaacaaaaatgtatataagcatacctatataggaaaatcatatacacatttgcatatgtgtgtgtatttcaatatagaaattattta

SEQ ID NO: 590212 - DNA, 550 bp, Homo sapiens
caattacatttaggtctttaaaataattcatccaccctggataagataactttcacattcagatggcaaagtaatgcattataatatctaagaaggcattttttaaaaaaagaagactgataagttgtcattatgatgttacactattaatataatcataatgagatccatgtggcactggcattgaaatagatgagtggagcagagccacagaatacaacatacagaaatagatcttgaatgtattatatgaaaagtgatagtttaattcagtgaaaaacagtgtgtcaaatagttgggcccaaatgactatacatcaagaagaaaatgaagttttgtccctmtattacactataaatgaaagatattaaggatgataaaatgcacatcattaaaaaatctaaatcaatactcacaaggtcttggatgtagaaaacattactaaccaaaactagactactagaaacaaaaatgtatataagcatacctatataggaaaatcatatacacatttgcatatgtgtgtgtatttcaatatagaaattattta

SEQ ID NO: 590213 - DNA, 550 bp, Homo sapiens
caattacatttaggtctttaaaataattcatccaccctggataagataactttcacattcagatggcaaagtaatgcattataatatctaagaaggcattttttaaaaaaagaagactgataagttgtcattatgatgttacactattaatataatcataatgagatccatgtggcactggcattgaaatagatgagtggagcagagccacagaatacaacatacagaaatagatcttgaatgtattatatgaaaagtgatagtttaattcagtgaaaaacagtgtgtcaaatagttgggcccaaatgactatacatcaagaagaaaatgaagttttgtccctctattacactataaatgaaagatattaaggatgataaaatgcacatcattaaaaaatctaaatcaatactcacamggtcttggatgtagaaaacattactaaccaaaactagactactagaaacaaaaatgtatataagcatacctatataggaaaatcatatacacatttgcatatgtgtgtgtatttcaatatagaaattattta

SEQ ID NO: 590214 - DNA, 428 bp, Homo sapiens
taactaagaaaaagaaatactaaattgcgaagtggatgtcatttatagtttggatacatgatgtcacttcatttttgctasaatagctgttatgttcctgtctacctgagaaatttcacttcatctgcgatagactgataaattgcaggtgtatttctattttctctatgaattttcactttagggtaaattatcaataaacatattattatcagaaaacttggaagatattatataatacacaagggtatttagtttatgcatgttaataaatgcttcacctttggacaaagctaaaaggaatactgtactacgatcatctcttccttgcaactgattcttttatgtatttatttttttgagatggagttttgctcttgttgcccaggctggagtgcaatggcacaacctcagctcactgcaacctc

SEQ ID NO: 590215 - DNA, 582 bp, Homo sapiens
ctaatgtggacctccaacacagcacagatgagttagaaaattatggccaaaccatttttttaagcaggtgcctgatcccatttctcatcactgggtggagtatcccaactggggtccccagctacccctgctggttttcttcagctgacagaggtttcaaagctccctgagatagagttcccagagggaggagtggaccaccatctttactgtttggtgacttagctgttccaggcttcaggctttggactgtctgaggtgaactggattcccaggaacagtacaactactgtatgaaaatatggccagcctgcttttttaagcaagaccctgatcctattttttgtctgagtgagatttcccaactggggtctccagtcaccacttacaggtgtgttagggccagcaacagatctgtactgcctgggatggagctcccagagcgggttgccatttttgctgttccacagcctttactgatgatacctccaggtgctggaaaatccaaagtgactagagactggaacgggtccccagcatgtagcagcaggcctacmaaaaaactggtcagacagttatgca

SEQ ID NO: 590216 - DNA, 376 bp, Homo sapiens
tcctctcgcctgtcttctccaaggctagccctgcytctaaaaatcactccctgtctctggtgcttttctagtttctcctataagaatgatttccagtataaactccaggactctgtaaccttctttaggcacctgggatcaccaatcagaaacacataatttttgccaaagccccgacagggtggggaactatcttatctggaattttaggatccctcctcagagaagcaggcctaacaaaagctatttctgaatctaggatatgaggagcctcagaaattgtatccttcctattcatataactgaggacaacagacatcactcttccaaccctggagagcccttccttccctcagggtatggccctccacttcat

SEQ ID NO: 590217 - DNA, 376 bp, Homo sapiens
tcctctcgcctgtcttctccaaggctagccctgcctctaaaaatcactccctgtctctggtgcttttctagtttctcctataagaatgatttccagtataaactccaggactctgtaaccttctttaggcacctgggatcaccaatcagaaacacataatttttgccaaagccccgwcagggtggggaactatcttatctggaattttaggatccctcctcagagaagcaggcctaacaaaagctatttctgaatctaggatatgaggagcctcagaaattgtatccttcctattcatataactgaggacaacagacatcactcttccaaccctggagagcccttccttccctcagggtatggccctccacttcat

SEQ ID NO: 590218 - DNA, 578 bp, Homo sapiens
gagtatcactttgtgtcagacaygattcttaactttagaaatctacaataataatgattatgagagtagacaaatttcttgcttttagggaacttactttctagggaaataaggcagaaataaacgaataagaaaataaatatataacattccaaacaaaatttggaatgagtgttaggaacgttcattcaacataattatttcacatttattatgtgccacgtgctatctcagatcttgaaaatacaaagaagcaaaaaacgttctacccttgggaatttacagtggcaaacatacacaggaaaggttaaaaaaaaagtttcgcagaacagatgtaaaatgcaggaatttatgacattctggttactcagattctatcctagtgtcatgataattcggaagagaccatcagggtgagccatctttgattcatcctcagagctgggggcaatgttgtagtccagtaaatacagtacctgatcaattggcagccacatgcttgatgatatgacttctcattactgaatttagatatatttttataatgtcaaagcaactgagaagtgaaagagctatgg

SEQ ID NO: 590219 - DNA, 422 bp, Homo sapiens
ggctggagtgcagtggcgcgatctcagctcactgcaacctctgtctccccagttcaagtgattctcctgcctcagcctcccgagtagagcagctgagactacacgcaggtgccaccacgcccggctaatttttgtakttttagtagagacagggtttcaccatgttggccaggctggtcttgaactcctgacctcaagtgatctgcccatatcggcctctcaaagtgctgggattacaggtgtaagccaccacacccggcctgtagaaaacattgaaaggaaaacgtaataacaatcttacacaaactctttcagaaaatagagaaggaagagcacatctcaattcattttttattatcaaaacctgacaaagaccttacacaaaaagaaaattacagcccaatatctctcatgaacacaga

SEQ ID NO: 590220 - DNA, 172 bp, Homo sapiens
catcctcaccagcactggatgtagttagtattttggattttcaccattcaaatatgtatgtagtagtatctcattttaatttgcatttccatgatgacagatgatatagtgcatcttttcacatgcttcttgaggtttgtatatcttcttkggtaaggttatctgtcagtgt

SEQ ID NO: 590221 - DNA, 523 bp, Homo sapiens
atttaaaggatcctttttcatgctttcaggcattcttgttcccacctctgttgctatattcaatgtgatgtaaatatttatgccctcacttctcctcaaatcagttcaaagactaaagtctttttttattaacaatgcaagcacctactataacatcatgtgaatggaggtgctccaatgttgaattcagtgactgaatgaacaaatatagtgttaatgagctcttgctattcaaatagcaaatatacaaaaattagaagatccaactcaactgctttactgtttattgattcaactaacatggatgatcacattcaatggcccwtgcatggtgcttggtatttccctctacagtatcttgttaaatcttcttagtgatccatgggaaggcataggatttatttatctgtacttaaccttatagttgaggtaaagacagaactcagacccggatcttctgtcttaattctgtaagttctttcttcacactctcatagccttacttcagtaaaaataacaacca

SEQ ID NO: 590222 - DNA, 577 bp, Homo sapiens
caattgaaaattggttgactctacagatacagaacctgtgactacagagggccaactgtactgctgaaggtcacagcccaggaacccaagctgaacaccaaaaatgagatcttatcataagattatagaaagcttctcatcaataacactttactatctgtattagtctattctcacattgctataaagaagtacctgagactgggtaatttataaagaacagaagtttaattgacttacacttctacaggctgtacaggaagcatggctgagaggcctcaggaaacttacaatcatggtggaagggtggaggcaaagcaagcatgtcttcacatggtggcaggagagagagagagagagagagasagagagagacagagagagacagagaccaagagagcaaaggggcaagtgctacacactttcaaacaaccagatctcataagaactctattttgagaactccaaggggaattccgcccccatgattctatcacctcccaccagccccctccttcaacactaggaattacaatttgacataagatttgggtggggtcacagagccaaaccatat

SEQ ID NO: 590223 - DNA, 636 bp, Homo sapiens
tgcatctatacgcaacgtatcatcgcgcagcatctgctgcagttgcagcacccatattacagaagtgtcaatgtctttaaaaaaagtcagtcagtccttaataattgaaacccttcttccagattgattaatgttgaatattttctctggcactgcttcttctatgtcttctttctcatcatctggcactggtttggaagcattcacctccatcaagttttcttctgttaattcctctggtgtggtgtctattagctcttaactttctccatatcttgaaacacttcacctccacaaactttttctttccatatccacaatctctttcatgattttcttgattggctctgttgtaaattctgtgaagtcatgcaccatatttggacacaactttctgcagcaggaatttattgtgtggggaaygatggcttttatggctttttccataacaatgatggcattttcaaggtgtaatccttccagacattcatgatgttctctctatcagagttctcttccatagcattaacaatcctttccaaagagtactgtatacaatgagtctaaaaggttcttataaacccctgatttagaggctgagttagaggtgttgtgtttgagggcaagtagacaact

SEQ ID NO: 590224 - DNA, 570 bp, Homo sapiens
tgagggtctatgtcccgctgtgcaagcattgtcttgataaacatcttaacaggaaacagggtttgagagcagagaaccagtctgactcgaatttaccaggctggaatttcccaatcctagtaagcctgagggtactgcaggaaaccagggcatatttcagtctgtatctcaactgcataagacagacactcgcagagcagccatttatagacctacccccaggaatgcattccttccccagggttgttccttgctgggaaaaaaaatcagcgatatttctcctaccagcacatccatctataggctttctgcaagaagaaaaatatggctctattctgccmaaccctgcaggcagtcagaccttatggttatcttcccttgttccctgaaaattgctgttattctgttctttttcagggtgcactgatttcatattgttcaaacacacgttttacaatccatttgtacaatagtgatgctgaggtgacgtacattctcagcttatgaagataacaggattaagagattaaagtaaagacaggcataagaaattataagagtattattagg

SEQ ID NO: 590225 - DNA, 578 bp, Homo sapiens
atgcatcaaaattattcttcaaaataaataataaagatttctttattttctaaacaaaaattgaaggaatttattgccaccatgccatacctcccacaggaaataataaacaaaattatttgagcagaagggaactgctattttcttgggtctaaggaaaggaagagtgtaagagaaggaataaatggagttttttttaagaataaaaaatcttatatgtytcttattatcttgaagataattgcttgtttaatgtaataatagtaacaatgtatttggtgattatagcacatggataaatgaaatgactgacaacaatatcacaagggatgtataaaggaattcgatacattctaagtgtaatgtgtatcctcagacatcagctagtatcaaatcacataaaacaatcaattaaaaccagaaagaacagaaatagatggaagggagagaaacaaaggaaatgcaaaatttagaaagattataaacatggtaggtattaattataatatataattagtcaacttaaatattacttgtctaagtacaccaatgaagacatcgtcaaaatgaatgaaaag

SEQ ID NO: 590226 - DNA, 578 bp, Homo sapiens
atgcatcaaaattattcttcaaaataaataataaagatttctttattttctaaacaaaaattgaaggaatttattgccaccatgccatacctcccacaggaaataataaacaaaattatttgagcagaagggaactgctattttcttgggtctaaggaaaggaagagtgtaagagaaggaataaatggagttttttttaagaataaaaaatcttatatgtctcttattatcttgaagataattgcttgtttaatgtaataatagtaacaatgtatttggtgattatagcacatggataaatgaaatgactgacaacaatatcacaagggatgtataaaggaattcgatacattctaagtgtaatgtgtatcctcagacatcagctartatcaaatcacataaaacaatcaattaaaaccagaaagaacagaaatagatggaagggagagaaacaaaggaaatgcaaaatttagaaagattataaacatggtaggtattaattataatatataattagtcaacttaaatattacttgtctaagtacaccaatgaagacatcgtcaaaatgaatgaaaag

SEQ ID NO: 590227 - DNA, 597 bp, Homo sapiens
agggaaagggaacacattccctttgctctatgaagtttagytaaaaatcaactgacaaaaggtagattaataaaagaatcagtgtacaaaatttattaatgtgcacacgtgtgtacaacagtcatacaaactatgagctcatagagaagccagagggttaatgcttaaatatgctcttcatagggcatatgacccaggcggcagcagacagacattaaaggaaagtgagggccggagctgtccaagaataaaagttgtcttattatgcagataaagtcccccaggtaatcttttggagctgtcttcagaagaataaacgagaagtgtgtctggccatggtgacttccaatggcttctcttctcaggtggttggttttttcatgttagtaaatgaggcggcttaagacaattgcattttttggtttttttttggaaagcatttttggtcagataagaaaattccagagagaccacctccatgcacgtggagagaaacaaggtgagagaaagccttgattctgagacagcttctcaggtctctcagtatgtcaaagcaccagtctttgagggtatcactttttgtcctcagcataccca

SEQ ID NO: 590228 - DNA, 620 bp, Homo sapiens
ctgattaaacaaataattatatgatgatgcaatgaaatgttgctcaactattgaaacataataatgtagatcaagggttagaaacattttctgcaaagggccaatagtaaatattttagccttcatgagtaaggttatctcygttgcagctattcatctctgccattctagctcaaaagcagccagatatcatacataaatgaatagacatggctgtgttccatttgaactttatttacaaaaacaggcattggtcaggatttggcccttggaccatcatttgctgaaacctggtatagatgatgttctccttgacatataaagatgcccacattatattgattagtgaaaaaaaaatcacattaggaagcatatagtatccttaaagaataatagcaacatataagcctggaaaaagtcctaaatggcagggttgtgttttacattttttcttctttgtgcatgtattcttttccttcccaggggaaggggaatacagaagagaaaatgggttttaactttaaaaaaaaagtgattgtaccagagaaagaagttgtcctaatgtagagataacaatggcactcttattaaataaaatcttccagtattttgccactgtc

SEQ ID NO: 590229 - DNA, 625 bp, Homo sapiens
gaaccccggaggtggaggttgtggtgagctgagataatgccattgcactccagcctgggcaatgagagcgaaactccatctcaaaaaataaaaaatgtatcttttatcctagtgtttgagtcaaaatacgttaattagcgaagaaataagactcttctggagatactgaagcacttcagtgtactctgaaatgttttgtaggttggcagcactgagtctcctctgacctcttttcaggtcaatattatagtttcttttgccttaatccagatgggatcccttcctcggctcccagcaaatagtcataattattattgtcctttcacatgaaatgaaaggaggaaatttaaaaaaatgtggaakagagaaagaaaagagaggaaggggggtgcagggagagagagagagatttctcagcattaaggagcaaatcaaagacagatgagaaggaaaatgagtataaatgatatatgtgtgtgagagagaaaagcaaaagagaaatgaatttaacttagaatagaaacagacatgaaggtgaggagcatgtgcatgtatattcctagcaggaagatgggatggagtaatgaggggaccagaaagtacctggacagagcacaggtttgat

SEQ ID NO: 590230 - DNA, 579 bp, Homo sapiens
aacctagcctaggagtcagctccaccacattgttacttgtcaaggaagtcacagtgtcacagtcagttttaaggagaagagacaggctatctcctcctgatgggggaatagcaaagttttgaaagagaatgtgggacaggacacctgtttgtgattatttttggaaaatgcaatttgctacaaagggataatctcatgaagtatcttattatcttattggcttctctcttcccttgcctccctgtcctacctccttactgccttcttcacgtattcccttcaagctccaaatttttctccctctactatgaagagtagttcagttgtcccccagatcctatttccattgctagacaaaacaaagggactccatttcccagaaacctgacctactatcattagaaagtaaggttttagtttgttccttacacagatttgraagaaaataataatcgtgtccactctctgcagaactgcagagactagcatgagagaaaatgaagagaatatcaaaagactagacaatggccaatgagaaaaacgtgtggaaaggacccctcaggcttggattactcacag

SEQ ID NO: 590231 - DNA, 411 bp, Homo sapiens
ttctgttaagattgtagtttgtatttatatcaagctatactctataattcatttatgtagtcctgttctctactatatgaacataattactgagaacagtcaatatgtccccatttgataaatgactaaaataagaatagcagattgcaacacaacgagttttaaggaggtgaaggatgtttactatgatgctactgaaagctcctctggcttctagagaaagaataatttccattcctgcttctcattccactgactgargtttgtctgtttgcttggtggattagaaatgattttcaaatagcctgctggatacatctaacagaatcctgggatggggactggaaacattctggaatttatgtcctgcactctgaggtcattttcataagactaccacacaattctttc

SEQ ID NO: 590232 - DNA, 569 bp, Homo sapiens
ggaaattataactcaatgtgagatttgggtggaaatacagagacaaaccatattatatcctaagactggagaaatacctccttaactaagggcgctgatacctacccaattcccaaaatggattctgttagcaaagaagaaagaaggaactggtgttacatagacaatcagaaatatgacccaaacctgcttcttccaagtatccaaattctatattatgaaggcctaatgaagtagtctgtcattaagaggatcctagtaggaattataaaatgcagataggcaaaatctaagtttctttaacagaatggggtaatgggctgggaagtctaataaatttataatatctgttgtgctataaattataatgcagggcatataatactaaatggtatagacagaaacayggataaaggactacagaaaattaaaggtgaaaaagagcctacaattggaaagattgaaggggtcatttgaaccaggccttaagagatcatcattacttaatagaaatatgggaatgaagttcaagtgaaaataagaacataatcaagtgcacataaaaggaa

SEQ ID NO: 590233 - DNA, 399 bp, Homo sapiens
gccagggaagaactgtctttgaaatttgacatctgtgtctggataggcgagtgtctttgtgggacctgacagcaggatcttaaagggaatttccatttgcaggttgagcaagcccaactgactgagagaaagaagcaccctgactctttcagtatggacactgctgggggcttgtttggagttgtatgtgtgtccaggcaagtgagtgtcttttgtgggtatcagacagcaggatcagcaactcttaatttgggaaattcctaaggtattttygtttgcaggttgatcaagcccaaccaatggaaagaggaagcaccccaattgttttagtttggacactcttggggcatgtttgttgctgcaacagttagattatgttttgataatggtatgtgtttg

SEQ ID NO: 590234 - DNA, 561 bp, Homo sapiens
ttaggtaaacttttatgtaatttaaaatcttaaaattatttttgatgttcattggatatctgtgtcatttccgattaagaaacagttatgatatggggaaatatgtttcyaaaaattgtggaatcattctcatctataaaatgataatatctgatagttcaggatttcttgcttcctaggtttcactaaaatttaaggtttttaagtataaaaatcgtagcgaatatataattgtgtatataaaatgtgccaaagaagatgtgttcttattgagaaatagattaattttgtgtaattcagaagttgtctaaaagttaatttaaattatgggcttgaaaaggttatttatgaaacaaggtagtaaggacctagtaagcagaggagagtgatgtgaagaaagctatggatatgaagatatatttttggttacaaggttataaagaaaagataataaatttgtatgagaatggatcttctatagtaaatttttgacctaaagtaaaatgatgtttttgtttgtttgtttgttagtttgtttaaaaaagaaaatttaggacaaac

SEQ ID NO: 590235 - DNA, 611 bp, Homo sapiens
gaattaatgagttttaataaatccacatactatagattttctactaattggaaacctaacaaaattaaatatgtatgacatttaaaaattatttttcagaactactttggaactgttaaatttagaggaaactttcctaatagatataaaatatatagtgaaagagccagcaatttttaaaaattttaccattttattagtttttaagtacacagttctaagactgtatgcatttacattattgtacaatcattattaccatccatctccagaaatttatcatcttccctaactgaaactctgttaccccttaaatactaactctctatcccaccttccccactccctgcccagttcctgacaaccaccattctgcttttcatctctgagattttgaccattcagggaatcttacgtaagaagaatcatagaatatttgtccttatgtaactggcttatttcacttggcataacatctgcaattaggatattattttagagcaagagttttaagctggagtctatagagccagctatatttgttttactaggttgatctactttaatgatatttaaatgtctatytgaatgcttcaactaatgagcatttt

SEQ ID NO: 590236 - DNA, 478 bp, Homo sapiens
agaagtgcgtatgaaaattaactatgtctcttgctattccaagagaactattttccctttaaatttaaattcatctttcagagttttgtctataggtgtacattgttttttctacatgcataccatatgtcgacaccaatgtacactattatatgatttttacatgtaacgttatatgataaacattattctgtgtctgttaaatagtttttacaattaccacttggtgaattcctttccaaactagcatatgcttcatgttaggaatgaagatatctgagcttcattgtcttatacaataatcttatacaactgtcttacagscttcattgtcttattacaaagtgaaggtaattgattattagctatatacctgtgtattcgtctgttctcacactgctataaagagctgcccgagactgggtaatttacaagaaaagaggtttaattgactcacagttccatatggctggggaag

SEQ ID NO: 590237 - DNA, 641 bp, Homo sapiens
cccagtgctcctcaaactttaatgtgcatgggaatctcctggggaagctggttaaaatgctgattatgaatcaggtggtctgaggtggaagctgagagtttgcatttctgacaaactcccaagtgatgctatgctagtccacagaccacattccaattcagacctggacaatatattatttgtcccctttgattttagcagaaaagacagaaacaaataataatgctatgtggttatttctgaagaaggaatgcaaaaaagatgaagtggggagtgtgcttctaagaaaggtgcaagcccaggagttgatcatgaagggcattagacgaatgagaacaggacacygactgtagtaggcagaagggcgagctatgtacagaattaagaacaaggtcatgggtacagggcatactgcttgggtgatgactacaccaaaatctcacaaatcaccattaaagaacttatgtaatcaaacaccacctgttccacaaaaacctatgaaaaaaaagagcaaggtcaattacttggtggccttggcgtttcgcagccaaagtgggctcatgcaggaactgtctcaactcagtgtttctgttctggctttattttaaaatttatttattgggttctcatcaccagcacct

SEQ ID NO: 590238 - DNA, 641 bp, Homo sapiens
cccagtgctcctcaaactttaatgtgcatgggaatctcctggggaagctggttaaaatgctgattatgaatcaggtggtctgaggtggaagctgagagtttgcatttctgacaaactcccaagtgatgctatgctagtccacagaccacattccaattcagacctggacaatatattatttgtcccctttgattttagcagaaaagacagaaacaaataataatgctatgtggttatttctgaagaaggaatgcaaaaaagatgaagtggggagtgtgcttctaagaaaggtgcaagcccaggagttgatcatgaagggcattagacgaatgagaacaggacaccgactgtagtaggcagaagggcgagctatgtacagaattaagaacaaggtcatgggtacagggcatactgcttgggtgatgactacaccaaaatctcacaaatcaccattaaagaacttatgtartcaaacaccacctgttccacaaaaacctatgaaaaaaaagagcaaggtcaattacttggtggccttggcgtttcgcagccaaagtgggctcatgcaggaactgtctcaactcagtgtttctgttctggctttattttaaaatttatttattgggttctcatcaccagcacct

SEQ ID NO: 590239 - DNA, 641 bp, Homo sapiens
cccagtgctcctcaaactttaatgtgcatgggaatctcctggggaagctggttaaaatgctgattatgaatcaggtggtctgaggtggaagctgagagtttgcatttctgacaaactcccaagtgatgctatgctagtccacagaccacattccaattcagacctggacaatatattatttgtcccctttgattttagcagaaaagacagaaacaaataataatgctatgtggttatttctgaagaaggaatgcaaaaaagatgaagtggggagtgtgcttctaagaaaggtgcaagcccaggagttgatcatgaagggcattagacgaatgagaacaggacaccgactgtagtaggcagaagggcgagctatgtacagaattaagaacaaggtcatgggtacagggcatactgcttgggtgatgactacaccaaaatctcacaaatcaccattaaagaacttatgtaatcaaacaccacctgttccacaaaaacctatgaaaaaaaagagcaaggtcaattacttggtggccttggcrtttcgcagccaaagtgggctcatgcaggaactgtctcaactcagtgtttctgttctggctttattttaaaatttatttattgggttctcatcaccagcacct

SEQ ID NO: 590240 - DNA, 641 bp, Homo sapiens
cccagtgctcctcaaactttaatgtgcatgggaatctcctggggaagctggttaaaatgctgattatgaatcaggtggtctgaggtggaagctgagagtttgcatttctgacaaactcccaagtgatgctatgctagtccacagaccacattccaattcagacctggacaatatattatttgtcccctttgattttagcagaaaagacagaaacaaataataatgctatgtggttatttctgaagaaggaatgcaaaaaagatgaagtggggagtgtgcttctaagaaaggtgcaagcccaggagttgatcatgaagggcattagacgaatgagaacaggacaccgactgtagtaggcagaagggcgagctatgtacagaattaagaacaaggtcatgggtacagggcatactgcttgggtgatgactacaccaaaatctcacaaatcaccattaaagaacttatgtaatcaaacaccacctgttccacaaaaacctatgaaaaaaaagagcaaggtcaattacttggtggccttggcgtttygcagccaaagtgggctcatgcaggaactgtctcaactcagtgtttctgttctggctttattttaaaatttatttattgggttctcatcaccagcacct

SEQ ID NO: 590241 - DNA, 544 bp, Homo sapiens
cgcctggccaagtagcctcccagctacttgggagactagggtgggaggaycacctgagcccactgcactccagcctgggaagcagagtaagaccctgcctcaaaaaagcctcagaaaaaaaaaagggggggggcaaaacaaaaaccattgatgttttttctttctgtgctgcaaaggtatttgtctaaaacaggctttctcaacttctgttaattctattaatattttggaccagataatcattcgttggggggagttgtcctgtgcattgtgggatgtatagcaacattactggcctccactcactagttgccagttgcattccctcctcccaactgcaaagattgaaaatgtctccagacattgtcaaatgtcccttgggaggttaaatagctcctgggtgagagccactgctctaaatgctgacaaatgaaaaagacaatttgctctctgggggagtgactgacaaatacaaaggtgttgggggcgctctccaactataaggcttgttctagtgccccacccaccagcccttagccaacag

SEQ ID NO: 590242 - DNA, 525 bp, Homo sapiens
tggcttaaacacagaaatttatttcttcagaattctggaggctaaaaacccaagatcaaggtgacagcaagattggtttcttctgaggcctctctccttggcttgtggatggtggtttttctccggtgttttcatgtgatcttctctctgtgtgtttctgtgttctcatctcttcttctagggatgctagtcatatgsgattagggcccaccttaatgacctcatttaaccttaactacctctttaaagacaatctcaaaatacagtcacattctgaagtactagggattagaatttcaatatatgaattttggagggacacaattcagcccacaacatgcaatcaatagatcattaacatttccaatgtattttaatgattcccatgctcaatatactccttcactctacattggctttttttcttgctaaacacatccttcagcagttctttccggaagatctaaaccactacttagctagtcttctactcagggaaggccttaatctgtagtagttgaaaca

SEQ ID NO: 590243 - DNA, 483 bp, Homo sapiens
gtgggcaacttggaatatgccaagggcttaatatcaaagctggacgagcagccctgctgagctgagggagagtgaaggagcgtttgaatgggttgaagagtcatttaccaatgcagtctcaaaagcagccttttcatgtttttgtttttgtttttgttttttttttacgcagtaaaaatctcattaaattgaaactcaggagacctggggaggcgagggtaggggagcagccttcatcacaacactgttcagattttcccagactttaatgaaagggcactagggcatcccaccacctgagcaatcacaggattttaatgacccactgttagaaacaaacagcagcttgggcttcatgggtctttgcaaagcattttagcyccccaagccacaaacgtgcccctttttccctctcgcccccttatctgttttttggactcctcaaccctactttaatttctcttttttggcaattctgctttc

SEQ ID NO: 590244 - DNA, 483 bp, Homo sapiens
gtgggcaacttggaatatgccaagggcttaatatcaaagctggacgagcagccctgctgagctgagggagagtgaaggagcgtttgaatgggttgaagagtcatttaccaatgcagtctcaaaagcagccttttcatgtttttgtttttgtttttgttttttttttacgcagtaaaaatctcattaaattgaaactcaggagacctggggaggcgagggtaggggagcagccttcatcacaacactgttcagattttcccagactttaatgaaagggcactagggcatcccaccacctgagcaatcacaggattttaatgacccactgttagaaacaaacagcagcttgggcttcatgggtctttgcaaagcattttagctccccaagccrcaaacgtgcccctttttccctctcgcccccttatctgttttttggactcctcaaccctactttaatttctcttttttggcaattctgctttc

SEQ ID NO: 590245 - DNA, 485 bp, Homo sapiens
ctgtgggcaacttggaatatgccaagggcttaatatcaaagctggacgagcagccctgctgagctgagggagagtgaaggagcgtttgaatgggttgaagagtcatttaccaatgcagtctcaaaagcagccttttcatgtttttgtttttgtttttgttttttttttacgcagtaaaaatctcattaaattgaaactcaggagacctggggaggcgagggtaggggagcagccttcatcacaacactgttcagattttcccagactttaatgaaagggcactagggcatcccaccacctgagcaatcacaggattttaatgacccactgttagaaacaaacagcagcttgggcttcatgggtctttgcaaagcattttagctccccaagccacaaacgtgcccctttktccctctcgcccccttatctgttttttggactcctcaaccctactttaatttctcttttttggcaattctgctttc

SEQ ID NO: 590246 - DNA, 544 bp, Homo sapiens
ccccactcccacttcctcctggtggttgctcaacccaggtaaccatgaatctattctctgcctctggagatttgtcttttctggacaatctttcttcttaaactcagcagagtgagttctgttgtttagaactagaaaccctgcccaatagaatactaatatcctcttgttttgcaagggagttagagtctcgctctgtcgcccaggctggagtgcagtggtatgatctcgcctcacttcgacctctaccttccggattcaagcgattctcctacctcagcttcctgagtagctgggattacagacgtgcaccaacacacctggctaatttttgtacttttagtagagatggggtctcaccatgttggccaagctggtcttgaactcctgacttcaaatgrgccacccgccttggcctcccaaagttctgggattacaggcatgagccactgcacccagccctaatatcctcttattacaaaagaagaaacaatgactcagaaagattaagtcacttacccaaggtcatgtagtcagtaagcaa

SEQ ID NO: 590247 - DNA, 529 bp, Homo sapiens
ttattgttcattaaagtctttttctttctggttgaagtactccctttagcatttcttataggacacrtctgctgttggtgaaatcccttggctttttgttgttgttgttgttgtttgaggaagtctatttctccttcacgtttgaaggatatttttgtcagatatgctattctaggctaaaacttctttttttttccttcagcactttatgtcatgccactctctaccggtctgtaaggtatctactgaaaagtctgctgccagatgtattggagctccaatataaggtttttttttgggggggggggctgcttttttatcctttctttatccttggccttcggaagtttgattattaaatgccttgaggtagacttctttgggttaaatctgcttggtgttctaaagtcttcttgtacttggattttgctatctttttctaggtttgggaagttctctgttattatccctttgaataaactttctgcttctatctctttctttagtttctctttaaggacaataagtc

SEQ ID NO: 590248 - DNA, 378 bp, Homo sapiens
acagtgaatgctggctttaccacatctaagtacacttatctcccaactgtagaataagcccttttccaatttctacaatcaatgaaattttcctgactttctttttaaagtcttgcttcttttgaaacaatatagaaatctctagtttacagaaaacaaagtagagatggggcacaagaaaattttgtctggaaaaacaaaacaaaaattaattttccaaattaaattgttgtaagatttatcaaaacaaaaccaagcaaacccacatatttttgtcttctttggaaaagaaagaaraaagaatggaaaaggaaggaagaaaggaaggaaggaagggagggaagaagggagggagggaggggaaggggcctggtggca

SEQ ID NO: 590249 - DNA, 569 bp, Homo sapiens
cctcctaaaatttaaacagaaaagtttgaggattgaaaagaatggataagtcctctggatccttctctttataaaatgctctcctttccttatcaccttagaaacaatgggatgaactatagtgggaycaaagagagagaataaaatctcagaaggacaaagtctaaacttggggtttttcctttctctgctaatgcactgactttcattaaatccagaattaagactgccatttaaatagcataagagggtaaatgctgtcagtggacatggcccatgagaaatacccctccttatctaccaagttgttttgacaaccaatgatgctgttgagtcctctgttctagtttccaccctcaggccatactgacagccttacgcacaggtggtcatatggggaatatatttggccttctgtcataaaccccatatcctctagaaatcgatcacttctggccttgctgaatcacttttcctgatgctacataaatggctttaggtgttggcaatcaatcatggaaaaccaaaaacatcactgcaaagtttcagataatctatattgaaaaaca

SEQ ID NO: 590250 - DNA, 420 bp, Homo sapiens
ttggtgaacatttggtagacatttctgtcagagagatagatatagacatagacatagatagaaatagagagagacaaatcgtttgatcatagggaaggcacatgtttatcattagtaaatgctgccaaacagctgcccaaagtgactgtacttggttagactccatcagcatatcgaagagtattagttgctctatatcctcaccaacaactagtgttttctgrggtttttatttgttttttcacatgtcttttagcagggtcaccactcctacccctccatccctgaaccacttacgtatggtttgccttctaggaattctgggaactgcagttgtctttattgtgttacattttaatgatgctttagtacttagcactctttgtatactggcattctgggccagtgctcccaatgggc

SEQ ID NO: 590251 - DNA, 537 bp, Homo sapiens
aacatttttcagtctattgaaatgaattacaaacgtttttaaatagaaaattagttaaaaaattggaggctgcttaatcgatagctttctctataaacatacttggatttcacaaataagtaataccgtaaaaatcttcttctccaaagaaaaatccccacaaataaatctattgatacctagtgacaagtggaaccagataaaaatggaatctataagaattaacctaattgacagcgctctggagctaatccatttccattagttatttgttcacagtaggtactcctaaggacttgttgaattgcgggcttggcgcccrttctacggagagttcacagccttcgtgagtggggacagaaggcggctcggcccggtgattcaggtcgaaattcaagctgaacagcctgctgagaggtgggatccaccatccggacagtggggggctttgggggtgctgtgagactgggctgcgacccaggtccagcagggagtgtgcggcacagaccacaaggtcggcgaggccccctaacccgc

SEQ ID NO: 590252 - DNA, 467 bp, Homo sapiens
aactgcatttaaagtcccccataaaaatagttgtcagtcctagcctgaatcttatccacagaaaaatagtgtccaactttttgcagctctgcccatttgggaggcaaagctgtgtcccacagctcaacccatctgaaagttctactaatttaatccctttctacatggctgcaattttaccactctcttccttttcttcctgtcagctgacacagaaagcagcggcacctcggaattatcaccatcacacttaactgagccttcatttatacccacagcctgataaactgttctcatcccttagttttacagcaattctatgtagtagatactcttattatcctcattttatagatgaggaaactgagayagaacaaagctaaggaacctgcctaaggccacatggtaagtggcagaatccagatttgaactactgcagtttgattccagaacccatccctctccat

SEQ ID NO: 590253 - DNA, 508 bp, Homo sapiens
taaggtctcgctgtgttgcccaggccggtcttgatcctgggctcaagcaatcctcccacctcagcctcccaaagtgctgggattacagacaatagctaccatcgtgcctgaccacattttgtatgttcattcagaaatgaacttccatgtctgaaataatgaggataatttaaaatttttattactacaattactgttggtatgattgatggatatatgttttttaaatttcaagtagttcaaagaatatccccctctctgtccaaaagacatgtttgattttttaaaaattagagaactattcatgaaattaaaatcttaattactcaaaaaattaaaagtgaagtgtttttttgcctccattcctcatttttttcttatgtggggtataattttcttctttctcccttgtgttkctgatcttcctaaatggtttatttactaaaaggatgaactgtgtgattgccaattttctttttcgtcatgttacaaagcttttaaaatatga

SEQ ID NO: 590254 - DNA, 599 bp, Homo sapiens
catctctagctgccaccataaagatacaccaaattctcagtggcctaacatgatagaggcttattcctcacttgcacagtctagtgtgggtcaggatcttccctccacgttgaagcaaagccatttgggtcacatagcctatgcagtagctcagcaacgtcttttctcctacacctaaagattcatccccaagtattgccttacccaattttggctctatactcaaaaatctataataaaatggtcatttatgccawtatcaactttgacaggaggcaagatcagtgatcaagaaaactgtgcagttctggcacctcacccagaagcaagaatggaataaaagagcagataaagaggactggaaacccagattcactggcccaaagatttggaaatatctggcagcatcatggtccaaaccttggtcagttaagcccgactcttttattgaaattgttatcccctacttagtcctgccacttggccactgcccaaactactcaatggtcctgtgccctgacctatgaccacactagctcctataaggccgaagctcgccatactagcacatactggtgccatctctgccagctgtcacc

SEQ ID NO: 590255 - DNA, 589 bp, Homo sapiens
tattttgattaaaaatgtttgcagaaaaatatgaacagatgtgctatgcatatgtgtatacatacaccaaatagcacttataatttgagagggggtaatttcaacattgctaagtggtaacacaagctaggtatttaagggaatgatataatatgacaacttcatagactaccaaactatgtatggtctctggaaattgtcattatcaacatgtacaataactagtagcattaggtggtctgtacagtatccttcatgtctaattgagtcacacagtctaagacacttgatgggcaccaggcactgccttctaatgggaactgactttcaaaaaaaaatgcattcagggcctcttctatataaattactatcgtttgcagcaagagagaattataaatgtttgctggcaaaaactaaatttatttacaaactgrgtctaatttatttatggctgcagtacaatcggcttttgttgaaatatttatgttatctgtacttctgcctcactaaactctaccacaatcataaacactgttgaaaaattatttgcagttagcaggatttaagctacccattatatcaccagcta

SEQ ID NO: 590256 - DNA, 605 bp, Homo sapiens
  misc_feature 131: n = A,T,C or G
ttgttttctctaagtgatctgatgtttgtctacatgaactgccatcctgcagaatgaccaaaaaaaaaaaaggcgggggtggggtggggggaagaagcaccctttagtaaagttattctaatacaggaatntaaaaagtctctctagttaactttttagtgtcttttagtaaaagagcccagtctctgtatttctccctgtttctcaaggtagcctctgggtacatggcgagtggtctgggcgccttgaccttggcagaggaggacaggggaggctctcctgtcagagtaggcattttttcatcctcactggtcttgcgagtggataggcagccagctcctttgtgcccctgagatataactgttcttggcattcttttggcatctgctgttggagcatgaggctggtgtaagttgggtgtcagcttgattaatgctggtggtcctgcctggctgattggccttcctagatgtctgttggcattgctgayactcctaaggtctggctgtggctcccatatacaccctgttcagccacatggcttctgctgaaacagccccctctctgtcctgactggctaatattactgtgatagaaagatttta

SEQ ID NO: 590257 - DNA, 606 bp, Homo sapiens
ttctggttccttctcatttgggtaggctctgtcagggggaaggtctagggctgaaggctgttcagattcttttgtcccatggggtgttcccttgatgtagtactctcccccttttcctacggatgtggcttcctgtgagcagagctgtagtgattgttatctctcttctgagtctagccacccagcaagtctacccagctccaggttggtactgggggttgtctgcacagagtcctgtgatgtgaaccatctatgggtcactcagccatrgatacccgcccctgttctggtggaagtggcaggggaatgaaatggactctgtcagcgttcttggctttggtggtttaatgctctattttgtggtggttggcctcctgccagcacgtggtgctttccagagagcataagctatggtagtatggagaggaactggtggtgggcggggccttgtaactccccagagtatatgccctttgtcttcagctaccagggtgtgcagggaaggcccatcaggttggggcagggccaggcatgtctgagctcagactctccttgggcatatcttgcttcagctgctgtggggaatgggggtgagcttcccaggtc

SEQ ID NO: 590258 - DNA, 606 bp, Homo sapiens
ttctggttccttctcatttgggtaggctctgtcagggggaaggtctagggctgaaggctgttcagattcttttgtcccatggggtgttcccttgatgtagtactctcccccttttcctacggatgtggcttcctgtgagcagagctgtagtgattgttatctctcttctgagtctagccacccagcaagtctacccagctccaggttggtactgggggttgtctgcacagagtcctgtgatgtgaaccatctatgggtcactcagccatggatacccgcccctgttctggtggaagtggcaggggaatgaaatggactctgtcagcgttcttggctttggtggtttaatgctctattttgtggtggttggcctcctgccagcacgtggtgctttccagagagcataagctatggtagtatggagaggaactggtggtgggcrgggccttgtaactccccagagtatatgccctttgtcttcagctaccagggtgtgcagggaaggcccatcaggttggggcagggccaggcatgtctgagctcagactctccttgggcatatcttgcttcagctgctgtggggaatgggggtgagcttcccaggtc

SEQ ID NO: 590259 - DNA, 521 bp, Homo sapiens
gagccgaggcctggaatcagagaccccaagagcctgcttggtgttctaccccattgaggccaagctagtacccaagctgattttggttcttatcttgtgtgagtagctgttaaatttgtgttcccatgggggaatgattgctggagggttctatttggtcatcttgctccacctctctcctccttacagactatttttaataccatttctgggaagtgaaagaaaagctctttatgacttacctactatgtactttcctgagctggatatcatagaatatagtagcmatagagttggaccactttagtccctcttctttgagtaggagagatttttgtcaagtagctggattgggacacatcttctttccttttctcctatgtaaggggttcatggcaactcctcaccatgattgatacagacagtgttatagttattgctgaagcttagacttctgtgggattggctgaaggttttctttcaattcttttaaatttattgagtctggttttatggcccaa

SEQ ID NO: 590260 - DNA, 564 bp, Homo sapiens
taaaaacatttatttgcttaaaattagaagttcatgaataagtatactaataatatgcaacaaggaaaaataaatacaattcctttaaaaaaacaaaaacaagatatcaatgtaatggagtaactttttttttwaaaaaaaagaattctctatggctaataacttattttggaaaaaaagcagaattatcagtctttcttgatgccatacctatagcctatgaccttactggtaaaaaggtttggtaggaaaatccgagctctactttttaatagaaatgattaaatttaataaaaatcataacttcaaaagctcactttatttcatgctgttcttaaatatttattaaatttaatagaaattattaaatttaataaaaattatataacttaaaaagctcattttatttcacgctattcttaaaataatacaaaaataccttactctatacatgtttaaagatataacatgactgataggtctgttatccctcttgcataactttgtcttgaaaaaaaacagctaactaaaatagctgatcttaaaagaaatcgttaaaaaaat

SEQ ID NO: 590261 - DNA, 606 bp, Homo sapiens
ttaacatctgatgccaataaattaactgctgagaacatcactagtgctacgcgagtggttggacagatattcaacacttccagaaatgcttcacctgaggtaaaactcacagagctttaaaaaaaawtttttttttatttttagagggggtgttgggaaagaaagagagatgtcctgaataccactccttattccacaatatggtttgagcatggtttaagttgcttaaaggcattttgcatagcactcctgagagacgctcaaagattaaaaaaagggcctcttgtccaaatattttattttaggatattcctaatgatcattattgtgttgtctttttcttttgagacagagtctcattgtgtcacccaggctggagtgcagtggcacgatcttaagtcactacaacctctgctttctggattcaggggttcaagtgattctcaggtctcagcctcccaagcagctgggactacaggcacacaccaccacacctggctatcacattaagtcttttaggaagtcctggaatgcataagtctacttcaccttatgaatatgtttaccaactacatttgaccttaccatccctagtgcattccaagt

SEQ ID NO: 590262 - DNA, 533 bp, Homo sapiens
atatttcaattggctgtttatataagggtcatctcttagctttggggtaaacccgatggaaaaggagagggttctcactgtcatttaaagaaaaagagtgaaagactggcaccatttgctgttactattttgccttgtacattttattgagagtgcatttgagttggtaaattctgtttcttttcacttcactccactccactctactccacttctttttatcctatcccatcccatcctatgtaattgttgaatattcttgcttgggttcctttattcaggtatagacataaattgtttttacatttttttaagggggagagaggtcacacatatctctgagaaactgatgaaagctataaatgtcttagtagggaaaatatatataaacacacaaaattttgcataaattaattttattgcattcaaaatttattttgaakaatcactccaggctggagtaacatatatataaattaaaagaacatataaattaagtctctttcacttttatttttcttggaaaagtaatg

SEQ ID NO: 590263 - DNA, 554 bp, Homo sapiens
ttttaaattgctttctcttatctaattgctctggctaggacttccagtrctatgttgaataacagtggtgaaagtgggcatcctttttgtgttccagatcttagaggaaaggctttcagtttttttcccattcagcatgatactagctgtgagtccgtcatatacagcttttattgtgttgaagtatgttccttctatccccagtttttaagagtttttaccacgaagtgatgttgaattttataaaattttttttagcatcaattgaaacaatcatgtgggttttgtccttcattgtgttgatatggtgtatcacattgattgatttgcatatgtaggaccatccttgcatttctgggataaattctactttgtcatgatgaatgacctttttagtgtgttgctgaatttggttttttagaattttgttgaggatttttgcatcaacgttcatcagatgcattggcctgtagtttctttctttctttctttctttttgatgtgcctttttctggttttggcaccagggtaatactggcctcatggagtgagtt

SEQ ID NO: 590264 - DNA, 554 bp, Homo sapiens
ttttaaattgctttctcttatctaattgctctggctaggacttccagtgctatgttgaataacagtggtgaaagtgggcatccttkttgtgttccagatcttagaggaaaggctttcagtttttttcccattcagcatgatactagctgtgagtccgtcatatacagcttttattgtgttgaagtatgttccttctatccccagtttttaagagtttttaccacgaagtgatgttgaattttataaaattttttttagcatcaattgaaacaatcatgtgggttttgtccttcattgtgttgatatggtgtatcacattgattgatttgcatatgtaggaccatccttgcatttctgggataaattctactttgtcatgatgaatgacctttttagtgtgttgctgaatttggttttttagaattttgttgaggatttttgcatcaacgttcatcagatgcattggcctgtagtttctttctttctttctttctttttgatgtgcctttttctggttttggcaccagggtaatactggcctcatggagtgagtt

SEQ ID NO: 590265 - DNA, 467 bp, Homo sapiens
ccttcttactccaaagttcaagcccttcgtcatgctcctctgcttcccagagatagccaaagataacagctgagatagccaaagataacaggcagaatactcaaactaattaaggtcccacaaagagcaaagtgaagttgcaccactgacatccttatgattcttctatgtgtacattcttctcagggattcttatttcttttcagatcacccaaaggaagacatttaatgtgctatctgatgtaagagatactttcaaaaattaagggtaatggttagggcaggaaaaaaggtagcagagatgcagcacagaaatacctgtcacagagactaggcagctcattctaccctgccccagamcccacctaacctccagccctctgcagaagcaacctcccaaaaaagagagctataaatatgcaaatccaaaaggaggtgatgatggaggcaagacatgctcgcatgct

SEQ ID NO: 590266 - DNA, 471 bp, Homo sapiens
cgggttgatgggtgcagcaaaccaccatggcatgtgtatacctatgtaacaaacctgcacgttctgcacatgtatcctagaagttaaagtacaattaaaacacacacacacacacacacacacacacacacacacacacacacaaagaagacaccaaaaagaaaaatatggtaaggaacattagcgtaacctyttctatattagcagggccaccaaagagaaacgcatataggttagaacactggctgtaatacagtagttcaagttcaaagatgtgcacacgagggaggaagaccagaactatccaactgaatgaagacagagaaaagggagcacattcatttgagattccagagatcgttacactatgtagctctgcatgggataactatattgcacaaggcatgcattttaggttgttaggagttcctgttctttttctttttctattctttttgtaaaaaccagaaa

SEQ ID NO: 590267 - DNA, 561 bp, Homo sapiens
  misc_feature 350: n = A,T,C or G
cacactaaggtcatcattgctgggacagagtaagaacttcaggagacatccacctcagatggtgggaggaggtcacaggttacagaggataagagggggaaccaggaaagacaaagaatgagttctttaaggagacgttaacatcccactaatttccaggaaaacaaaatcttcaaaataaatgtgtaacaaaaggaacaacaacaacaacaaaaaagtgaagaaacgaaaccataattagccctgtacatttaaatgtcaatatacatagcactgtcttaggtatgaaggagggttaaaaagaaaagtgtccaaaggcgtttaaaatccaaaggagtttagagttaacncagagagtgggaaaaaacaaacaaacatcataattacacatgtaaatgtagaaaaaagtattcattttgttttaaaaggctctttttaaagagccatcacatccattattcacagttaaaaagtgamcaccaattctgtgagagagacagggtagacattattattaatctcattttattaacttagaatttgatgctgaaagaaaatcaa

SEQ ID NO: 590268 - DNA, 551 bp, Homo sapiens
agcagaaagaaataaaacaaagaaaacaatacaacagatcaacataacaaaaagttggttttttgaaaaggtaaacaaaatcagcaaacctttagccagactaagaaaaaaaagggagaagaccgaattaaataaaatctgatatgaaaaaggagacattacaacaaataccacaggaatttagaggatcattagaggctacaatgagcaactgtacaccactaaattggaaaacctagaagaaatggatacattcctagatacataaaacctaccaatattgaaccatgaagaaatccaaaacctgaacagaccaataacaagtaacaagacctaagccataatgaagtcttccagcaaaaaaaggcctggtacccaatggcttcattgctaaatttcaccaaacatttaaagaagagataataccaatactactcaaactattctgacaaayagaagtgaagggagtactttcaaactcattctacaaggccattattaccctgataccaaaaccagataaaaacacatgaataaaggaaactacaggc

SEQ ID NO: 590269 - DNA, 507 bp, Homo sapiens
gtgtgaatctcctgctacttcactaaaatgatttgagatggatatttaatactattttcttttttttattctaaaagaaacccgttctcacattagaaaacttgaaaagcataaatagttttcaagaatacaactgttagtgttacttatttttcccactacctggaggtaacacttgttagagtttggtgtatttctktaatcattttatttatatacttacatatttcctctgacataattgatatatgacataattgacataattgataatatcaactgggtatacagtattacattagcttttattttcacaagtagaaaatctttaaaccacctaggcaaggtacatgaaagataaacaataaaggcaaatgggggtaagaactgttcatggatatctcattcctagaagcagcatgatgaagtggaaatccacggattgaaggaattctcttttcttcctggattcctacttcagtgctcaaatctcaacttgccagccta

SEQ ID NO: 590270 - DNA, 532 bp, Homo sapiens
ttcctgctcctgaaacccaaaagcctcccagatctccccaaaattcccttaaaattgggcagcaaagtgaagtcatgctttcttatgctggttccttagtaaaacaacctgtctgtagcatgatctattttttttaaatcaatgttgtttatgttaaagtgttaactatttcataaaacgtgcactgcggaacacccccagctgaaagaagtgtcttaatctgytctcgctgctaaaaggaactgcctgagactgggtgatttatagaggaaagagatttaattgactcatagttctgcatggctggggaggcctcaggaaattaacaatcatggcagaaggggaagcaaacacgtccttcttcacatggtggaagaagagagaagtgcagagcaaagcgggggaaaacccgttataaaactatcggatctcatgagaactcactcactatcatgagaacagcatgggggaactgccgccatgatctaatcaccttccatgagatctctcccccaacttgtggggattacaa

SEQ ID NO: 590271 - DNA, 528 bp, Homo sapiens
aactaccacagaaacccaaagagtctttcttggcagatgccaggtcgtggcatgtcaacatcagctctctcattacaggtatggtaaggtcaggtgggggcagccactatgggattgggtgaccaatcatctgaagaaataagggtcacaaaacacatgttattttaaagggttggtcttagctagtttttcttccctagggaaaatgtcatcccacttcaaatatcaacaactttgacattttgagcaagaaagcgagaagccccattagggaattgaatctgtgcttcctccaggctccaataaacccaacttttattacatgatgcctctatgtgaaaacattaactttttaggccgggcactgtggctcacacttgtaatctcagcactttgggaggccgaggtgggcggatcacctgaggtcaggagtgtgagaccagcctgaacaacatggcgaaaccccgtctctactaaaaatataaaaattagccgggcgtggtgkcatgtgcctgtaatctcagctac

SEQ ID NO: 590272 - DNA, 412 bp, Homo sapiens
tcactcatgatcatttaacatttatctacttgacttactcataagttcactttacatctttctgagatagttattgtataccttctcttcatcctccaaattttcacatgctttttctccacccctctcctcactctcagctgatgatcccacttgaaaaaacaggaatgaaaagkcagaactccattatctaccaggcaaaaacatctacaaaaatcaacctctattctcacctacattctctgcctacctcgctgccacaatggaagttgtgttcctgctcctgcacctgccctcatttaacacctgaaattcaccctctcaccatccgatatggtttggttttgtccccacccaaatctcatcttgaattgtagctcccaaaattcccacgtgttgtgggaggaaccca

SEQ ID NO: 590273 - DNA, 637 bp, Homo sapiens
cttcagttttcacaagaaaaaaaaacagaagatatattttctacccctatttaggagatgacaggtggagcttccaatccacagaatgctcatttctaacatgactaacaactcctatatgccacttctggccaatgagctctcaattacttgccatctgtttcttttcaaagaggccttccatgagccaacaaccagaagcattgcactagggatcacctggccagagatatggaagttccattcctttaactcttataccgtgccatatgctggtaaatattaaatggccagcttttcaggaggaaaaagcactaaatcatagcttttgccaatttctgtagtgtaaatactcatgccatagtagatttcaacttaccaatatgaagtcactgaacatggagctggaaagagctgcatggtagcacaccattaggtcatgttcccaacctacagatagagtggacatagtcacaaaagtaaagataatggcraaaatgtagtaaaataattaggaaacagtaagtttcaaatacgtattacttttgttttttaaggtaatttatgtattataagtcaatatactttattttttgataatggctatgtttaacaattggctcacaaaaccactgca

SEQ ID NO: 590274 - DNA, 596 bp, Homo sapiens
cgggatgaatcttagatttgtcagtccttttaggaatgtattcatcttccttgtaacggcagcctttcccagacaaaacttgggtcactggctgaacttcccttgacaacaggtaggcaggagagtgagaaggatatttggaggtggagtgataagggaagaagtgatttgacctggactgaagccgaaaagatgccaattacaatgcacagggctgtaaatgactcctcagggtttttgcagaatgttagttgctagctgtctccttagaattttgtttcagtgatttcctctgatctcttttttatttcccttccttcccaaagtcttgccgaaagaaaattctaacttcgtgaaacaagcaatattcatttatgctttccaatggaggaaagaaagcaaggggaatttagaggaaggataataatgtttgtacattccagcaatgcaatgtactccatctaaaatcaaaattcaaattgtgmtgagcagttttttataaagttaaacatacacctgccattcgactgggcaattctactcctaggtatttacccaagagaaataaaaacatatgtccacgtaaagacctgtac

SEQ ID NO: 590275 - DNA, 488 bp, Homo sapiens
gataagcccatatgttaccaaaattctgtgaaaaagctattactttccaatctgyttctcatgtttaagatacagaacacacagatgcttggcatcactcatcagtcttcctaaattttcacaccagataatcaaggtccaccaataactttcctatctaaaaatcctagaaatgtctttattccatcagtgcctggttcccttgttaaatctgaaagtaaccataaaagaccattcagttactgtacaataagtgttaatttgctaatttcttcacaggtaatcaattaaaatgtaaaatattggataaaagtagttgcactaaatttaacagctgctccataagcataattagtttcacaagggccatatgtattctgaacagagacagagttgaaacaaatagacagattttaaacaagtttgagaaaatctgcatttaattagcaggtgggcactacaactgcataacatttttatacatttat

SEQ ID NO: 590276 - DNA, 548 bp, Homo sapiens
  misc_feature 202: n = A,T,C or G
aaccacgtgaaaaactgtgtctccagagtgtgaaagggaaagagactttctctatgattcacattcctactgaggagccaggcaatgtaggccatggggcaaggccttaaccctacccagtgctggagctgatttagtgaggtgtaggaagtatatgataaggagcagcaaaaggatatactctggatacactcccagaccncagcagggaaggagggaagccattctcaatcctacctcatagaggaacctcatagacatgtgccaggtaactcaggcagtggtcacaggttgagagaaactcccaactaagatttgtgatattatcttgagtggggccaaacttccttggccggaacttaggggcaagtgggaagtgtgctatagccaactgtaccctaaagctattgaaataaaatacattaaaagttaaataaaaatgaaatgccttttttgtcactagtatgaatttatgtcttaaattctattttgcctaatagtagtatagccactayggctcagttttgactatgttgtgcatggtatat

SEQ ID NO: 590277 - DNA, 562 bp, Homo sapiens
ctcgtgatccacccgcctcggcctcccaaagtgctgggattacaggcttgagccactgtgccyagccctagatgattttttcatagacgttttttctcaggtttttaactgcagtgccattttagtgtttcacatcttgactcacattggagccctttgttgcccagatacaattagggaccagatttccacctgggatggcaaccacattgtgggggacctctagttggggctcctgaattgactgaatgtacccttagttgcttagctaagttagagctacttttctgtttttcagctaagtttccatgttgtgcagagaggggctatgacctcaaatcagctgagtggatgatctgtccatgttcaatttccatggctcctcttcactggtatagataaccagacagtgactgcacttctttatgcaatatttagcacagtatcaagttggagactttcatatgtgcttttggttgaggtgattttgttttggcagtaccaaatttcttgctatttcttgtgcctcatttatgcagcgtgacggaaagattgagagaat

SEQ ID NO: 590278 - DNA, 582 bp, Homo sapiens
ctcacaaattaaagtttttaaaaccccattaaagtaaaaatactgcttcagagctttcattggtatgtttttgaaagcaagtgtcatagtcaatgtaaatcttcaaaaatttctctgctatttagtacaacagagggtggattttgtgccagggtggcatcctttgtgtaattcacatggcctgargcttcttgcctttttttcccctagaagagttggaattaagatactaataatcataactgtaataattatcatcatgtttttaaggggttgctgagcctctggagatctcagtgcacagagcgaagcaggagaggcttaaaaaggaaggctctgctgctgatgctgtgatgaccaagcagcctattattacttttcctcttcaacgtgactgctctgtttttttttttcctgatcctgttacaagatgtggggaagccccttaagaattgtgcatagttcgctacagatggtggtctctgtgcccagagaccgaaagagtatctgttacagcgatactttgtaacagctgcagatgtgcgggcctaaaactgctccatgtgttcaaaccaataataa

SEQ ID NO: 590279 - DNA, 582 bp, Homo sapiens
ctcacaaattaaagtttttaaaaccccattaaagtaaaaatactgcttcagagctttcattggtatgtttttgaaagcaagtgtcatagtcaatgtaaatcttcaaaaatttctctgctatttagtacaacagagggtggattttgtgccagggtggcatcctttgtgtaattcacatggcctgaggcttcttgcctttttttcccctagaagagttggaattaagatactaataatcataactgtaataattatcatcatgtttttaaggggttgctgagcctctggagatctcagtgcacagagcgaagcaggagaggcttaaaaaggaaggctctgctgctgatgctgtgatgaccaagcagcctattattacttttcctcttcaacgtgactgctctgtttttttttttcctgatccygttacaagatgtggggaagccccttaagaattgtgcatagttcgctacagatggtggtctctgtgcccagagaccgaaagagtatctgttacagcgatactttgtaacagctgcagatgtgcgggcctaaaactgctccatgtgttcaaaccaataataa

SEQ ID NO: 590280 - DNA, 567 bp, Homo sapiens
tacggtgatcttaaatattgccgtattttctagttctcagagttagttttgtggacatttgtcctttctttaggaaggaacattatagtaaacattatgggccaatttaatagcaaagtatttttactgatattgtattgaaatttaaatatgaaaacacacccttcaaattctgccaatgaggtgggaaggctttgtctattacatgtcatctacacagtggatgccactcaaagttttggggcttcgaggagatgtccaaatttcaagttgatccatagacttaataaaatctctatttttgtccccaaatttccaattactgatctaaacaggaacagaccgtgtcataaacaacttaattgcttgcttaaatatgtgattccacgcatgccacatattttcttaattggaaaaatatggcagtacaccagttactgcaggcaccaagtgccaaatcaattttattgttgaactccyttgaattggtatagaacgctctgccattgagataaagacgtttcctaacactgagctagcaccaaaggatttttgctctaagagaac

SEQ ID NO: 590281 - DNA, 577 bp, Homo sapiens
gggcacaaactgtgattctgaaaagccagcaatgttctatttcatgacctgcatggtttttacatctatgttcacttcataattatccattaaattgttcagttctgtttgtacattttcgcatatatattttgcattttgaaaaatttagaaagtttgatataaatcagatgtttrtacttaagaatacattttatctatagaaataagatggtaagtaacatttaatcagattgacccataactttcagttaggtaatataaatactgtacatttcaattaaaaaataatatagaataaatattttgggaccaaaattgatacaaagaaggaaaaacagaaaggaagatgaacttcaaggccaagctaaaatttcacttctgatgtaaaagtcttctttggttcccaggcaaaatttatctttcaaaaagtatgcttctggtttaaatgtaacatattgggtggtaaatgtgtatctcatctggcacatttgtctttgtaacttctctgaggcctagcacaacaactggcttaaaggaagtgcaagtacaactgtcccccttcataaatacatat

SEQ ID NO: 590282 - DNA, 629 bp, Homo sapiens
gagacataaagtagatcattggttgcttgtgggttggggtttgtggtggagagctggggggtgatggctaaaggatacagggttgctttgtgaggtgataaaagtgccctaaaattgactgaagggatggttgcacatacctgtcagcgcacacacaaaaacactgaattcatactttaaatgggaaaaatgtatgatctctgaaatcatctctcaataaagctgttattttaaagtaggtccaggtatgcaatgtaggggcatgccctaagctagaattagtgagaataaagcattgggaagaataaaagaaatattttaaagatggactagataggacttgttatggggctatgaagaagggtggaggagagataataataatttaaaaaattattccaatgcctatcagaaatkatttctatcccagaaagtagcaattttgtcaccatttgcctctttcccagaggtgtgtacttgcaagacttgtttgaggatgatgggcaaaacagatgcagcttgactctcttcaggcaactgaaccttgtgagtttatctgggagctttggcaagaaagcacaagcaacagtgcacctttggcactctttcctctctgatgaaaagcccag

SEQ ID NO: 590283 - DNA, 629 bp, Homo sapiens
gagacataaagtagatcattggttgcttgtgggttggggtttgtggtggagagctggggggtgatggctaaaggatacagggttgctttgtgaggtgataaaagtgccctaaaattgactgaagggatggttgcacatacctgtcagcgcacacacaaaaacactgaattcatactttaaatgggaaaaatgtatgatctctgaaatcatctctcaataaagctgttattttaaagtaggtccaggtatgcaatgtaggggcatgccctaagctagaattagtgagaataaagcattgggaagaataaaagaaatattttaaagatggactagataggacttgttatggggctatgaagaagggtggaggagagataataataatttaaaaaattattccaatgcctatcagaaatgatttctatcccagaaagtagcaattttgtcaccatttgcctctttcccagaggtgtgtacttgcaagacttgtttgaggatgatgggcaaaacagatgcagcttgactctcttcaggcaactgaaccttgtgagtttatctgggagctttggcaagaaagcacaagcaacartgcacctttggcactctttcctctctgatgaaaagcccag

SEQ ID NO: 590284 - DNA, 519 bp, Homo sapiens
ggtttatgggataaattttcataaagaaagtattcgtgggtttgaaggggaatatttccagggttaagaagagtaagaagggtgttgaggaacccagaaaactggtatcatcagaaaagctgttatcatccttggatctgaaggaccaagaggaggatatagtgttgctggagcccctygaaagctacttccatggcagaggggctatgtgagaggggctgtggctctgaatggatgccgccgttgccagaaccatgttgccaaagcagaaaacaagtggaaagaaaccctccagtctttttctttctaccttccaaacccctgttggtgcctcccactgaccaacactgaccacagtcctttatcacggctggtagaggagctgggtgatgaggtctggaggagtcagttcctgggcacaaggtgtggtgaacaggagttacaagtggatggggtggaaacagagaataaccagcacacctggtattcatgggtctctggttgcattctgtattccct

SEQ ID NO: 590285 - DNA, 519 bp, Homo sapiens
ggtttatgggataaattttcataaagaaagtattcgtgggtttgaaggggaatatttccagggttaagaagagtaagaagggtgttgaggaacccagaaaactggtatcatcagaaaagctgttatcatccttggatctgaaggaccaagaggaggatatagtgttgctggagcccctcgaaagctacttccatggcagaggggctatgtgagaggggctgtggctctgaatggatgccgccgttgccagaaccatgttgccaaagcagaaaacaagtggaaagaaaccctccagtctttttctttctaccttccaaacccctgytggtgcctcccactgaccaacactgaccacagtcctttatcacggctggtagaggagctgggtgatgaggtctggaggagtcagttcctgggcacaaggtgtggtgaacaggagttacaagtggatggggtggaaacagagaataaccagcacacctggtattcatgggtctctggttgcattctgtattccct

SEQ ID NO: 590286 - DNA, 582 bp, Homo sapiens
ataggttgtggcacggttatacaatgctacattatatagattatagaatctatatagaattgatgtggtagaatgtttgtgtcaacatggaaagatgtctaaaaatattttgaagtgaaaacagcaagctcaaaactgtgttgacagtataatccctttcatcaattataatatattgtacataaggtggaacattttcctaaattaatcactgagcttttcattcttaaaatttcccttttacatgtattaaaactagaccatgacatcctctgctcaagtcaagaaggatccagccaaaatgcagatratcaaatgtaaattcttgtatttcaaaaaccctcaaatcagattttggaagctcatagcatagataacattttgagattaaaaaaaatatcagagtaacaaaaatcactgtcctgaagaagacatgttaccaattgacagagccagactattatctttaaaaaaaaaaaaaaaaaaaaactgttttctgtgtaaaaagttatgcttgcttattgtaaaaactcaggccataagaaaatatacaaaatagaggttaaaatttttgtcccccaa

SEQ ID NO: 590287 - DNA, 582 bp, Homo sapiens
ataggttgtggcacggttatacaatgctacattatatagattatagaatctatatagaattgatgtggtagaatgtttgtgtcaacatggaaagatgtctaaaaatattttgaagtgaaaacagcaagctcaaaactgtgttgacagtataatccctttcatcaattataatatattgtacataaggtggaacattttcctaaattaatcactgagcttttcattcttaaaatttcccttttacatgtattaaaactagaccatgacatcctctgctcaagtcaagaaggatccagccaaaatgcagataatcaaatgtaaattcttgtatttcaaaaaccctcaaatcagattttggaagctcatagcatagataacattttgagattaaaaaaaatatcagagtaacaaaaatcactgtcctgaagaagacatgttaccaattgacagagccagactattatctttaaaaaaaaaaaaaaaaaaaaactgttttctgtgtaaaaarttatgcttgcttattgtaaaaactcaggccataagaaaatatacaaaatagaggttaaaatttttgtcccccaa

SEQ ID NO: 590288 - DNA, 570 bp, Homo sapiens
gaatcatttaagtttatgtctagtaacatatatgtaggacctatatactgaaaactataaaacaccaataaaataagttagagaacgatactcatgttaatgtattaagagactcaacatttttagtatgtgatttctctccagacagatctacagttttaatttaatattcatctaaatctcagaagatttttgctgatattggcaagctgactctaaaacatttgtagaaatgcaaaggatcttgaamagcccagataatttttaagaacaacaaaattggaggtctcaagccttaaaactatccaaatttacaccttagcataaaggcataaagtttcagtaatcaagccagtctgacattagtgaaagaatagacacatagtaaatcaatgattgaaaggaagaatactccacaatggacacacaggtatacagttaattgactttcaacataggtggaagttaattccatggacaatggataatatttgcaacaaatggtgctagaacaattatgaatacaaaatatgccacaaataacacttgatatgtgccccacacagtctt

SEQ ID NO: 590289 - DNA, 410 bp, Homo sapiens
ctccttgctgtttaaaagagactggattccttttgaactatagattgaaaccaatggatcttgaaccatttttcatgagataaaaatgagacagaaattccataattcttactaatagagcttttatttattagtcaattacttggaggtggtcctggtgatatatgccagttcacgtctctcctctttatggaaagggtcttatcactgcttcttccataataacagtcccccagttttattcacaaaccaaccraacagacctgtgcccttgagaggagatgactgagaagctgaaaaggtgagtcatgcctgttctagccagttttggcccttgtacctgtgcttggtcttggaatgagcctttcagccagtttgcacctatgagtccgatgggaggttcgctgggg

SEQ ID NO: 590290 - DNA, 574 bp, Homo sapiens
aggtcattgtgcacaggcagcttgcctaaagatgcccacagtgaaaaatttcatccctgaacctatgcacagtaagggaataaagcaatgtggagtggctcagactaagggcccacctgcccactgggagaagcgaggggagccactgtaaatcacgccttagcagtgggagggagcctggcctcctcagctcatgtgtggtggcctgtaatccaatctggaggtggaagcttgttggcagggacccccttttttttgctgagagctatcttttaatacattttgccttcctcacatttcagtgtgtccacgtgcctaattttcctggttgtgagacaagaacacaggtgttagctgtgctaaggagcaaaaaatcctgcatcactattttaaaaatgaatccacaatgaggttgaaagatgggattytatgcacacacacacacacacacacacaattgtttgcatgctttcaagcttcatataaatagtgcaacttgcttttgttttcttagtcatatagtttcagatttatttgtgttgaaagatgtagttctagtgactccattttcaag

SEQ ID NO: 590291 - DNA, 618 bp, Homo sapiens
tacctggccacagcaacataagcagtgatcccatgtcatgaagtgggaagacctagagacctcagccacctccccactcatgggattgggtaagaagatgccctgtgcccatcctaaagacctcagccacctcctcacccataaggctgggtaaaaagatgccctgtgcctgccctggagacctcagccacctcccacccatggggctgggtaaaaagatgccctgtgcctgccctggagacttcagccacctcccaccyatggggctgggtaagaagatgccctgtgcctgtgcttggcctcactgctctgccctgcctccattctctgagatccttggggctttcttgtattcttctggtttgtgaagttgcacattggaattgagagttttggagaaattctgatggttttccctgagaaattatgtaatcacccaggtgagggtgtctcatgaaaggcttgcctcagatttttccaactgaaggggaaagtttggaaacagagtcctgcagaagagctgtctgtgctgaaagtgaaaggaaccagttgtacttagtttatgaacagacaaggattacactggccttccagacatgttaattgggaggattgact

SEQ ID NO: 590292 - DNA, 553 bp, Homo sapiens
tgagctctgcagacccacctagcactgcagaggcagccctctaggacaagscttcataaaaaagtgactttatgagttggctccataaaaaagatacagattaagaaattgtttaaacagtgatctctatataattactcttttatttaaaagtatgggctgggagcggtggctgacgcctgtaatcccagcactttgggaggccgatgtgagcagataacctgaggtcgggagttagagaccagcctgaccaacatggagaaactccgtctctactaaaaatacaaaattagcagggtgtggtggtgcatgcctgtaatcccagctactcgggaggctgaggcaggagaactgcttgaacccaggaggcagaggttgtggtgagccgagatcgcgccattgcactccagcctgggcaacaagagcgaaactctgtctcaaaataaataaataaataagtattcctttcccagtcttttgctgtgtggagccaagatttttatttgcagaagtctgcagggctggtgtgatctctttcagtcataaaccataa

SEQ ID NO: 590293 - DNA, 504 bp, Homo sapiens
  misc_feature 69: n = A,T,C or G
aactcagtgtgatgctttaatagaccaatgagatcaagttaacaaatagatcctagaaattatactatntttaatgtttgtgaagtacctgctcagccaggtgttgatggaggacagaggattaagaggaagccttgagttacagggaccgaagcagctgctgtgtggattcagatctgggcgataccgccccaaggctcgttcttccagcatttctatcattctctctctctgtcttataggcaaatgagatgatgtttccgggtcaatacatgacgggattaactgggatagagaaacrtggttttaggatgtgagtctccaaaatttctatggttcaaatgtgggatctcacatgatggtcttgggcaaagagaatatcattgattctcaagatttaaacacaggagagcctctcactcctcccaaagctacgaaggggatggagatggcccagggacattcgaatcggaactcaagatcagtattggagaccccaccctg

SEQ ID NO: 590294 - DNA, 550 bp, Homo sapiens
caaaaaaataaaaacttataagagttatatcacttatctacattcgcctgtatagtaagtgctaggtgggattggtatttgaactcacgacaatttaaatccatgccccttccaygaagaatgccaattacacttcagttcatgtgtcaggtcccaaaagaatgatttcattgcccagagatgtgctgagatttttctaaatatgcatctagggttagaaggaaaagtgacaatattgactaggaacatctgctgcaggtcaggaagactgagtggttatggtgtaataagagctacttaattgctcttcctgtactaaaccatagttggttcccaaatgaaccaaatttatccatatctgttctattattctagatttagtaacttttaaaatgttcattaatttcaatagatatcttttactttatcacacagtgggggaaaaaaggtgataacatttttcttccatagaatgctctcattcttttctggaattaaatatgtacctcatatcagggaaatcaaagcatctcattgacataaccacagt

SEQ ID NO: 590295 - DNA, 507 bp, Homo sapiens
cacggaattcaggctttgaaggatggatagaaatttggaagaaagatttgatgggtaaaatggagcatgcaaagggaataatgacaggaaatgtagatgataaaccacaggtcaaatccaagacatggtaggtgttccagattcagtagcactggagtggtgcccttgagtggtaaggtgagacactcccttgaagagagaaaaataagtagcataaattttgagagaataatccatctggggtttgaatagtaaaggaagggggtcaggggacccagtgatagtctaaagtataaggagcaaggagactggaagagacgagaacagttaaggtgaaatcagttaattcttgactggatcmtggatccattaaaagctgctacaccaaacaattaggggactattggagaaatttaaatgtggaccaggtgaaatgaataatttgctaattttgttaaacatcaaaatagtgttagctgatacaggagattccttattttttggaga

SEQ ID NO: 590296 - DNA, 597 bp, Homo sapiens
  misc_feature 426: n = A,T,C or G
cattcttttattcctttactttcttaataaacttgctttcactttactccatggacttgcccccagtcctttcttgagtgagatccaaaaattgactcttggggtctggatcagaacccctttccagtaaaattagatttttttttttgagacatagtctcactctgcctaggagaccagcctgggcaacatgatgaaaccctgcctctacaaaaaattttaaaattagctaggcatggtggcacacacctatcgycccagttactcaggagactgcggtgggaggatcacctgagccaggaaggtcgagtctgcagtgagccctgatggtgccactgcactccagcctgagtgacagagtgagacctcgtctcaaaaaaaataagataatgggtgatacagctagccataaaatgtctttaaacnaatggggttggtgcgactgaagttccatactcctgtttccctggacctgataaattttacatacattgccaggcacagtggctcaggcctgtaatcccagtacttgggaggccgaggcgcacgcatcacaaggtcaggaaatcgagaccatccaggctaacatgctgaaac

SEQ ID NO: 590297 - DNA, 597 bp, Homo sapiens
  misc_feature 426: n = A,T,C or G
cattcttttattcctttactttcttaataaacttgctttcactttactccatggacttgcccccagtcctttcttgagtgagatccaaaaattgactcttggggtctggatcagaacccctttccagtaaaattagatttttttttttgagacatagtctcactctgcctaggagaccagcctgggcaacatgatgaaaccctgcctctacaaaaaattttaaaattagctaggcatggtggcacacacctatcgccccagttactcaggagactgcggtgggaggatcacctgagccaggaaggtcgagtctgcagtgagccctgatggtgccactgcactccagcctgagtgacagagtgagacctcgtctcaaaaaaaataagataatgggtgatacagstagccataaaatgtctttaaacnaatggggttggtgcgactgaagttccatactcctgtttccctggacctgataaattttacatacattgccaggcacagtggctcaggcctgtaatcccagtacttgggaggccgaggcgcacgcatcacaaggtcaggaaatcgagaccatccaggctaacatgctgaaac

SEQ ID NO: 590298 - DNA, 597 bp, Homo sapiens
  misc_feature 426: n = A,T,C or G
cattcttttattcctttactttcttaataaacttgctttcactttactccatggacttgcccccagtcctttcttgagtgagatccaaaaattgactcttggggtctggatcagaacccctttccagtaaaattagatttttttttttgagacatagtctcactctgcctaggagaccagcctgggcaacatgatgaaaccctgcctctacaaaaaattttaaaattagctaggcatggtggcacacacctatcgccccagttactcaggagactgcggtgggaggatcacctgagccaggaaggtcgagtctgcagtgagccctgatggtgccactgcactccagcctgagtgacagagtgagacctcgtctcaaaaaaaataagataatgggtgatacagctagccataaaatgtctttaaacnaatggggttggtgcgactgaagttccatactcctgtttccctggacctgataaattttacatacaytgccaggcacagtggctcaggcctgtaatcccagtacttgggaggccgaggcgcacgcatcacaaggtcaggaaatcgagaccatccaggctaacatgctgaaac

SEQ ID NO: 590299 - DNA, 471 bp, Homo sapiens
gctcgggtgagagttcaccagggccgaacccggcccctacacgtctcctcatgcgtggagacagcgaattggtgtttccggagccatcagcctcggggccaattcacttccggttacggagtgacgcggaaaaggcgcccaaacgcgcacgcgcaaatctagggcgacgcttgacagagcttgggagggtgcgcctgctttcgccctccttctccagcgggaggggcgcgcacttccgcggggcggagtccgtctagtgctgacgttggcagccgaacccaaagtagatcgaggcggcgggctgcacattccccgttgttgcgttgcgtttccttcctctttcactccgcgctcacggcggcggccaaattggcggcgacggcggcgcgagaacgacccggcggccagttctcttcctcctgcgcacctgcccygctcggtcagtcagtcggcggccggcgcccggcttgt

SEQ ID NO: 590300 - DNA, 544 bp, Homo sapiens
taacaattctaaagacagtattaagcaatttgccgtcataattagctaagtaagttccaaaagagctactacaatggaattaccttactcaggaagttcacttctaaaacgatggcgtaactcaaataactaattgtattctgccaaaataaggtatgttggaggatgatttttaagtttcttaattaagaaaaawtttatcttaaaggttattaaggcatatgaattctatcttttgatcaagaatttagattatatcatctttatggcatagtattttttactatcattgtttctaatcaaaggaagactgctggaatactcacgtaattgcactacagcactttctccatttgttgcaatgtagtgtagagtttgttctccatagtaggaagctcctgtcttgtcaacatctgtgctagctattaccaacacagcagtagctataacagtaaaaactttaattagatttaaaacacaaatgggcattgattcttctgttatacacataggaatatagcctaaattaacaactgataaacaa

SEQ ID NO: 590301 - DNA, 612 bp, Homo sapiens
  misc_feature 574, 575, 576, 577, 578, 579, 580, 581, 582, 583, 584, 585,586, 587, 588, 589, 590, 591, 592, 593, 594, 595, 596, 597,598, 599, 600, 601, 602, 603, 604, 605, 606, 607, 608, 609,610, 611, 612: n = A,T,C or G
ctgttgccccaggctggagtacagttgtgcgatctcaattcattgcaaccttcttcacctccagggttcaagcaattctgcttcagcctcccgagtagctgggattacaggtgcctgccaccaccgccgactaattttttgtatttttagtagagayggggtttcaccatgctaaccaggctggtcttgaactcctgacctccagtgatctgcccacctcggcctcccaaactgctgggattatgggcatgagccactgtgtcctgcctaatcctgacatatttttaaggggacaaatctagttttacttttctgtctattttatatttgcttttattattttaattacacaggaaattcaactttgctgcaggagaaatagaaaatacaaataagcagttaggggaaaaaaaggactctcataatccaacacccagagataaaacattattaacatttataagaatattaaatatgctatcttctaaccaacctttttactgaaaatattacagctgtcttcctaagtcaatcatacaggtaaacaaattgtttttctgtcagaataattggnnnnnnnnnnnnnnnnnnnnnnnnnnnnnnnnnnnnnnn

SEQ ID NO: 590302 - DNA, 612 bp, Homo sapiens
  misc_feature 574, 575, 576, 577, 578, 579, 580, 581, 582, 583, 584, 585,586, 587, 588, 589, 590, 591, 592, 593, 594, 595, 596, 597,598, 599, 600, 601, 602, 603, 604, 605, 606, 607, 608, 609,610, 611, 612: n = A,T,C or G
ctgttgccccaggctggagtacagttgtgcgatctcaattcattgcaaccttcttcacctccagggttcaagcaattctgcttcagcctcccgagtagctgggattacaggtgcctgccaccaccgccgactaattttttgtatttttagtagagatggggtttcaccatgctaaccaggctggtcttgaactcctgacctccagtgatctgcccacctcggcctcccaaactgctgggattatgggcatgagccactgtgtcctgcctaatcctgacatatttttaaggggacaaatctagttttacttttctgtctattttatatttgcttttattattttaattacacaggaaattcaactttgctgcaggagaaatagaaaatacaaataagcagttaggggaaaaaaaggactctcataatccaacacccagagataaaacattattaacatttataagaatattaaatatgctatcttytaaccaacctttttactgaaaatattacagctgtcttcctaagtcaatcatacaggtaaacaaattgtttttctgtcagaataattggnnnnnnnnnnnnnnnnnnnnnnnnnnnnnnnnnnnnnnn

SEQ ID NO: 590303 - DNA, 560 bp, Homo sapiens
ggcattcctgaaccacaaacaatagcatgagygatctgtgccttaaggacatgttcctgctgcagataactagccagacccgtccctttatttcagcctgtccctttatttcctgtaaggaatacttttagttaatctataatctacagaaacaatgcttatcactggcttgctgtcaataaatatgtgggtaaatctctgtttggggctctcagctctgaaggctgtgagacccctgatttcccactccacactctatatttctgtgtgtgtgtctttaattcctctgacgccactgggttagggtctccccgaccgagttggtcttggcacttctggagacttctgggaaactctgtaagttgatgtcttgctgacaaatgaggaactggggaatttatccttgaactcctgcttgttactaattgagggctgcccctgggataccatctcccagccacttctagccagctcctgacaccgtccaagcacacacctgcaacagatgaattcccaggcagagacaaagcacctgtgggtaagaacctattagagattgt

SEQ ID NO: 590304 - DNA, 331 bp, Homo sapiens
cattcaagcaagaaaaggaaagcatagaggagaaacttctcttaagagaaaaaaaggatgtgaagaaagtcaagatattagcagtcaatgtgtctcattttccaaagaattaggcttatcttttcacagacctttgtctgctggaatgactgtctaacctccatgccacgtttttaatccctgcaaactgrttttagtttttgccaagatggatgttggatctgaatgaaaaccagagtcatttatctttgccaaggcattttcttcttcttccgcagcggaaagttatggagataggtgctttctcatcggaatgtgccccttccaaaat

SEQ ID NO: 590305 - DNA, 490 bp, Homo sapiens
ctcaagcctgggtgacagagtgagaccctgtctcaaaacaaacaaacaaaaagtcttagaataaaacctgaactctttcccgtatcaggaaggccttgcaggagctggcccctgcctgccctcctatctcatcctgccctcctttctgcctctccattccacccacctccttctctgatcctcatttgtaccagcctttgctcctaccccagggcctttgcacatgccattccctctactcccagccccccttgcaactgcctcctctgtggccaacccctccrtgaggccagccctgaccactggccattgaaattccctctctccatcttatcactctgttttatttattacatagcactgaccactatcagaagttattttaccattatccttagcaaactaacgaaggaacaaaaaaccagacaccgcatgttctcacttataagtgggagctgtgcaatgagaacacatggacacagggagggta

SEQ ID NO: 590306 - DNA, 566 bp, Homo sapiens
tatttgcatttcctcaacacagctattttgaattctctatctgaaaggtcacatatatctggcattgttccctggtgccytatttagataatttggtgaggtcatgttttcctggatggtgttgatactaataactgttctttggtgtctaagcattgaagagttaggtatttattatagtcttcactgtctgggctaatttgtagctgtcctccttgggaagactttccagatatttaaaaggacatgggtgttgtgatctaagctgtttctgctttaggggggatcccaaacctaataacactgcagttcttgcagactcatagaggcactgccttgatggccttggacaaggtctgggggagttctctggattaccaggtaaagaattttgttctcttctcttactttctcccaaatacacagtctctctctctgttttgaaccacctaaagctgtaaatggatgacacaagcacccctgtgtccaccaccactatgacttctatgggtcagacctgaagccaggacagcacggggtctcacccaaggcctgctttaaccact

SEQ ID NO: 590307 - DNA, 566 bp, Homo sapiens
tatttgcatttcctcaacacagctattttgaattctctatctgaaaggtcacatatatctggcattgttccctggtgccttatttagataatttggtgaggtcatgttttcctggatggtgttgatactaatarctgttctttggtgtctaagcattgaagagttaggtatttattatagtcttcactgtctgggctaatttgtagctgtcctccttgggaagactttccagatatttaaaaggacatgggtgttgtgatctaagctgtttctgctttaggggggatcccaaacctaataacactgcagttcttgcagactcatagaggcactgccttgatggccttggacaaggtctgggggagttctctggattaccaggtaaagaattttgttctcttctcttactttctcccaaatacacagtctctctctctgttttgaaccacctaaagctgtaaatggatgacacaagcacccctgtgtccaccaccactatgacttctatgggtcagacctgaagccaggacagcacggggtctcacccaaggcctgctttaaccact

SEQ ID NO: 590308 - DNA, 454 bp, Homo sapiens
aagagggtaaaacagtattattgatgatatggagaaaatttgagttgtctggatggaagattaaaccagccatgacattcccaaaatctaatccagaacaaggccataactctcttgaattctatcaagactgtgagtggtaaggaaactgcagaagaaagtgatgctagcagaggttagttcatgagrtttttagggaaagaagccatcttcaaagcataaaagtgcaagatgaagcagcaagtgctgatggagaaactgtagcaaattttccagaagatcaagctaaaatcatttatgaaagtgactacacaaaacagcagattttcactgtagattaagtagactggctgactctcttgttatgggaaaaatgcagctagtgagttgaagttaaggccagtgctcactgactattctgaaaatcctaggacccttaataattatgcaaatc

SEQ ID NO: 590309 - DNA, 454 bp, Homo sapiens
aagagggtaaaacagtattattgatgatatggagaaaatttgagttgtctggatggaagattaaaccagccatgacattcccaaaatctaatccagaacaaggccataactctcttgaattctatcaagactgtgagtggtaaggaaactgcagaagaaagtgatgctagcagaggttagttcatgagatttttagggaamgaagccatcttcaaagcataaaagtgcaagatgaagcagcaagtgctgatggagaaactgtagcaaattttccagaagatcaagctaaaatcatttatgaaagtgactacacaaaacagcagattttcactgtagattaagtagactggctgactctcttgttatgggaaaaatgcagctagtgagttgaagttaaggccagtgctcactgactattctgaaaatcctaggacccttaataattatgcaaatc

SEQ ID NO: 590310 - DNA, 586 bp, Homo sapiens
ttagtaccactgaactgtatacttcaaaatggttaagatggtaagttctgttacatgtattttacaccacaataaaaaactccacacatcaatgtttacagcagctttattcataatcaccaaacctggtccttcaataggtgaatgtacatccagacaatggaatattattcagtgctaaaatgaaatgagctatcaagccatgaaaagacacggaagaacctcagatgcatactgctaagtgaaagaagccaagttgaaaaggctacacgctatataattccaactacgggacattctggaaaaggcattgcgatggaggtagtaaaaggatcagcggttgccaggggttgcagtaaaagtgggaggaacaggtggagcagagagttttaaggtgcggaaaccagtckgtatgatactggtggagacatgttgttatacatttgtccaaacccactgaatgtacaataccatacgagcaaaccctaacgtaaactgtgggctttgggcagtgatgatgtgtgaatgctggttcactgactgtgccaaatataccacagtgatgcaggatgttgatgaggaggag

SEQ ID NO: 590311 - DNA, 586 bp, Homo sapiens
ttagtaccactgaactgtatacttcaaaatggttaagatggtaagttctgttacatgtattttacaccacaataaaaaactccacacatcaatgtttacagcagctttattcataatcaccaaacctggtccttcaataggtgaatgtacatccagacaatggaatattattcagtgctaaaatgaaatgagctatcaagccatgaaaagacacggaagaacctcagatgcatactgctaagtgaaagaagccaagttgaaaaggctacacgctatataattccaactacgggacattctggaaaaggcattgcgatggaggtagtaaaaggatcagcggttgccaggggttgcagtaaaagtgggaggaacaggtggagcagagagttttaaggtgcggaaaccagtctgtatgatactggtggagacatgttgttatacatttgtcmaaacccactgaatgtacaataccatacgagcaaaccctaacgtaaactgtgggctttgggcagtgatgatgtgtgaatgctggttcactgactgtgccaaatataccacagtgatgcaggatgttgatgaggaggag

SEQ ID NO: 590312 - DNA, 608 bp, Homo sapiens
ctgcattcccacctgggcaacagagtacaactccatctaaaaacaaaaaaaaaaaagaacaaagcacagaaaagtaaaaggggggaaaaggggctaacctttacagkggagaaatctgacaaaccctacctcagccaaatgatcaaagtcaccctcaccagtgacgggccatgctgatactatgaacctttgatatgatgtgataaaaagggcacttctcctgtgtcttcctccaaaccccatacccccagtctaatcatcccaaacacatcagcacactcccagttaagagacactctgcaaaatacttgaccagtcctcctcagaagtgtcaaggtcttcagaatcaagggaagtctgccattccatcacagccaagaggaaccgaaggagatacgacacagtgcaatgtggtatcctggaacagaaaagacaagaaaatctcaataaaatttgggctttagttaataatgatgtatcaatattcgttctttaattgtgacaaatttgctatactaatgtgttaatagtaggagaaattaggtttgggatatatggggactctatactatctttacaatgtttctgtaagtctaaaactattctaa

SEQ ID NO: 590313 - DNA, 608 bp, Homo sapiens
ctgcattcccacctgggcaacagagtacaactccatctaaaaacaaaaaaaaaaaagaacaaagcacagaaaagtaaaaggggggaaaaggggctaacctttacaggggagaaatctgacaaaccctacctcagccaaatgatcaaagtcaccctcaccagtgacgggccatgctgatactatgaacctttgatatgatgtgataaaaagggcacttctcctgtgtcttcctccaaamcccatacccccagtctaatcatcccaaacacatcagcacactcccagttaagagacactctgcaaaatacttgaccagtcctcctcagaagtgtcaaggtcttcagaatcaagggaagtctgccattccatcacagccaagaggaaccgaaggagatacgacacagtgcaatgtggtatcctggaacagaaaagacaagaaaatctcaataaaatttgggctttagttaataatgatgtatcaatattcgttctttaattgtgacaaatttgctatactaatgtgttaatagtaggagaaattaggtttgggatatatggggactctatactatctttacaatgtttctgtaagtctaaaactattctaa

SEQ ID NO: 590314 - DNA, 390 bp, Homo sapiens
gaattccatatgtctgggacattaggtactgatgtgaacatggaagaaaagtgtgggggcaaaggagaaaaaggakaaatgggaatttctatttctgtctacattgtgccaagcattataattttactttctagaccaagaagatatttttatgttttttttggggcagacaagtgacaaagtgagatatttatgctttagaaaggttagttgtatcaaaatgtagaaaatattttaagaaataagaaataaagactgtatggcaaactttgagatattttaaaaataggctacattaagaacctaaactagaaacatgtttttctaagagaaataatgtgttggtactattaaacatgatagggcgaaaattgatgggaatcagtgttt

SEQ ID NO: 590315 - DNA, 390 bp, Homo sapiens
gaattccatatgtctgggacattaggtactgatgtgaacatggaagaaaagtgtgggggcaaaggagaaaaaggataaatgggaatttctatttctgtctacattgtgccaagcattataattttactttctagaccaagaagatatttttatgttttttttggggcagacaagtgacaaagtgagatatttatgctttagaaaggttagttgtatcaaaatgtagaaaatattttaagaaataagaaataaagactgtatggcaaactttgagatattttaaaaataggctamattaagaacctaaactagaaacatgtttttctaagagaaataatgtgttggtactattaaacatgatagggcgaaaattgatgggaatcagtgttt

SEQ ID NO: 590316 - DNA, 390 bp, Homo sapiens
gaattccatatgtctgggacattaggtactgatgtgaacatggaagaaaagtgtgggggcaaaggagaaaaaggataaatgggaatttctatttctgtctacattgtgccaagcattataattttactttctagaccaagaagatatttttatgttttttttggggcagacaagtgacaaagtgagatatttatgctttagaaaggttagttgtatcaaaatgtagaaaatattttaagaaataagaaataaagactgtatggcaaactttgagatattttaaaaataggctacattaagarcctaaactagaaacatgtttttctaagagaaataatgtgttggtactattaaacatgatagggcgaaaattgatgggaatcagtgttt

SEQ ID NO: 590317 - DNA, 390 bp, Homo sapiens
gaattccatatgtctgggacattaggtactgatgtgaacatggaagaaaagtgtgggggcaaaggagaaaaaggataaatgggaatttctatttctgtctacattgtgccaagcattataattttactttctagaccaagaagatatttttatgttttttttggggcagacaagtgacaaagtgagatatttatgctttagaaaggttagttgtatcaaaatgtagaaaatattttaagaaataagaaataaagactgtatggcaaactttgagatattttaaaaataggctacattaagaacctaaactagaaacatrtttttctaagagaaataatgtgttggtactattaaacatgatagggcgaaaattgatgggaatcagtgttt

SEQ ID NO: 590318 - DNA, 531 bp, Homo sapiens
ctgcttaaaaggacgtactatgggcaatagacctttaaaatgacacktccccagccatgcatatgttagatgtaatagcaaaaaaaaaaaaaaaaaacaacaaaaacaaaaacaaaaaacaaacaaacaaacagttttttaagatacgggatataaaaattttgttttgttttttgaaattatttttaaattaatctcacagctccaaatagcctggcttttactgacttctctgaaactgactctaacacctaaatttggggcctcacattcagctactttaaagttctgctaatgtttcctttctaaaaccattttcattgatttttttcccctagggctgattttcactgggctacggtgaaaagtctttgcttcccagcttgtctctgaagtccttcatcctttgttgttagtaagcctatcatttggtcttgactgtctcatcatagttattatatcccattcacccatgtctttaaggactccaacaattttgcccagtgttcattgtaaacttttgtcacacat

SEQ ID NO: 590319 - DNA, 557 bp, Homo sapiens
tactatgtaccaacaaagaagcacattagtgtttattaacttcaccttttttttttttttttactttttttttattaattctgccccaaacactgtttttctttttctttttttttttttttttgaattatgcttcttttttttttaattttttttttattatactctaagttttagggtacatgtgcacattgtgcaggttagttacatatgtatacatgtgccatgctggtgcgctgcacccactaacgtgtcatctagcattaggtatatctcccaatgctatcccttccccttcccccgaccccaccacagtccccagagtgtgatattccccttcctgtgtccatgtgatctcattgttcaattcccacgtatgagtgagaatatgcggkgtttggttttttgttcttgcgatagtttacctttttagcagtggtagggaagcaaagcatcatatttattaaccactaacaatttacctgacttttttaatacatataccccatatatcttaggtattttcttcataaaaatactttagatcttaattctct

SEQ ID NO: 590320 - DNA, 557 bp, Homo sapiens
tactatgtaccaacaaagaagcacattagtgtttattaacttcaccttttttttttttttttactttttttttattaattctgccccaaacactgtttttctttttctttttttttttttttttgaattatgcttcttttttttttaattttttttttattatactctaagttttagggtacatgtgcacattgtgcaggttagttacatatgtatacatgtgccatgctggtgcgctgcacccactaacgtgtcatctagcattaggtatatctcccaatgctatcccttccccttcccccgaccccaccacagtccccagagtgtgatattccccttcctgtgtccatgtgatctcattgttcaattcccacgtatgagtgaraatatgcggtgtttggttttttgttcttgcgatagtttacctttttagcagtggtagggaagcaaagcatcatatttattaaccactaacaatttacctgacttttttaatacatataccccatatatcttaggtattttcttcataaaaatactttagatcttaattctct

SEQ ID NO: 590321 - DNA, 557 bp, Homo sapiens
tactatgtaccaacaaagaagcacattagtgtttattaacttcaccttttttttttttttttactttttttttattaattctgccccaaacactgtttttctttttctttttttttttttttttgaattatgcttcttttttttttaattttttttttattatactctaagttttagggtacatgtgcacattgtgcaggttagttacatatgtatacatgtgccatgctggtgcgctgcacccactaacgtgtcatctagcattaggtatatctcccaatgctatcccttccccttcccccgaccccaccacagtccccaragtgtgatattccccttcctgtgtccatgtgatctcattgttcaattcccacgtatgagtgagaatatgcggtgtttggttttttgttcttgcgatagtttacctttttagcagtggtagggaagcaaagcatcatatttattaaccactaacaatttacctgacttttttaatacatataccccatatatcttaggtattttcttcataaaaatactttagatcttaattctct

SEQ ID NO: 590322 - DNA, 594 bp, Homo sapiens
attttgaatgactttatttagattgtatttcttaaaatgaagatgtgtttacagaaatttgcattcattgctggtggaaatacagaaggatatgtcaacttcccaagacagtttgacagtctcttacaaaatgaagcacaagcttcacatgcaatccagcaatcattcttctatgtacttacccaaatgagttaaatttttgtctacacaaaaacctgcctataatttgtaaatcagttttattcataattgctaaatattggaagcaaccaaatgtccttcagtaggataatggttacacaaaatatcatatatccatacaactgaatatcaytcaacaataaaaagaaatgagctatcagccacaaaaagaaatggaagagccttaaatgtatattgctaagagaaagaaaccagtctgtaaaggctatataccaaatgattccaaccatatggcactctgtgatagacaaaaaactacagagatggtaaaaagatcagtggtgtccaaagattcagggagagggaaacaggaatgagtaagtggagatagttttacctatgcacggggcatttttaagatgttcaaactat

SEQ ID NO: 590323 - DNA, 594 bp, Homo sapiens
attttgaatgactttatttagattgtatttcttaaaatgaagatgtgtttacagaaatttgcattcattgctggtggaaatacagaaggatatgtcaacttcccaagacagtttgacagtctcttacaaaatgaagcacaagcttcacatgcaatccagcaatcattcttctatgtacttacccaaatgagttaaatttttgtctacacaaaaacctgcctataatttgtaaatcagttttattcataattgctaaatattggaagcaaccaaatgtccttcagtaggataatggttacacaaaatatcatatatccatacaactgaatatcactcaacaataaaaagaaatgagctatcagccacaaaaagaaatggaagagccttaaatgtatattgctaagagaaagaaaccagtctgtaaaggctatatwccaaatgattccaaccatatggcactctgtgatagacaaaaaactacagagatggtaaaaagatcagtggtgtccaaagattcagggagagggaaacaggaatgagtaagtggagatagttttacctatgcacggggcatttttaagatgttcaaactat

SEQ ID NO: 590324 - DNA, 601 bp, Homo sapiens
tttaccaccagcttcaagagagaaaatgtatcattagttcctaagtgttagtagctagcttttccaagaaagtctaataatactggagatttatcttgtccactaaaaaatattttttaaaaactgatacaattttattttaaccttgcccacttattaccatagggagtgtaataattagatgttgtctgttagggtcttgtcaaaatatgttattgttataagatataaggatgaatttgtattgggaacaatacagtaaaaatcatgactaccaagttggggtactaaaaattttttattatagatttcaggcagtttcatctcttttgattgtgttattctgtatcaggggaaaaaagaaggaaacacgagttttgagagatacaggcacagttaaattacattctatgttgttcattttaaaacatgaacaccatgctcaaaatcaaattcagtcttatccattttacctcatattttctcaaaaataaaaattactatacatatgaaggaaggaaccaatgataaaatgaacaaacaaatcacctattaaactaaacattattttgccctayacattggaagctaattaatttaa

SEQ ID NO: 590325 - DNA, 605 bp, Homo sapiens
ctaatttgtgcatagtatcaaatgacatttcaagctttttttcatttttgtacttgatttatgtaaaatcagaaaatgtaccaggctgaagtttctcattaatttttctgtgttctcctacagatcagaaaattaattcttattraacttaaaaagtaggttaacaaatttataacaacattttcgcctctctattctggctgttttttttcttgtttcttataaatatctaaacgtattaataacagactagtacacatttcctgcttaagggagagttagaaaatactaatgacatactatgaagaagtaggaacaacttcatatatccagcaaaaaaataataataaagtaactgttccaaagccagaatattttatgtgtaggatgaccaaatcatttataattcaaagcaggacactcttgagtgtgaaagtggatactattaataattattccaggacaatttgcatgaaccaggactgcctctggcaaagcaggatatgtgttgtatctaccataaggaatgcacactgtagtggcattgtctaccttaacatgggacaaactggaagatcatggtgtttgttcctcttaaaaaaatt

SEQ ID NO: 590326 - DNA, 557 bp, Homo sapiens
cttcacagttctccccccaccaagagcttctgcaggcatctaggccgtggtcaatttatgtgaagcttttatgaccctctgcaggaatgtccatagccatgatctcagttgccttgctttcttgtcaagccttgggggtgtctgtccacagcagatgttatcttagaacctcagtctaccatacatgtgcacatcactttgaggggtcagtaatttcactttaggctgagtcacttatcataagtgactccattttgagaaatttgggatcacaaaacattatcatatatcagatgatcatgtggtttattttccttcattctgctgatatggtgtattacgttgaccgggtgtttctaggaagttgtttattttatctaggttatccaatttgttggcatataactgttartagtactctcttataatctcttatatttctgagattcgtatttttttccttagttaatctagttaaagcttagccaatttttgttaactcttttgaagagctgacttttggcttcattcattttatccaatgtttttctattctc

SEQ ID NO: 590327 - DNA, 469 bp, Homo sapiens
ggttacatctattacctatttaatacttaccctgtgataaataccttacttagtgaccctgtaggtagacactattaacaggcggagcytacagacaaggaaactgagacactgataagcaaacttgttggaatttcactcttggcagcctgatgccaaaccactacactctgtgatcactgtaatcttctcttatcagatgaaaatatttgtatcttttttttcctgctcttagtaatttccatactttgcctttaactgagctatctgataccagacatcttggcattcaggctgctctcctatgtccatctggatgctatgataatagagcctccatacctctaggccaggcaaaggagaaaataattttaaaacaaggagtttgcagactatcacctggtggctctgtgatttggtttctctgtgtccctacccaaatctcatcttgaattgtagctcccataat

SEQ ID NO: 590328 - DNA, 201 bp, Homo sapiens
atacaatgcgggtacaggcattgggtaaatgctcccatttaggagaaattggccaaaacaaaggggctacaggcmccatgcaagtccaaaacccagtagggcagtcattaaatcttaaagctccaaaatagtctccttttatcccatgtctcatatccagggtatgctgatgcaagaggtggactcccaaggccttgggca

SEQ ID NO: 590329 - DNA, 442 bp, Homo sapiens
actctgggaaagcactccacccaggycactttgcccagtggcttctagttgggtttgcccaacacgcagccctggcagaagaacagaaaatgagagaggaatcatggaatcagctccactcccagctttggtgccctggagctgagtaggagagaggaaagatccttcttaaaaatattcccaggaaaaggcttgttccctctcatttgctctggctgggtcacatgcacacctccaaaatggctatggtgaccagggaaataagatgctgaaatcggctcaggcccagcacacatgccctatccataaggctctggcacaggaattggactacagatatatgcctaaaataggataattcgaagagctacgtcccagagaaaacacaaaccagaatgctgctacatggggagatggtaaggaaacattcatgtgttgtccc

SEQ ID NO: 590330 - DNA, 571 bp, Homo sapiens
gcttgggttaccccagaagcaacctgaaataagaattcacatgcaagtaggaaacactagtaggggaatagagaagtgagaaacaggcaagagaagaaaaccaaccaaaggagaataatcaagaaagttaccactgagggcaaatgaagctgaattccactggggaattctgagagacagtgtagagcctgctactcaaagcggaycatcatcatcatcatcatcatcatcatcatcatcatcatcatctgaagctctaccacaaatccactgaatcaggatgtgaatttttaacaggatccccaaatgataaagtttgtaaagtactgaggtagaatatgcctcaaagttaatcagatgaaggggtgagaaaactgtgatagtcattactagcttcccccttaacactgcttgtgagctgtttctgaagttaattcccctgcactcctggcttagcctttgtatgagcagggcattcatgccccagtggtcaaaaaggaagtccccagacagaaaatcaaaggtattagcaggaagcggccctcaacatgcacagctattacaagttcag

SEQ ID NO: 590331 - DNA, 679 bp, Homo sapiens
aacaaatggaaacacatctcatgctcatgaatgggtagcatcaatatggtgaaaatkaccatactgccacaagcaatctacaaattcaatacaattcccatcaaaatactaccatcattcttcacagaactagaaaaaacaatcctaaaattcatatggaaccaagaataagcccacatagccaaaacaagactaagcaaaaagaacacatttggaggcattacattatccaacttcaaactataaggacatagtcaccaagccagcatggtactggtatgaaaagaggcatattgatcaatggaacagaatacagatacccagaaattaatgcaaaatacttacagtcaactgttcttccacaaagcaaacaaaaacaaagtggggaaaggacaccctattcaacaaatggtgttgggataattgtcaagccacatgtagaagaatgaaactggatcctcatctatcaccctatacaaaggtcaactcaagatgaatcaaatacttaaatctaagacttgaaaccataacaattctagaaggcaacatcagaaaaatcccttctagacattggcttaggcaaagacttcatgaccaagaacgcaaaagcaaatgcaacaaaaacaaagatgaatagatgggagttgattaaattaaaaagcttctacacagaaaaata

SEQ ID NO: 590332 - DNA, 679 bp, Homo sapiens
aacaaatggaaacacatctcatgctcatgaatgggtagcatcaatatggtgaaaattaccatactgccacaagcaatctacaaattcaatacaattcccatcaaaatactaccatcattcttcacakaactagaaaaaacaatcctaaaattcatatggaaccaagaataagcccacatagccaaaacaagactaagcaaaaagaacacatttggaggcattacattatccaacttcaaactataaggacatagtcaccaagccagcatggtactggtatgaaaagaggcatattgatcaatggaacagaatacagatacccagaaattaatgcaaaatacttacagtcaactgttcttccacaaagcaaacaaaaacaaagtggggaaaggacaccctattcaacaaatggtgttgggataattgtcaagccacatgtagaagaatgaaactggatcctcatctatcaccctatacaaaggtcaactcaagatgaatcaaatacttaaatctaagacttgaaaccataacaattctagaaggcaacatcagaaaaatcccttctagacattggcttaggcaaagacttcatgaccaagaacgcaaaagcaaatgcaacaaaaacaaagatgaatagatgggagttgattaaattaaaaagcttctacacagaaaaata

SEQ ID NO: 590333 - DNA, 679 bp, Homo sapiens
aacaaatggaaacacatctcatgctcatgaatgggtagcatcaatatggtgaaaattaccatactgccacaagcaatctacaaattcaatacaattcccatcaaaatactaccatcattcttcacagaactagaaaaaacaatcctaaaattcatatggaaccaagaataagcccacatagccaaarcaagactaagcaaaaagaacacatttggaggcattacattatccaacttcaaactataaggacatagtcaccaagccagcatggtactggtatgaaaagaggcatattgatcaatggaacagaatacagatacccagaaattaatgcaaaatacttacagtcaactgttcttccacaaagcaaacaaaaacaaagtggggaaaggacaccctattcaacaaatggtgttgggataattgtcaagccacatgtagaagaatgaaactggatcctcatctatcaccctatacaaaggtcaactcaagatgaatcaaatacttaaatctaagacttgaaaccataacaattctagaaggcaacatcagaaaaatcccttctagacattggcttaggcaaagacttcatgaccaagaacgcaaaagcaaatgcaacaaaaacaaagatgaatagatgggagttgattaaattaaaaagcttctacacagaaaaata

SEQ ID NO: 590334 - DNA, 530 bp, Homo sapiens
aaagctgtttcttttccaacattaaaygtgagctgactaatatgagcttcctagcatgctctgcccaagttatccagcacaagagtgtttaggttaataaaggtcattttactacaaattaccctctgtagttgtagttgaatctttttatttttgagaagaaattatagtgaaaatatcattattatatttgtggtaagtataaaatttggtcttttttttcctgctgtactaactgttcataggtctgtagtgaacaaaataatatttactaaaacacaaattaatatttagaacagaaacaacttagactcactctggactcccataaaaattgattacttagacatttaaatatatttacttaatactgtaatattatatacatttcctaaagcaaattttaagacataatatttggaaaatctagtagaggttgtcaaagctacttctgttggccaatagcagttgcttttataaaatcgtattatttcctgctcaaacacttcattaactacattatggcccaa

SEQ ID NO: 590335 - DNA, 624 bp, Homo sapiens
agaagctggccgcaaacagacaggggagcaggcgtcttctctgcagctttgccttccaggctttctgcccacactctctggcccacaggactactttattctgcgattttggctagaaaaattgggcttctttcacagatttagctgcytaccttgctgccacgtttgcagctctgtaattgctgcctgcctcagcctaggctgcaagagaaaagaaaagaaaaaaggaaactcccacaaggctcacatctgcagtttttggttcccctctaccaactgcctgctttgtttactttttagcccactcacgtagttgctttttgaattttgtccggattttttctcattgtaatcagttggaagagacttaacaggctttctctatcttggccaaaccagagctgacatttgtttccacatctatggctacagagaagcccgagcatttccttcttttcctcactctgcatgtgctactcttgcacctacattcgtcatcataggcttttcaaaatggaagttgtaaatacatcaattgatataaatgcatcaatacaaaaaagaaagcattaaaaaagtgtatcagaatgccaagaccaaaacaaacaaacaaccaaaaaatcc

SEQ ID NO: 590336 - DNA, 624 bp, Homo sapiens
agaagctggccgcaaacagacaggggagcaggcgtcttctctgcagctttgccttccaggctttctgcccacactctctggcccacaggactactttattctgcgattttggctagaaaaattgggcttctttcacagatttagctgcctaccttgctgccacgtttgcagctctgtaattgctgcctgcctcagcctaggctgcaagagaaaagaaaagaaaaaaggaaactcccacaaggctcacatctgcagtttttggttcccctctaccaactgcctgctttgtttactttttagcccactcaygtagttgctttttgaattttgtccggattttttctcattgtaatcagttggaagagacttaacaggctttctctatcttggccaaaccagagctgacatttgtttccacatctatggctacagagaagcccgagcatttccttcttttcctcactctgcatgtgctactcttgcacctacattcgtcatcataggcttttcaaaatggaagttgtaaatacatcaattgatataaatgcatcaatacaaaaaagaaagcattaaaaaagtgtatcagaatgccaagaccaaaacaaacaaacaaccaaaaaatcc

SEQ ID NO: 590337 - DNA, 624 bp, Homo sapiens
agaagctggccgcaaacagacaggggagcaggcgtcttctctgcagctttgccttccaggctttctgcccacactctctggcccacaggactactttattctgcgattttggctagaaaaattgggcttctttcacagatttagctgcctaccttgctgccacgtttgcagctctgtaattgctgcctgcctcagcctaggctgcaagagaaaagaaaagaaaaaaggaaactcccacaaggctcacatctgcagtttttggttcccctctaccaactgcctgctttgtttactttttagcccactcacgtagttgctttttgaattttgtcsggattttttctcattgtaatcagttggaagagacttaacaggctttctctatcttggccaaaccagagctgacatttgtttccacatctatggctacagagaagcccgagcatttccttcttttcctcactctgcatgtgctactcttgcacctacattcgtcatcataggcttttcaaaatggaagttgtaaatacatcaattgatataaatgcatcaatacaaaaaagaaagcattaaaaaagtgtatcagaatgccaagaccaaaacaaacaaacaaccaaaaaatcc

SEQ ID NO: 590338 - DNA, 624 bp, Homo sapiens
agaagctggccgcaaacagacaggggagcaggcgtcttctctgcagctttgccttccaggctttctgcccacactctctggcccacaggactactttattctgcgattttggctagaaaaattgggcttctttcacagatttagctgcctaccttgctgccacgtttgcagctctgtaattgctgcctgcctcagcctaggctgcaagagaaaagaaaagaaaaaaggaaactcccacaaggctcacatctgcagtttttggttcccctctaccaactgcctgctttgtttactttttagcccactcacgtagttgctttttgaattttgtccggattttttctcattgtaatcagttggaagagacttaacaggctttctctatcttggccaaaccagagctgacatttgtttccacatctatggctacagagaagcccgagcatttccttcttttcctcactctrcatgtgctactcttgcacctacattcgtcatcataggcttttcaaaatggaagttgtaaatacatcaattgatataaatgcatcaatacaaaaaagaaagcattaaaaaagtgtatcagaatgccaagaccaaaacaaacaaacaaccaaaaaatcc

SEQ ID NO: 590339 - DNA, 408 bp, Homo sapiens
gctaaccactgagatagtggaatagcaaacatatacgacaagaaatacagtcttccaaaatagttttgggaggccgaggtgggtggatcacaaggtcaagagatcgagaccattctggccaacatggtgaaaccccgtctctactaaaagtacaaaaattagctgggcgtggtggtgctcacctgtggtcccagctactcgggaggctgaggcaggagaaatgcttgaacccaggaggyggaggttgcagtgagccaagatcgcaccactgcactccagcctggcgacagagtgagattccatcccaaaaaaaaaaaaaaagtttgaaaatgttactaaacaaacaagtgattgcagccctcaacatgcaacagcaggcaaaccctggggaagagggaaatctgaatt

SEQ ID NO: 590340 - DNA, 583 bp, Homo sapiens
gtactggcataaaaagtgagagataggctgatgaaacagaatagagaacccctacagagaactcattttcaacaaatgtgccaagaacatacgctggggaaatcatagtctcttcaataaatggtgctgggaaaactagatattcatatgcagaagaatgaaactagacccctatctcctgccatatacaaaaatcaaatcaaaatggattaaaggyttaaatctaagactttagactatgaaacaactataagaaaacattgggggacaatctccaggtcattggtctgggcaaaaatttcttgagcagcaccccacaagcacaggcaacaaaagtaaaaatggacaaatgggatcacagctaaaaagcttctgacagcaaaggatacaatcaacaaagtgaagagacaacccacagaatgggagaaaatatttacaaactacccatctgacaagggattaataagaagaatatataaggagctcaaacaactctacagagaaaaaaaaaaaaaacaaacctaaataatctgataaaaaaatgggccaaagattcaaataaacatctctcaaaagaagacac

SEQ ID NO: 590341 - DNA, 566 bp, Homo sapiens
tattgttttgggtttgtaactccttcttttatttctttcataatttaaaagacaaatttataaagcataattataaatctatgtttatgggtacccaatgtgtaaagatgtaatttttgacaacataaagaggagtaaatcccagtgaatacagatcataaggaggaaaaaaaagaggagcagagctgaataggagcagagtatttgcattctattaaagttaatttggtataaatttaaackatattgttataaatgtagggtctcagttgaaatccccatggtaaccactaagaaaatatctaaaaaacgtatacaaaatgaaacagatcagaatcaaaagagtgcactacaacaaagcaattaaacacaaaagaaggcagtaaagaaggaaatgaagaacaaaaaaggtataagatatagattttctaaaaaatagaaaaatggcagaagtaagtcattccttagtagtaattaatgtaaatgaaaatggattaaactttccaatcaaaaggcagaggctggcagaatgaatttaaaaacatgattcaactatatgctgctta

SEQ ID NO: 590342 - DNA, 601 bp, Homo sapiens
ctatgtatatacttgaaagaattgagaacaggtgttcaaataagcacacatacacacttatgcacagcatcactattcacaatagcctaaagataaaagcactctaaatgtccatgaatagataaatggataaacaaaatgaggtatatacatacaatgaaatattatttagctacaaaaaggaatgaggaactgacacatgataggatatggatgaaccttaaaaacattatgctaagtgaaagaaggcagataagaaagatcacatgctatatgawcttttttgtaacaataactgggttgaaacttttattttaatgggagatacatgccttaagttgtgaatatattaaagaacaattttccagtgtgctaggggtggtggatggtgatatttcccgatacgaaactacaaactgcacattctgcagtaatttatttgggaactgtgtgatgagcaagagtctctggttgtcaaaacctcccaagtggagtcacctaaatttagaaaaggtaaaatgtatgtttgcaataaatatattagaaattcttaactttaaagcaacatctatgactaaaaaatttgcaaaaagcaaaccac

SEQ ID NO: 590343 - DNA, 618 bp, Homo sapiens
aacatttgtcctcattcctattttatgaaaaacatgaagctatacatacagtttctaaatttgttttgtataatgtcttcttcctccacgggtgtttcttcttgaagacggaattttgaaaagcttctgattcttctgttgcatcatcctccgtgacacctcataatgcagatggccaccacgcccagccagggcatggacaggcaaccacctctctgcttcaagggcctaattgtaccatatgtcacacccactgaataatacaaaggcccccccatgtacctaccgcttttckatagcaaatctggatgttttgctgtgtttgcttcagtgcttttctaataaagaaaatatcagaaatataatagtagacccccaagtatccctgaatctcagcactcttattttccacagataactacaacctgaaaattgatatactctattctcattatttttgatactttactatgtaaatctgtatctataaataataccattttcatgcttaaaacataaactaaatgttatgccactctaggttttcttacaatattatttatcttgagacattaactccactcattttaattgctctatggtatttcattatacata

SEQ ID NO: 590344 - DNA, 610 bp, Homo sapiens
ataggctatttagcctgtctcatattgatgggcagtttggtatttaaaataatgtgcaatagtaatcttgtatttaagttattatccatatgtgtgaatatatctttaaggatatatacccagaggaggaacttctgggtcaaagtctatgtgtatttttcaagaataaatccgcacatatacagccaactaatcattgataagtttgtcaggtgtacacaataaggaaaggacactgtagtctcttcaatgaatggtgctgggaaaagtagatattcacatgcaaaagaattaaattggacagttatcttacaccatacccaaataataccttgaaatagataaaagacttaaacataagacctctaaccataaaattcctagaagaaaacaaggaaaaaatctccytgacattggtcttgacaatgactttttaaatatgacatcaaaagcacatgcaaaaataaataagtggaaccacatcaaaccaaaaaccaaaaagcttttgcacagcaaaggaacttaataacaagaaaacaaataactgaatttaaaagttggcaaaggtcctaaatagacatttttttccagagaagacatacacattgcc

SEQ ID NO: 590345 - DNA, 578 bp, Homo sapiens
atttttcctcttctcaaaatgctcataagcaggagattatctgcatatctacaagtaaagtgaaaaaattaggcataaagtgaaaatatatgtcagagaatgttggatctttctaaatactgaggccgattatgtggtagaaagatgattatgtcataaagtatagaaaataaaaacattgagatattcttattataaataaattattcttgtatcatgttttaatttccatggcatcattacctacattcttgtctgatctggtttgcaaatatttgtaatttcaatcacactgcaaaagtcaaaagttggctaggtgtggttggctcatgcctagagccccagtgctttgggaggctgaggcaggaacattccttgaggccaggagttggagaccagcctgggcaacatagcaagaccattgtctctaaaaaaaatttaaaaattagctagatgtggtgstgtgggcctggactcctaattactcaggaagctaaggtgggaggatctcctgagcttaagagttcaaagcttcgctgagccatgatcacactaatgcctttcagcctggatgacag

SEQ ID NO: 590346 - DNA, 377 bp, Homo sapiens
agtagcccttattatttttgccagggttgtatagggctttctgggtatcaaaagtgtctcctactgaactgcgccatagctgttggtgtctattggcctcaccaagcatatgccagatagataatcttcattcccatgaagcaccattggtaatatackcattgtactttctgtagatctcaaaatccaggcaggcaacaagtttacacttaagccaagtgtttggagttctaaacgcgattccatataaatatggttaagagctttaaaaaaagtctctcaacttataaaacagaaatattctcaaaaaataagatataaggaagaatgttcacatgataattttattatcgacacacaatttccaaatacttatt

SEQ ID NO: 590347 - DNA, 499 bp, Homo sapiens
atacttatttggaaaacgtgatgcatgtccccaatttttctggaccgctctacagtaactgtggttcccagccagagcggcatgaggaggactgaggcctgactctcttcctgcgtccacgtccccacgtccccacgcccccacacccctgcaacagtaaggccctgctcccacccccgctgcgtcccgcccggttccccgtggcatcgctgcgctgccctgccctggtccggctctgggctacgggcagttgacaggyggcgcccgcgctccgcttcctgccctgattggcccaccgctccccctcaggcttcccctattggctgacagtgctccagccgcgcccgccggttggccgttcagccgttgccctggcgacgccgatgttgtggttccgcggcgcgctgggagtttgggtttggttggctgcagccagccagccgtgtaaaaactccaacgccgggcgccgcgggcagcacccacggagacccgcggggag

SEQ ID NO: 590348 - DNA, 499 bp, Homo sapiens
atacttatttggaaaacgtgatgcatgtccccaatttttctggaccgctctacagtaactgtggttcccagccagagcggcatgaggaggactgaggcctgactctcttcctgcgtccacgtccccacgtccccacgcccccacacccctgcaacagtaaggccctgctcccacccccgctgcgtcccgcccggttccccgtggcatcgctgcgctgccctgccctggtccggctctgggctacgggcagttgacaggcggcgcccgcgctccgcttcctgccctgattggcccaccgctccccstcaggcttcccctattggctgacagtgctccagccgcgcccgccggttggccgttcagccgttgccctggcgacgccgatgttgtggttccgcggcgcgctgggagtttgggtttggttggctgcagccagccagccgtgtaaaaactccaacgccgggcgccgcgggcagcacccacggagacccgcggggag

SEQ ID NO: 590349 - DNA, 715 bp, Homo sapiens
tgtctaacaacctaaatgtccatcagttgtgacaaattaaactatggtaaatccacactctcagttctttaaacagtggtagaaagctacacatttttctgggaagatattcgtggtatrgtattgagtaaaaacaggttatgaaacaccatgaatattatgtcattcatgtaaaaatgtgtgtgtatgaatatatgtgtatatgattatgtgtgtgtatatgtgtatgtaattatgtgtgtgtatctgtgcacttgtgtatataattttatgtctctaagtagaaatgcacataaagagatcgctggcagcttaaatgaatatttaccaaaattaaaattgctctcagaataagaggattttctggtgatttttttacttttcatttagcactttctatattattttgctactatcttctccttaaaacttactaaatgctcaaaatctacagtctactttaagataatactattgaccagatattcactatttgctagttacatgcattatcttggcaggacttcacagcaattctcagaagtaaaatattattattttttgaatgaggcaagcaggactttagaatgttgagaaattgatccacagtcacatagcaagcaaatgacagagctggaacagtaatgtcagactaactccacagtagacgccctcaatcactgtaccatactacgataaagaatacaagaaatac

SEQ ID NO: 590350 - DNA, 715 bp, Homo sapiens
tgtctaacaacctaaatgtccatcagttgtgacaaattaaactatggtaaatccacactctcagttctttaaacagtggtagaaagctacacatttttctgggaagatattcgtggtatagtattgagtaaaaacaggttatgaaacaccatgaatattatgtcattcatgtaaaaatgtgtgtgtatgaatatatgtgtatatgattatgtgtgtgtatatgtgtatgtaattatgtgtgtgtatctgtgcacttgtgtatataattttatgtctctaagtagaaatgcacataaagagatcgctggcagcttaaatgaatatttaccaaaattaaaattgctctcagaataagaggattttctggtgatttttttacttttcatttagcactttctatattattttgctactatcttctccttaaaacttactaaatgctcaaaatctacagtctactttaagataatactattgaccagatattcactatttgctagttacatgcattatcttggcaggacttcacagcaattctcagaagtaaaatattattattttttgaatgaggcaagcaggactttagaatgttgagaaattgatccacagtcacatagcaagcaaatgacagagctggaacagtaatgtcagactaactccacagtagacgccctcaatcactgtaccrtactacgataaagaatacaagaaatac

SEQ ID NO: 590351 - DNA, 620 bp, Homo sapiens
aaacattatttccgggttcatctatgaagatgtttctggaagagattaggatttgagtcagtatcagaccgagtaaagaagattggccctcaccaatgtggaaggacaccatctaatccattgagggcctgaatggtacaaaaaggtagagaaagggcaaattaacactttctttttgagctgagacatcaatcttctgctttcagacatcagagctctgggttcttgggcctttgaactctaggacttacagcagcggcacccccagttctcaggccttcagatttaaaccaggagttaacatcatcagctcccctgattctcaggtcttcaggcttaractgaattacgccacgggctttcctgggtctccaggttgcaggtggcagatggtggaacttctcaggctccataatcctgtgagccaattcccaagataaatctcctctcatacataaatatacacacattacatagacattatatattacatattatatatgcagtatagattatatatacattatatattacatagaatatatacactacatatcatataatacaatatatacattgcatactatatatgtgttatatatcctatatatgtattatat

SEQ ID NO: 590352 - DNA, 565 bp, Homo sapiens
caggcaccagaagaagaaataaaggggcgtgaccgcttaatagataggcaggaggtctcccttagaggggatgaaaatgtttggtgatagacagtgatagtgatagtgatagacagttttgtaacagatagtgacagggatagtgacagtttggtgatggtggtgatagacagcggtgatagttgcacaacgttatgaatgtactaaatgtcactgcatctacacttttaaatggctaaaatggtgaaatttatatgatgtatactttactacttttttttttaagtgcaacactaggttcatgacctcaagttcatggcctcatagccaggaagtaggcacccatgctgaaagacaagagtagtggccatgttcatgtccacaatgcccagcataattcttggaatattatagggactggaaagatgggacaaagggaagaactatgggaggggagggagaggggaatgggataggggagcctggcatacctgaattgaattaagtaccytatacaaaatgtaccctagagccacatattccttctgaatagtttcaagattgt

SEQ ID NO: 590353 - DNA, 363 bp, Homo sapiens
ctccaaatattttacagactttgactcttttcgtcgacactttttagcaatacaaatgggtgaagaaaagacttgaattcaacctgcagtctgcagcctggttaagctgacccacagcctagagcagggacgtctcacgaagtccgcagacctgggagctagcaaaagaaatgcttgctgcagtgcaggcagtatgttttggggaagtttattatgcagcaatagctgattaacatatcatttttatatggggcaaactgggtcrtatggagagaaagatggggtggttgtggaaaaagaaaggttattaggtttccagggaggagaggaaactgttgtctatcatgagtcctgaaggacctt

SEQ ID NO: 590354 - DNA, 606 bp, Homo sapiens
acttgagcagttagcccatctcctgcaaaaacgttcctttttttttttttttgagacagagtttcgctcttgttgcccaggctggattgcaacagtgtgatcttggctcactacaacctccacctcccaggttcaagcaattctcctgcctcagccttccaagtagctgggactacaggcctgcacccccacacacggctaatttcgtgtttttagcagagacggggtttctccatgttggtcaggctagtctcaaactcctgacctcaggtgatctgcctgccttggcctcccaaagggctaatgttcctttttaaaggccatcagagtgcaatttcccttgccccaaactccacctctcctcacccaaatcaggggctctttttccaacattcaatcggaacctgccattctcaaaaaatatcgaacccaagtagatgkactggacggtctggagtccgggagtaggatgcaccttgaaaggtgaaaccctaaggaagggttattattttattcatttacttatgagtaatgagtaaagatgagcttttgtagtgctctattctgggagctgtgggtatggtttcacttcctacacttgttaga

SEQ ID NO: 590355 - DNA, 634 bp, Homo sapiens
gcaaaaattcagtggtggcctgtacagagctgaaagggcaaaactgaaaggcagtaagagaatacccttttacatcaggcaaaattgatggctgattcaacagccccaaaggcttatgtagctcagcaacttacagcaaccattcttcttgttcatcttggtgaagttattcacacgacgagtgagggtccccactctgcccaggtgcaggaggagattcagaaaatttaaagaaatatgggcataatttaattcaatgttgatggtgatagaaagttccagagayacagccataacataccgactagtattatgcttatctttggaaatggtaacatgatgcttttaaccatcatggtggtattctttcttgcatagaaagaatttttaaaatagaacatttaaaaaaaaaaaaagcatttgataccagtaaagtttttccagagggcattgaaaagaattgaactaagcttagaaaaatgacagttatctgttacccagaaaaagcaggtaggtcaatgctgatagagcaatttaattttagcccacatgtttcaacacaaatttaaacctcccatgcaattagctaaaataactgaaataggggagtgcccaaaggctgtacccatataca

SEQ ID NO: 590356 - DNA, 542 bp, Homo sapiens
acttggaaaggcttaggtgataggcttttaacgctgtcaagggmaacattcaaatccttcaaatcgtgaatactatgccagcacattttttctccaaaaactggagcacaactccagacctttaacgaggcagagtcatagagcgactaaccaaccaatactcaaatctggggaagttgggtgggcttactgatgtcgtcgctctcaccgcagtctcacatagggcaggtttctgattcctgcctctgcacagatttctgcaatgcacggagttatggggccactctaggataatgaaatccacaaaagtgaaatcgtcacaaggaaaaacttagcatcgtggtgctcaacctttgacgtgcatcagaacagctctccgaatgtctgggtgcaaacctacctagtcagaatcgctgaggatgggatccaggtgcgcctaattgtaaatgacggcaggcacgagttggctgtgcccccctcccctgttcagaacaatggtttctcgaaaaatactgatatgcagtttcatttatttttacatc

SEQ ID NO: 590357 - DNA, 542 bp, Homo sapiens
acttggaaaggcttaggtgataggcttttaacgctgtcaagggaaacattcaaatccttcaaatcgtgaatactatgccagcacattttttctccaaaaactggagcacaactccagacctttaacgaggcagagtcatagagcgactaaccaaccaatactcaaatctggggaagttgggtgggcttactgatgtcgtcgctctcaccgcagtctcacatagggcaggtttctgattcctgcctctgcacagatttctgcaatgcacggagttatggggccactctaggataatgaaatccacaaaagtgaaatcgtcacaaggaaaaacttagcatcgtggtgctcaacctttgacgtgcatcagaacagctctccgaatgtctgggtgcaaacctacctagtcagaatcgctgaggatgggatccaggtgygcctaattgtaaatgacggcaggcacgagttggctgtgcccccctcccctgttcagaacaatggtttctcgaaaaatactgatatgcagtttcatttatttttacatc

SEQ ID NO: 590358 - DNA, 602 bp, Homo sapiens
ttgagttccttcaaggcaaattctaggcacctagccagctgtgagacataaatgagcaacatgataagcaagaaggtaatagtggcttaaaatgatagccaaggaagttacagtgaaatgtttggtctcctatagaaactaagataacatcttaacatatgaccccgagttgcttttcagaaacccagaccctcaccaaagggatccgctgacacagagacctcagataaggggaagctgaggactgaaccctgacctctgttgtttgttctaaatttcttcctgcaggacctagaggaagccatcttcacaggccagagctaacattcttttctactgaaccctaatttttagacaaagctttgcctctttaaccagcctcaaatcagaaaacctttgaattcacctatgacctgtgccctcacacccccatttttagatgtcccacctttttaggtcaaaccaatgtagagcctccatgcattgacttatggctttgcctgtaaccyctgcctttccatctttaaaaacccctccctgcaagccatcagagagttcaggtcttaggcgtgagctgcctgatattctccttgcttggcgct

SEQ ID NO: 590359 - DNA, 540 bp, Homo sapiens
aaggattgctagaccttctctggaggtgtaagcaatcatctccaaagaagtgatatttgagctgggtattcgataatgggagcacattttccaggtggtcaagaaggtaaaggacatttcaaggcagagggaatagtgtgggcaccagggaggkcttgtatgtctgagaagttgtggtggtttagtggtgttgggttgaaacgtggatctcatcttgggagagtaggtagtgagagctgaggccaggggggtcaaggctggatcacaaagagtattgcatgcaaggcaagccagcagcttggattctattccctgggccactgggtaccactgatgtgtatgagacaagggagccacaaagtcagatgtacactttagttatttatttgagacagggtcttactccagcccccaggctggagtgcagtggtgtgattatagctcactgcagccttgaactcctgggctcaagagatcctcctgcttcagcttcccccttgggttggaaggcatcaaacagacagagaaaggaattagggc

SEQ ID NO: 590360 - DNA, 540 bp, Homo sapiens
aaggattgctagaccttctctggaggtgtaagcaatcatctccaaagaagtgatatttgagctgggtattcgataatgggagcacattttccaggtggtcaagaaggtaaaggacatttcaaggcagagggaatagtgtgggcaccagggagggcttgtatgtctgagaagttgtggtggtttagtggtgttgggttgaaacgtggatctcatcttgggagagtaggtagtgagagctgaggccaggggggtcaaggctggatcacaaagagtattgcatgcaaggcaagccagcagcttggattctattccctgggccactgggtaccactgatgtgtatgagacaagggagccacaaagtcagatgtacactttagttatttatttgagacagggtcttaytccagcccccaggctggagtgcagtggtgtgattatagctcactgcagccttgaactcctgggctcaagagatcctcctgcttcagcttcccccttgggttggaaggcatcaaacagacagagaaaggaattagggc

SEQ ID NO: 590361 - DNA, 589 bp, Homo sapiens
gccatagctctctttccgggttatttccagttttttgctattacaaacagagctgcaatgcatgaccttatgtgaatgacttttcatattttcaggctctctagtgaatcgaatgtgcaaccggggttgagaacttctgatctagagggaaagcaggttgttaagagatctaacttggaatcccagctctgcccttaacttacatctcataaaatgtaagtaacagtagttcctaccttgtagacttgttgagagggttaaatgagctaatatatgttaagtgtttaaatcagttcttagcgcattttaggagatgcatattgttattgttattattgttgtattagtctgttctcatgctgctaataaagacatacccragaatgagtaatttataaaggaaggaggtttaatggactcacagctccacacagctggggagacctcacaatcatggtggaaggcgaaagaggagtaaaatcacaacgtacatggtggcaggcaagagagcttgtgcaggggaactcttatttataaaaccatcagatctcatgagacttattcattaccacaagagcagggtggggga

SEQ ID NO: 590362 - DNA, 458 bp, Homo sapiens
tgttacttttcatagcaaaaggagctttgaacatgtagttgggtttttttttgttgttgttgttgtttgttttgttttgtttgtttgttttttgagatcgrgtatcattcttatcacccaggctggaatgcagtggtgcgatcatggctcactgcaactgccacctcccaggtccaagcgaacctcctgcctcaatctccctagtagctgggattacagacacctgccaccacacccaactaatttttgtatttttagtagagaaggatttcaccatgttagccagggtggtctcgaactcctgacctcaagtgatccaccagcctcggcctcccaaagtgctgggattacagatgtgagccacagcacctggcctaaagatgtgactaagttcaggatcctgagataggggattacactggatatctgggtgggtctcatataatcacaagtgtcct

SEQ ID NO: 590363 - DNA, 482 bp, Homo sapiens
ttttttctctgactctgttcttgaagcaatggaagcatcaaatgtagtggtccggaggaggtggaggtggagggagtggtgctgagttgaagagagaacgagggagggyggaaggcgctgaatacttgacagtatcctgtcaaatccgggatgacttcataaacactagctgctgtttgcaaaaacatctttggaagagaaactgtacagatgttaaagtgtgttggtggggggtgtctcccctaatgctatgtctgcaaagtccaaaatagcaatgtgccaagaaatctctctccaacccagttatttcaagaggaaacctggtggagtggatggaatagtggggtaagaatcaaaagaattggtttctctgtccagatctgccactgcctacctgggtaatcacagtcaagtcacatcgtctctttgaatcttggattatggagccggtaaaatgggagtgaaaacaccctctttggcta

SEQ ID NO: 590364 - DNA, 599 bp, Homo sapiens
aagggaataccatgatcatggaaattgacccagaatagtcaacattgatacatctccgtgtaaagctgctgaacttcatacataaagaagcctttgagtggcatttaaaagttcactgacaggagcaaaagatcaggttggcttcagttttttccacggcaacattcaacacttgaagacagtggagaaatgcccgaaaatcacagccaagaattttctatttagccaaattatccttcaagtataatgactatgaatggttttgagcctacaaaaactcaaggagctatagagtgaagactgaaacacatacatgcatttggatgacagaagagaatatgagtgatatcagccctgacaatctagaagtgatacagctaacaaaaamtaatggacaagagaaggcaaagaaggaaggagacatagtgtaggaattttctgttcacttcctctaggatagatgagagtcacagaatattatttaaagctgacaaatcaaggaatcaaggtgtactagatgtaataaaagcctactgacagttcaaatgtaaattgcaagaaaaataatgctattgactaaattcagaaaactaacaaga

SEQ ID NO: 590365 - DNA, 511 bp, Homo sapiens
agttgtaacacatactaattcagtttctattttcaaattcaattctccatctaggtttgcttcaataacctgcaaattgagtattttacatagtcttagaaaaggaagccaaaaggaaaaaaactccatgggcaacagctttcacacaaccagatgacaaagtaccctacaawacctcaaaacacctcagagcacactgagacccccgtgctatcagggaaagtgagaagataaggcccaagagccaagaactcagaaatctcccaaaaatctcaaaggggaagtccccctgcctgcctcccggaatgaagaactcagtgaagatgtgaaaacaggtggaactccgagaggacttgccaggagactacagcagcacaagggcagggctctagggagggctgggtggagctgatgagaactccctcacagcaggagagagtcctgcactgagaaggaaccacgggaagtaagagcctcaactaagcagaatgggcaccttgggcaaaaaaaa

SEQ ID NO: 590366 - DNA, 581 bp, Homo sapiens
tttttctttgttatttacctttttaactttaaatcaatttgcccatctttcctaggcttagtgtagttaaacacagcaaaggggtgaggcgcagcagccttggaggagttgggcactggaccaggtcccattctacttgggtgaagctgactcaagtaggaagcagagttcatgagaaaaagcccagaatcacatttgtgcggcatctgcaaatttgagatgagacatgaaaaataccgcagacttccctgaaagacaaaggatggacaaggccttggccttgggactagggaaattgatggcagtctacagagaggagaggggagtaatcagacttgattgtcattctcgtttattttttgagacagagtctcactgtgttgcccaggctggagtgcagtggagcaatctcggctcactgcaacctccgcctcctgggttcaagccattctcctgcctcagtctcccgagtagctgggactacmggtgcccaccaccatgcctggataagttttgtatttttagtagagacaggatttcactgtgttagctaggatggtctcgatctcctgacctggtga

SEQ ID NO: 590367 - DNA, 442 bp, Homo sapiens
agtaggctgggcatggtggctcatgcctataatcatagcactttgggaggtgggatgatcgcttgaggctatgtgttcaataccagcctgggcaacatagtgagaccctgtctctacaaaaaataatacaaagaaaaactcgytgggtgtggtggcatgcacctatagtctcagctactcaggaagctgaggtgggaggattgcttgagcccaggaggtcgaggctgcagtgagctgtgatggtgccactgcactccagcctgggtgaaagagtgagacctgtctctaagaaaaaacaaaaacaaaagcaaaacattattaacaggctcctacaagtagcaagagctgccagtgagtgttctcttggcttggccttggcacctgctacctctagcatcctgtgtttgtatgctgcaggcatagggaatatccagttcatgta

SEQ ID NO: 590368 - DNA, 627 bp, Homo sapiens
tgcactccagcctgggtgaaagagtgagacctgtctctaagaaaaaacaaaaacaaaagcaaaacattattaacaggctcctacaagtagcaagagctgccagtgagtgttctcttggcttggccttggcacctgctacctctagcatcctgtgtttgtatgctgcaggcatagggaatatccagttcatgtatttgaacttgctatcacatttttgcatacagataacacacagagcctctgatttctcagcaaagaaaaactaggaaactgggagcaaaggtctaccttcccaaactataggcagtcatccacaatgacaaattatttgaggaatctgtaatcagtagattgaaaggaaccatcagtaatgtatatagcacgcgcccaagagagggagcaaattgttggctggagaattttgtttttaattaaacaggtaatgtatgcttgcgtttagtcctataaatgaaaacgtattcactacagaggcatgaatcctattaggccttcctktacataaactgtatgggtgattaccactgattactgtactattagagacctgtgcatggagtggcttgattgtagcctgcctggctcctgaaagggttcccgtgtgttttg

SEQ ID NO: 590369 - DNA, 513 bp, Homo sapiens
cccccaccatgattcaattacctcccaccaggttcctcccatgaaacgtgggaattgtgggagttacaattcaagatgagatttgggcggggacacaggaaaatcatatcatctatcaagcataaatttttttaaattctgtaattggttgctttgtttttcataaaaacacccaagcaactaattgtttagttatcttttgtaaattggcaagtttaaatccagcaaattatttctcacttcaagtattaatatttgatctgtccacaggtaagaaaactgaagcaggtatgtcatgcttttccaaccatcactcagccaattaatagtaaagccaggctagtggctctttctatctgaggtgtataactctacctgaggggttcatctttgctggttttcttgctcccactgcctgctckcaattattcccaataccatactatacataaatctacataatttttgacttttgaataatagacatgcttgaaattgaaattgaagggccag

SEQ ID NO: 590370 - DNA, 561 bp, Homo sapiens
gtcccttaaataaataaataaataaacaagaaatctggacacagacacagagggaagacaatataaagacacagagaaaagatgatcatctacatgtcaagtagagcggcctcagaagaaatgaagagatcaacsctgttgacatcttgatctcagacttctagcccccggaattgtgagaaaattaatttctattaggtaagcccgtcagttcatggtactttgttacagaaacccaagctaatgaacacagatgctattctctctcaccaaggcttgttttgagaaagggaagaaaggtctctatagcacagtagaaggcattttcttttctttttttttttaaatccagactgccaataaacatgcttatagcctcaaattagatgtaggtagcagtggcaagtgaagtcaacacatcaaagcatgggaatgaatagtgcatgtttgaattctagcccacagaaactcttatctctcccaatacccacatcccttgcccaaaatactaccaccatcaaaggtgtttttgaaatacagaaaccctgaattatccaaaaa

SEQ ID NO: 590371 - DNA, 556 bp, Homo sapiens
aaccactcccatttcagtggcctaaaataacagtcttttgttatgtttacagactcgatggggcagagatttggagagaaacagtgaagatggtttgtctctactccataatgtctgggaccacagatgggaggtttcaaatggctgagggtgactctgatggctggggctggraagatctggaggattctacactcacaaatctggggcctgatgtagaatgactcagaggttggcctcttctcagaaagtcaaccagagcgcccacacatggcctttccacgtggcttgggtttttttatgtatggtgagtatccacacatggcctctccacatggcctgggctaccttacagcatggtgagcacccacacatggccgctccatgtggcctgggctaccttacagcatgctgggcacccacacatggcctctccacgtggcctgggctaccttacagcatggtgagcacccacacatggcctctccacgtggcttgggcttccttacagcatggtggggcagaaatttgaacagaaacagtgaagatggtttct

SEQ ID NO: 590372 - DNA, 609 bp, Homo sapiens
agcaaggttttaagtacctgtagtttgaggattaacacatattaaaaataatggtgtgaaataacccaatttacaatatcaggagatgataatgattttgcagaaagaaataagttctaataaaaataatctagattcctaataccacttactgacaatcacagctttatatcatggtaaaattacatacttatctcctcattagcaactagtctcacttattcctcttgccaaaccaattataagaaaatgttcagactcaaagggattaataggacacttggacctcactcagtcttctcacgactcaagtaattagcaagcacttgtacataaaatccaaatagttttcctaaactaattaaggaaatgaaggacatcaaaatgttaycaaataatagcaactcatgtcccatataccaatagtcctcaaacagataaaataattgccagatgctgatggaatcttgttggtcaactcagaaactaatttggggtgtttataaggaggaggaaagaaagatacttgtttatcaaataagcaaattatgtcacaaagaaatattttataggcaatgccttgtatattaaacagcttctgaattctcc

SEQ ID NO: 590373 - DNA, 609 bp, Homo sapiens
agcaaggttttaagtacctgtagtttgaggattaacacatattaaaaataatggtgtgaaataacccaatttacaatatcaggagatgataatgattttgcagaaagaaataagttctaataaaaataatctagattcctaataccacttactgacaatcacagctttatatcatggtaaaattacatacttatctcctcattagcaactagtctcacttattcctcttgccaaaccaattataagaaaatgttcagactcaaagggattaataggacacttggacctcactcagtcttctcacgactcaagtaattagcaagcacttgtacataaaatccaaatagttttcctaaactaattaaggaaatgaaggacatcaaaatgttaccaaataatagcaactcatgtcccatataccaatagtcctcaaacagataaaataattgccagatgctgatggaatcttgttggtcaactcagaaactaatttggggtgtttataaggaggaggaaagaaagatasttgtttatcaaataagcaaattatgtcacaaagaaatattttataggcaatgccttgtatattaaacagcttctgaattctcc

SEQ ID NO: 590374 - DNA, 640 bp, Homo sapiens
accatgcttggctgattttttgtatttttagtagagacgggtttcaccatgttggcgaggctggtctcaaactccttaagcagtccacctgcctcggcctcccaaagtgctgggattacagacgtgacccagtgcacccaccaataatgtaaattcttaytgaaacagtcatgcttgtgtaggtactgtctgtggtcacttttgttctacaatgacagagctgtgtagatgtgacagagattatacagcctgcaaaacaaaatacttagtatctggcctgttatagggcaagcttgccaactcttacatacagagtgttctgatccaaggaaaaagtaataaaaagtacccaattatagagcagcttcctgaaatcaacatttgttctttcttttacatctcctattgaagaataggatgttgtatataagaggatagcacaaaatgtttcctcaagttttcatttatgtcactgaagagttgactttaaagaattattataaattaataaaatgtaaccatttggaataagctatgtaaatgaatttgaaagtttgaagttgttgcttttctttagtaatgaaaaactaacccatgaaatgtgtggtagatttttcacttattaagagtaaatatgcgc

SEQ ID NO: 590375 - DNA, 640 bp, Homo sapiens
accatgcttggctgattttttgtatttttagtagagacgggtttcaccatgttggcgaggctggtctcaaactccttaagcagtccacctgcctcggcctcccaaagtgctgggattacagacgtgacccagtgcacccaccaataatgtaaattcttactgaaacagtcatgcttgtgtaggtactgtctgtggtcacttttgttctacaatgacagagctgtgtagatgtgacagagattatacagcctgcaaaacaaaatacttagtatctggcctgttatagggcaagcttgccaactcttacatacagagtgttctgatccaaggaaaaagtaataaaaagtacccaattatagagcagcttcctgaaatcaacatttgttctttcttttacatctcctattgaagaataggatgttgtatataagaggatagcacaaaatgtttcctcaagttttcatttatgtcactgaagagttgactttaaagaattatyataaattaataaaatgtaaccatttggaataagctatgtaaatgaatttgaaagtttgaagttgttgcttttctttagtaatgaaaaactaacccatgaaatgtgtggtagatttttcacttattaagagtaaatatgcgc

SEQ ID NO: 590376 - DNA, 536 bp, Homo sapiens
ctttaatgtttgctttgttcatgarcaccacatattgcctctcctatgcagttaagcaggtaggtgacagaaaagcccatgtttgtctctactcacacacttccgactgaatgtatgtatggagtttctacaccagattcttcagtgctctggatattaactgggtatcccatgactttattctgacactacctggagttagcacagaccccacaagttaggggctcagtcccacgaggccatcctcacttcagatgacaatggcaagtcctaagttgtcaccatacttttgaccaacctgttaccaatcgggcgttcccgtaactgtcttcttgggtttaataatttgctagaacagtttacggaactcagaaaaacagtttattttctttttttctgagagagagggtcttattttgttgcccaggctggtgtgcaatggtgcagtcatagctcattgcagccttgattgtctgggttccagtggttctcccacctcagcctccctagtagctgagactacatgcctgcaccac

SEQ ID NO: 590377 - DNA, 536 bp, Homo sapiens
ctttaatgtttgctttgttcatgaacaccacatattgcctctcctatgcagttaagcaggtaggtgacagaaaagcccatgtttgtctctactcacacacttccgactgaatgtatgtatggagtttctacaccagattcttcagtgctctggatattaactgggtatcccatgactttattctgacactacctggagttagcacagaccccacaagttaggggctcagtcccacgaggccatcctcacttcagatgacaatggcaagtcctaagttgtcaccatacttttgaccaacctgttaccaatcgggsgttcccgtaactgtcttcttgggtttaataatttgctagaacagtttacggaactcagaaaaacagtttattttctttttttctgagagagagggtcttattttgttgcccaggctggtgtgcaatggtgcagtcatagctcattgcagccttgattgtctgggttccagtggttctcccacctcagcctccctagtagctgagactacatgcctgcaccac

SEQ ID NO: 590378 - DNA, 618 bp, Homo sapiens
agctttggccttctgagatcaagcaatcctcccatctcaacctcccaagtagctaggactacacatgcatgtcacccatgcccagatcatttttgtagagtcagagtttcaccgtggtggccaggttggcatgttggccagatggggtcttcttttgttgcccaggctggccacaaattcctgggctcaagtkatcctcccacctcgtccttgtagagatgagatttagttatgtcgtccaggctgatctcaaactcctgggctaaatcgattgtctcacctcagcctctcaagtatgttatgaaggttatatgttaggaagggtcccaggaggtagacccacacagatgggatttgggcataggtttggtttcccagggggcagtgctgagctctttgccagtgggaaatgggatgctggtgatttccagtaggtgacctcacagtgactcaagctaccacttactgttgattgtgacgaaatgccagctgaggcacatgccttgggagctaagtggttgctgcccttgaccactgtgaagactggtgtgggaagggtcgttttggatgcacttgagcaggggtccccaacccctgagccatggagccgcaaggagc

SEQ ID NO: 590379 - DNA, 494 bp, Homo sapiens
gagtttagggagaggtttttaaaacagaagaagtttgagtaatttaaatgatgatgggaaggagctaaaagtgggggataggttaaagatacaggaaagtgggaggaagaactgacaagtgaggttccagagagggcaggagaagaggagattcccatagggggattaacactttcttttcttttttctttctaagacagggtctcactctgtcgcccaggctggagtgcagtggcacaatcttggctcactgtagtgtagacttcccaggctcaagggatttctcccaccccagactcccaagtagctggaactacgggtgtgcaccaccaccacacctggctaatgtctcttttttttggtagacacagagtctcactatktagcactgattggtctccaactcctggcctcaagcgatcctcctgcctaggcttcccaaattgctgggattacaggcatgagccacaatgcctggcctctgctagttccgt

SEQ ID NO: 590380 - DNA, 528 bp, Homo sapiens
cacttgagcagcggtctccaaccacagggccacagagctggaggtgagcagcaggcgagtgaagggaaacttcatctgtatttctagcccctcccatcgcttgcatgaccacctgagctccatgtcctgtcagatcagcagcagcattagattgtcataggagcacaaactctgttgtgaagtgtgcatgcgagggatctaggttgtgtactccttatgagaatctaatgcctgatattctgttactgtctcccatcaccccaggtggacagtctagttgcaggaaaacaagctcagagatcccactgagtctacrttatagtgagttgtagaatcatttcattatatattactatgtagtaataatagaaataaagtgcacaatatatgtaatgcactttaatcatcctgaaattattccctcattcccagtctgtggaaaaattgtcttccacacattcactctgttttttggtagaggcagggtcttaatatattgcccagtctgatctcaaactcctggcctca

SEQ ID NO: 590381 - DNA, 528 bp, Homo sapiens
cacttgagcagcggtctccaaccacagggccacagagctggaggtgagcagcaggcgagtgaagggaaacttcatctgtatttctagcccctcccatcgcttgcatgaccacctgagctccatgtcctgtcagatcagcagcagcattagattgtcataggagcacaaactctgttgtgaagtgtgcatgcgagggatctaggttgtgtactccttatgagaatctaatgcctgatattctgttactgtctcccatcaccccaggtggacagtctagttgcaggaaaacaagctcagagatcccactgagtctacgttatagtgagttgtagaatcatttcattatatattactatgtagtaataatagaaataaagtgcacaatatatgtaatgcacttkaatcatcctgaaattattccctcattcccagtctgtggaaaaattgtcttccacacattcactctgttttttggtagaggcagggtcttaatatattgcccagtctgatctcaaactcctggcctca

SEQ ID NO: 590382 - DNA, 528 bp, Homo sapiens
cacttgagcagcggtctccaaccacagggccacagagctggaggtgagcagcaggcgagtgaagggaaacttcatctgtatttctagcccctcccatcgcttgcatgaccacctgagctccatgtcctgtcagatcagcagcagcattagattgtcataggagcacaaactctgttgtgaagtgtgcatgcgagggatctaggttgtgtactccttatgagaatctaatgcctgatattctgttactgtctcccatcaccccaggtggacagtctagttgcaggaaaacaagctcagagatcccactgagtctacgttatagtgagttgtagaatcatttcattatatattactatgtagtaataatagaaataaagtgcacaatatatgtaatgcactttaatcatcctgaaattattccctcattcccagtctgtggaaaaattgtcttccacacrttcactctgttttttggtagaggcagggtcttaatatattgcccagtctgatctcaaactcctggcctca

SEQ ID NO: 590383 - DNA, 635 bp, Homo sapiens
tgcttaactaagcaacagagaaggtaaaatactaattcaattcatcaatttaagcaatactcaataagagccaagtatgtgcttactgaataagctgctaaggtatggtggttacagagtgtgcggtgaaatgatgtctacatcacagtccaacattcacagagtttaaaagcctaccaagaatcaagacagacacaaatacctaacatagacgtttgtatrtgataagagagccagagtacaatttaggagaagaaattgtatggaaggaaggttcatttccattagaccagaaaagacagcacatttgaaggcctgaataagaaatattctggataagatattgtggctgctaccagaatggctcttgatgatctctacctcgtggtatttatacccgtatataatctctttcctatagtgtaagctggtcccaggtacttgtttctattgaatagaatagaacaaaagaaatgagatgccacttctgagattagattataagatactgtgaatttcatcttgtgccctctccctctctctctttctcttgccctctcatttgaatgaagccaactggcatgctgtcagtggcccagtgtaagtcctgttacaagaaattgatgattacctgt

SEQ ID NO: 590384 - DNA, 635 bp, Homo sapiens
tgcttaactaagcaacagagaaggtaaaatactaattcaattcatcaatttaagcaatactcaataagagccaagtatgtgcttactgaataagctgctaaggtatggtggttacagagtgtgcggtgaaatgatgtctacatcacagtccaacattcacagagtttaaaagcctaccaagaatcaagacagacacaaatacctaacatagacgtttgtatatgataagagagccagagtacaatttaggagaagaaattgtatggaaggaaggttcatttccattagaccagaaaagacagcacatttgaaggcctgaataagaaatattctggataagatattgtggctgctaccagaatggctcttgatgatctctacctcgtggtatttatacccgtatataatctctttcctatagtrtaagctggtcccaggtacttgtttctattgaatagaatagaacaaaagaaatgagatgccacttctgagattagattataagatactgtgaatttcatcttgtgccctctccctctctctctttctcttgccctctcatttgaatgaagccaactggcatgctgtcagtggcccagtgtaagtcctgttacaagaaattgatgattacctgt

SEQ ID NO: 590385 - DNA, 597 bp, Homo sapiens
atgtgcttactgaataagctgctaaggtatggtggttacagagtgtgcggtgaaatgatgtctacatcacagtccaacattcacagagtttaaaagcctaccaagaatcaagacagacacaaatacctaacatagacgtttgtatatgataagagagccagagtacaatttaggagaagaaattgtatggaaggaaggttcatttccattagaccagaaaagacagcacatttgaaggcctgaataagaaatattctggataagatattgtggctgctaccagaatggctcttgatgatctctacctcgtggtatttatacccgtatataatctctttcctatagtgtaagctggtcccaggtacttgtttctattgaatagaatagaacaaaagaaatgagatgccacttctgagattagwttataagatactgtgaatttcatcttgtgccctctccctctctctctttctcttgccctctcatttgaatgaagccaactggcatgctgtcagtggcccagtgtaagtcctgttacaagaaattgatgattacctgtagccaaccctaagtgaagaactgaggtcctcagtccta

SEQ ID NO: 590386 - DNA, 541 bp, Homo sapiens
taaaatactaattcaattcatcaatttaagcaatactcaataagagccaagtatgtgcttactgaataagctgctaaggtatggtggttacagagtgtgcggtgaaatgatgtctacatcacagtccaacattcacagagtttaaaagcctaccaagaatcaagacagacacaaatacctaacatagacgtttgtatatgataagagagccagagtacaatttaggagaagaaattgtatggaaggaaggttcatttccattagaccagaaaagacagcacatttgaaggcctgaataagaaatattctggataagatattgtggctgctaccagaatggctcttgatgatctctacctcgtggtatttatacccgtatataatctctttcctatagtgtaagctggtcccaggtacttgtttctattgaatagaatagaacaaaagaaatgagatgccacttctgagattagattataagatactgtgaatttcwtcttgtgccctctccctctctctctttctcttgccctctcatttg

SEQ ID NO: 590387 - DNA, 597 bp, Homo sapiens
atgtgcttactgaataagctgctaaggtatggtggttacagagtgtgcggtgaaatgatgtctacatcacagtccaacattcacagagtttaaaagcctaccaagaatcaagacagacacaaatacctaacatagacgtttgtatatgataagagagccagagtacaatttaggagaagaaattgtatggaaggaaggttcatttccattagaccagaaaagacagcacatttgaaggcctgaataagaaatattctggataagatattgtggctgctaccagaatggctcttgatgatctctacctcgtggtatttatacccgtatataatctctttcctatagtgtaagctggtcccaggtacttgtttctattgaatagaatagaacaaaagaaatgagatgccacttctgagattagattataagatactgtgaatttcatcttgtgccctctccctctctctctttctcttgccctctcatttgaatgaagccaactggcatgctgtcagtggcmcagtgtaagtcctgttacaagaaattgatgattacctgtagccaaccctaagtgaagaactgaggtcctcagtccta

SEQ ID NO: 590388 - DNA, 627 bp, Homo sapiens
gtgaatttcatcttgtgccctctccctctctctctttctcttgccctctcatttgaatgaagccaactggcatgctgtcagtggcccagtgtaagtcctgttacaagaaattgatgattacctgtagccaaccctaagtgaagaactgaggtcctcagtcctacaaatggagagaaactgaatctagctaagaaccatgtgagtgagctgggaagaagatccaccctcagttgaaatttaagatgacatattgagcagacatactgagacacactgaaagtaagagagcaggaggaaacaaaaccagggtcatacaaagaacacaactgattttgagattctcacataagtattacaccttcagtgagcacgtgtactagaaatttaaaaaataaatwaaataaaccttcaaagtgagctagcaaataaatttccctatggtctcagctctgagtggagagagaaaatgttccctgtggagtttatagccagaatccagctctcaaacaggtttcagcctgaactcacacaatctgtgtggcttccaaatttgcaagctgagaatttaattcaaagtggtctcaggttgatagcagtccaaaatgctaggtaggaaaaaaaatcctc

SEQ ID NO: 590389 - DNA, 627 bp, Homo sapiens
gtgaatttcatcttgtgccctctccctctctctctttctcttgccctctcatttgaatgaagccaactggcatgctgtcagtggcccagtgtaagtcctgttacaagaaattgatgattacctgtagccaaccctaagtgaagaactgaggtcctcagtcctacaaatggagagaaactgaatctagctaagaaccatgtgagtgagctgggaagaagatccaccctcagttgaaatttaagatgacatattgagcagacatactgagacacactgaaagtaagagagcaggaggaaacaaaaccagggtcatacaaagaacacaactgattttgagattctcacataagtattacaccttcagtgagcacgtgtactagaaatttaaaaaataaataaaataaaccttcaaartgagctagcaaataaatttccctatggtctcagctctgagtggagagagaaaatgttccctgtggagtttatagccagaatccagctctcaaacaggtttcagcctgaactcacacaatctgtgtggcttccaaatttgcaagctgagaatttaattcaaagtggtctcaggttgatagcagtccaaaatgctaggtaggaaaaaaaatcctc

SEQ ID NO: 590390 - DNA, 627 bp, Homo sapiens
gtgaatttcatcttgtgccctctccctctctctctttctcttgccctctcatttgaatgaagccaactggcatgctgtcagtggcccagtgtaagtcctgttacaagaaattgatgattacctgtagccaaccctaagtgaagaactgaggtcctcagtcctacaaatggagagaaactgaatctagctaagaaccatgtgagtgagctgggaagaagatccaccctcagttgaaatttaagatgacatattgagcagacatactgagacacactgaaagtaagagagcaggaggaaacaaaaccagggtcatacaaagaacacaactgattttgagattctcacataagtattacaccttcagtgagcacgtgtactagaaatttaaaaaataaataaaataaaccttcaaagwgagctagcaaataaatttccctatggtctcagctctgagtggagagagaaaatgttccctgtggagtttatagccagaatccagctctcaaacaggtttcagcctgaactcacacaatctgtgtggcttccaaatttgcaagctgagaatttaattcaaagtggtctcaggttgatagcagtccaaaatgctaggtaggaaaaaaaatcctc

SEQ ID NO: 590391 - DNA, 447 bp, Homo sapiens
tggtctcagctctgagtggagagagaaaatgttccctgtggagtttatagccagaatccagctctcaaacaggtttcagcctgaactcacacaatctgtgtggcttccaaatttgcaagctgagaatttaattcaaagtggtctcaggttgatagcagtccaaaatgctaggtaggaaaaaaaatcctctctggacaaataaatcatcaaagcaagctcataagagcaggtttcaaaggtcatgagmttctaacacacacacaaaaatcacacacacaaaatgggggtagcagcaacatgggtagcatattcaaacttgaaaagactttaaatatttgtattattagatgtagattatgaaacacatattttaatgtggttaatttttttaaggaatcaaaactatgagtaaagaccaagaaaattgtgctggatggccacttccac

SEQ ID NO: 590392 - DNA, 624 bp, Homo sapiens
attttaatgtggttaatttttttaaggaatcaaaactatgagtaaagaccaagaaaattgtgctggatggccacttccaccatggctcccctcctatttaagtctgggtactgtgtcacccgaagtcttcaggcacattgttccaggtytgggtttgcctatgaaagaaactcatgagagctggaaatgaggagtgaagaggaggtcttcaaataaagcaggcttaaggattagacatagcaggtttgacagatgtgatggcttgcagaatcctttatgagctcccactgtccatctggataagatttacagacctttcagaaattcctataagcttgggttctgtgcccacactctagactgtcaggctaagatctctgatataaaacagacctcttctgattttgtctagctgcttttctaatatctattcaccaagctcttccaataatagcataaggccctaattaatattaaacttttatcattataatacataggatgtcttctgttttcctgatcaaattctgactactattaaaatataaagaattgtccagaaatatataaaaaaagaatcacacattgatcttctttaaatgaaaatataacaattgtatggac

SEQ ID NO: 590393 - DNA, 412 bp, Homo sapiens
gatggccacttccaccatggctcccctcctatttaagtctgggtactgtgtcacccgaagtcttcaggcacattgttccaggtctgggtttgcctatgaaagaaactcatgagagctggaaatgaggagtgaagaggaggtcttcamataaagcaggcttaaggattagacatagcaggtttgacagatgtgatggcttgcagaatcctttatgagctcccactgtccatctggataagatttacagacctttcagaaattcctataagcttgggttctgtgcccacactctagactgtcaggctaagatctctgatataaaacagacctcttctgattttgtctagctgcttttctaatatctattcaccaagctcttccaataatagcataaggccctaattaatattaa

SEQ ID NO: 590394 - DNA, 557 bp, Homo sapiens
attttgtctagctgcttttctaatatctattcaccaagctcttccaataatagcataaggccctaattaatattaaacttttatcattataatacataggatgtcttctgttttcctgatcaaattctgactactattaaaatataaagaattgtccagaaatatataaaaaaagaatcacacattgatcttctttaaatgaaaatataacaattgtatggactaggatgattacagttgttcagttctgactgttatttgaagaaaaaagcaataagaagcctcagcaacttaacagaaggagctgccatttactaggagaaaagattgtggatgagagtgtagcaaaggtcagaattctgtgaagcttgagatgtttattataatgaattatcttttatactcactacaatttcctaacaattttggggtttatatttttgaaagagatatacctttaattttctttctttgtactattgttaggtaactttgatgtgcagattatactacagygaaagttgccaatgacaaggcaaagtcacttacatcagacc

SEQ ID NO: 590395 - DNA, 557 bp, Homo sapiens
attttgtctagctgcttttctaatatctattcaccaagctcttccaataatagcataaggccctaattaatattaaacttttatcattataatacataggatgtcttctgttttcctgatcaaattctgactactattaaaatataaagaattgtccagaaatatataaaaaaagaatcacacattgatcttctttaaatgaaaatataacaattgtatggactaggatgattacagttgttcagttctgactgttatttgaagaaaaaagcaataagaagcctcagcaacttaacagaaggagctgccatttactaggagaaaagattgtggatgagagtgtagcaaaggtcagaattctgtgaagcttgagatgtttattataatgaattatcttttatactcactacaatttcctaacaattttggggtttatatttttgaaagagatatacctttaattttctttctttgtactattgttaggtaactttgatgtgcagattatactacagtraaagttgccaatgacaaggcaaagtcacttacatcagacc

SEQ ID NO: 590396 - DNA, 483 bp, Homo sapiens
atgagttcttaaaaatggagaacctttcttagctgagtccagagagagatgtgacaatgaaagaatggtcagagaaatgtgacattgccagctttaaaaagagagaggagaggcaatgagaaaaggaatgctgatgttctctagaagatagaaaaggccaggatatggattctaccctagccgccataaagaaacatgactgtcgacaacttgattttagttcactaaaattcatgcctgatttctgacttgtgtacactgtaagatgacaagtttgtgttattttaggtcacttagtttgtagaaatttrttacagcagtaatagaacaagtggttatccatatgaggcaaattagattggatacctatctccaatagaaatcaattcaaggtgaattccaggaaaatacttaaaacatttagattaaaaataaatgagaatttttgttactttttgtaggtcatagaaccaagaaaaacaa

SEQ ID NO: 590397 - DNA, 393 bp, Homo sapiens
agatctcctaaaactgctatatagttctgcctcactcttacaaagattcatctcttgagagttttgtgctctacccccagatgtggtctttctggttctgaagcttttgcttcagtcaccctgaattttgccagccctatgcatgctataccttggattgccaacttgccctcactgaagccagtttctctggttagaatagttgccccaacccatgcctaatactctagtaaacaaggttctacctgggcttaggttaacttttgctcctttgggccctgtgttctaccagcattccatttatctgaaactctccctcaccttaagaacttatctgttctttaatgatttactgctgcttcctgggttcraaagaacccagttcaggagttt

SEQ ID NO: 590398 - DNA, 458 bp, Homo sapiens
agaaaatggatggacaagtaaatcccactcagcacccatagtccaggcatggggacctcaacacacctgagccccagacatcacctttcattgtgagtagctctgagatgacayttctgctgttcccaattccagcattaattggattagatagttattttatgaagaattttcatatgccacaatcctgaccatatcttcaagtgaacagaaaaattctattaaaaagtcaaccttctgtctcactctgttgcccagactggagtgcagtggtgcaattatggctcactgcagcctcaacctcctgggctcaagcaatcctcctgcctcagcctcacaagtagctgggactacaggtgcttgtcaccacatctcactaattttcccatttgtgttatatgtggattccacaggactgacttcgaaaacttgagtatgcgtggattttggtatacaca

SEQ ID NO: 590399 - DNA, 458 bp, Homo sapiens
agaaaatggatggacaagtaaatcccactcagcacccatagtccaggcatggggacctcaacacacctgagccccagacatcacctttcattgtgagtagctctgagatgacatttctgctgttcccaattccagcattaattggattagatagttattttatgaagaattttcatatgccacaatcctgaccatatcttcaagtgaacagaaaaattctattaaaaagtcaaccttctgtctcactctgttgcccagactggagtgcagtggtgcaattatggctcactgcagcctcaacctcctgggctcaagcaatcctcctgcctcagcctcacaagtagctgggactacaggtgcttgtcaccacayctcactaattttcccatttgtgttatatgtggattccacaggactgacttcgaaaacttgagtatgcgtggattttggtatacaca

SEQ ID NO: 590400 - DNA, 585 bp, Homo sapiens
catgcactttatcttggtgttcagtcttgactggtgtaaacttttgatgtccagaaggttttcttcatgtgttgttgtgtggaattgtaaatattttctagcttttgtaaggttgtggctcatatttatatttctcctggtttgaaagaagagagagaaagaagtatgtcaaattgagactcttagattggaaatctgaatttatttacacgattgagattgatctagagttttattttttctgctgtaactgaaatttggattcaagattatatgtgttttgtgaatatgtttggtaacattgtgacttttctataatttagggaagtttgatgtaggagaaagagaaaaaatttttgagagaatcctaaattcatatatggcctaaccttttaatatctatgtaattttagataataaataatttgtttgagattatgtggctctaacaacacctgcttcacagtgtaattatgaggatttcatagaatttgtatagtgagcgttagttttgatgttactttaaacctctttgccttatacattctattttttccatggaayattatatgatttcatgtccac

SEQ ID NO: 590401 - DNA, 567 bp, Homo sapiens
agaggcaactgggtgtcaggagacatgatggagaggaaagcatcatcatggtcattctctgtctcactgtccagcagggactcccctgaggggcccagggctcctcctccatggtgggaggtgagsttttaccaggttccaccacccccaaagtgtgtggggttgcgggccctgggctttcagggcaggtggctccagggggccgcccagggtcaacactccctgtcccaccctggtggacgctcatgagcaacagctgccaacttggcacgttgttttctctggttggcggccactgagtgactggcaggttgctgggcctcgtgtggctgccgggaggggtccggaaggcgctggagtaccaggcgaacacggccgcagagtgaccttccacattcctccacacgaacatgctgacgccacgggaggcctcactgaacgcaggcctgggggccgagcacttggtccgggcggggggttcctggcaggggctcacacctcctcaccccctcctcagccaaggtggcttgggcccagagaaggggaggttggagaggagcagaagcc

SEQ ID NO: 590402 - DNA, 567 bp, Homo sapiens
agaggcaactgggtgtcaggagacatgatggagaggaaagcatcatcatggtcattctctgtctcactgtccagcagggactcccctgaggggcccagggctcctcctccatggtgggaggtgaggttttaccaggttccaccacccccaaagtgtgtggggttgcgggccctgggctttcagggcaggtggctccagggggccgcccagggtcaacactccctgtcccaccctggtggacgctcatgagcaacagctgccaacttggcacgttgttttctctggttggcggccactgagtgactggcaggttgctgggcctcgtgtggctgccgggaggggtccggaaggcgctggagtaccaggcgaacacggccgcagagtgaccttccacattcctccacacgaacatgctgacgccacgggaggcctcactgaacgcaggcctgggggccgagcacttggtccgggcrgggggttcctggcaggggctcacacctcctcaccccctcctcagccaaggtggcttgggcccagagaaggggaggttggagaggagcagaagcc

SEQ ID NO: 590403 - DNA, 567 bp, Homo sapiens
agaggcaactgggtgtcaggagacatgatggagaggaaagcatcatcatggtcattctctgtctcactgtccagcagggactcccctgaggggcccagggctcctcctccatggtgggaggtgaggttttaccaggttccaccacccccaaagtgtgtggggttgcgggccctgggctttcagggcaggtggctccagggggccgcccagggtcaacactccctgtcccaccctggtggacgctcatgagcaacagctgccaacttggcacgttgttttctctggttggcggccactgagtgactggcaggttgctgggcctcgtgtggctgccgggaggggtccggaaggcgctggagtaccaggcgaacacggccgcagagtgaccttccacattcctccacacgaacatgctgacgccacgggaggcctcactgaacgcaggcctgggggccgagcacttggtccgggcggggggttcctggcaggggctcacacctcctcrccccctcctcagccaaggtggcttgggcccagagaaggggaggttggagaggagcagaagcc

SEQ ID NO: 590404 - DNA, 482 bp, Homo sapiens
ggattcaatgaagaactgactatcaccttgttaatcattcagaaacatgttgcagrcttaagccatttttgatatagatactgaaacaattacttgctaagagcaaacttgaaggtatggataaggccctgagtcatcttcctgagctgaatgatagttaagctgaatgtacgtataaaatatgattttctaaccacttgctcgccaacaaggaaaacttttaagtagagcagaacctgaatagacaagacatttctttcttttggtagaaaatgatttaccatcactgtgtagttaattgtagactaggtaattttaactttgtgatttattgccggagacattttcttctgtactgtaaagtgtgtgtcaaaaaaaaaaaatagcgattttggaggattaggggactttgataaattgcctgcaattctggcagtatgaactgcatattaatttctctctttcaagaacatttttattta

SEQ ID NO: 590405 - DNA, 482 bp, Homo sapiens
ggattcaatgaagaactgactatcaccttgttaatcattcagaaacatgttgcaggcttaagccatttttgatatagatactgaaacaattacttgctaagagcaaacttgaaggtatggataaggccctgagtcatcttcctgagctgaatgatagttaagctgaatgtacgtataaaatatgattttctaaccacttrctcgccaacaaggaaaacttttaagtagagcagaacctgaatagacaagacatttctttcttttggtagaaaatgatttaccatcactgtgtagttaattgtagactaggtaattttaactttgtgatttattgccggagacattttcttctgtactgtaaagtgtgtgtcaaaaaaaaaaaatagcgattttggaggattaggggactttgataaattgcctgcaattctggcagtatgaactgcatattaatttctctctttcaagaacatttttattta

SEQ ID NO: 590406 - DNA, 485 bp, Homo sapiens
ttatcacgatttgctttattaatttatactttgcttatatggaattttgcccagcagacctcatcacagtttctaacctgttttattttttattttttatttttttttgttctgagacagggtctccctctgttgtccaaggctggagtgtagtagtgctatcgcagctgactgcagcctcaaccttccaggctgaagcgatcctcccacctcaacctcccacgtggctgagactacaggtgcttgccactatgcccaactaayatttggaattttcgtatacgtggattccagaggggtgacagcgaaacgtgagtaagcatggattttggtatatgcagagatggggggctggaactaattctgtatactgagggacgacgactgtatatgtttttacaattacgctgtaggatacatactgttgcatagccttgaaaataataatttttaattgagtggaataagaataatattgataaaag

SEQ ID NO: 590407 - DNA, 485 bp, Homo sapiens
ttatcacgatttgctttattaatttatactttgcttatatggaattttgcccagcagacctcatcacagtttctaacctgttttattttttattttttatttttttttgttctgagacagggtctccctctgttgtccaaggctggagtgtagtagtgctatcgcagctgactgcagcctcaaccttccaggctgaagcgatcctcccacctcaacctcccacgtggctgagactacaggtgcttgccactatgcccaactaatatttggaattttcgtatacgtggattcyagaggggtgacagcgaaacgtgagtaagcatggattttggtatatgcagagatggggggctggaactaattctgtatactgagggacgacgactgtatatgtttttacaattacgctgtaggatacatactgttgcatagccttgaaaataataatttttaattgagtggaataagaataatattgataaaag

SEQ ID NO: 590408 - DNA, 485 bp, Homo sapiens
ttatcacgatttgctttattaatttatactttgcttatatggaattttgcccagcagacctcatcacagtttctaacctgttttattttttattttttatttttttttgttctgagacagggtctccctctgttgtccaaggctggagtgtagtagtgctatcgcagctgactgcagcctcaaccttccaggctgaagcgatcctcccacctcaacctcccacgtggctgagactacaggtgcttgccactatgcccaactaatatttggaattttcgtatacgtggattccagaggggtgacagcgaaacgtgagtaagcatggattttggtatatgcagagatggggggctggaactaattctgtatactgagggaygacgactgtatatgtttttacaattacgctgtaggatacatactgttgcatagccttgaaaataataatttttaattgagtggaataagaataatattgataaaag

SEQ ID NO: 590409 - DNA, 485 bp, Homo sapiens
ttatcacgatttgctttattaatttatactttgcttatatggaattttgcccagcagacctcatcacagtttctaacctgttttattttttattttttatttttttttgttctgagacagggtctccctctgttgtccaaggctggagtgtagtagtgctatcgcagctgactgcagcctcaaccttccaggctgaagcgatcctcccacctcaacctcccacgtggctgagactacaggtgcttgccactatgcccaactaatatttggaattttcgtatacgtggattccagaggggtgacagcgaaacgtgagtaagcatggattttggtatatgcagagatggggggctggaactaattctgtatactgagggacgacgactgtrtatgtttttacaattacgctgtaggatacatactgttgcatagccttgaaaataataatttttaattgagtggaataagaataatattgataaaag

SEQ ID NO: 590410 - DNA, 554 bp, Homo sapiens
gggtccatttattcaatgaataattgccgctatgtgtcagacatttttctaggcctaggaatggatacataagtgaacaaagcaaagattctggttcttgtagagtttccattaaaagacaatttagtaaaactkttcttcccccaaattataaaatctgtaagatggtttaacaacatgtgtaaaagtcattgtgggccaggcacggtggctcataccaggtgtggtgactcatagcactctgtcacccaggctggagtgcagtggcacaatctctgctcactgcaacctctgcctcctgggtacaagcgattctcctgcctcagctttctgagtagcaaggactacaggtgcacaccatcacgcctggctaatttttgtactattagtacagacggagtttcaccatgttggccaggctggtctcgaactcctgacctcaaatgatccgcccacctcggcctcccaaagtgctggaattacagatgtgagccacaatgcccggccttattttctacaactttggtaactttagcatataccccaaatctgta

SEQ ID NO: 590411 - DNA, 659 bp, Homo sapiens
atgtactatcgctgggtccatttattcaatgaataattgccgctatgtgtcagacatttttctaggcctaggaatggatacataagtgaacaaagcaaagattctggttcttgtagagtttccattaaaagacaatttagtaaaactgttcttcccccaaattataaaatctgtaagatggtttaacaacatgtgtaaaagtcattgtgggccaggcacggtggctcataccaggtgtggtgactcatagcactctgtcacccaggctggagtgcagtggcacaatctctgctcactgcaacctctgcctcctgggtacaagcgattctcctgcctcagctttctgagtagcaaggactacaggtgcacaccatcacgcctggctaatttttgtactattagtacagacggagtttcaccatgttggccaggctggtctcgaactcctgacctcaaatgatccgyccacctcggcctcccaaagtgctggaattacagatgtgagccacaatgcccggccttattttctacaactttggtaactttagcatataccccaaatctgtaagacataatattataattcaaatgcaactcatggcttctctttgtactctttctctagcttttgaattatttattctaataccagttttaat

SEQ ID NO: 590412 - DNA, 561 bp, Homo sapiens
  misc_feature 561: n = A,T,C or G
tgggttcgcgtggcgctcccaggcttatcaggacaaggaaattcccgcctaataaatgttggtcagatgggttgtctgctctcaaaccctttctcctgataagatgttatcaatgacaatgcgcgcccgaaacttcattagcaattttaatttcgccccagtcctgtggtcctgtgatcttgccctgcctccatttgccttgtgatattttattaccttgtgaagcatgtgatctctgtgacccacacccyattcgtacactccctcaccttttgaaaatcactaataaaaacttgttggttttgcggcttggggggcatcacggaacctgccgacgtgtgatgtctcccctggacatccagctttaaaatttctctcttttgtactctttccctttatttctcagactggctgacactcagggaaaatagaaaagaacctacatgaaatatcaggggtgaatttcccccgatatcacactggctcttctctcacctgtctacctgcttaacttaataggagaggcaatgcatggtgctcatgaacaagcaagcattaaan

SEQ ID NO: 590413 - DNA, 177 bp, Homo sapiens
aatccacaccatcgcttccaatactratgtcataatatccacaccatgccctatcactgatctagtccacaccatcgcttccaatactaatgtaataatatccacaccatgccctatcactgatctagtccacaccatcgcttccaatactaatgtaataatatcaacaccatgccc

SEQ ID NO: 590414 - DNA, 177 bp, Homo sapiens
aatccacaccatcgcttccaatactaatgtmataatatccacaccatgccctatcactgatctagtccacaccatcgcttccaatactaatgtaataatatccacaccatgccctatcactgatctagtccacaccatcgcttccaatactaatgtaataatatcaacaccatgccc

SEQ ID NO: 590415 - DNA, 177 bp, Homo sapiens
aatccacaccatcgcttccaatactaatgtcataatatccasaccatgccctatcactgatctagtccacaccatcgcttccaatactaatgtaataatatccacaccatgccctatcactgatctagtccacaccatcgcttccaatactaatgtaataatatcaacaccatgccc

SEQ ID NO: 590416 - DNA, 177 bp, Homo sapiens
aatccacaccatcgcttccaatactaatgtcataatatccacaccatrccctatcactgatctagtccacaccatcgcttccaatactaatgtaataatatccacaccatgccctatcactgatctagtccacaccatcgcttccaatactaatgtaataatatcaacaccatgccc

SEQ ID NO: 590417 - DNA, 478 bp, Homo sapiens
gtgaccatggcccttgacacagccctcaggagaccctgagaacatgtgcccaaagtcgttggggtgcaggttggttctatacattttagggagataggagacatcaatcaagtgtatttaagatatatattggttcggtccagraaggtgggacaacccaatggattagggttggggggtggggcttccaggttataggtacatttaaaatttttctgattggcagtttgttgaaagacttactatcaatagaaaggagtgtctgggttatgataaggggttatggaggccaaggttttatcatggagatgaagcttccaggtagcaggcttcagagagaatagattgtaaatgtttcttatcagatttaaggttgtgttgatgttaaatgctgattggcttttcctgaattccaaaagggaggagggcataatgaggcatgtctgaccacctctttcccatcatagcctgaaccagt

SEQ ID NO: 590418 - DNA, 478 bp, Homo sapiens
gtgaccatggcccttgacacagccctcaggagaccctgagaacatgtgcccaaagtcgttggggtgcaggttggttctatacattttagggagataggagacatcaatcaagtgtatttaagatatatattggttcggtccagaaaggtgggacaacccaatggattagggttggggggtggggcttccaggttataggtacatttaaaatttttctgattggcagtttgttgaaagacttactatcaatagaaaggagtgtctgggttatgataaggggttatggagrccaaggttttatcatggagatgaagcttccaggtagcaggcttcagagagaatagattgtaaatgtttcttatcagatttaaggttgtgttgatgttaaatgctgattggcttttcctgaattccaaaagggaggagggcataatgaggcatgtctgaccacctctttcccatcatagcctgaaccagt

SEQ ID NO: 590419 - DNA, 478 bp, Homo sapiens
gtgaccatggcccttgacacagccctcaggagaccctgagaacatgtgcccaaagtcgttggggtgcaggttggttctatacattttagggagataggagacatcaatcaagtgtatttaagatatatattggttcggtccagaaaggtgggacaacccaatggattagggttggggggtggggcttccaggttataggtacatttaaaatttttctgattggcagtttgttgaaagacttactatcaatagaaaggagtgtctgggttatgataaggggttatggaggccaaggttttatcatggaratgaagcttccaggtagcaggcttcagagagaatagattgtaaatgtttcttatcagatttaaggttgtgttgatgttaaatgctgattggcttttcctgaattccaaaagggaggagggcataatgaggcatgtctgaccacctctttcccatcatagcctgaaccagt

SEQ ID NO: 590420 - DNA, 587 bp, Homo sapiens
ggaattcttctgtgtaagagatttctattcagtccatttgcatatctgtttaatcatttatttataccagtatgggtccacagatagttactttaatcttttggttgttatctaattgtacagtattttgttgctctttgttcatacctgtggccattggtagctctttccactggctccttttacataatttcatgttttttttttataatttatttctgttacttcaaaagtaccctggctcatatattttctgtcccagtcctagtttcagctatttcttctaatagccctgatttcttttgttagagaatggtatgaaaaacttacatctggccactaaatgtggtcatggcatcaggacacttagagctgacagtgcaaagaaatatatgtgtgtcttctaacttatatgtacccacttaattataaaggtttctatgtggaaccatctatgtatatgttaagctaaatgtgagtttatacttacgttgtatatatatattctgactcattatgacagagatcattctaggcttccctattttttatctgtaacttctcrctgtaatagtgaggaacctggc

SEQ ID NO: 590421 - DNA, 536 bp, Homo sapiens
agcacaaaactaggcagctgtttgggcagacaccgagctagctgcaggaggttttttttttttcatgccacagtggcaactgcgaatgccaacaagacagaaccattctctctcctggaaagggggctgaagccagggagccaagtggtctggctcggcgggtcccacccctacagagcccagcaagctaagatccactggcttgaaattcttgcacagcagtctgaggttgacctaggacactagagcttggtggggggaggggcttccacattgccaaggcttgagtaggcagttttacccccactgtgtaaacaaagccaccagaaagtttgaactgggtggagcccaccacaactcagcaaggccacagcagccagactgcctctctagatttctcctctctgggcaaggcatctctgaaaaaagggcagcagccccagtcagagacctatagataaaacccccatctccctggaacagagcacctaggggaaagggcgsctgtgggcacagcttcagcagacttaaagcat

SEQ ID NO: 590422 - DNA, 490 bp, Homo sapiens
ctgtaaaacatgaaattacggtagtataaggcatatttttactctttttataattttttctaaaaaaaattagtgtttgttccctatataacttttaactttataggtaaatatttgtttctttcagctccagttttatgtgaaatagagttttcagatttatgtagcatggaaagttttaatacgtcagagttactgatttttrccaatcattttctcaattatttcttttttatctttagttgatttttttgtagtgacacattttgtttctagtctcatttccttttgtttatattctatatatatttcatttttggttactatgagaattacatataacatcctagagttataacattttaatttgaatttatttcaacttaagttcaatcacataccaaaattctactgctatatatatagctctactctttttatgttattgatgtgacaaattatatctttattcattgtataccagctaaca

SEQ ID NO: 590423 - DNA, 411 bp, Homo sapiens
agaaagtgatcgcattctgcaggaacttatattgtataaaatatattgtatattgtataaaaagaatttctctttattctaagtgcaatgtgaagccaatgaagtgctttaaacaggtgatgtgatttgattgaatttattacttcacttaacaaatattcattacatgcccactgtttgtcagatattgctgtagcccctggtgatacagtagggaataaaacaggcaaaaatccctgtcctcttgcagcttataatggactgcaatgtttaatatgtcagaggaggtccacggaggagtgacttctaagcaagaatctgaaaaaaatraggatatctaaggagggaacaaatggttcaaaagccctataattgcaagcaggcatgatgaagcaattgcagttgtcctga

SEQ ID NO: 590424 - DNA, 466 bp, Homo sapiens
cagtgtagtggcacagtctcaactcactgcagccttgacctcctaggctcaggtgatccttccacctcagtagttgggactatatgcacatgccactatgcctggccaattatttttatttttttatttttactagagaggaggtcttgctttgtttctcaggctggtctggaactsctggcctcaagcaatccccccaccaccccctcccaaagtactggtattataagcatgagccaccatgcctggggtatctgtgtcttttccatttatttatagagttactttgtcttttactaattcaatgatctgtttaatcttttattaaattataaaaatgataaatacttttaaataagtgaaaaatgtccttcactctttagacccataatcttatctcaggaaataattgcagttgagaaaatgggccatatccttcaagatacgtacatggtgattgaacatc

SEQ ID NO: 590425 - DNA, 450 bp, Homo sapiens
ggatctgggggccacagggatggcatctcagggagggggtgaggaggtctgaggagaggtgacgggcccgccccaccctggtcccagggacacggaccagggatgtgaggtaccgcaccacctgcctgctggtgcagacgggagcagaacggtctccgtgtgcttccagcttctgctcacagggaacccggcaatcttctacccactccttcccaaaacagatgcacttatttaaacgtcacagggctcttgtctggtctctttcctgaacagcacttgggacaytgaggttggccccggccacaaaccccacccaggcccccgccagggaggagcaggcaggtggggcggggagggagccgcactggggggctccaccagccctgaccaccaacctgcccaaacaagcaccatgatgaggccacatcgaggaacggctggagcacgggc

SEQ ID NO: 590426 - DNA, 334 bp, Homo sapiens
tccctggagctgtctcagtcccctgttctcagttcctctgatgaccaggagaaaccctggatgcccaggcctggcctgctgcagacactcagagcagaggagtggccaatgcaggaaagccatggcctcctgccaccccaccctgtgcccacagccaccgcctcccacattggattctggcaggatactcggttgccccacagccactttcaatccgcactggatggggcagcgccaacacaggcaccaaagcggasgccggagctccacctgcatctgcctggaaacctcttgcctgaggaccctgatgggtccacaaggcgggggagaggca

SEQ ID NO: 590427 - DNA, 334 bp, Homo sapiens
tccctggagctgtctcagtcccctgttctcagttcctctgatgaccaggagaaaccctggatgcccaggcctggcctgctgcagacactcagagcagaggagtggccaatgcaggaaagccatggcctcctgccaccccaccctgtgcccacagccaccgcctcccacattggattctggcaggatactcggttgccccacagccactttcaatccgcactggatggggcagcgccaacacaggcaccaaagcggacsccggagctccacctgcatctgcctggaaacctcttgcctgaggaccctgatgggtccacaaggcgggggagaggca

SEQ ID NO: 590428 - DNA, 561 bp, Homo sapiens
gaatttcaagaaaggtatgagacacaatcactatcacttgtattagttttcatttgaatatcatactgtccataaattgttagccacagggtgcgaggaagtatgtgggggccagtttgtgcgcacatagctgccattcgtggttcagttctccatgctaagaaaaggagaacaaactagaactttctgtgctgattcggttaatactttctctgtagatgactcagaaccttcctgataatatttacttataattttctacaggagcttakaatctgtatctgttttatgaaaatatccattggtttcataattatcctgcaacctgataaattatcttaaattgatggcatacccagctgtgttttaactcctgaccccaaaactaaagctaaaatgttgccatttcaactttaaaactaataaatgccacaaaaaaaatcaatgtctatctcaagtaaaaaccaagagcaattaatggcaattaaagtgactgttatatgtttccataattcttttaaatacattacatgtagacattaagtacattaagaaaattgt

SEQ ID NO: 590429 - DNA, 419 bp, Homo sapiens
ttacaggtgcacacccccatgcccagctaatttttgtatttttagtagagacggagttgcaccatgttggccaggctggtctcgaactcctgacttcaagtgatctgcccatcttggcctccygaagtgctgggattacaggcctgagccaccgcgcctggccaattctctcaaaactgatctaaagagtcaatgcagtctgtagaaatttttgttaaaatgtactagattattacatactttataaggaaatataagttatcttaaatagccaacacctttgaaaaataacatagttggaagacttacattacctgacttcaaggtaaatgttaaagctagagttgtcaaaacagtgccgtattggcataaaaatagacagatcaatggaagagaacagagtccagaaataggcccac

SEQ ID NO: 590430 - DNA, 552 bp, Homo sapiens
ccgcctcaccgtcccaaactgctgggattataggcatgagcaccatgtctggacatcagcatctgtattttttgaagcacagaygagtttgggaactaccgcgctagactgagtttcgattcctagccctgtctgaccgtaggattcggctgggctgcttctgaaaacagagctccccaggctccttcccaggtaattctgattcattaggtctggggtgggccccggaatgtgcattttttatgagatccctctgggtgaatctggctaaagccagtttgggatctgagaccttggagatcattccccagcttccctcctaacccagttcccggcttggcccacctcacccaggctgtgtcacgtctgacttcgcagattacacctgagagggaagccccagccatcacaatgtgagaacattttacaatgaacaggatatgccaagtacattttaagactcattcaggattagcgttcaccttaaacttgacagactcagagaatgggctggccacgtgctgtgcacaacccttagtgcccttctgtgac

SEQ ID NO: 590431 - DNA, 552 bp, Homo sapiens
ccgcctcaccgtcccaaactgctgggattataggcatgagcaccatgtctggacatcagcatctgtattttttgaagcacagacgagtttgggaactaccgcsctagactgagtttcgattcctagccctgtctgaccgtaggattcggctgggctgcttctgaaaacagagctccccaggctccttcccaggtaattctgattcattaggtctggggtgggccccggaatgtgcattttttatgagatccctctgggtgaatctggctaaagccagtttgggatctgagaccttggagatcattccccagcttccctcctaacccagttcccggcttggcccacctcacccaggctgtgtcacgtctgacttcgcagattacacctgagagggaagccccagccatcacaatgtgagaacattttacaatgaacaggatatgccaagtacattttaagactcattcaggattagcgttcaccttaaacttgacagactcagagaatgggctggccacgtgctgtgcacaacccttagtgcccttctgtgac

SEQ ID NO: 590432 - DNA, 552 bp, Homo sapiens
ccgcctcaccgtcccaaactgctgggattataggcatgagcaccatgtctggacatcagcatctgtattttttgaagcacagacgagtttgggaactaccgcgctagactgagtttcgattcctagccctgtctgaccgtaggattcggctgggctgcttctgaaaacagagctccccaggctccttcccaggtaattctgattcattaggtctggggtgggccccggaatgtgcattttttatgagatccctctggrtgaatctggctaaagccagtttgggatctgagaccttggagatcattccccagcttccctcctaacccagttcccggcttggcccacctcacccaggctgtgtcacgtctgacttcgcagattacacctgagagggaagccccagccatcacaatgtgagaacattttacaatgaacaggatatgccaagtacattttaagactcattcaggattagcgttcaccttaaacttgacagactcagagaatgggctggccacgtgctgtgcacaacccttagtgcccttctgtgac

SEQ ID NO: 590433 - DNA, 552 bp, Homo sapiens
ccgcctcaccgtcccaaactgctgggattataggcatgagcaccatgtctggacatcagcatctgtattttttgaagcacagacgagtttgggaactaccgcgctagactgagtttcgattcctagccctgtctgaccgtaggattcggctgggctgcttctgaaaacagagctccccaggctccttcccaggtaattctgattcattaggtctggggtgggccccggaatgtgcattttttatgagatccctctgggtgaatctggctaaagccagtttgggatctgagaccttggagatcattccccagcttccctcctaacccagttcccggcttggcccacctcacccaggctgtgtcacgtctgacttygcagattacacctgagagggaagccccagccatcacaatgtgagaacattttacaatgaacaggatatgccaagtacattttaagactcattcaggattagcgttcaccttaaacttgacagactcagagaatgggctggccacgtgctgtgcacaacccttagtgcccttctgtgac

SEQ ID NO: 590434 - DNA, 505 bp, Homo sapiens
attcttgatggactgctccatagcctcagagacagtcggacttgtttcttcacccagagcggagcagacaggcaatttctgtatccaccaggacaaatattagaccaactcttcagtgtacagagagcatcacatttcttatatgctagaatatctgttggtccaaaatataaataaatagtattgtagccagccacagtggctcacacctataactccagagctttgtggggctgaggcaggaggttcacttgaggtcaagagttcgagaccagcccgggcaacatagagagacacccccacacmgccacctgccatctctacaaaaattaaaataattagctgggcatagtagtgtgggcctgtagtcccaactacttgggaagctgatgtgggtggatcgcttgagcccaggaatttgaggctgcagtgggctatgactgcatcactgtactccagctagaccttgtctcaaaaaaaaaaaaaaaagtgctgcaattgacat

SEQ ID NO: 590435 - DNA, 505 bp, Homo sapiens
attcttgatggactgctccatagcctcagagacagtcggacttgtttcttcacccagagcggagcagacaggcaatttctgtatccaccaggacaaatattagaccaactcttcagtgtacagagagcatcacatttcttatatgctagaatatctgttggtccaaaatataaataaatagtattgtagccagccacagtggctcacacctataactccagagctttgtggggctgaggcaggaggttcacttgaggtcaagagttcgagaccagcccgggcaacatagagagacacccccacacagccacctgccatctctacaaaaattaaaataattagctgggcatagtagtgtggrcctgtagtcccaactacttgggaagctgatgtgggtggatcgcttgagcccaggaatttgaggctgcagtgggctatgactgcatcactgtactccagctagaccttgtctcaaaaaaaaaaaaaaaagtgctgcaattgacat

SEQ ID NO: 590436 - DNA, 505 bp, Homo sapiens
attcttgatggactgctccatagcctcagagacagtcggacttgtttcttcacccagagcggagcagacaggcaatttctgtatccaccaggacaaatattagaccaactcttcagtgtacagagagcatcacatttcttatatgctagaatatctgttggtccaaaatataaataaatagtattgtagccagccacagtggctcacacctataactccagagctttgtggggctgaggcaggaggttcacttgaggtcaagagttcgagaccagcccgggcaacatagagagacacccccacacagccacctgccatctctacaaaaattaaaataattagctgggcatagtagtgtgggcctgtagtcccaactacttgggaagctgatgtgggtggatygcttgagcccaggaatttgaggctgcagtgggctatgactgcatcactgtactccagctagaccttgtctcaaaaaaaaaaaaaaaagtgctgcaattgacat

SEQ ID NO: 590437 - DNA, 481 bp, Homo sapiens
tcagaattccggcctgtccttggaatgctacaaggtacagcccatttgttgcaggaagtcagggaccccaaacggagggacaggctgaagccatggcagaagaacgtggattgtgaagattttatggacatttattagttccccaaattaatacttttgtaatttcttatgcctgmctttactgcaatctctaaacataaattgtaaagatttcatggacacttatcacttccccaatcgatatccttgtgatttcctatgcctgtctttgctttaatctcttaatcctgtcagccgagaaggatgtatatcgtctcaggaccctgtaataattgcgttaagtacacaaattgtacagcatgtgtgtttgagcaatatgaaatgtggacatcctgaaaaaagaacaggataaccgcagtcgttcagggaataagagagataaccttaaactctgaccgctggtgagcccggcagaacagag

SEQ ID NO: 590438 - DNA, 481 bp, Homo sapiens
tcagaattccggcctgtccttggaatgctacaaggtacagcccatttgttgcaggaagtcagggaccccaaacggagggacaggctgaagccatggcagaagaacgtggattgtgaagattttatggacatttattagttccccaaattaatacttttgtaatttcttatgcctgactttactgcaatctctaaacataaattgtaaagatttcatggacacttatcacttccccaatcratatccttgtgatttcctatgcctgtctttgctttaatctcttaatcctgtcagccgagaaggatgtatatcgtctcaggaccctgtaataattgcgttaagtacacaaattgtacagcatgtgtgtttgagcaatatgaaatgtggacatcctgaaaaaagaacaggataaccgcagtcgttcagggaataagagagataaccttaaactctgaccgctggtgagcccggcagaacagag

SEQ ID NO: 590439 - DNA, 485 bp, Homo sapiens
tttcaccatgttggccaggatggtctcgatctcctgacctcgtgatctgcccgcctcggcctcccaaagtgctgggattacaggcgtgagccaccatgcccagccattattggccatctttgaaacataactttcttacctgtgaatggtaagtaccttgaagaatttttgttgggattaaatgagataatgcatgtaaaggccttagcggagtgtctggcacacaagaaacgttcattaacgatttgctattaccacctttatcctcrtttatgaaactgattcgatcccagtcactgtcaccttaacaacagtaacaaagaacgtgggcgaaataaagttaaatttcactgctcagttgtgcctcagttttcagaaagtgattttattttagacacactgttccgccagaccctgattgacttcagtagggatagcaccacgtgtgaggggctggcaaagagatgcagagccagtgaacgaga

SEQ ID NO: 590440 - DNA, 623 bp, Homo sapiens
ttacttgtttcttcacattataaatgtaaaggcctcaataaatgcattttacctcaaagaagagaaattgaattgttgggataaaaaaaattcttcacaagaaacaactctatctagtgcactccagtctctagtcttttgaagtaccaggttttgttagcattcattgagagccttatacttgataatagcctcctgtctcatctgtttatacacatttgaaatttgaaaacatgtgctagggtcataaaggtaaagatcattctcattttcacttcatacaaattttaaattttgacaacaactagctgaaaggaaaacaacattatgaaaaacataattttagcatgtgtagcatagttattattattacacayggactcagacaaaattacatatttttaaaagccagtgtgttcaaacttagtgattctacaaaagaagccataaatatactttttaaaaaaacttaatgagacaaatccaatatctcctgcttctgagcatgacatctgtgttccgtttgtttttaaactggtataatgcttttcattcatgcattcatttagccagtaggtacctgaggacagtggcaaagactgggttcaaggagcaccattaag

SEQ ID NO: 590441 - DNA, 623 bp, Homo sapiens
ttacttgtttcttcacattataaatgtaaaggcctcaataaatgcattttacctcaaagaagagaaattgaattgttgggataaaaaaaattcttcacaagaaacaactctatctagtgcactccagtctctagtcttttgaagtaccaggttttgttagcattcattgagagccttatacttgataatagcctcctgtctcatctgtttatacacatttgaaatttgaaaacatgtgctagggtcataaaggtaaagatcattctcattttcacttcatacaaattttaaattttgacaacaactagctgaaaggaaaacaacattatgaaaaacataattttagcatgtgtagcatagttattattattacacatggactcagacaaaattacatatttttaaaagccagygtgttcaaacttagtgattctacaaaagaagccataaatatactttttaaaaaaacttaatgagacaaatccaatatctcctgcttctgagcatgacatctgtgttccgtttgtttttaaactggtataatgcttttcattcatgcattcatttagccagtaggtacctgaggacagtggcaaagactgggttcaaggagcaccattaag

SEQ ID NO: 590442 - DNA, 614 bp, Homo sapiens
aaatacttgattacaggttgttactttaggtatttattcacaatggggaatatgctcataaccacaaggaaggatgctccacaggtaacacttaaggcataaaacaggttagtaagggagatagcagggtaaagggaatcctgtggtgagcctggaattaggctcctaaagctgccttcttttaaagccataaagttaatcctatccagaaatactttttttttctatttttaattgtgataaaaaatccaacataacatttacagtcttaactatttttaggtatagcattcaatagtgttcattaygttcacattgttgtgcaatggatctccagaatgttttcatcttgcaaaactgaaactctatatccattaaacaacaacccccccatttcctggttctcccagtccctggtaaccatgatccattgtttgtctctatgaattttttttttaatagagacagggtctctctattgcccaggctgatcttgaacccctgggctcaagtgattctttcaccttggcctcccaaagtgctgggattacaggtgtgagccactccacccagcctgtctctatgagcttgactgctttagatatctcatacaa

SEQ ID NO: 590443 - DNA, 534 bp, Homo sapiens
taacaatcaaacttccaaatatcaaggataaagaaatgatcctagaagcagcaagataaaaacaaaaacaagaamaagtaacatataatggaattgctccactatgtctggctgtagacttttcagtggaaaccttacaggccaggagagagtggcatgttatatttaaagtgctgaaggaataaatcttttatcctaaaataatatgtctggcaaaaatatctttcaaacatgaaggagaggctgggtgcagtggctcacacctgtaatcccagcacattgggaggccaaggcaggtggatcaatttaggccaggagtttgagaacagcctgcccaacattgtgaaacactgtttctactaaaaatacaaaaattagctgagtgtggtggcacacacctgtaattccaactacttgggaggatgaggcatgagaatcacttgaacccatgaggcagagattgcattgagccaagagcatgccattgcataaaaaaagaaaacagtaacaagaaaaacaaaaccatgaaggaga

SEQ ID NO: 590444 - DNA, 343 bp, Homo sapiens
cctgaggtcaggaattcgagaccagcttgaccaacagtaaaatccttgtctttactaaaaatacaaaaattagccgggcatagtattgcatgcctgtagtcccaactactctggaggctgaggcaggagaatmgcttgaccccaggaggtggaggttgcagtgagccaacatcgtgccattgcactccagcctgagcggcaagagcaaaagtccatctcaaaaaaaaagctcaaattttaccacaaaagaaaatatcatcaaaattggcaaacttttagctacattgatgaagaaataaaaagagatgactcagtttactagtctcagaaataaagaagggaa

SEQ ID NO: 590445 - DNA, 455 bp, Homo sapiens
cccaggaggtggaggttgcagtgagccaacatcgtgccattgcactccagcctgagcggcaagagcaaaagtccatctcaaaaaaaaagctcaaattttaccacaaaagaaaatatcatcaaaattggcaaacttttagctacattgatgaagaaataaaaagagatgactcagtttactagtctcagaaataaagaagggaaataattactattgacatttaagaaaaataaaaaktagcataaagacattctcttaacaattttattattagaacaattgtataaattagataacaggtaaaatggataaattctttgaaagacacaaactacagaaactgagttggaaagaaacagacaatctgaatagatctataacatataaaggcattgaaacagtaatcaaaactacccacaaagaaaaggccaggccagatagttccaataatgaat

SEQ ID NO: 590446 - DNA, 455 bp, Homo sapiens
cccaggaggtggaggttgcagtgagccaacatcgtgccattgcactccagcctgagcggcaagagcaaaagtccatctcaaaaaaaaagctcaaattttaccacaaaagaaaatatcatcaaaattggcaaacttttagctacattgatgaagaaataaaaagagatgactcagtttactagtctcagaaataaagaagggaaataattactattgacatttaagaaaaataaaaagtagcataargacattctcttaacaattttattattagaacaattgtataaattagataacaggtaaaatggataaattctttgaaagacacaaactacagaaactgagttggaaagaaacagacaatctgaatagatctataacatataaaggcattgaaacagtaatcaaaactacccacaaagaaaaggccaggccagatagttccaataatgaat

SEQ ID NO: 590447 - DNA, 455 bp, Homo sapiens
cccaggaggtggaggttgcagtgagccaacatcgtgccattgcactccagcctgagcggcaagagcaaaagtccatctcaaaaaaaaagctcaaattttaccacaaaagaaaatatcatcaaaattggcaaacttttagctacattgatgaagaaataaaaagagatgactcagtttactagtctcagaaataaagaagggaaataattactattgacatttaagaaaaataaaaagtagcataaagayattctcttaacaattttattattagaacaattgtataaattagataacaggtaaaatggataaattctttgaaagacacaaactacagaaactgagttggaaagaaacagacaatctgaatagatctataacatataaaggcattgaaacagtaatcaaaactacccacaaagaaaaggccaggccagatagttccaataatgaat

SEQ ID NO: 590448 - DNA, 381 bp, Homo sapiens
tccaaaagtgcagagaggggctttctctgaagttcctttatctgactaaggaaagacctgccagaaagaatgcaattgtctttagcacctccaaataatatcaacaaacagaatattaacttacaggaaagaagtagaaagttgataatacttattctttggagcactgctacctgacacactttatctccataataaaataacctttgttcatcatgcattttctcccctatccttccatagcttgtgtcaccaactccccaccagaagtctttaaatttttagtaagtcacaatgctatttaagcttcaaccacctggtcrttatttagtcttatatattgtgagtctccagtgtgtatgcatttcataaatgtgtatg

SEQ ID NO: 590449 - DNA, 611 bp, Homo sapiens
ggaaaagcataaacacctctgagaaaacaggaaagaaggtgtcagcaaagggcctcagtaaccctctgtaattcaatggatgtagtgatrcacaaactcattattagttcaaaagataaaaaaaaaaaacctcacctagtgatatggtttggctctgtgtccccagccaaatctcatcttgaattgttatccctatgtgtcaaggaagggacctggtgggaggaattggatcataggggtgttttcaccccatgctgttctcatgatagtgaatgaattctcacaagatctgatggttttaaaagtgtggcacctcgaccaaacaccgcatgttctcactcataggtgggaattgaacaatgagaacacatggacacaggaaggggaacatcacacaccggggactgttgtggggtggggggaggggggagggatagcattaggagatatacctaatgctaaatgatgagttaatgggtgcagcacaccaacatggcacatgtatacatatgtaacaaacctgcacgttgtgcacatgtaccctaaaacttaaagtataataataatagaaaaaaaaacaaaacaacaaaacaagaaaaaaaaagtgtgac

SEQ ID NO: 590450 - DNA, 608 bp, Homo sapiens
tgcaccatgatttcattcttcttttcatcatttctgatttgccacctcaaccttggttccaaaacattttgaaatatatccttccatactttttttctcattgcatgcatacaagtgtattcccgtattttgattcattttctgcactgtttataaatatagaactatagtgtacacatccctctgcaactagctttttctgaacaggttttgttaacatgtctccaggtcattaacaaacaactctaacttattcactctgtagctgtgtaatatttcataaggtggctgttccacaaattactcattatgctgctcttggaggccctttgaagaattagtaattaatgcttagaaagtcttatgaggaggactggacaggtagaattagcccattttgtatgttggggcactgaacctcagagggtaaaccatttaaagtcacataagcagtactgctatatgatgtcttgactgctgtcgctcaagctgatgactttcaagtcttctactgcattttctctacatgaggctcctttattttcaaagaaaaaaaatgccctttatgtgkgctatttctttttctgatcatttcccatcctattttc

SEQ ID NO: 590451 - DNA, 526 bp, Homo sapiens
atctcgtggtcccatcatggctgcttaagatccagccattgtattcacattccagctatcagggaggaagaacagactaaggacatgaccgtcttccactgaggaaatgtcctagaagttgcacacttaaaccatggctaactacaagggagggtgaaggctggtctttattcctygcagctatgggcccacctagaaaaacagggcttctattatggagaaataatagaagacaatcagcaacctctagtccaccatgcaaggttcagttaatatacttgcataagactaaagataggctgtggcctctccttgaggtttgcagaaatatggcacagttgacatctcacaaaatatattaatagtcatagagctcatattttagaaagccagaaaagacatattagaaaggattttggagatcattcagttcaaatctctcatttggatattaatgtttcataacatatatcactttgcacagatatgtaatgctgtatttttaaaatacggcattatcgttcat

SEQ ID NO: 590452 - DNA, 570 bp, Homo sapiens
ttttatatttggctgggcataatggctcatgcctataatctcagcactttgggaagccgaggtgggaggatcgcttgagcccaggagttcaagaccagcctaagcaacatagtgggatcccgtttgtaccaaaggaaaaaaaaaatagctggatatggtggcacacgcctgtagttccaactactgtggaggcttacataggaggattgcttgagcctgggaggttgaggctacagtgagctgtgattgcaccagtgcactccagcctgggtgacagaaagcaagaccctgtctcaaaaaaaaaaaaaaaaaaaaaatcttggtatttaattttgatctctcactacggaacagaatagatttatgcattgggaggataggaaatataataattagagatatattaattgattttagatttttrtctgtaaaatactagtcataaatgcagttactagaatccatgtttatggtctttgaatttgatcaagacagagagttattcatcaaaaagccactagacccaccatttatcacaactaatcgtgaacttatatctctgtaactcac

SEQ ID NO: 590453 - DNA, 595 bp, Homo sapiens
gggcctgactggagacttaggccaccaaaactagacaggtttatatagtttcttttccctttgaaaggtcccttttggatttagtttcaaaataagatggccaaatttaacctccctgaagtttcatcataccttcaagtttttcatgtgtgtgaatggacagagtgcccacaatgtgatattttggccccacatggtgattaaaatcaggcttttcctttaaaactcttcaacagtttatggctgggcatcccttaaataaaaacagtctgttaaataagtgatggtataaatctgcttgtatttggaccttttgaacsaaataccagaatgactttttaaaaatagttgactaagttttatttcaataacactgtaatgttccatatcaaatgactggtcaaaaagtgacatattgggtattcttaccactctccctgagctttttcttcttcatttgctttctcttgctaaaactgtcatttggaattagttcttgtcttatgtttctgtaaataaaattgatagcatgttattagtgtctttgtttccagaattctgagagtttgcattttaaaaggagctatataaaatc

SEQ ID NO: 590454 - DNA, 594 bp, Homo sapiens
acctgagaagtagtttttcaacccttaccctcctttcaccttcccccctcaagtaggcatctctgtccattgttctcctctttgtgtccatacgtactcaatgtttacttcccacttataattgagaacatatggcatttgattttctgttgttgtctttgttaattcacttaggataatggattccagctgcctccatgttgctgcaaaggacattgttttccctttttggctgcagagtattccatggtatttatgtaccacattttctttatccaggccactgctgatgggcatcttggttgattytatctctttgctattgtgactaatactgtgatgaacatataagcacatgtgtcttttggtagaacaatttatattacttgggtatatacccagtaatgggatggctgggttgaatggtagttgttttaacttctttgagaaattgctatactacttttcacagtggatgaactaatataaattagttcaccaacagtgtgaacaaatttacattagtgtaagtttccaccaggagtgtataagtgtttcttttctccctgacatgtttcttttctcatcaacatg

SEQ ID NO: 590455 - DNA, 594 bp, Homo sapiens
acctgagaagtagtttttcaacccttaccctcctttcaccttcccccctcaagtaggcatctctgtccattgttctcctctttgtgtccatacgtactcaatgtttacttcccacttataattgagaacatatggcatttgattttctgttgttgtctttgttaattcacttaggataatggattccagctgcctccatgttgctgcaaaggacattgttttccctttttggctgcagagtattccatggtatttatgtaccacattttctttatccaggccactgctgatgggcatcttggttgattctatctctttgctattgtgactaatactgtgatgaacatataagcacatgtgtcttttggtagaacaatttatattacttgggtatatacccagtaatgggatggctgggttgaatggtagttgttttaacttctttgagaaattgctatactacttttcacagtggatgaactaatataaaytagttcaccaacagtgtgaacaaatttacattagtgtaagtttccaccaggagtgtataagtgtttcttttctccctgacatgtttcttttctcatcaacatg

SEQ ID NO: 590456 - DNA, 619 bp, Homo sapiens
ggcccagcaatcccattgctaggtgtatatccaaaaggaaacaaattattctaccaaagacacatacacttgcatattctttgcagcaccattcacactagcaaagacatggaattaacttaaatgcccatcactggtgaactggataaaggaaatgttgtatacatacatcatgcaatactatgcagccataaaagaggacaaaatgatattctttgcagcaacatggatgcagctagaggccattatcctaagcaaatgaatgcagaaacagaaatccaaataccacatgttctcaattataagtgggtgctagayattagatacacaagaacataaagatggcaacaatagaaattgaggactgctagatgggagaggaagtgaggagggcaagagttgaaaaactaactgttggatactatgatcaatacctgggatcactcataccctaaacctcagcatcatgcaatatacccaggtaataaacctgcacatgtacccctgaagctaaaataaaagttgaagaaaaagaattggagccatgaagaccattaacaactttcacaagagaagttgtaggaatgtggtaagggcagaaatgcatgtattgagttta

SEQ ID NO: 590457 - DNA, 559 bp, Homo sapiens
aatatacaatcaataattattatataatgtaactcaacaaattaaatttatatgggaggtcatgaagttttcttaaagtgaattgtgtctgtcgtttattaaaagtatactctgattaasccctttgatgaattttattaagttacttcagtttacttgaatgacattaaagaatttgaagtcatgcatgttgattacttaaccttgttcatttacaacatattttgatgtgcatcagtactaaactaatctgaaattgtaaaaatgactataaaaatcacattagcagagtaactcattaaattttagaactccactcatttcttcttaatggtgataataatctctgtacttaatcagttttataatttctattttattatccaaaatgtacatgctcatcaaaaaatacaaacaacttgaaggaaaagggtaaaacacttctgaaggctatttttccatgatataattcaaaattttgagctataaattaactcactgctctcactttctaatatttatgaaggagaagtaaaagtaatcagtattcattattata

SEQ ID NO: 590458 - DNA, 506 bp, Homo sapiens
aatgaaacatgaaaaaccttgcctggggaaaatgtggaagaaacttggcctgttttgcctctcgattgcattgcctcttgaytgattgcattgcctcttcttggttgcacttttgacaagggaaaagaaacagaaatttttgcagtttaaaaaccaagcaatgtgtacacaggagaggcatgcacagaataatctagcgcagaactatttccctcacattagggtgagcaccacctagagtgtgttaaaggcccctataagccctataagtgaacatgccatttttgatgagtagtgctcattgtatgctgggaaaagttgtcatatctgggaaatgcaaaatgggtgagcattagaaaaaaaaacagaatattggcaagaaattttaattacttgaaacttagtgtttagttgggaaatacctcattatcatatgatctgtcatccatcattgccttccaatctccctttatcattagaaaattgaaatggtttagatgttagaa

SEQ ID NO: 590459 - DNA, 579 bp, Homo sapiens
aatgtaggttctttctattttccttaagtgtcagctggctgagaaataaagagagacagtacaaagagaggaattttacagctgggycgccgtgggtgacatcacatattggtaggacaatgatgcccccctgagcctcaaaccagcaagtttttattaagggttttaaaaaggggagggggtgcaagaatagggagtaggtacaaagatcacatgcttcaaagggcaaaaagcagaactactaataagggtctaacaaagatcacatgcttctgagggaacaggacaaagggcaaaagcagaactactgataagggtccaacaaagatcacagggcaaagggcaaaagcagaactactaataagggtctatgttcagcggtgcacgtattgtcttgataaacatcttaaacaacagaaatcagggtacaagagcagagaactggtctgaccacagatttaccagggcagagttttccccatcctagtaagcctgagggtactgcaggagaccagggagtatcttagtccttatctctactgcataagacagacattcccagagcggccatttatagac

SEQ ID NO: 590460 - DNA, 579 bp, Homo sapiens
aatgtaggttctttctattttccttaagtgtcagctggctgagaaataaagagagacagtacaaagagaggaattttacagctgggtcgccgtgggtgacatcacatattggtaggacaatgatgcccccctgagcctcaaaccagcaagtttttattaagggttttaaaaaggggagggggtgcaagaatagggagtaggtacaaagatcacatgcttcaaagggcaaaaagcagaactactaataagggtctaacaaagatcacatgcttctgagggaacaggacaaagggcaaaagcagaactactgataagggtccaacaaagatcacagggcaaagggcaaaagcagaactactaataagggtctatgttcagcggtgcacgtattgtcttgataaacatcttaaacaacagaaatcagggtwcaagagcagagaactggtctgaccacagatttaccagggcagagttttccccatcctagtaagcctgagggtactgcaggagaccagggagtatcttagtccttatctctactgcataagacagacattcccagagcggccatttatagac

SEQ ID NO: 590461 - DNA, 590 bp, Homo sapiens
aaagttgtttgtggtaaatgttgctgcaagggcatgcctgtttctttgcacatctgaataggaakggcgtagtctgagcacttagaggcttatctttataacaggaagcatatagagacattgcatggcctggtcctatggcatttctctctttttgaggacctgagattcagtgtagaagtcctcgattttaaaagtctgggtgttctgcttttcaactgtgtaaattgttagggtttacaaattacaagtaattttttggccctgttccttgatgggctccaccctgggctcagtagtcaagttgaagaaacagactgcagtaaaagttacctatcttaaatgaagttgatctccttgtgaaatcctatggtgaattcctataattttgcattgttttggcatccttttttgatctttctctaccacacacacacacaaattccttcttaaaggagcgtggactttctctctctcccctgacccctttgagatgtggattgctaccctgtttcctctggggttaggtgagggcttgagttgtcagggacaagtgggcattgacttattcaatttgcagggacataagc

SEQ ID NO: 590462 - DNA, 537 bp, Homo sapiens
ctttctatcttttgatatgcgcatttagtgctataaatttcccttttaacattaccttagctgtgtcccagagattccaccatgctatatctttgttttcattagtttcaaagaacttcttgatttctgccttaatttcattgtttatctaaaagccattcaggagcaggttgtttaatttccatgtagttgcatgcttctgagcaattttcttagtcttgaattctatttttattgctctacaatttaagagagtggttggtataatttcagttattttacatttgttgaggattgttttatgtccaattgattttagagtatgtgccatgaggtaatgagaagaatgtatattcaattgtgtttttgtggagagttctgtagatgtytatcaggctcatttggtccaatgttgggtacagttcctaaatatgtttgctaattttctccctcagtgatctgtctaatattgtttgtggggtactgaagtttcccactattattgtgtgggagttgaagtctctttgaaggtctcta

SEQ ID NO: 590463 - DNA, 491 bp, Homo sapiens
aaaactttgatatttgacaaactttccaaaattgaaattttcaaattctaactcagcctttttgacctcaaactaactttttggatattagagcccctggaaatcacagacacattaggcttatttgatatgttaaaatcacatggaaatgattgtcaaatatgaaatggtgtttaattttctttgggttatagttttagacatgcattattaatatatgttccaaaatttatgagatttctaaaattctgatgtcttaatatgktctagtaattattatgtcaaattgttgtataccacagaaatagccaaattttcttgtcagttgagtctttaaccatggctattctaagacctttgtcattcacatataattattgttttactttgattcttctcacaaagtggcttttaattattttagttcaaaatttgcttccttaagaatattcatggaaaggcctctgacaagtactcttgaatacaagttt

SEQ ID NO: 590464 - DNA, 498 bp, Homo sapiens
tgttttcatcccttggtggcagatattcctcctggctgcatctagttggccatcttgaagcaggcaaccttgagcaaatgttttaaaactttgatatttgacaaactttccaaaattgaaattttcaaattctaactcagcctttttgacctcaaactaactttttggatattagagcccctggaaatcacagacacattaggcttatttgatatgttaaaatcacatggaaatgattgtcaaatatgaaatggtgtttaattttctttgggttatagttttagacatgcattattaatatatgttccaaaatttatgagatttctaaaattctgatgtcttaatatgttctagtaattattatgtcaaattgttgtataccacagaaatagccaaattttcttgtcagttgagtctttaaccatggctattctaagacytttgtcattcacatataattattgttttactttgattcttctcacaaagtggctttta

SEQ ID NO: 590465 - DNA, 491 bp, Homo sapiens
aaaactttgatatttgacaaactttccaaaattgaaattttcaaattctaactcagcctttttgacctcaaactaactttttggatattagagcccctggaaatcacagacacattaggcttatttgatatgttaaaatcacatggaaatgattgtcaaatatgaaatggtgtttaattttctttgggttatagttttagacatgcattattaatatatgttccaaaatttatgagatttctaaaattctgatgtcttaatatgttctagtaattattatgtcaaattgttgtataccacagaaatagccaaattttcttgtcagttgagtctttaaccatggctattctaagacctttgtcattcacatatmattattgttttactttgattcttctcacaaagtggcttttaattattttagttcaaaatttgcttccttaagaatattcatggaaaggcctctgacaagtactcttgaatacaagttt

SEQ ID NO: 590466 - DNA, 426 bp, Homo sapiens
tgtttgttagttttccttctaacagtgaggctcctctgctgcaggtctgcaggagtttgttggaggtccactccagaccctgtttgcctgagtattaccactgrgggttgcagaacagcaaagattgctgcctgctccttcctctggaagcttcatcccagaggggcacccaacagatgccagccagagccctcctgtatgaggtgtctgtcaacccctgatgagagatgtctccccatcaggaggcacggggttcagggacccacttgagaaggtagtctgtcccttagcagagctcgagcactgtgctgggagatctgctgctctctttagagctggcaggcaggaatatttaagtctgctgaagctgtacacacagccacccctccccgcaagtgctctgtcccagggagatgggagatttat

SEQ ID NO: 590467 - DNA, 426 bp, Homo sapiens
tgtttgttagttttccttctaacagtgaggctcctctgctgcaggtctgcaggagtttgttggaggtccactccagaccctgtttgcctgagtattaccactgagggttgcagaacagcaaagattgctgcctgctccttcctctggaagcttcatcccagaggggcacccaacagatgccagccagagccctcctgtatgaggtgtctgtcaacccctgatgagagatgtctccccatcaggaggcacggggttcagggacccacttgagaaggtagtctgtcccttagcagagctcgagcactgtgctgggagatctgctgctctctttagagctggcaggcaggaatatttaagtctgctgaagctgyacacacagccacccctccccgcaagtgctctgtcccagggagatgggagatttat

SEQ ID NO: 590468 - DNA, 405 bp, Homo sapiens
aattgccattgccccatatccctcaagattgaggaatgcacaacagaaagggagttgatatagtttgaatatgtgttgctgccaaatttcatgttgaattgtgatccccagtgttggaggtggggtcttgggggaggtgtttgggtcataagggcagactctcatgtcatagtgcattcwtttgagatccagttgtttaaatgtgtggaaccttccctacccattctctctctcttgttcctgctctgccatgtgatgtgtctgttcctgcttctatacacagagacttttgctccaattctctatgtttttaaatttaagaatgaagaagagctctttgtgtgaaataatgaagtaaaacagggtatttcaagtagcatctttaccaaagatttgggcagaatc

SEQ ID NO: 590469 - DNA, 594 bp, Homo sapiens
tatgcttgagcagccttcaaaactgtgccagttaaacctcttttctttataaattatccagtctcaggtatttctttatagcaatgcaagaatgacataatacagggggcttataaccgtgggaccagctcaaaccaattaaccactgcttaagttgttacagatgttgcagaggcaaaattgcaagtcattgaccccagccatgaacaatgytaacctcctgatttttaacacaaccaatctggcagaccagctgcagtggcatcacctaggcctagttagaaatgccataaaagcttggcccaactccaaattgaagagacacatttcagcatttcctcctgtctccttgccagtaaactcaaaatgaaacttttattctcaaaagccagtgccatagtgttggcttctatgcacattgattggcaagcccattgctcaataacagtttatatattctcatgatatttgttagcatcctttaatttcaacctaaaatactcccttttgcatgcatggtaaggcagatgatgatgaattccttcagcttttatttgtctgggaaaaccttttatctctcctccattggtaaag

SEQ ID NO: 590470 - DNA, 594 bp, Homo sapiens
tatgcttgagcagccttcaaaactgtgccagttaaacctcttttctttataaattatccagtctcaggtatttctttatagcaatgcaagaatgacataatacagggggcttataaccgtgggaccagctcaaaccaattaaccactgcttaagttgttacagatgttgcagaggcaaaattgcaagtcattgaccccagccatgaacaatgttaacctcctgatttttaacacaaccaatctggcagaccagctgcagtggcatcacctaggcctagktagaaatgccataaaagcttggcccaactccaaattgaagagacacatttcagcatttcctcctgtctccttgccagtaaactcaaaatgaaacttttattctcaaaagccagtgccatagtgttggcttctatgcacattgattggcaagcccattgctcaataacagtttatatattctcatgatatttgttagcatcctttaatttcaacctaaaatactcccttttgcatgcatggtaaggcagatgatgatgaattccttcagcttttatttgtctgggaaaaccttttatctctcctccattggtaaag

SEQ ID NO: 590471 - DNA, 594 bp, Homo sapiens
tatgcttgagcagccttcaaaactgtgccagttaaacctcttttctttataaattatccagtctcaggtatttctttatagcaatgcaagaatgacataatacagggggcttataaccgtgggaccagctcaaaccaattaaccactgcttaagttgttacagatgttgcagaggcaaaattgcaagtcattgaccccagccatgaacaatgttaacctcctgatttttaacacaaccaatctggcagaccagctgcagtggcatcacctaggcctagttagaaatgccataaaagcttggcccaactccaaattgaagagacacatttsagcatttcctcctgtctccttgccagtaaactcaaaatgaaacttttattctcaaaagccagtgccatagtgttggcttctatgcacattgattggcaagcccattgctcaataacagtttatatattctcatgatatttgttagcatcctttaatttcaacctaaaatactcccttttgcatgcatggtaaggcagatgatgatgaattccttcagcttttatttgtctgggaaaaccttttatctctcctccattggtaaag

SEQ ID NO: 590472 - DNA, 582 bp, Homo sapiens
atgagttcttgctctgagttcatgtgagaactggttgtttaaaagtgcgtggccyctacctcccgctcttactcccattcttatcatgtgacctgcctattcccacttcaccttcctccataattgtaaggttcctgagaccctcaccagaagcagatgctgtagccatgttggtacagcctacaggttgatgaggcaattataactcttttctttacaaattactgagccacaggtatttctttatagcagtgcaagaatggcctaacacagcttggtattggagtccttgaacatgctaccctggtccctcagcaagtaggtgggcaggcctggtgcttggatctacaatgaccagcttggagcctggatccactagggtggcactggagcttaggtccctgtgggcaggcctgtcactaagaagggcctcacatctggaaccatggagatgggcctggttctgagtctgtgggcccagagtctacaggggccatcctggtgctatggtgagactagaaattgggtctttgggtttatgcctgaatctcaggtctatagtggctagcttggcaccagagt

SEQ ID NO: 590473 - DNA, 582 bp, Homo sapiens
atgagttcttgctctgagttcatgtgagaactggttgtttaaaagtgcgtggcctctacctcccrctcttactcccattcttatcatgtgacctgcctattcccacttcaccttcctccataattgtaaggttcctgagaccctcaccagaagcagatgctgtagccatgttggtacagcctacaggttgatgaggcaattataactcttttctttacaaattactgagccacaggtatttctttatagcagtgcaagaatggcctaacacagcttggtattggagtccttgaacatgctaccctggtccctcagcaagtaggtgggcaggcctggtgcttggatctacaatgaccagcttggagcctggatccactagggtggcactggagcttaggtccctgtgggcaggcctgtcactaagaagggcctcacatctggaaccatggagatgggcctggttctgagtctgtgggcccagagtctacaggggccatcctggtgctatggtgagactagaaattgggtctttgggtttatgcctgaatctcaggtctatagtggctagcttggcaccagagt

SEQ ID NO: 590474 - DNA, 582 bp, Homo sapiens
atgagttcttgctctgagttcatgtgagaactggttgtttaaaagtgcgtggcctctacctcccgctcttactcccattcttatcatgtgacctgcctattcccacttcaccttcctccataattgtaaggttcctgagaccctcaccagaagcagatgctgtagccatgttggtacagcctacaggttgatgaggcaattataactcttttctttacaaattactgagccacaggtatttctttatagcagtgcaagaatggcctaacacagcttggyattggagtccttgaacatgctaccctggtccctcagcaagtaggtgggcaggcctggtgcttggatctacaatgaccagcttggagcctggatccactagggtggcactggagcttaggtccctgtgggcaggcctgtcactaagaagggcctcacatctggaaccatggagatgggcctggttctgagtctgtgggcccagagtctacaggggccatcctggtgctatggtgagactagaaattgggtctttgggtttatgcctgaatctcaggtctatagtggctagcttggcaccagagt

SEQ ID NO: 590475 - DNA, 662 bp, Homo sapiens
cacactcatggaccacagcacaataggaatagatgtcaagaccaagaaaattgcttaaatccatgcagttaaacaacatgctcttggatgacttttgggtaaataatgaaattaargcagaaatcaacaagttttttgaaaataatgggaacaaagatacaaaataccagaatctctggggcacagctaaggcaatgttaagggggaaatttatagcactaaatgcccacattaaaaagttagatctcagctgggcactgtgcctcatgcctgtaatttcagcactttgggaggccaagatgggcagattacaaggtcaggagatcaagaccatcctggctaacacggtgaaacactgtctctactaaaaatacaaaaattagccaggcatggtggcacacacctgtagtcccagctgctcagaaagtttaggcaggagaatcactagaacccaggagccggaggttgcagtgagccaatatcatgctgctgcactccagcctaggtgacggagtgagactctgtctcaaaaaaaaaaaagttagatctcaaattaaaaacctaacatcacaactgaaagaactagagaagcaagaagaaatcaaccccaaagctagcagaatacaataaataaccaaaatcagagctgaagtgaaagaaat

SEQ ID NO: 590476 - DNA, 662 bp, Homo sapiens
cacactcatggaccacagcacaataggaatagatgtcaagaccaagaaaattgcttaaatccatgcagttaaacaacatgctcttggatgacttttgggtaaataatgaaattaaggcagaaatcaacaagttttttgaaaataatgggaacaaagatacaaaataccagaatctctggggcacagctaargcaatgttaagggggaaatttatagcactaaatgcccacattaaaaagttagatctcagctgggcactgtgcctcatgcctgtaatttcagcactttgggaggccaagatgggcagattacaaggtcaggagatcaagaccatcctggctaacacggtgaaacactgtctctactaaaaatacaaaaattagccaggcatggtggcacacacctgtagtcccagctgctcagaaagtttaggcaggagaatcactagaacccaggagccggaggttgcagtgagccaatatcatgctgctgcactccagcctaggtgacggagtgagactctgtctcaaaaaaaaaaaagttagatctcaaattaaaaacctaacatcacaactgaaagaactagagaagcaagaagaaatcaaccccaaagctagcagaatacaataaataaccaaaatcagagctgaagtgaaagaaat

SEQ ID NO: 590477 - DNA, 518 bp, Homo sapiens
caactaggtattaaaggaacacacatcaaaataataagagccgtctatgacaaacccacagttaacattgctgaattggcaaaagttggaaacattcctcttaaaaacaagcacaagacaagaacgccctctcttgccacttctattcaacataggatgaagtcctggccagagcaataagacaagagaaagaaataaagaacatttaaataggaagagaggaagtcaaactatgtctgtttgcagacaacatgattctatgtctagaaaaccccatagtcttgggccaaaatctctttgagctgataaacaacttcagcaaagctgcagcatacaaaaatcaatgtacaaaagtcactagcattcctatacaccaacaagatccaaacagagagtcaagtcagaaaggtaatcccattcacaattgccactaaaagaataaaatacytaggaatacagctaaccagggagataaaagatctctacaacgagaattacaaaacactgctcaaatatat

SEQ ID NO: 590478 - DNA, 511 bp, Homo sapiens
acagaggcctacacacatccttaaaatcttaccatcaggtgaggctgcactgcacgattttcccattcgacagctcactactcaaccctccactctgtatgtcaagactggctgggagggataatgcctttgtgaggtctccttggggagagggtgggagagatggctgtactgtctctgttgcctggagattcaaccctgacctgctcatgtgcatgcactttctcaagcccgtttctctagcccgtttctctctccctcatactcatatcacctcccatgtccatgcttcaggtgttagtaaatagtttcatgtgtgctaaaccacaggttttacagagtcttaattaataaaaccctaaatcctaagagtttgaaatgtaagcactggagtagattcctggaggagatacttctgagggtgaagagggcagattaaaacatttgctctcaaaaaccacatggaagtttttatgtggtcccartcttgcagatgacctactgtgagacc

SEQ ID NO: 590479 - DNA, 499 bp, Homo sapiens
catggttgaaattgtcaagctttatggctaaagtcatcaagctttctaagttcccttttcaaacactagtcttctcttgctgccattacccactttcatctttcatctttggatatcttatttagagttcccttcatggtgaaaaaatttctgaaacaggtacccatttgtctgttttctgctttgcatatcaactgatagcaaatttcttcagatctgtataactgccaagcagcttttttctkaagcttttagtgagctcattcactattttctatataatgtataataatatataattattttacaaactcccttcatattctttgctacactccactgaacactccaaattgccaatatttcctatagtctagtccctggaattgatctatgtttctgataaacttacagagagttgggaatattatttcctgttggatccagggcttctgttaagaaagcgtgagttaaaggggcttttttggtgaaaggtttt

SEQ ID NO: 590480 - DNA, 499 bp, Homo sapiens
catggttgaaattgtcaagctttatggctaaagtcatcaagctttctaagttcccttttcaaacactagtcttctcttgctgccattacccactttcatctttcatctttggatatcttatttagagttcccttcatggtgaaaaaatttctgaaacaggtacccatttgtctgttttctgctttgcatatcaactgatagcaaatttcttcagatctgtataactgccaagcagcttttttctgaagmttttagtgagctcattcactattttctatataatgtataataatatataattattttacaaactcccttcatattctttgctacactccactgaacactccaaattgccaatatttcctatagtctagtccctggaattgatctatgtttctgataaacttacagagagttgggaatattatttcctgttggatccagggcttctgttaagaaagcgtgagttaaaggggcttttttggtgaaaggtttt

SEQ ID NO: 590481 - DNA, 499 bp, Homo sapiens
catggttgaaattgtcaagctttatggctaaagtcatcaagctttctaagttcccttttcaaacactagtcttctcttgctgccattacccactttcatctttcatctttggatatcttatttagagttcccttcatggtgaaaaaatttctgaaacaggtacccatttgtctgttttctgctttgcatatcaactgatagcaaatttcttcagatctgtataactgccaagcagcttttttctgaagcttttagtgagctcattcactattttctrtataatgtataataatatataattattttacaaactcccttcatattctttgctacactccactgaacactccaaattgccaatatttcctatagtctagtccctggaattgatctatgtttctgataaacttacagagagttgggaatattatttcctgttggatccagggcttctgttaagaaagcgtgagttaaaggggcttttttggtgaaaggtttt

SEQ ID NO: 590482 - DNA, 445 bp, Homo sapiens
atcccagctactcaggaggctgaggcaggagcatcacttgaacttgggaggcagaagttgcagtgagccgagattgcaccactgcactccagccttggcaatagacaagactcagtcataaataaataaatggcacctagaggtgttgccaagttattttggctatataaaaacattggggagcattgtaacaaggagattcttgwgctggttgctggagctcactcccaccctgtaaactgtcttcaacaaatctgtgctttcattacttccttgctttgtctttcattgcttcattcttttgttactttgtgcattttgttcaattctttgttcaacacttcaagaacctggacaactctatcagtaacaataggattgaacaaagtagtatgtatattgcaaataatgttgcacaaacaagttacaaataagaatagaactt

SEQ ID NO: 590483 - DNA, 445 bp, Homo sapiens
atcccagctactcaggaggctgaggcaggagcatcacttgaacttgggaggcagaagttgcagtgagccgagattgcaccactgcactccagccttggcaatagacaagactcagtcataaataaataaatggcacctagaggtgttgccaagttattttggctatataaaaacattggggagcattgtaacaaggagattcttgtgctggttgctggagctcactcccaccctgtaaactgtcttcaacaaatctgtgctttcattacttccttgctttgtctttcattgcttcattcttttgttactttgtgcattttgttcaattctttgttcaacacttcaagaacstggacaactctatcagtaacaataggattgaacaaagtagtatgtatattgcaaataatgttgcacaaacaagttacaaataagaatagaactt

SEQ ID NO: 590484 - DNA, 627 bp, Homo sapiens
gtgatgatattcctgcctaactattagggtctctgtttctgcttcagaagatagtacaggtgtctctactactgaaaagggcagtacaggccaattctcatcctccctctcctgccctccacccccggtgggttcaacrtgcagggcaaaagactcctttaaaccttgagacacaaaacacgaaccgcccatccagtctgagacatgacagaatctcagcactctgttgaacactttgagctgttcctactcccactagggatgtagaagatagttttagggaccgagataggggccaattgtttttagatattactgacacactgacacatcagctcctatatccataagcccataaaacttctttcctttgatttgcactgtataggtgggtctattagatgccacgggttgtgataggtaagtctctctcccagttgcacttccaaatccctgacctcctcacttcttcttatgtagagaggggtacaatttatagggaataagcaacagttgagcaatatattctcctggttcaaaaacccaaagatcttgtgacgttaccactgcttgaatttctccttcacaatcccaattaccaactcctgggcctgtaagttaagacag

SEQ ID NO: 590485 - DNA, 658 bp, Homo sapiens
tggtgtctctaaattgcctgcaagttctgaagacctgtcctggggacactaatatcctgttaaaggtaaatgacagttttcagacaacagcatcacaacagacaccagatagaaagtgcctgttaagcaaaggcctgtcctgtgcaatatgagctggagtgacattctgcttgaactctcagcttcccctcccacagcctctacactcacatgcaggctgccccccatgacccccactcacacacagctccctgctctccttcccagccagcctcacctgcttttgcagaatggatgagctcacaagtctctccagggaagtgtgaactaccatttttacttccagcgaaacctctgaccccgctcaacttctgaccatggaagctccaaaggagtggagccaatgaagaaatatttcacatttaaacagaaaaagaatgtagtatttcacaatttggtaggtgcttcagttttgcctgagggaagtgtttttctccatgcacctgctggactcccragaaacccagtcacagccattgctttggatggtagtgtgactctgaagacctagtgaaatagcccaaattttgctcaatgttgtattctctatggtcagccactgagatccacttccttcccctccatttcaggactgaag

SEQ ID NO: 590486 - DNA, 410 bp, Homo sapiens
acagtggtaatatgtatgaaggctatagyagactgtattacaagagccagttccaaagtcaagtttacaatcacacagctagtagagaattgctgctttgacaagagttttcctagaaggcccaactcattataaacaggatcactcttcagtatttacattatagcattttatttgtttgccatatagaaacatgtttgttattgacagtaggaaactatggttttgttgacatctgcactacctattaccaactcaccagtagcttttagattgtattttagttctcactgctaatgttactttgcctcaaaccaggaaacaggcaccatcttggaagcaaggagtaagcctttaccaggcacagaatctgctgatgccttgagcttggatttcctagcctacagaat

SEQ ID NO: 590487 - DNA, 410 bp, Homo sapiens
acagtggtaatatgtatgaaggctatagcagactgtattacaagagccagttccaaagtcaagtttacaatcacacagctagtagagaattgctgctttgacaagagttttcctagaaggcccaactcattataaayaggatcactcttcagtatttacattatagcattttatttgtttgccatatagaaacatgtttgttattgacagtaggaaactatggttttgttgacatctgcactacctattaccaactcaccagtagcttttagattgtattttagttctcactgctaatgttactttgcctcaaaccaggaaacaggcaccatcttggaagcaaggagtaagcctttaccaggcacagaatctgctgatgccttgagcttggatttcctagcctacagaat

SEQ ID NO: 590488 - DNA, 410 bp, Homo sapiens
acagtggtaatatgtatgaaggctatagcagactgtattacaagagccagttccaaagtcaagtttacaatcacacagctagtagagaattgctgctttgacaagagttttcctagaaggcccaactcattataaacrggatcactcttcagtatttacattatagcattttatttgtttgccatatagaaacatgtttgttattgacagtaggaaactatggttttgttgacatctgcactacctattaccaactcaccagtagcttttagattgtattttagttctcactgctaatgttactttgcctcaaaccaggaaacaggcaccatcttggaagcaaggagtaagcctttaccaggcacagaatctgctgatgccttgagcttggatttcctagcctacagaat

SEQ ID NO: 590489 - DNA, 410 bp, Homo sapiens
acagtggtaatatgtatgaaggctatagcagactgtattacaagagccagttccaaagtcaagtttacaatcacacagctagtagagaattgctgctttgacaagagttttcctagaaggcccaactcattataaacaggatcactcttcagtatttacattatagcattttatttgtttgccatatagaaacatgtttgttattgacagtagraaactatggttttgttgacatctgcactacctattaccaactcaccagtagcttttagattgtattttagttctcactgctaatgttactttgcctcaaaccaggaaacaggcaccatcttggaagcaaggagtaagcctttaccaggcacagaatctgctgatgccttgagcttggatttcctagcctacagaat

SEQ ID NO: 590490 - DNA, 560 bp, Homo sapiens
tgttatagattctacaatacaataatatacacattgttttttaaagttgcctttcaaatcagttaataaaaggggaataaatgtgaaaaaaagaaagaagaaaaagaagagaaagaaagaaagaaggaaggaaggaaggaaaattttcttatcttgaagtgtgattgtattcacagcaactccttctttttcaaccttaatgtctktttcaaccttaatgtctcattttgaaatatattttcactgaatatattattctacaaatagtatcttacaatagattctgtgcctggtaaaggcttactccttgcttccaagatggtgcctgtttcctggtttgaggcaaagtaacattagtagtgagaactaaaatacaatctaaaagctactggtgagttggtaataggtagtgcagatgttgacaaaaccatagttttctactgtcaataacaaacatgtttctatattgcaacaaataaaatgctataatgtaaatactgaagagtgatcccatttataatgagttgggccctctaggaaaactcttgtcaaagcagcaa

SEQ ID NO: 590491 - DNA, 512 bp, Homo sapiens
aaaataccgtctttttaccagaaggatatgactttctaataaagatggagtagagaccagagctgggaccagagctcaaagtaagtgtcttaatcctcctactggaacagaagggagttattccccatcctgggccacctgacaaccacagagtgacagccccaggagagaaaaccaacagaatctgacccaggcagagctgccagaaggagaccttcattggtgactgtagagtggaaagagaaagcaaaaatgaaggtcatgtctggtcaccacagggcaaaggggaaaggacagtctgtttcttgtttttggaaagttaaaacaatagtaggaagtgctccagtgggtgtcaggctctctaacwtcctggaattgatcagtcatctgcattcctgagaagatgacaatttattaagcaactccagagttgtttcctcctgggtgtagagggataaacagtttctctttccaagccagagggaggagagtgagcttggtatagaaatgcc

SEQ ID NO: 590492 - DNA, 544 bp, Homo sapiens
tccttcactggggtatttgtcaccccaagttgggcagccaggaatgttggggtgattggacccaacaccaggtggtgggggtgacaaaatctggtggagtcaaaggaatgagtaaagacagtttgagagagaaagtgggcccagggcgccaatgtgagtaatggaggctgtgaaggccctgagctctggaagcccagactatttattggtgatcaaacaaagaaacaggtggtgagaatgtggggttgaaagggaacattgcattaagcacatgatttacagctatgacagtttagcatatgctctgctacttgagataatggagagaaggttcttttaactcaagatacaatcgatcctggcagagcaaggagcaaggagccagcaagtctagacacattccagaggccatgaggggttttatgtcctgsgcttacattatggtgcatcagggtaggcttccaccctttagcacagagcttggtgttccaaaggccaagagaggttttagaccccggaccctggacaggttccaagactcttt

SEQ ID NO: 590493 - DNA, 616 bp, Homo sapiens
gaattcaaggctgcagtgagctatgatggtgccagtgcactccagcctgggtgacacagcaagaccctgtctcaaaaagagtggtatttctgagttgaggtttccggagaacctcacctggaaagtaagcatgaacatgttccagctatttggatcagtataatgakccaatccaaaacttagtgacataaaacagccattgcattatgctcatggattctgtaggtctgaaatttaagaaggacactggagaacagcttgtctctgttctacaatgtctggggcctcagctagaaagcctcgaaggctgtgagtgacatgacagctagaggctgaaaccatttgaagaaatctgggggttgatactgactaggacctcagatgaatctgttggctaggacatcaccatgtgacctccccacatggcctgggttttctcattgcatggtggctgcattccaagagcaaatatctcaagagaacaaagcagaagtgaaggacattttaatgacctacttgagaaatcatatggcatcatttccaccatcctctattggtggaggtgttacaggaaatggctcccgatcccaatcccaagaccctgagtgagggttct

SEQ ID NO: 590494 - DNA, 533 bp, Homo sapiens
aaaaaactgtaagatgttttctgtaaccacaaaacaaaaatttataattgacacactaacaataaatggcatggaatcaaaacatattactaacagaaatcacttaatcacaaaggaagatagtaagagaggaaaaaagaagaaagaatctacaaaacaaccagaaaacaggtaacacaatgggagtaatattctcttatctatcagtaataatcctgaatgtaaatgaatttaattccccaattaaaaaacagagtgactaaatgtataaaaaaggcaatgacacaaatatatatactgtctaaaaaaaactcacttcacctataaagactcttacagactgaaagggaagggatggaaaaagatattccatgcaaatggaaaccaaaaaagagaaggagtagctatactgtataagagagagtatactttaagtcagaatggtaaataaaagacaaagaaggtcattayatcatgataaaggagtcaaaacagcaagagaatataaaacttgtgaatatatatgtacccaa

SEQ ID NO: 590495 - DNA, 588 bp, Homo sapiens
aaaattgttgtgacatgtttcctaattgcataaggagagagtgttgctttttaaagtacatttttaaaggaagaactttttaaaaatctacaaagtgatttcttacaaatgccattagtcacagaattaaatgtgtttttctccaattatttattttacactaaaatgtaataatattattcttcctctggagagtacagatgttaagggatagtagcatgaaacatttaaagaaagctgtcttggaaggctgaggcaggaggattgcttgaggccaggagttcaagactagttgagtaaatagcaagaccctgtctctacaaaaatatktaaaaattagccaggcacggtggcacgcaactgtagtcctggctacttgggaggctgtggcaagaggattactcgagcccagaagtttgaggctacaatgagctatgatcgcaccactgcacttcagcctgggtgacagagtggggccctgtatcaaaatgctgctttgtctctttatcccatcccagctcttatgagcctaaaactctgtctaagcataaaatgtgtccagctttaaataagagagatggagagcaa

SEQ ID NO: 590496 - DNA, 568 bp, Homo sapiens
tgtgtatactatacccaatatgtagtcttttatccctcaccctcccacccttccccaccatccccaaagtccactgtgtcattcttatgcctttgcatcctcatagcttagctcctacttatgagtgagaacatatgatgtttgcttttccattcctgagttacttcacctagaataatggtctccaacttcatttaggttgctgcaaatgccattatttcattctgttttatgactgagtagtattctatggtatgtatatacaccacattttctttatccactcattggttgatagacatttagggtggttccatatttttgcaactgtaaattgtgctgctgtaaatatacatacacaggtgtctttttcatataatgacttaygttcctatgggtagatacccagtagtgacattgctggatcaaacagtagttctacttttagttctttaagaaatctccatactgttttccacagtggttgtaccagtttaccttcctatcagcagtgtaaaagtgttacttttaccacatccatgctaacatctgttagtttttgattttt

SEQ ID NO: 590497 - DNA, 548 bp, Homo sapiens
atttattgtactttcatcttacagatttataattacatcatcatttttttcttttgagatggagttttgcaattgttgcccaggctgcaatgcaatggcatgatctcggctcactgcaacctctgcctcccaggttcaagcgattctcctgcctcagtctcccaagtagctgggattacaggcgcctgccaccacrcccgggtaattttttgtagttttagtgcagatgaggtttcaccatgttggccaggctggtcacgaattctggaccttaggtgatccaccagcctccgcctcccaaggtgctgggattacaggtgtgagccaccacacccagtcaatatcatcatttatttttatttttattttttataagacggagtcttgctctgttgccaggctggactgcagtggcccgatctcagcttgcagcaacctccgactccctggttcaagctattctcctgcatcaacctcctgagtagctgggattacaggcacttgccaccaggcccaggtaatttttgtatttttagtagagacagggt

SEQ ID NO: 590498 - DNA, 528 bp, Homo sapiens
gtttttgggaacaggtagtgtttggttasatgaataagttcttttgtggtgatttctgagattttggtgcccccatcacccgagcagtatacactgtacctaatttgtagtcttttattcctcatctccacccagcattccccccgcagtctccaaagtccattgtgtcattcttatgtctttgcatcctcacagcttagctcctacttatgagtgacaacttatgatgtttggttttccatccctgagttacttcacttaaagcaatggtctccaattccttccaggttgctgcaaatgccattatttcattcctttttatggttgagtagtatccatggctggttagattgttttgttgtttggttgttttttcatgttggtagagggtagtttacacagggttttggaaaatataaaataaaaccaacagctacaaggtggcttatttgagaattcaggtatattttcttgctaaaataattcttaaagttcacacttactcatggattttttttttttgaggca

SEQ ID NO: 590499 - DNA, 527 bp, Homo sapiens
catcaagctaatagtattacgatccaacccataattcttcctctgtgtgatatcayataacatcaacaaaagactttacagatgatattggactttttcaagaaattaagaaagtaatctttttgtttcacacataaaccaatgaactcagaagtcagaaatgtattaaaacagagttgagccctaccttaagagtaaagggacttacaaaaccttatttgcatttactgtctcaagtagggaaatacttaccccaatgtattcccctcctgacctgacactttatcatggacccatagtatccattctgccccataaacaggaatcagacataaggaatcaagtcttattcatctctatttagtctacaatgcctagcatagaatttcatacacgatactgtggagtttacttcatgactttcttaggttaggatggtcctagcaaaacagaaacttctgccacactgctcatcccattagaagtccagtggtcactcgagtttactatttcatatggtattgcag

SEQ ID NO: 590500 - DNA, 636 bp, Homo sapiens
gccccactcctatctcccttcactgactctcttttcggactcagcccacctgcacccaggtgattaaaagctttattgctcacacaaagcctgtttggtggtctcttcacacggacgtgcatgaaactgagtgtaggccaagttagccttcggaaaggatttagtttatagtttaatcctgaaacaaaactgttaatagcccctttcctgaaaaaactccctttttgcctatgaatcagtctgcctttgtagggactaacaaatcagctacaagattagaaattaccatttaggagccttgcagcctctgctgcaagagtctcaacctcctcaaattgctcctgggattaacatcactgttgtaaaacctaagatcagtgcttaagatatttcacaaaccctgcattctgatgtaccagctgacatggcccagaccagtaatctggctcaaccagttctgcaatcccacacaggaacagatgtcagcaagaagaactcatctcagccccttatgatttcatmtccagcccaatctatcagtactcctcacttcccaatcatctacccaccaaattatccttaaaaactccaatcccaagttttcatttttggggagaccgattcgagtaataataa

SEQ ID NO: 590501 - DNA, 622 bp, Homo sapiens
gaagctttaacccccagtgtgatggtattcacaggtgaggccttcgagaggtgaatgggattagtgtgctataagaagagrcaaagaaagatgatctctctttccaccatgtgaggctacagcaagaaggcagccatctacaagccaagaagtgggcctccccagaaccctaccatgctcgcaccctgatcttggacttcccattcaatacacttcagatgcttaagccaccaagtccatggtatttgttatagcagcccaggccgactgagacaagagccttggtattcgagatttttatatcgtattcctgaattctcgaaagttctgaaaataaagagatgttcatagggcccatatatagttatatataacagatccatgttccaagtggacaaggatgagtggaaaggcaggtacttcagtcatacacagatattcaggtagctccttgatgacctgtctacccaccacattcctctgccttgtgtctaccttttttttcaaatgtgaaaattatctggactttatttttctacttgtcaaattctctttagctttttttagctgttgtgttgacctcttctatctctaaaaggcatttggttatttttttaatgtt

SEQ ID NO: 590502 - DNA, 622 bp, Homo sapiens
gaagctttaacccccagtgtgatggtattcacaggtgaggccttcgagaggtgaatgggattagtgtgctataagaagagacaaagaaagatgatctctctttccaccrtgtgaggctacagcaagaaggcagccatctacaagccaagaagtgggcctccccagaaccctaccatgctcgcaccctgatcttggacttcccattcaatacacttcagatgcttaagccaccaagtccatggtatttgttatagcagcccaggccgactgagacaagagccttggtattcgagatttttatatcgtattcctgaattctcgaaagttctgaaaataaagagatgttcatagggcccatatatagttatatataacagatccatgttccaagtggacaaggatgagtggaaaggcaggtacttcagtcatacacagatattcaggtagctccttgatgacctgtctacccaccacattcctctgccttgtgtctaccttttttttcaaatgtgaaaattatctggactttatttttctacttgtcaaattctctttagctttttttagctgttgtgttgacctcttctatctctaaaaggcatttggttatttttttaatgtt

SEQ ID NO: 590503 - DNA, 622 bp, Homo sapiens
gaagctttaacccccagtgtgatggtattcacaggtgaggccttcgagaggtgaatgggattagtgtgctataagaagagacaaagaaagatgatctctctttccaccatgtgaggctacagcaagaaggcagccatctacaagccaagaagtgggcctccccagaaccctaccatgctcgcaccctgatcttggacttcccattcaatacacttcagatgcttaagccaccargtccatggtatttgttatagcagcccaggccgactgagacaagagccttggtattcgagatttttatatcgtattcctgaattctcgaaagttctgaaaataaagagatgttcatagggcccatatatagttatatataacagatccatgttccaagtggacaaggatgagtggaaaggcaggtacttcagtcatacacagatattcaggtagctccttgatgacctgtctacccaccacattcctctgccttgtgtctaccttttttttcaaatgtgaaaattatctggactttatttttctacttgtcaaattctctttagctttttttagctgttgtgttgacctcttctatctctaaaaggcatttggttatttttttaatgtt

SEQ ID NO: 590504 - DNA, 622 bp, Homo sapiens
gaagctttaacccccagtgtgatggtattcacaggtgaggccttcgagaggtgaatgggattagtgtgctataagaagagacaaagaaagatgatctctctttccaccatgtgaggctacagcaagaaggcagccatctacaagccaagaagtgggcctccccagaaccctaccatgctcgcaccctgatcttggacttcccattcaatacacttcagatgcttaagccaccaagtccatggtatttgttatagcagcccaggcygactgagacaagagccttggtattcgagatttttatatcgtattcctgaattctcgaaagttctgaaaataaagagatgttcatagggcccatatatagttatatataacagatccatgttccaagtggacaaggatgagtggaaaggcaggtacttcagtcatacacagatattcaggtagctccttgatgacctgtctacccaccacattcctctgccttgtgtctaccttttttttcaaatgtgaaaattatctggactttatttttctacttgtcaaattctctttagctttttttagctgttgtgttgacctcttctatctctaaaaggcatttggttatttttttaatgtt

SEQ ID NO: 590505 - DNA, 501 bp, Homo sapiens
tccactgcctaggcagatggtcagcaggcagtttagttgtgggagtatttccaatttgcatgaatgaaacatggacaaataagataaggctggctccagggaagtaattcccccagttcccctgagccttggatctggaaaactgcagcccatcctggaattagggaacatcacaaaacgtactggggagaactccccatgtggcctcggccacgccagraggcggtcaaggtcccaggtgccggctcgcccacaagctatggctaagacagaaaaacaaaggaaaaaaagtcctccccaaacacacacataagcaaaacccatcttcctgtgttctctgccaagagagctggagcaaaagagatgagtttgagactctgattcatccatcaagacaaataaactcagtctatggaggttagcagggcaatttgtgaagcaaacaaaagttgagttttggaaaggggctctgaagaaaatgaagatgacatcccaggaatt

SEQ ID NO: 590506 - DNA, 400 bp, Homo sapiens
atggtatccataccccactggtccaatggaatgcatagtagaaaaayggaaattgacatttatgaaaattcatctcaaacattctcaaattcatatcaaattgtactaaaaattttcataaagcaaaactcagacattaggtaaaaccatgtagatgttaagttttacatgattagaaaatgcctggtgataaaataatcaccttatccaggtagtcaaattagatattcagctgactggacaattcttctccatgttggtctactaacagatttacaaatatgcaagtttctacaacatgctacattactctatacctggttctctccagtgaatgatttaaatggagacaaacattttaacatacgtggacatagaatgtagaaagataggtagcata

SEQ ID NO: 590507 - DNA, 549 bp, Homo sapiens
cagtgggataaaactggaaataactccaaaaggaaccttcaaaaccatgcaaatacatggaaattaaataacgtgctcctgaatgagcactgggtcaaaaatgaaatcaagatggaaatcaaaaaattctttgaactttaggacaataatgacacaacctatcgaaacctgtgggatacagcaaaggcggtgctaagaggaaagttcatagccctaaatacctacattgaaaagactgaaagagcacacagtgacactgtaaggtcacatctcaaggaactagagaaacaagaaaaaaatcaaactsaaacacagcagaagaaaggaaataaccaagatcagagcagaattaaatgtaattaaaacaaacaaaatacaaaagataaataagacaaaaagtttgttctttgaaaagataaataaaattaatagaccattagcaagattaacaaataaaagacgagagaaaatccaaataatcttactaagaaagaggagatattacaactgacaccactgaaatacaaaagataattcaaggctactatt

SEQ ID NO: 590508 - DNA, 576 bp, Homo sapiens
gtctgtttttatgccagtaccatgctgttttgattactatagccttgtagtgtattttaaaatcaggtagtgtgatacctgttgctttatttatttatttttttgctccagattgctttgagtattcagagtcttctgcatttcaatatgaatttaagatttttttttccatttctgtaaagaatgtctttggtattttcgtagggattgcattgaatctgcagctagctttaggtaatacgaacattttaaaaatattaattcttccaatccataatcacatgttacctttccattttttttgtgtcttattcaatttctttcatccatgttttatagtttttactatagggatctttcayctcctcagttaagtttattcctaggtttttttctttagctattgcaaatgaaattgctttcttgatttctttttcagagagtttgctattggtttatagaaatactactaatttttatatgttgatttgtattctgtaaatttactaaatttatttattagttctaacagttttttggtgcaatctttggagttttctataaatatgaccatgt

SEQ ID NO: 590509 - DNA, 558 bp, Homo sapiens
accagcctaggcaatatagtgaaaccccgtctctacaaataatttgaaaattagctgggcatggtagtgtgtgcctgtaattccaggtactcaagaggctaaggttagaggatcacttgagcccgggaggctgaggctgcagtgggccgtgatcacaccactgcacttcagcctgggtggcagagtgagaacctgtctcaaaaaaaaaccacgaaaaacaaaaaagaatataataatgccttcagaccatttatatgcatcagtaagttttaggtttttataaagcaatatgtgaacctaaaaatatgatatccaatcaaagtgtttcaagtaaatgggtgcaatgttattcaaaataaatattcatcttcaacatgtttttctttcagcttcccaccctatgcgttgcatgaactacatcacaaagttgtactcagaagsaaaaacaaagaggaaggaaaatgtacaacattcaaaattagaagaaaagcacatccaagtaccagagagtattgtgtagtgctctctgcaatggaacatgtgatttcagggttgccg

SEQ ID NO: 590510 - DNA, 567 bp, Homo sapiens
aaagcacaatgaccactctagctttttcttgctgacatgtggcatgatgggagtaggagctgactccaaggtaagaggagtggaactgccttgcagctgtctgcacacactcagggtgcctaatcggggtttcaaggcttgcatgacaaaggcattagtattcttctctatcgttttagcacagcatttaaatgagctataaagtaaataatgagttctagggtaaggagtgagagtcctagcttcagaagcctttgtggaactgatctgaagctctgagggatccaggtgaatagcgcgaagaatcaatcagaaatggggtctgtagtagagagatatttgggtcagaggttattagaaagactgattaggatagayaggaaagggcaaatttaaatataccaacccatatatttttaattggtttcctagtcctgagactagatcagttcagttaaatagctgtttaccatatcaggaagtggcagtgcagatgggctaggcttctgtatgtgatgacagcaaacaagcttttaataggaggcatttctgtggaaacagaagaaa

SEQ ID NO: 590511 - DNA, 567 bp, Homo sapiens
aaagcacaatgaccactctagctttttcttgctgacatgtggcatgatgggagtaggagctgactccaaggtaagaggagtggaactgccttgcagctgtctgcacacactcagggtgcctaatcggggtttcaaggcttgcatgacaaaggcattagtattcttctctatcgttttagcacagcatttaaatgagctataaagtaaataatgagttctagggtaaggagtgagagtcctagcttcagaagcctttgtggaactgatctgaagctctgagggatccaggtgaatagcgcgaagaatcaatcagaaatggggtctgtagtagagagatatttgggtcagaggttattagaaagactgattaggatagacaggaaagggcaaatttaaatatascaacccatatatttttaattggtttcctagtcctgagactagatcagttcagttaaatagctgtttaccatatcaggaagtggcagtgcagatgggctaggcttctgtatgtgatgacagcaaacaagcttttaataggaggcatttctgtggaaacagaagaaa

SEQ ID NO: 590512 - DNA, 532 bp, Homo sapiens
cagagcatgagtgatgtgtaggagagggaaacagaaagaagggagttgcatgaatgggtggcatggggtggaaaaggagtaaactcagttcagtattactaacccatgtatttaagcgctttttgacttgttattcctattctgcgtattttggttagttcagcggtcaggttgacagctgaattctaaaagataatatatgcaaaagactttgagaccctgtgargtgctattcatatgtaaattatcaatgttattaccataacagcagatgaaaacaatgcactttatggttttattttgtttgcatgcactctgtaatccttaagaattctgaaaagcagagcattagtgtgctgcttattaaaccattgtctctcagcttcactcatatactctggtcgtgatgctggggcaacccctacaaacctcatttttctttgccagccggctccttgtattactctgccaggaggggacagtagagggagaccccaagcctggagactggaaaagggactgctccttcctt

SEQ ID NO: 590513 - DNA, 638 bp, Homo sapiens
acttgattgtcaataactcaggtcatttttgatgatgggattgaactacaaatacagaataatttagaaagcctggattataattccarttttttagacagtgaactcactagaggttaactcagagcaatgattgtatatctaatttaactttgtattttacctagcatagtatccagcaatagcagcttctcagaaaatgaattacgaaagaaagaaagaaagaaagagagaaagaaaagaaagaaagaaagaaaaagaaagaaagagagaaagaaaagaaagaaagaaaaagaaagaaagaaagaaagaaaaagaaagaaagaaagaaaaagaaagaaagaaagaattggttatggtgctttgagcaagactattagcctcatccagaaaggcataaattcctacatattctctttccatttcatgtaatgtgtcaataataatttcatttgttggaataagggctttcagagcattatcatgttcatagttctgagtatcagatcatatttttaaaaatttgtatcctaaataatatttaaaagtaaatgtttgggatttctaaacactgataaatacaacatgtaccatacaattttttgaaggacaatggaaattgaaaatattatgaagtg

SEQ ID NO: 590514 - DNA, 617 bp, Homo sapiens
ttgtttgtttttattaatttgtttatatatagagacagctaatccccaaagcatgtgaactgtgccttctgtaggtccaagcacaatgttctacacatagctggcactccttaattattcattggttaagatgaggtgactaggacatttagcaagactacagcccatagaatcagaattctaggtttagaaagccttttttttttttttaagagacaggtctcatctgtctcccaggttggagtgcagtttcacagtcatagctcactgtaaccttaaactcctggactcaagtgatcctctgcctcagtctcccaagtagctaggactacaggtgtgcaccactgctcctggctaattttttattattattatttttgtagagacaaagtgtcactatgttgcccaggctggtctcaaactcctggcctcaagcaaccctcccatcccagcctcccaaagtgctgggattacaggcatgagccactgcacctggctagaaatattttcacaagctcatctgatttagcccaaatgccttcctgtagggccacatttaacctaaccaagataaataaattttcrttttatttggatagttttttaaactccttaac

SEQ ID NO: 590515 - DNA, 634 bp, Homo sapiens
atctgtgaaatattttatttccccttcatttctaaagtgtagctttgctgggtttaatattcttggctgacagtttttttttcagcactttgaatctatcatcccattctttcctggcctgtaaatattttgctgagaagtacactgttagtctaatgaagattcctttatatgtgacttaattctttcctcttgctgtttttaaaattcattgtctttgacttttgacaatttgactacaacatttttcagagaggacctgcttgggttaaatctaattrggattctttgagctttctggacctggatgcctatctctctcccaagacttgggaagttatctgctatgattttattaaatatgttttcctctccttttctattctcttctcttctccttgtagaacacccagaatatgaatatttattcacttaatggtgtctcatacatctgtaggctttcttcatttctatataattaaaacaaatgatttattccaagttctatcagtttaaagtttttcagaaattattacagaaatcaacactgaaatcagaaacaagctttcacagctgtagcatttataacaaagtcaatatctacattgccttgatttaagagatttagggtgtt

SEQ ID NO: 590516 - DNA, 576 bp, Homo sapiens
agtacagttaaaaagagatctaaatggtaccacagaagtggaccagtcaggacaggaaacagatggcatactgaaaaggagtgattaaagagagtttaataaggaatttatttacaaaggtataggcagttaaggacagtgaagcatcaacagtgagaattgctcctacacctaggcctgaagaaacaaagggaaagagctattaccaaacttcagaaagcaagctataggagagagctacctcacaggaactctgtttcaggtaatgcagcccctgccaatccaaggcctggaagagagggatgtaggaaaatattacaattgtactcttctgtcctctgagtttctttcagcrtgtcccactgttcaaatctaccagaaagtcagaggacaaggaaacctgttactgtcatccaaagaggtcaacctctgaggacgcagggcaagtagagaatgctggagaggggatctcaagtggccagcaaagaacaacccagcacagaagcgaagggactaacactttcttaagatttcataaaagaccttttaaaggaggttatatttgagataggcact

SEQ ID NO: 590517 - DNA, 556 bp, Homo sapiens
atacaaaatggcagaatggatgagaatttaccaaccaactctctgatgccttcaagagactcacctaacacataaggactcacacaaatttaaagtaaagggatggaaaaagacatttcaggtaaatgcacaacaaaaacaagcaggagtaactattcttatatcagaaaaaaacaaactttaaagcaacagcagttaaaaaagacaaaaagggtcattatttaagaataaaaggccttgyccaacaggaaaatatcacaatcctaaatatatattcatctaacactggagctcccaaatttataaaacaattactaatagaccaaagaaatgagatagatttcaacacaataatagtgggaaactttaatactccactcacagcaccagacaggtcatcaagacaggaagtcaacaaagaaacaatggatgtaaactataccctggaacaaacaggcttaatagcaatatacagaacattccatccatcaactgcagaatatacattctattcaacagcgcatggaactttctccaagatagaccatatgatagc

SEQ ID NO: 590518 - DNA, 589 bp, Homo sapiens
aatattatgaaaatgaccacactgccaaaagcaacctacaaattcaatgcaactgccatcacaataccaccatcattcttcacagaatttgaaaaaacaattgtcaaattcaaatgaaaccaaaaagagcccacatagccaaagaaagactaagcaaaaagaacaaatctggaggcatcacattacctgatttgaaactatactataaggccatagtcaccaaaacagcatggtactggtataaaaataggcacataccaatggaacagaatggagaacccagaaataaacccaaatacttacagccaactgatctttgacaaagcaaacaaaaacataaagtggggaaaggacactatattcaacaaatggtgctgggataattggctagccacatgtaggagaataaaactggaacctcatctattaatttatgcaaaaatcwactcaagatggattaaggacttaaatctaaggtatgaaactataaaaattctagaagataacattggtaaaactcttctagacactggcttaggcaaggatttcatgaccaagaacccaaaggcaaatgcaatagaaacaaaga

SEQ ID NO: 590519 - DNA, 589 bp, Homo sapiens
aatattatgaaaatgaccacactgccaaaagcaacctacaaattcaatgcaactgccatcacaataccaccatcattcttcacagaatttgaaaaaacaattgtcaaattcaaatgaaaccaaaaagagcccacatagccaaagaaagactaagcaaaaagaacaaatctggaggcatcacattacctgatttgaaactatactataaggccatagtcaccaaaacagcatggtactggtataaaaataggcacataccaatggaacagaatggagaacccagaaataaacccaaatacttacagccaactgatctttgacaaagcaaacaaaaacataaagtggggaaaggacactatattcaacaaatggtgctgggataattggctagccacatgtaggagaataaaactggaacctcatctattaatttatgcaaaaatctactcaagatggattaaggacttmaatctaaggtatgaaactataaaaattctagaagataacattggtaaaactcttctagacactggcttaggcaaggatttcatgaccaagaacccaaaggcaaatgcaatagaaacaaaga

SEQ ID NO: 590520 - DNA, 569 bp, Homo sapiens
agattcctttaggttttatacatagatgattatgtcatctgcaaatagggacaattttattttttccttttcaatctgtatgtcttttccttcatttacttgccttattacatgaatgagaatttcataattatgatgaatagaagtgatgagagcaaatgtccttgccttgttgcaatcttagaggaaagctttyggtctttcatgattaaatgtgatgttagctgtagatgccctttttcaagttggggaaggtctcttctatgcttcattttctcaaagttttaattttgaatagatgttgaattctaaattttgtcaaatgctttttctccagcaattgatatgatggtgcagtttttctttatagcctcttaatatggtggattacactattttttttttttttttggtggagtctcgctctgttgcccaggctggactgcagtggcgtgatcactgcaacctctgcttcctaggttcaagtgatcctcctgcctcagcctcccgagtagctaggactataagcgtgtgccaccatgcccggctaatttttgtatttctagtag

SEQ ID NO: 590521 - DNA, 574 bp, Homo sapiens
tcagacacgtaacttccaatcacacattatccaaaactgcttttatatgataaagaaaaaarcccacatatatcaaactattctacataactgtcccaagacatagggctaaaaaggagagaaaaatataaaaaccaaaaggacacacattgaactttttatctccaacccactctacataagccaagtctgtacaggctcagaaagtataaagaactcctagagaaagaaatctgttttgaagactctacccccagaaggtcaaggataacttattaagtctagctcagtttggaccctcctagtaataagagatatacattataagttttgatgtatgttatattatctaatatctaagcatttaaacttttgctggaagttcatgtgctaatgtgtgttatttattctgtttcaaaagcatttcacatagtatcatttctggtgaagatatggagaactgggctgaatgcttgtaaaatgataataaattggttcaatctttttggaaagcaagttagcaattcacttcaagaaccctgtaaaaaacaaatattgctatctgaaccagtca

SEQ ID NO: 590522 - DNA, 536 bp, Homo sapiens
atgcatagaagagagactgttacagtggctattgctggacaggaatatgggtggggaaaagaggaaggcaaactgctctcttttcttccttatagtttgaattcgtttgtttgtttgagagagggtctggctctatcccctgggctgtagtacagtggtgggatctcagctcactgcaatctctgcctcctgggctcaggcaattctcccacttcagccttcagaatagctgggagtacaggtgcatactacaataccctgctagtttttttgtatttttagtagagatggagtttcgccatgttgcccagactggtctcaaactcctgggctcaggtgatcsaggcacctaagcctcccaaagtgctgggattacaggtgtgagccactgcgcctggcctcttccttatagtttgaattttttttaatgtgaatgtatctacatactacttgtgtaatttaaaaaataagttaaaatcagaaataacaaagaagtgccaaagtgaggtttaacaactatagccattcagtaaaat

SEQ ID NO: 590523 - DNA, 616 bp, Homo sapiens
ctccatgtccccaccagactcaggagcccagctggcttcacccagtggatcccgcactggggctgcaggtggagctgcctgccagtcccccgccatgcgcccgcactcctcagcccttgggtggtcaatgggactgggygccctggagcaggggcggcgctcgtcggggaggctcgggccgcacaggagcccacggagggcgggcaggctcaggcatggcaggcgacaggtcccaaaccctgccccgccggaaggcagctaaggccgggagcgaaattgagcacagcagctgctggcccaggtgctaagcccctcactgcccaggccagtggggcccgcaggccgctcggagtgcggggtctgcccagcacacgcccacccggaactcacgctggcccgcaagcacagcgcgcagcctcggtaccccccctgcctctccttccacacctcctcacaagctgagggagccggctcgcgccttggccagcccagaaaggggctcccacagtgcagcggcgggctgaagcgctcctcaagtgccgccaaagtgggagcccaggcagaggaggcgcccagagcgagcgagggctgtgaggactgccagcacactgtcacc

SEQ ID NO: 590524 - DNA, 616 bp, Homo sapiens
ctccatgtccccaccagactcaggagcccagctggcttcacccagtggatcccgcactggggctgcaggtggagctgcctgccagtcccccgccatgcgcccgcactcctcagcccttgggtggtcaatgggactgggtgccctggagcaggggcggcgctcgtcggggaggctcgggccgcacaggagcccacggagggcgggcaggctcaggcatggcaggcgacaggtcccaaaccctgccccgccggaaggcagctaaggccgggagcgaaattgagcacagcagctgctggcccaggtgctaagcccctcactgcccaggccagtggggcccgcaggccgctcggagtgcggggtctgcccagcacacgcccacccggaactcacgctggcccgcaagcacagcgcgcagcctcggtwccccccctgcctctccttccacacctcctcacaagctgagggagccggctcgcgccttggccagcccagaaaggggctcccacagtgcagcggcgggctgaagcgctcctcaagtgccgccaaagtgggagcccaggcagaggaggcgcccagagcgagcgagggctgtgaggactgccagcacactgtcacc

SEQ ID NO: 590525 - DNA, 514 bp, Homo sapiens
ttggtatccaccactattagtatttttgtattgttctttcagtactttcrgtaagtgtagtgcatatgcacttacaacgtttaaagagcatgcatgtgattgttttgtattcgttgtctgccttgtgtgcctcacaatgttactctctagaggtctgctccatttttttaatggtgtcatgatattccatagtatacatatgtcagtatatgtttattccctctgctattattgggcatttaggttagttccattttttgtgattatagttaatgctgcaatgattgcccttattcatatgtttcagtgcacacatgcaacaattttcatagaatgggtttctagaaatataattatgggcctgatagtatggttatttaaaaattttaagtactaccagctgggcgcattgccccgcacctgtaatctcagcactgaggcgggctgattgcttgagcccaggagttcaagaccagcccgggcaacatggtgaaaccccatctctacaaaaaat

SEQ ID NO: 590526 - DNA, 527 bp, Homo sapiens
aggtatgaggtgtcacataaaatactcattaataatgcttcagtgcaagattattttcacatccttgccaatgcagtaaggcaagaaaaagaattaagagtataaatactggctagtagaatactaggttttacttatctgtagataatatgagtctttatccagaaaayccaaaagagttaactgaaaaacttttcgagttattaaaaaaaatccagtaaattgatcagacaaaactaatatgcaaaaatgaaaagatcattaatcagaacccttttaacttccagtcccacccagctgcaaacttatttgtatccacattcaaccttacttctttcaccgttcaactttaggatatactgcaagcagttttccaaaattgttgtattaagtacacttctggcagggtgcagaggctcacacctataaccccagcattttgggaggctgaggtgggtggatcacttgagaccaggagttcaagaccagcctggccagcatgatgaaatcctgtttctactaaaaat

SEQ ID NO: 590527 - DNA, 619 bp, Homo sapiens
ccttgattcacgggctgcagaatgmatgctgtgttagcaggcataaaaacaattttaaccttcttatacatttctgtaagagctcttgggtgactgtattataataacgagcaatactattttgaaagaaatattttttgtcctgcacggtagatctcaacagtgggcttaaaatattcattaaaccatgctataaacagatgggctatcatccaggctttgttccatttatagaacacaggcagagtagatttaacataatttttaggggtctcagaattttcagaatggtaaatgatcaataattttaatgtaaaatgatcagcccctaacaaaaaagtcagcctgtcctttgaagccagtccttgacttctcctctctagctatgaaagtcctagatatcatcttcttccaaaagaaagctattcagtctacatttaaaatcagttgttcagtgtagatattatcttaacaagataccacttcacaacctctaggaaggctatggttttcaaagttgttggatattaagcagggcttgtcttggtaaatttagagcatgaaataagttcacatgtaatgagtacccagatacttttgatgagaaaaccacaaatta

SEQ ID NO: 590528 - DNA, 547 bp, Homo sapiens
gtattggtgagagctcagagtctggcattaagtggaagaggcctccatcctacttctgccatttatcagccacatggtgtagagtaagttrgttaacatctccaagtcttacatctcaatgtgtccatatatgaaatgcacatacttcttagagttggtgtgaagatacagtgagagaatatatgtaagtgcttaataagatgtctgcatagagaagagtgctttataaatattagccatttagtggtcactttatttgccttacttcttgactttcataatatttaccactttgcaaacactataatcatccataagtatatcaatatatatgcccatctctaatactatctgatatacaagaggcccttagtaaagatttttgtatgaagaaatgaatgaatgagctccctgtctcaattctgtaaagcattgcggtttggcaatgtcaaacctcaggctggcaatgtcaagcactgagactcctgaagtagaatttttagatctagcaaataaaaatacagggacttagctaaatttgaacctc

SEQ ID NO: 590529 - DNA, 609 bp, Homo sapiens
tatacgtacatatacatatatgtgtgtatatagacacatatatacacatatatgtacatgtgtatatatatacacatgtacatatatatgtgtgtgtatatatacacacatatacgtgtgtgtgtgtgtgtgtgtgtgtgtatatatatatattttttttttttttgagacagtagagtctcactctgccaggctggagtgcagtggtacaatctcggctcactgaaacctccacctcccaggttcaagcgattttcctgcatcacctcccgagtagctaggattatacgggtgcaccaccaagccccacttttttttttatttttagtagagatggggtttcatcatgttggccaggctggttttgaacgcctgacctcaagtgatccaccatccttggcctcccagactgccaggattrcaggcgtgagcgctatgcccggcctatagttttttttaattaacatatgtggaatcaaattgtatgtatatttactaccctttttctcatttaatatcttgttttgagcctatccttattgatgattatttacctcatctacttcatcaatgtttctcatcctcaccattttgtaatttcctccatac

SEQ ID NO: 590530 - DNA, 591 bp, Homo sapiens
tcggtctgccatccattgctgacatttcaagaagggttaagaaccagggctgaaggttagtgcgttggtgtggaggtaaggggacacttcagctttctgaattgccaaaatgcttgtgttaagaatttctccctgatagttttcctttaactatcatgtaagatgagtatagtcattggcttcatttctgggtgctttcagagggcgaaggctctgggtaggatctttatttgtggttgaatatttgccttaggtttcacaggtactgtacaccagcaaaatatttttgttgttgtaatttgtcgtatgatcaagtagatggtgcttaacagtaatggctgkcagatagactcttactcagctacatggctatcttctatttcaatgctttcacagtagtgctctgtggtagtcagggagcgagatgacccactcaccaagtccacttttgggctttgtaggagccccaccctatcactggcactgtacctgagttttctttgttaggtgttttgggctgcggggctccctcagggagaggctaggtctggcagacaggtcacacccctccctgaccagccctgtggtagg

SEQ ID NO: 590531 - DNA, 558 bp, Homo sapiens
ggattcttattctaggacccagaataaggaagagagtctaatgggagagtgatttactcatgacagatgttagaggctcaagaggcctaacacagccatacaatcaaatttaagatcaaatgtaaaaaatcctcagattacattgaccaatgaaaatcacatggtcatggcatacaggggtcagggaagtatgctttacttgctggaaggcatggcargtcacttgtgacagggtgcgcagatgattttgttaacaggtaagggagtagatagctgtgaactatgtaatctacctgattcccaaaggcatagctaagttccagtgtttctgactgaatttgaaaacctttataatctggctataccctatcaactcaacattagttgccactaataatctatatgctcagccaataccacattattatctactgtttattgctcatgctgttttctttacctgggatattttctttctttccttccttccttccttccttccttcctcttttattctttcattattttgttctttctttagttttttctttctttcct

SEQ ID NO: 590532 - DNA, 601 bp, Homo sapiens
ttttttaactcctgggtaccctgccacccatatttgttcacagactattataaaatttgatataaaatgtacatatctcaaatggataaacttctccctcctgccaccattatagtctaagccaccattctctctagtctggattagggctatacaaattcagacagtagaaactaagttagaaattccagctaggtaaaaattgcaattataagttatgagacacactgcttctctaaacagagatagataaattataaagtgtaaaatttatgttaaaggcccatatggggaaaaacatgataaatatttgcatggatcaacatgcagaagaaactccaagtgtgagcaaggcttaagcawcatacatactggtctctgtgttcaaaatcaggcagaggtacctgggagttcaggtttatggggtaatagaaactaaggattccaagtgagatagtgagccagatgtaaactcaatgtttgaagccaggagctatagtaggactgtcagtcacaggaaagaagggccacagaatccgatgcaggtcactttccagggctacagaaggcttcaagtctgctgctgggatttctaatataa

SEQ ID NO: 590533 - DNA, 618 bp, Homo sapiens
ggtttagaaaccagtaaaacacagataaattctattggggcatgttttgtatgagtacttttaattttcttttttctttctattttatagttgtgtatttttccttgagtcttatcgccattatcaatagtgtcaataggcttgtaatattatagtgttataagaaagagaaattaagcagaagagtgggaagcaggaacacaaaagctgttatgtaactcctccattgttcaatttaaagagcattttttgagtaaatagcacgttgtcttttgctyccataactgtacatttgagaatgactgatgacttaacaaatttctttgtgttcagcagcccacagagtgaaatgcactgtgtgctgctatgattggcctggaggtgtacaattcatctcacttgataagagtttgtgatcagttttccagtcggttttcttcttggtgcttctcatctaatttctcatctcttaattgctttatatcttgtttgcagcatgcattatcatccatgcttgttcctaaaagtgttgtaacacagtttcactatctagaagagcttaaaatgacagaaatgtattctctcaccgccctggagtctagaaatccaaaaacaagg

SEQ ID NO: 590534 - DNA, 618 bp, Homo sapiens
ggtttagaaaccagtaaaacacagataaattctattggggcatgttttgtatgagtacttttaattttcttttttctttctattttatagttgtgtatttttccttgagtcttatcgccattatcaatagtgtcaataggcttgtaatattatagtgttataagaaagagaaattaagcagaagagtgggaagcaggaacacaaaagctgttatgtaactcctccattgttcaatttaaagagcattttttgagtaaatagcacgttgtcttttgcttycataactgtacatttgagaatgactgatgacttaacaaatttctttgtgttcagcagcccacagagtgaaatgcactgtgtgctgctatgattggcctggaggtgtacaattcatctcacttgataagagtttgtgatcagttttccagtcggttttcttcttggtgcttctcatctaatttctcatctcttaattgctttatatcttgtttgcagcatgcattatcatccatgcttgttcctaaaagtgttgtaacacagtttcactatctagaagagcttaaaatgacagaaatgtattctctcaccgccctggagtctagaaatccaaaaacaagg

SEQ ID NO: 590535 - DNA, 365 bp, Homo sapiens
tgggagggccaagggtgagatgataaggtttggctgtgtccccacccaaayatcaacttgaactgtagctcctacaattcccatatgtgggagggactggttgggagctaactgaatcatgggggagggtctttcctgtgctatcatcctgatagtaaataagtctcaggagatctgatggctttataaagggaagtttccctgcacaaaggtgccttccccttccaccatgattgtgaggcctccccacccacatggaactgtgagtccattaaacctctttcttttgtaaattgtccagcctcaggtatgtctttgtaagtggcatgaaaatgtactaatacacctaccaaaagtcctatatc

SEQ ID NO: 590536 - DNA, 545 bp, Homo sapiens
tgcagggtgccagagagtggctggtgggaaaggcagagaaacaaagagtttcaaagtacattcaaaggcctcttatgggaagtcagggaccccgaacagaggggactggctggagctgtggcagaggaacataaattgtgaagatttcatcttcatatggacatttatcagttctcaaataatacttttataatttcttatgcctgtctttactttaatctcttaatcctgttatctttggaagctgaagatatacatcacctcaggcccactgtgataattgtgttaactgtacaaattgattgtaaaacatgtgtgttcgggcaatatgaaatcagtgaaccttgaaaaagaacagaattatagcgatttttatggaacaagggaagacaaccataaggtctgactgcctgcggcattgggcaaaaagagcgatctttttcttcttgcagagagtgtataaaagsacatgtaagtaggaaacatattgctaaattcttttcctagcaaggaatattaatattaataccctaggaaaagaatgc

SEQ ID NO: 590537 - DNA, 613 bp, Homo sapiens
ctagtgacccaatagtggatatttttgatgtttctagtcaatccacaatgattcccctgcttttgcaaagaccttcatattatgtaggcatatgccaccagaaaccatgtttgtttaacatgtcataaccctagctatgacatcattcttgggttctatgcaagatcctgtaatcatgtaataaaacctctgtttccttaaacttactgaattttttttctattacttacagcttgcagtaatatattgattaaatgataccattatatctttaacctcacaaatgtttcttaaaacctctttattatctagatctggcacccctcctcacagaggactaaaccagtccaggggmacaggatgacatataccattacatcagttgcattttctaataattttattttattttctacctgccttgtatccaaatgtattttcctcattcaaccaaaagcagagcccacatgcatattaagtcaaataaataaatatcccataggggagcagtgcgatggtgggaggtctgtcagggagacaccagaagaggaaacctcaaaacaaattaaaacctcaataagaagttaagccaagaggtaccagaagagtgagc

SEQ ID NO: 590538 - DNA, 613 bp, Homo sapiens
ctagtgacccaatagtggatatttttgatgtttctagtcaatccacaatgattcccctgcttttgcaaagaccttcatattatgtaggcatatgccaccagaaaccatgtttgtttaacatgtcataaccctagctatgacatcattcttgggttctatgcaagatcctgtaatcatgtaataaaacctctgtttccttaaacttactgaattttttttctattacttacagcttgcagtaatatattgattaaatgataccattatatctttaacctcacaaatgtttcttaaaacctctttattatctagatctggcacccctcctcacagaggactaaaccagtccaggggcmcaggatgacatataccattacatcagttgcattttctaataattttattttattttctacctgccttgtatccaaatgtattttcctcattcaaccaaaagcagagcccacatgcatattaagtcaaataaataaatatcccataggggagcagtgcgatggtgggaggtctgtcagggagacaccagaagaggaaacctcaaaacaaattaaaacctcaataagaagttaagccaagaggtaccagaagagtgagc

SEQ ID NO: 590539 - DNA, 497 bp, Homo sapiens
tatataaatacacacataggtatatagcatatggggtgtctgtgtgtgtgaatgtatatatgtatgcatgcttatatgtgctgtaaacaaaaaaaaaagtatctgagaaaagtctcagtcaatttaaatgtttattttgccaaagttgaggatgcaactgggaaaaagagacaagagccaaagtaggatcagtggctcatgtgtttttggaagaggattttgaaactttcaatatttaaagggaaaaagaaggaaggaggggaaacgagaaagtgaaaaaagagcaaaggtatggttacctcttgtgaatccacatctggcatgtgaaaaggaggggtgatggaaatatagtcaattatgtattcatcttgcactcagcaaatctgcactttacatgctayaaaataaacatagagtaaaggaagcagttaaaaatgcatttatatcagggttaacagaaattaatttctcatctcccttgtctcatgccatgaaga

SEQ ID NO: 590540 - DNA, 575 bp, Homo sapiens
gacttaatgtcaattagagttcatgcaacaccctcttcagttttgattaatttgctagagtgattcagagaactcagagaaatactgtacttacatttatgcatttattataaaagatattacaaaggatatagataaataccagattgtggaaatacatagggtaatctttgggaggaaaagtacatagagtttctatgccctcactaggtatattagtctgttgtcacattgctataaggaaataccagagacttggtaatttataatggaaagaggtttgattgacttccagttccgygtggctgtaaaggcctcaggaaacttacaatcatagtggaagacaaagggaaagaaggcaccttcttcacagagtggtaggaaggagaactgctgagcaaagagagaagagccccttataaagccatcagatctcatgagaacacactcacaatcaggagaacagcatgggggaaaccgccccccatgattcaattacctccacctggtctctccagtgacaggtggagactatggggattacaattcaagatgagattagagtgaaacagagc

SEQ ID NO: 590541 - DNA, 585 bp, Homo sapiens
gagtttctatgccctcactaggtatattagtctgttgtcacattgctataaggaaataccagagacttggtaatttataatggaaagaggtttgattgacttccagttccgtgtggctgtaaaggcctcaggaaacttacaatcayagtggaagacaaagggaaagaaggcaccttcttcacagagtggtaggaaggagaactgctgagcaaagagagaagagccccttataaagccatcagatctcatgagaacacactcacaatcaggagaacagcatgggggaaaccgccccccatgattcaattacctccacctggtctctccagtgacaggtggagactatggggattacaattcaagatgagattagagtgaaacagagcctaaccatctcaccgcacatgctaccttctaggcaacttcacatagtcaattattcagaagctctctaaactgttcttgttgggtttgtggcagtttcattacataggtatgattaattaaatcactaaccattgatgatcacctcaacttttactctttctctccattctggaggttgggggttaggataggaagctt

SEQ ID NO: 590542 - DNA, 620 bp, Homo sapiens
caaaaaggcacttatcacttaagagattccaacagttttagctgtattccagaaaacagggacaaagtccaaatacgtattttacaatatgggaggtagctattaatctaactatatcattaatcactttaaatattaatgatctcaatacaccagttaaaaaacagagactgttacatagatwaaaaaaaaggattcaactatatgttgtttatgagaaactactttaaattgtaaaagtgcatatagattaaaagtaaagaaatgaagacagatataccatttcaacactaatgaaaagaaagtggaaatagctatattaatttcaggcagagcagatttcagaggaaggaaagttatcagcaataaagaggggcattacataatgataaaggggtcaattctataagaagatataacaatccttcctgttgtatatgcctgacaataaagtgtcaaaataaatgaggcaaaaaatgatagaacaacaagtagaaatatatgaactcactgttatggttggggatgttaacacctttctatcagaaaataatcaaatgcatcaagcagaaaataagtaaggacctagtttaaaccaatagcaccatcaatcaactgaa

SEQ ID NO: 590543 - DNA, 620 bp, Homo sapiens
caaaaaggcacttatcacttaagagattccaacagttttagctgtattccagaaaacagggacaaagtccaaatacgtattttacaatatgggaggtagctattaatctaactatatcattaatcactttaaatattaatgatctcaatacaccagttaaaaaacagagactgttacatagattaaaaaaaaggattcaactatatgttgtttatgagaaactactttaaattgtaaaagtgcatatagattaaaagtaaagaaatgaagacagatataccatttcaacactaatgaaaagaaagtggaaatarctatattaatttcaggcagagcagatttcagaggaaggaaagttatcagcaataaagaggggcattacataatgataaaggggtcaattctataagaagatataacaatccttcctgttgtatatgcctgacaataaagtgtcaaaataaatgaggcaaaaaatgatagaacaacaagtagaaatatatgaactcactgttatggttggggatgttaacacctttctatcagaaaataatcaaatgcatcaagcagaaaataagtaaggacctagtttaaaccaatagcaccatcaatcaactgaa

SEQ ID NO: 590544 - DNA, 620 bp, Homo sapiens
caaaaaggcacttatcacttaagagattccaacagttttagctgtattccagaaaacagggacaaagtccaaatacgtattttacaatatgggaggtagctattaatctaactatatcattaatcactttaaatattaatgatctcaatacaccagttaaaaaacagagactgttacatagattaaaaaaaaggattcaactatatgttgtttatgagaaactactttaaattgtaaaagtgcatatagattaaaagtaaagaaatgaagacagatataccatttcaacactaatgaaaagaaagtggaaatagctatattaatttcaggcagagcagatttcagaggaaggaaakttatcagcaataaagaggggcattacataatgataaaggggtcaattctataagaagatataacaatccttcctgttgtatatgcctgacaataaagtgtcaaaataaatgaggcaaaaaatgatagaacaacaagtagaaatatatgaactcactgttatggttggggatgttaacacctttctatcagaaaataatcaaatgcatcaagcagaaaataagtaaggacctagtttaaaccaatagcaccatcaatcaactgaa

SEQ ID NO: 590545 - DNA, 610 bp, Homo sapiens
aaaggttatggtattaggaggtggagccttttagaggtgagtggtccataagggcagtgccctcacaaatgggattagtgtccttacaaaagaggctcaagggagacctctcaccccttctaccatgtggggacacaacaaaggcaccacctrtgaaccagagagttggttcttaccagacgacaaatctaccagtgccttgatcttggaattcccagcctccagaactgtgagaaataaattattgtttataagccacccagaataatacattttgttacagcagcagcctaaacaaactaagacagacaccccctggatagattacttattaccatttgacttatataaagaaacatgctccaaactaatataacatagctagtcttctggctgcatcattacaaatggaaactgaaaaatattcaacagctcagatgtatgccatcatcacaagccttctagattatccatttgttatctatgtactattgaattaaaaacaaaacaaacacacacacacacacacacacacacaccatttctgaacttactgctctttgaaagcacatattttatacctgagaataatcaagtgcaactccaaaaa

SEQ ID NO: 590546 - DNA, 610 bp, Homo sapiens
aaaggttatggtattaggaggtggagccttttagaggtgagtggtccataagggcagtgccctcacaaatgggattagtgtccttacaaaagaggctcaagggagacctctcaccccttctaccatgtggggacacaacaaaggcaccacctgtgaaccagagagttggttcttaccagacgacaaatctaccagtgccttgatcttggaattcccagcctccagaactgtgagaaataaattattgtttataagccacccagaataatacattttgttacagcagcagcctaaacaaactaagacagacaccccctggatagattacttattaccatttgacttatataaagaaacatgctcyaaactaatataacatagctagtcttctggctgcatcattacaaatggaaactgaaaaatattcaacagctcagatgtatgccatcatcacaagccttctagattatccatttgttatctatgtactattgaattaaaaacaaaacaaacacacacacacacacacacacacacaccatttctgaacttactgctctttgaaagcacatattttatacctgagaataatcaagtgcaactccaaaaa

SEQ ID NO: 590547 - DNA, 500 bp, Homo sapiens
gagaatagaaaagatttagggccagagcaatactgcataacatctttttaaacactgcaatatttaaagaaaatggagctccaattgaatttaaaaagacataaaatagttcaatttgattataatttaacctagttaaatcataaaataattaaaataaaatattcaaatccaatcactttgagatagctcttggcataggcctctgagtaaatgtttatggtcatctctacccagaagtttactgttatcattgatagttttatatcattactactgttataattaaccattaatcgaatgtgtattatgttgtcttctctcactttagatactagccgtggtcstgctacatagatgtcaagaaagaaagatatcacttaaagccttcagcaggttggaaataaatgtgatatgaaatttggctgaataatctggttgccctacataaagaatacaaagtcttcacttctatatattcacaaaatatatatatatat

SEQ ID NO: 590548 - DNA, 631 bp, Homo sapiens
tttgggtccataattctactaattttatttatcatatataaaattttttaatatttgacattcccctcatattttcattgaacaagtctattccacaagactataaatgtaatcttattttgtagcatttatttcaccttttaaatgctttcatattatttgatttttaattctataagttcatttaaagttttataattttaagttgctttaaaaactcaaatccatactcttcgtttgaagccaataagaagtttttagtagtttttaacaataactatgatagctgtattaatttttttggttataatgctatacaagaaagtctcagtggcttatcacaataaacattttatctcacattcatgggttggcagttttgatcccttgatagttcacaggagcttgaaaaagaaagataagtgccgatcktcttcttcttctttcttctttctccttcttcttcctcttttttttttttttttttttttttttttttttttgagacagagtctccctctgtcgcccaggctggagtgcagtggcgcgatctcagctcactgcaagctctgcctcctgggttcatgccattctcctgcctcagcctcctgagtagctgggactaccagca

SEQ ID NO: 590549 - DNA, 587 bp, Homo sapiens
agcacaactgggtgcctttagtcacttataacatcattgtacattttaaaataagttaaagattgtaattggaatgtttgtaactccaagcatgctagaggttaggaaaactcctttctccatgatgtgcttattttatatgcatgcctatatcaaaacatctcatgtacccataaatagtagagtacacctactatgtacccacaaaaagtaaaaaaatgaaaaagacaaatatcaaaaattaaaaagggaacattactgtagattataaacatattttttaaagttagagaatattaaaaattccattataaaaatgaggtatcaaaaaatgcccaatgcaaagaaatgaggaaaagaaaatatgaaatacattgggaaacaaggaaaagagaaacagamtgatatacctaaatataatttttcaggaatttcataaataaatattgtctaattcatcaaggttcaacaacctagatgaaatgcaaaacagtttcaagatatcattattaaaatatatttaagaatacacgcaaaatcaatagcctagaaatatattaaagatactgaattcacaactaaaaatt

SEQ ID NO: 590550 - DNA, 592 bp, Homo sapiens
tcttttatcatccagttaattttctttatttaaatgtaaattgtagtttcactggcaggagaatggtgagtgtgcccactaggatttctttaattctgaggtttatatattagaaattttctgaaagaactgtaataatgtggttctcttagttctagcactcatctattttatttctgcttttacattgatgttaattttctcagaaatcttatagaaaaactacatatttataattaaatcccatcatataaatacatagtccaactagttttctatttataaaggtaagtattggtggggtaggttgggggagatgtayctccagttttctctgtgataaaaaatacctattaaatgtcaatctcatcacacatattccccatattccattcatacatatccacctatagatatcaaacaggggagcaaataaaactacttataacctaagctcaaagcataagtaggagacaaaataataacaacacaaacttcgatacacatataagtagaaagtaaacatcaaacccagcagtcttgagtgatcaccaaaacagaaaggtagatgaagactggtaggagacagtgg

SEQ ID NO: 590551 - DNA, 567 bp, Homo sapiens
ctcttcaatatattgatgtattagtttgttttcacactactgataaagacatacctgagactgggcaattcacaaaagaaagaggttaattggacttacagctccacgtggctggggaggcctcataatcatggcagaaggtgaaagacacgtctcacatggcagcagacaagagagcttgtgcaggggagctcctctttttaaaaccatcagatctcatgagacttatccactatcaaaggaacrgcatgggaaagacctgcccccatgattcaattacctcctgctgggtccctcctgaaatgagggaattcaagatgagatttgggtggggacacagccaaatgtatcaactgatttcctttcttttgtgtatacacctgggagaggattgctggattatatagtaactctacttttagtttttttgaggagcctccaaactgttctccatagtggttctactaatttactttcccaccaacaatgtgggagggttctcttttctctgcatccttaccagcatttgttcttgcctgttttttggataaaagccattttaactgg

SEQ ID NO: 590552 - DNA, 618 bp, Homo sapiens
tctacttttaggtaataactctagagaattttttwtaaaattctgcatgttttatacacacatatgcacaaaaaataagaaatattataatagccaagatatgcaaataatccagatgtccattatcagatgactgaattaacacattgtggcatattcaaacaatgaaatgctactcaaaaatttaaagcaatgaagtactgatgaacacagcaccatgcataaatatgaaaaacatgatgctcagtgaaaaccagacaaaaataacatactccataggattatgtacaatttttgagcggaacagacaaagctttagttgtagatatgagcacagtgtggcctggtgaggaaatagttgactgaaaagaggcacaccagaatttagaatatactgggttatgaaaatagtttagacactaattggagtgatgattatacgtgtgtgtgtgtaaactcagcaaactatatacttaatatctttggattatgtaacaaggtacttatgtgccccctaaaatttcactggaagcctaaacaaacaactgattaaacatatctaactggataaattcagaaattgaaactagatcagaagaaatggcacaaactgaggca

SEQ ID NO: 590553 - DNA, 618 bp, Homo sapiens
tctacttttaggtaataactctagagaatttttttwaaaattctgcatgttttatacacacatatgcacaaaaaataagaaatattataatagccaagatatgcaaataatccagatgtccattatcagatgactgaattaacacattgtggcatattcaaacaatgaaatgctactcaaaaatttaaagcaatgaagtactgatgaacacagcaccatgcataaatatgaaaaacatgatgctcagtgaaaaccagacaaaaataacatactccataggattatgtacaatttttgagcggaacagacaaagctttagttgtagatatgagcacagtgtggcctggtgaggaaatagttgactgaaaagaggcacaccagaatttagaatatactgggttatgaaaatagtttagacactaattggagtgatgattatacgtgtgtgtgtgtaaactcagcaaactatatacttaatatctttggattatgtaacaaggtacttatgtgccccctaaaatttcactggaagcctaaacaaacaactgattaaacatatctaactggataaattcagaaattgaaactagatcagaagaaatggcacaaactgaggca

SEQ ID NO: 590554 - DNA, 235 bp, Homo sapiens
gaatgaaattaaaatgatggaaataataaggataaaagctgaaatcaatgaaaaaaaaaaccaaagacataatagagaaaatataaaaagccaaagctgtttctttgaaaacagtattccagttgctaatctctgtggcagccagcctccaaaatggcccgcggtgattttcacttctgctatccatgccttgtgcagttctctctcatattraatatggctgacctgtgttatc

SEQ ID NO: 590555 - DNA, 336 bp, Homo sapiens
ttgtgtgcatgccagcaatatgtctatctcatatcctaatgtatgtctctctcctcctcctcctctcctcttccctctcctttcttctgtgcgcacacacacacacacacacacacacacatatcccaggagtaacaacccatcacatttgcaatattrtgtcagttagaaacaagtcacagatcctactcacacttactcgatttcatccaaaagcttgggcagtgatcccatccacactaaaaaaggaagagatcatacagagtataacaccaggacatcgagatcatgggaaacatcttagaagtctgcctatcacagataataaatacttgt

SEQ ID NO: 590556 - DNA, 336 bp, Homo sapiens
ttgtgtgcatgccagcaatatgtctatctcatatcctaatgtatgtctctctcctcctcctcctctcctcttccctctcctttcttctgtgcgcacacacacacacacacacacacacacatatcccaggagtaacaacccatcacatttgcaatattgtgtcagttagaaacaagtcacagatcctactcacacttactcgatttcatccaaaagyttgggcagtgatcccatccacactaaaaaaggaagagatcatacagagtataacaccaggacatcgagatcatgggaaacatcttagaagtctgcctatcacagataataaatacttgt

SEQ ID NO: 590557 - DNA, 583 bp, Homo sapiens
ggaaacatcttagaagtctgcctatcacagataataaatacttgttgttgtttgaagacattaagtttcaggtaatttcttatgcagcaatagacaactaattagtaagagttgtgcctaactaattaggcacaagttagaatataaggagtgaagasttatcactatagatcctacagatactaaaagataagagtttgttttactataagcaagcctatcacaataagactatttagattaaaaggctggtaagttttatgctttgtatattttaccatgataaaaacattttataagcatcacttaccatttgatcacttattaaatgctaagtgttttacatacatttcattaatccttagaacaactttgttcagtaaaaattattcctggtttacagaggagaaaactgaggctcagaaaggctactcatttatttgaagtctcacagccttcataatgttattcatgcactctttatgccctagagagttggagaaattgcaggggagaatctcagaaataactaaaataattgaagatgtaatcaagaaacaaaagtacagtgtttgaatagaga

SEQ ID NO: 590558 - DNA, 583 bp, Homo sapiens
ggaaacatcttagaagtctgcctatcacagataataaatacttgttgttgtttgaagacattaagtttcaggtaatttcttatgcagcaatagacaactaattagtaagagttgtgcctaactaattaggcacaagttagaatataaggagtgaagagttatcactatagatcctacagatactaaaagataagagtttgttttactataagcaagcctatcacaataagactatttagattaaaaggctggtaagttttatgctttgtatattttaccatgataaaaacattttataagcatcacttaccatttgatcacttattaaatgctaagtgttttacatacatttcaytaatccttagaacaactttgttcagtaaaaattattcctggtttacagaggagaaaactgaggctcagaaaggctactcatttatttgaagtctcacagccttcataatgttattcatgcactctttatgccctagagagttggagaaattgcaggggagaatctcagaaataactaaaataattgaagatgtaatcaagaaacaaaagtacagtgtttgaatagaga

SEQ ID NO: 590559 - DNA, 553 bp, Homo sapiens
gacggttgtctctggacctgtgtcttggttatcatggagctggactgggcctggtgacagggccctgatggggttgtcctgggtggtcaggggggtgatgagaaaaatgcagaatggaattgctgtgaggatgaatgagacgactgtcagcacaraacaggcacccggtgagtgttcagagattaccctcagtagctgcccagaggccaaaaccacccacctgatagtgactgtccccaagccaggaggaagagaggagagcaggtcccactcacctgagtctgatcagtgagctgtgttgagatgtgtctgtcatctagaaaatggtccttcatgcagagctactcacagacactgctgtgtgtctctaacttctccacaacacagaggcgatggggactcaggaagagtgatattgtgggttgacaacccaccacaacgggagcttgcttgggtcaacagggctcagagtcagtgtcctctatcccttgaactgacgtgtatatacaatgtgtttgtgtacgcatgtgtgcctgtgtgtgtgtgcgcgtgt

SEQ ID NO: 590560 - DNA, 553 bp, Homo sapiens
gacggttgtctctggacctgtgtcttggttatcatggagctggactgggcctggtgacagggccctgatggggttgtcctgggtggtcaggggggtgatgagaaaaatgcagaatggaattgctgtgaggatgaatgagacgactgtcagcacaaaacaggcacccggtgagtgttcagagattaccctcagtagctgcccagaggccaaaaccacccacctgatagtgactgtccccaagccaggaggaagagaggagagcaggtcccactcacctgagtctgatcagtgagctgtgttgagatgtgtctgtcatctagaaaatggtccttcatgcagagctactcacagacactgctgtgtgtctctaacttctccacaacacagaggcgatggggactcaggaagagtgatattgtgggttgacaacccaccacaacgggagcytgcttgggtcaacagggctcagagtcagtgtcctctatcccttgaactgacgtgtatatacaatgtgtttgtgtacgcatgtgtgcctgtgtgtgtgtgcgcgtgt

SEQ ID NO: 590561 - DNA, 560 bp, Homo sapiens
agatggcatggtccacctcccaacagtcatatgctataacctaaaaaaacagacaggcagkcaatgtccatatagagtcaaagataccatgacaggtatacagcagggcactactggaacacatagaagggacatctacccacttttatgtcaatatcatgggctttctggtggaggagataacataggttgatacctgaaggacaagaaaaagcttcccagatagagggaagaggggaaggcaaagagccagaggtgaggaagagccctgcagagttccactccatccagtttggtgctagagcaaaggacagagtgcagtaagtggcgagagacaaggctgagtaacttgacgagaattactttgatatgggtgtttttatttcatggtgaaaaatttggaactttttcctggagacaagtgtaagccaatgacatagtaattgacaggagatttaaaatgtcacctgtcaagtgactgcttatgaagggttattgctcagctaagtatttctgaatgagtcttaggtctgttggccttcaatctctaccgaaaccct

SEQ ID NO: 590562 - DNA, 457 bp, Homo sapiens
catctctttttcactggctctacactttcttaagttttgccatcctcatggaactgtcagccagcacactgaaacgattctcagaaaacaaaagcatcatcaagttctcagggtttcggtagagattgaaggccaacagacctaagactcattcagaaatacttagctgagcaataacccttcataagcagtcacttgacaggtgacattttaaatctcctgtcaattactatgtcattggcttacacttgttctcaggaaaagttccaaatttttcaccatgaaatgaaaacacccatatcaaagtaattctcgtcaagttactcagccttgtctctcgccacttactgcactctgycctttgctctagcaccaaactggatggagtggaactctgcagggctcttcctcacctctggctctttgccttcccctcttccctctatctgggaagctt

SEQ ID NO: 590563 - DNA, 560 bp, Homo sapiens
agatggcatggtccacctcccaacagtcatatgctataacctaaaaaaacagacaggcagtcaatgtccatatagagtcaaagataccatgacaggtatacagcagggcactactggaacacatagaagggacatctacccacttttatgtcaatatcatgggctttctggtggaggagataacataggttgatacctgaaggacaagaaaaagcttcccagatagagggaagaggggaaggcaaagagccagaggtgaggaagagccctgcagagttccactccatccagtttggtgctagagcaaaggacagagtgcagtaagtggcgagagacaaggctgagtaacttgacgagaattactttgatatgggtgttttyatttcatggtgaaaaatttggaactttttcctggagacaagtgtaagccaatgacatagtaattgacaggagatttaaaatgtcacctgtcaagtgactgcttatgaagggttattgctcagctaagtatttctgaatgagtcttaggtctgttggccttcaatctctaccgaaaccct

SEQ ID NO: 590564 - DNA, 457 bp, Homo sapiens
aagcttcccagatagagggaagaggggaaggcaaagagccagaggtgaggaagagccctgcagagttccactccatccagtttggtgctagagcaaaggacagagtgcagtaagtggcgagagacaaggctgagtaacttgacgagaattactttgatatgggtgtttttatttcatggtgaaaaatttggaactttttcctggagacaagtgtaagccaatgacayagtaattgacaggagatttaaaatgtcacctgtcaagtgactgcttatgaagggttattgctcagctaagtatttctgaatgagtcttaggtctgttggccttcaatctctaccgaaaccctgagaacttgatgatgcttttgttttctgagaatcgtttcagtgtgctggctgacagttccatgaggatggcaaaacttaagaaagtgtagagccagtgaaaaagagat

SEQ ID NO: 590565 - DNA, 478 bp, Homo sapiens
ctgtattagttaacactatgggaacttcatgggaaatgaacactgcagctccaccataaatagaaactgtttaygtcaaaaaacacataaaagcatagttgcaagattacaattccttccagatatttcatttagtatctccacagatcactcactgcctgaatagcattcttgtgtctccactgcctcacattcgatttcaggtcattccatcaattgtcaaagacgtatccaacattaactttccaactactggtttggattctgtcaacattgtcatcctgggccacaacaacacaaaaggctaactcagtgaggtaacatagacactgatcagtgagattttgctgacgggtggtaccattttttactaagatcaagggtattcataccttcaggcatctagataacattgaatagggcaggttcatagataaaaagggaaagaggaagggtttttgcagtatacatgagctac

SEQ ID NO: 590566 - DNA, 478 bp, Homo sapiens
ctgtattagttaacactatgggaacttcatgggaaatgaacactgcagctccaccataaatagaaactgtttacgtcaaaaaacacataaaagcatagttgcaagattacaattccttccagatatttcatttagtatctccacagatcactcactgcctgaatagcattcttgtgtctccactgcctcacattygatttcaggtcattccatcaattgtcaaagacgtatccaacattaactttccaactactggtttggattctgtcaacattgtcatcctgggccacaacaacacaaaaggctaactcagtgaggtaacatagacactgatcagtgagattttgctgacgggtggtaccattttttactaagatcaagggtattcataccttcaggcatctagataacattgaatagggcaggttcatagataaaaagggaaagaggaagggtttttgcagtatacatgagctac

SEQ ID NO: 590567 - DNA, 478 bp, Homo sapiens
ctgtattagttaacactatgggaacttcatgggaaatgaacactgcagctccaccataaatagaaactgtttacgtcaaaaaacacataaaagcatagttgcaagattacaattccttccagatatttcatttagtatctccacagatcactcactgcctgaatagcattcttgtgtctccactgcctcacattcgatttcaggtcattccatcaattgtcaaagacgtatccaacattaactttccaactactggtttggattctgtcaacattgtcatcctgggccacaacaacacaaaaggctaactcagtgaggtaacatagacactgatcagtgagattttgctgaygggtggtaccattttttactaagatcaagggtattcataccttcaggcatctagataacattgaatagggcaggttcatagataaaaagggaaagaggaagggtttttgcagtatacatgagctac

SEQ ID NO: 590568 - DNA, 478 bp, Homo sapiens
ctgtattagttaacactatgggaacttcatgggaaatgaacactgcagctccaccataaatagaaactgtttacgtcaaaaaacacataaaagcatagttgcaagattacaattccttccagatatttcatttagtatctccacagatcactcactgcctgaatagcattcttgtgtctccactgcctcacattcgatttcaggtcattccatcaattgtcaaagacgtatccaacattaactttccaactactggtttggattctgtcaacattgtcatcctgggccacaacaacacaaaaggctaactcagtgaggtaacatagacactgatcagtgagattttgctgacgggtggtaccattttttactaagatcaagggtattcataccttcaggcatctagataacattgaawagggcaggttcatagataaaaagggaaagaggaagggtttttgcagtatacatgagctac

SEQ ID NO: 590569 - DNA, 541 bp, Homo sapiens
acttggggtggactccaaactttgataaattaaagaccctgcttattccttgagtaatgctacactgacaactgatttagtgaatgccactgtgaaaataataaacctcttggtgaatatatttagacatgtcttgtaacctgtacacatcttaaccagggatgttacttggtctttctatgttcaggagtgtgtggagatagaaaaacatacaggattgtaattgtttcctgtgagactaacagaaaattcaagctagtgaagwatgtttatgcatggcacacttctcaccagcaattttaggaagttctacccacaacccatatgtcttttgatatgtgggttaccttggagagagaaaaagaaactctgaacacaagcatgaaatactttcgaattttatctagagttggacttttccaaaagcttttgtataaacttgcttgatgagcaactgttgtccactggtaccttcactgtacaatccacacacaacaaaacttcacaactggacacctaaatttgcactttgtttggtaaa

SEQ ID NO: 590570 - DNA, 595 bp, Homo sapiens
tggcacacttctcaccagcaattttaggaagttctacccacaacccatatgtcttttgatatgtgggttaccttggagagagaaaaagaaactctgaacacaagcatgaaatactttmgaattttatctagagttggacttttccaaaagcttttgtataaacttgcttgatgagcaactgttgtccactggtaccttcactgtacaatccacacacaacaaaacttcacaactggacacctaaatttgcactttgtttggtaaagttgaatgaaaaatgttgtcttttaagcttatgctctcttatgaaagctgttattagattaattttactccaagatatgccagttaagaaataacttccaatttaatttcaccagctccctgtgagtggactaattactcacacatcacacttactctggtggtgaaatgcctcaaaagaaggtctccagagtgttgctctacctagaaggacaagaatgaagagacataaaaatcattcattaagaaggaagaagattttccttgcctagattttcacttgtaggatccaattaattttatcacttaatattttgtcctggtgggcatt

SEQ ID NO: 590571 - DNA, 595 bp, Homo sapiens
tggcacacttctcaccagcaattttaggaagttctacccacaacccatatgtcttttgatatgtgggttaccttggagagagaaaaagaaactctgaacacaagcatgaaatactttcgaattttatctagagttggacttktccaaaagcttttgtataaacttgcttgatgagcaactgttgtccactggtaccttcactgtacaatccacacacaacaaaacttcacaactggacacctaaatttgcactttgtttggtaaagttgaatgaaaaatgttgtcttttaagcttatgctctcttatgaaagctgttattagattaattttactccaagatatgccagttaagaaataacttccaatttaatttcaccagctccctgtgagtggactaattactcacacatcacacttactctggtggtgaaatgcctcaaaagaaggtctccagagtgttgctctacctagaaggacaagaatgaagagacataaaaatcattcattaagaaggaagaagattttccttgcctagattttcacttgtaggatccaattaattttatcacttaatattttgtcctggtgggcatt

SEQ ID NO: 590572 - DNA, 595 bp, Homo sapiens
tggcacacttctcaccagcaattttaggaagttctacccacaacccatatgtcttttgatatgtgggttaccttggagagagaaaaagaaactctgaacacaagcatgaaatactttcgaattttatctagagttggacttttccaaaagcttttgtataaacttgcttgatgagcaactgttgtccactggtaccttcactgtacaatccacacacaacaaaacttcacaactggacacctaaatttgcactttgtttggtaaagttgaatgaaaaatgttgtcttttaagcttatgctctcttatgraagctgttattagattaattttactccaagatatgccagttaagaaataacttccaatttaatttcaccagctccctgtgagtggactaattactcacacatcacacttactctggtggtgaaatgcctcaaaagaaggtctccagagtgttgctctacctagaaggacaagaatgaagagacataaaaatcattcattaagaaggaagaagattttccttgcctagattttcacttgtaggatccaattaattttatcacttaatattttgtcctggtgggcatt

SEQ ID NO: 590573 - DNA, 613 bp, Homo sapiens
agaagattttccttgcctagattttcacttgtaggatccaattaattttatcacttaatattttgtcctrgtgggcattcactttacaaatttgtaaggtcagtagaaatggaaacttttggaaatcgaactgtaaatgttctgtagacattgacagaaatagctatttggagctgtgcttttgccaactagacactctgagaaaatctgtgagaggatattttcaggaagtcattgaaccccctaaaaatcaagtttattgcttttaccataaatataaataattaatttattatcaaccactttcaatattccaataagtaacctttattgtttatttcattgacatgatctacatagacacacaatttatcttcttttacgatacattcagaaaattgctgcctggaaaagccatgttttaaaattaccacctgtttgatgacttgtttttgtactttaagttttagggcatatgtgcacaacctacagtttagttacatatgtatacatgtgccatgttggtgtgctgcacccattaactcgtcatttagcattaggtatatgtcttaatgctatccctcccccctcccccaccccacaacaggccctg

SEQ ID NO: 590574 - DNA, 345 bp, Homo sapiens
tcacttgtaggatccaattaattttatcacttaatattttgtcctggtgggcattcactttacaaatttgtaaggtcagtagaaatggaaacttttggaaatcraactgtaaatgttctgtagacattgacagaaatagctatttggagctgtgcttttgccaactagacactctgagaaaatctgtgagaggatattttcaggaagtcattgaaccccctaaaaatcaagtttattgcttttaccataaatataaataattaatttattatcaaccactttcaatattccaataagtaacctttattgtttatttcattgacatgatctacatagacacacaat

SEQ ID NO: 590575 - DNA, 613 bp, Homo sapiens
agaagattttccttgcctagattttcacttgtaggatccaattaattttatcacttaatattttgtcctggtgggcattcactttacaaatttgtaaggtcagtagaaatggaaacttttggaaatcgaactgtaaatgttctgtagacrttgacagaaatagctatttggagctgtgcttttgccaactagacactctgagaaaatctgtgagaggatattttcaggaagtcattgaaccccctaaaaatcaagtttattgcttttaccataaatataaataattaatttattatcaaccactttcaatattccaataagtaacctttattgtttatttcattgacatgatctacatagacacacaatttatcttcttttacgatacattcagaaaattgctgcctggaaaagccatgttttaaaattaccacctgtttgatgacttgtttttgtactttaagttttagggcatatgtgcacaacctacagtttagttacatatgtatacatgtgccatgttggtgtgctgcacccattaactcgtcatttagcattaggtatatgtcttaatgctatccctcccccctcccccaccccacaacaggccctg

SEQ ID NO: 590576 - DNA, 345 bp, Homo sapiens
tcacttgtaggatccaattaattttatcacttaatattttgtcctggtgggcattcactttacaaatttgtaaggtcagtagaaatggaaacttttggaaatcgaactgtaaatgttctgtagacattgacagaaatagctatttggagctgtgcttttgccaactagacactctgagaaaatctgtgagaggatattttcaggaagtcattgaaccccctaaaaatcaagtttattgcttttaccataaatataaataattwatttattatcaaccactttcaatattccaataagtaacctttattgtttatttcattgacatgatctacatagacacacaat

SEQ ID NO: 590577 - DNA, 613 bp, Homo sapiens
agaagattttccttgcctagattttcacttgtaggatccaattaattttatcacttaatattttgtcctggtgggcattcactttacaaatttgtaaggtcagtagaaatggaaacttttggaaatcgaactgtaaatgttctgtagacattgacagaaatagctatttggagctgtgcttttgccaactagacactctgagaaaatctgtgagaggatattttcaggaagtcattgaaccccctaaaaatcaagtttattgcttttaccataaatataaataattaatttattatcaaccactttcaatattccawtaagtaacctttattgtttatttcattgacatgatctacatagacacacaatttatcttcttttacgatacattcagaaaattgctgcctggaaaagccatgttttaaaattaccacctgtttgatgacttgtttttgtactttaagttttagggcatatgtgcacaacctacagtttagttacatatgtatacatgtgccatgttggtgtgctgcacccattaactcgtcatttagcattaggtatatgtcttaatgctatccctcccccctcccccaccccacaacaggccctg

SEQ ID NO: 590578 - DNA, 613 bp, Homo sapiens
agaagattttccttgcctagattttcacttgtaggatccaattaattttatcacttaatattttgtcctggtgggcattcactttacaaatttgtaaggtcagtagaaatggaaacttttggaaatcgaactgtaaatgttctgtagacattgacagaaatagctatttggagctgtgcttttgccaactagacactctgagaaaatctgtgagaggatattttcaggaagtcattgaaccccctaaaaatcaagtttattgcttttaccataaatataaataattaatttattatcaaccactttcaatattccaataagtaacctttattgtttatttcattgacatgatctacatagacacacaatttatcttcttttrcgatacattcagaaaattgctgcctggaaaagccatgttttaaaattaccacctgtttgatgacttgtttttgtactttaagttttagggcatatgtgcacaacctacagtttagttacatatgtatacatgtgccatgttggtgtgctgcacccattaactcgtcatttagcattaggtatatgtcttaatgctatccctcccccctcccccaccccacaacaggccctg

SEQ ID NO: 590579 - DNA, 396 bp, Homo sapiens
tagtttcctgtgaacctgctaattaatatgacttttgcagacatttccttaacctaaacagtttgggtttcctgtatatagactgcatgtattctcatctttaacctttccataatcttccctaattacagrtgtcattggttcttaatagcaaaagaacagcagtagcttataaagttatattatttgttttttactaatatgtgaagtgattttgtctttcatttcacctctagagctaattatgtcttctaggttaacaaaatttccagatcataccatcattagtttaaactttacaatgaaatcattatttccatttattactagcctgaattatagcaatatttagctaatgaattctcaaaatatttcttgaaaggtgaaagagtacct

SEQ ID NO: 590580 - DNA, 391 bp, Homo sapiens
ctctttcacctttcaagaaatattttgagaattcattagctaaatattgctataatgcaggctagtaataaacggaaagaatgaattcattgtaaagtttaaactaatgatggtatgatctggaatttttgttaacttagaagacataattagctttagaggtgaaatgaaagacaaaatcacttcacatattagtaaaaaacaaataatataactttataagctactgctgttcttttgctattaagaaccaatgacatctgtaattagggaagattatggaaagrttaaagatgagaatacatgcagtctatctacaggaaacctaaactgtttaggttaaggaaatgtttgagaaagtcatattaattagcaggttcacaggaaacta

SEQ ID NO: 590581 - DNA, 391 bp, Homo sapiens
ctctttcacctttcaagaaatattttgagaattcattagctaaatattgctataatgcaggctagtaataaacggaaagaatgaattcattgtaaagtttaaactaatgatggtatgatctggaatttttgttaacttagaagacataattagctttagaggtgaaatgaaagacaaaatcacttcacatattagtaaaaaacaaataatataactttataagctactgctgttcttttgctattaagaaccaatgacatctgtaattagggaagattatggaaagattaaagatgagaatacatgcagtctatctacaggaaacctaaactgtttaggttaaggaaatgtttgmgaaagtcatattaattagcaggttcacaggaaacta

SEQ ID NO: 590582 - DNA, 494 bp, Homo sapiens
taaaataagctattgcaagcatattcaaggatttaaggaatagatggtcataagagggaatatatggagaatctcaacagagaagtaaaaacgataaagagataayaggacaaattttagaactgagagactgaatatcttatataaaaatgtcattgtatgcacataccagtaaattaaagatggcagaaaaaactatcagtgcacttaaaaacagatcaagaacaatttcccaatacagttaatacaaaggaagaaaaataataaaaatagggccagtctagcactaatataattggactcctagaaagagtagagaagaaaatgagacagaaaaagctatttgaaaaagtaaagaccaaaagttttcctaattgtcagcatatatcaatttacaggcttaagaaactcaaagagcaaaataaaaataaagagaaccaaatgtagacataccatagtcaaaccactgggcaaaaaaagagtaaatcttgaaa

SEQ ID NO: 590583 - DNA, 494 bp, Homo sapiens
taaaataagctattgcaagcatattcaaggatttaaggaatagatggtcataagagggaatatatggagaatctcaacagagaagtaaaaacgataaagagataacaggacaaattttagaactgagagacwgaatatcttatataaaaatgtcattgtatgcacataccagtaaattaaagatggcagaaaaaactatcagtgcacttaaaaacagatcaagaacaatttcccaatacagttaatacaaaggaagaaaaataataaaaatagggccagtctagcactaatataattggactcctagaaagagtagagaagaaaatgagacagaaaaagctatttgaaaaagtaaagaccaaaagttttcctaattgtcagcatatatcaatttacaggcttaagaaactcaaagagcaaaataaaaataaagagaaccaaatgtagacataccatagtcaaaccactgggcaaaaaaagagtaaatcttgaaa

SEQ ID NO: 590584 - DNA, 494 bp, Homo sapiens
taaaataagctattgcaagcatattcaaggatttaaggaatagatggtcataagagggaatatatggagaatctcaacagagaagtaaaaacgataaagagataacaggacaaattttagaactgagagactgaatatcttatataaaaatgtcattgtatgcacataccagtaaattaaagatggcagaaaaaactatcagtgcacttaaaaacagatcaagaacaatttcccaatacagttaatamaaaggaagaaaaataataaaaatagggccagtctagcactaatataattggactcctagaaagagtagagaagaaaatgagacagaaaaagctatttgaaaaagtaaagaccaaaagttttcctaattgtcagcatatatcaatttacaggcttaagaaactcaaagagcaaaataaaaataaagagaaccaaatgtagacataccatagtcaaaccactgggcaaaaaaagagtaaatcttgaaa

SEQ ID NO: 590585 - DNA, 494 bp, Homo sapiens
taaaataagctattgcaagcatattcaaggatttaaggaatagatggtcataagagggaatatatggagaatctcaacagagaagtaaaaacgataaagagataacaggacaaattttagaactgagagactgaatatcttatataaaaatgtcattgtatgcacataccagtaaattaaagatggcagaaaaaactatcagtgcacttaaaaacagatcaagaacaatttcccaatacagttaatacaaaggaagaaaaataataaaaatagggccagtctagcactaatataattggactcctagaaagagtrgagaagaaaatgagacagaaaaagctatttgaaaaagtaaagaccaaaagttttcctaattgtcagcatatatcaatttacaggcttaagaaactcaaagagcaaaataaaaataaagagaaccaaatgtagacataccatagtcaaaccactgggcaaaaaaagagtaaatcttgaaa

SEQ ID NO: 590586 - DNA, 252 bp, Homo sapiens
gctgctggtgtcgcaaccacaacgtgggaaccacagaaccactggttggttttcagtgtttcagtgcatacaattcctaatatatctggccaagaaaacttggaagttcttagattgtcccaaaggtggcgcatgaaatcaaagcaggagaatagtttcctacgaggtgtagcctgggaaagttgggggtgactgatggaaaggaggagtraagctccgccctttccgctgctaggctgcgcccgaggctat

SEQ ID NO: 590587 - DNA, 595 bp, Homo sapiens
atgtttccccttaaatgggatttttgttattgctacctagccaacctgctatacagatagctaaaaaagtagaagcaggctcaatagtgggtagcaaacaaagattggaagggcttggagggattagagtactagagggagtgggagggagtgatttaatcatggatgggtgggggtgtatgtggaagggaaaaaggggtgggtagggtgggagggagtagactggctgtatggtggtgggaaggtggtgggtagtaggaagggggagtagcctgctgcagaggcagagcctcatggaaaatgcctactggggaagtgcacctgtggctttgcaggtctgagcccccatggctgctctcatagattggactagtgttgagtgyctgtagcttttccacacggagggtgcaagctgttggtgggtctatgtatctggggtctggagggtggtagcatgggggctccaagtccatattttccttctgcactgccctagtagaggtttcccaagaactcttcgtctgcaggaggctactgcgtggaaacagtaggaggtgggtgtgggaagcagatccttcaccaatggttaggcaac

SEQ ID NO: 590588 - DNA, 595 bp, Homo sapiens
atgtttccccttaaatgggatttttgttattgctacctagccaacctgctatacagatagctaaaaaagtagaagcaggctcaatagtgggtagcaaacaaagattggaagggcttggagggattagagtactagagggagtgggagggagtgatttaatcatggatgggtgggggtgtatgtggaagggaaaaaggggtgggtagggtgggagggagtagactggctgtatggtggtgggaaggtggtgggtagtaggaagggggagtagcctgctgcagaggcagagcctcatggaaaatgcctactggggaagtgcacctgtggctttgcaggtctgagcccccatggctgctctcatagattggactagtgttgagtgtctgtagcttttccacacggagggtgcaagctgttggtgggtctatgtatctggggtctggagggtggtagcatgggggctccaagtccatattttccttctgcactgccctagtagaggtttcccaagaactcttcgtctgcaggaggctactgcgtggaaacagtaggaggtgggtgtgggargcagatccttcaccaatggttaggcaac

SEQ ID NO: 590589 - DNA, 594 bp, Homo sapiens
taatcaactaaatgtgctttccctctgataggtcacagagcagcctggcaatagggattagcattgtcaaaactaataactgcaacactatatcctaagcagccaaatctgcaatcatctttttcagagactcctgtaaccaagctataaaatgcacatatggttctcttggtccctgttttatagcactaaatgaagggtattgttctccatatgaagtgattttttccaagctctaatgcacactcctctaagctgttctatggcatcawcctgcttgactacttgtgcatgtaaaccagcccagccaccaacccccaaaagttggtctgcagttatattaatttgaggttgggcccaggcattgagagcagcctgaatggaagcttcatctgcccactaagttttaaattgtaagaactgagcaggagttagacaagctagagtaagagtgtcccagtcagtaggaatcatccgactggaaacagcaacattctttaacagtcccatttcaaaaggagaacctggtccatactgatttatagcttgtttaattttttgagtaatttaaaaggaaaaggctcaaatgtagct

SEQ ID NO: 590590 - DNA, 594 bp, Homo sapiens
taatcaactaaatgtgctttccctctgataggtcacagagcagcctggcaatagggattagcattgtcaaaactaataactgcaacactatatcctaagcagccaaatctgcaatcatctttttcagagactcctgtaaccaagctataaaatgcacatatggttctcttggtccctgttttatagcactaaatgaagggtattgttctccatatgaagtgattttttccaagctctaatgcacactcctctaagctgttctatggcatcaacctgcttgacyacttgtgcatgtaaaccagcccagccaccaacccccaaaagttggtctgcagttatattaatttgaggttgggcccaggcattgagagcagcctgaatggaagcttcatctgcccactaagttttaaattgtaagaactgagcaggagttagacaagctagagtaagagtgtcccagtcagtaggaatcatccgactggaaacagcaacattctttaacagtcccatttcaaaaggagaacctggtccatactgatttatagcttgtttaattttttgagtaatttaaaaggaaaaggctcaaatgtagct

SEQ ID NO: 590591 - DNA, 331 bp, Homo sapiens
atcatggctcactgcagcctcaacctcccaggctcaggtgatyctccaccttagtctcccaagtagccaggactatgagcacgtgctaccacacctagctagcttttgtatttttagtagagatggggttttgccattttgcccaggctggacttgaactcctgggctcaagtgatccacccaccgtggcctcccaaagggctggaattacagacaagagccgctgcacacagccacatgtcatttttaaataacattcatttaattagcatgacaaccaaaagacatcaaaagcaacatagaaggttacatggaagtgaaaactgaaaac

SEQ ID NO: 590592 - DNA, 331 bp, Homo sapiens
atcatggctcactgcagcctcaacctcccaggctcaggtgattctccaccttagtctcccaagtagccaggactatgagcacktgctaccacacctagctagcttttgtatttttagtagagatggggttttgccattttgcccaggctggacttgaactcctgggctcaagtgatccacccaccgtggcctcccaaagggctggaattacagacaagagccgctgcacacagccacatgtcatttttaaataacattcatttaattagcatgacaaccaaaagacatcaaaagcaacatagaaggttacatggaagtgaaaactgaaaac

SEQ ID NO: 590593 - DNA, 335 bp, Homo sapiens
atgacaacatcttccattactgcttgattctctaatcaaccccagttagggccaactcatattaactgatcaaagaaaacaggcacaggtggctgcaggtgtgtgttttcttttgcctgagtttgagttcaycagcctaccaagttttaaactgcaagtactgagatggagtgagaacaggttttgtcaaagtatcctaattatatggtattaatctattatcaagagccatatttttaataaagattgcgcaaaaagagagttcagtccatattgactaatggcttgcttaaattctttagtaacttaaaagaaaaagcaggctaattagctat

SEQ ID NO: 590594 - DNA, 335 bp, Homo sapiens
atgacaacatcttccattactgcttgattctctaatcaaccccagttagggccaactcatattaactgatcaaagaaaacaggcacaggtggctgcaggtgtgtgttttcttttgcctgagtttgagttcaccagcctaccaagttttaaactgcaagtactgagatggagtgagaacaggttttgtcaaagtatcctaattatatggtattaatctattatcaagagccatatttttaakaaagattgcgcaaaaagagagttcagtccatattgactaatggcttgcttaaattctttagtaacttaaaagaaaaagcaggctaattagctat

SEQ ID NO: 590595 - DNA, 335 bp, Homo sapiens
atgacaacatcttccattactgcttgattctctaatcaaccccagttagggccaactcatattaactgatcaaagaaaacaggcacaggtggctgcaggtgtgtgttttcttttgcctgagtttgagttcaccagcctaccaagttttaaactgcaagtactgagatggagtgagaacaggttttgtcaaagtatcctaattatatggtattaatctattatcaagagccatatttttaataaagattgcrcaaaaagagagttcagtccatattgactaatggcttgcttaaattctttagtaacttaaaagaaaaagcaggctaattagctat

SEQ ID NO: 590596 - DNA, 331 bp, Homo sapiens
atcatggctcactgcagcctcaacctcccaggctcaggtgattctccaccttagtctcccaagtagccaggactatgagcacgtgctaccacacctagctagcttttgtatttttagtagagatggggttttgccattttgcccaggctggacttgaactcctgggctcaagtgatccacccaccgtggcctcccaaagggctggaattacagacawgagccgctgcacacagccacatgtcatttttaaataacattcatttaattagcatgacaaccaaaagacatcaaaagcaacatagaaggttacatggaagtgaaaactgaaaac

SEQ ID NO: 590597 - DNA, 525 bp, Homo sapiens
caaggtctcccttggctttagctttttgaatagaattttgtctagcaccaccaattgctccaggttttaatgttgtaactacaggagcagtaagtttttcagctaatttattttctcacccatttaggggagagagaggaggtggccattcacttaattcagcaggtggagccaacgggctagtaaaacatactttttaaagtttttctttcttttctttaatctcctccggtagctgctcctcacacagaatttgaagttagttttttacactcatcctcctcttcctcatctgaatctgcctcatcatctgtttgaaatggctcaagggctgcctttattagtgcccacactgaccatatataaactggaatttctgctccatctttatatgcctwtcaaaaatctcttccaattctctcccattcatccaacttcatagtccctttgctctggaaaccatgggcaaaactgctttactgtactaaagagtgataacaaattctaagtactaaatttcactcc

SEQ ID NO: 590598 - DNA, 525 bp, Homo sapiens
caaggtctcccttggctttagctttttgaatagaattttgtctagcaccaccaattgctccaggttttaatgttgtaactacaggagcagtaagtttttcagctaatttattttctcacccatttaggggagagagaggaggtggccattcacttaattcagcaggtggagccaacgggctagtaaaacatactttttaaagtttttctttcttttctttaatctcctccggtagctgctcctcacacagaatttgaagttagttttttacactcatcctcctcttcctcatctgaatctgcctcatcatctgtttgaaatggctcaagggctgcctttattagtgcccacactgaccatatataaactggaatttctgctccatctttatatgcctttyaaaaatctcttccaattctctcccattcatccaacttcatagtccctttgctctggaaaccatgggcaaaactgctttactgtactaaagagtgataacaaattctaagtactaaatttcactcc

SEQ ID NO: 590599 - DNA, 331 bp, Homo sapiens
atcatggctcactgcagcctcaacctcccaggctcaggtgattctccaccttagtctcccaagtagccaggactatgagcacgtgctaccacacctagctagcttttgtatttttagtagagatggggttttgccattttgcccaggctggacttgaactcctgggctcaagtgatccacccaccgtggcctcccaaagggctggaattacagacaagagccgctgcacacagccacatgtcatttttaaataacattcatttaattagcawgacaaccaaaagacatcaaaagcaacatagaaggttacatggaagtgaaaactgaaaac

SEQ ID NO: 590600 - DNA, 514 bp, Homo sapiens
gctctggaaaccatgggcaaaactgctttactgtactaaagagtgataacaaattctaagtactaaatttcactccccatctttgtatgtcctcggktgtcttttgatgatgtgtcctctgctttcatatgctctagccttccttcaccgggtctttgtcaccccatgttgggcaccaggaatgttggggtgatcagacccaacactaggtcatgggggtgatgaagtccggcagagtcaaaggaatgagaaaaagacagtttgagagagaaagtgggaccaggagaccatcacgagtgtggagtctgcaaagtccccaagctctgggagcccacgctatttgttggtgctcaaacaaagaaacaggtggtgaggatgtgggggttaaaaggaaatggtgtatcaagtgaatgagaaacatatggccctgcctcagcttctcttccaacactcagcttttctcccaacacattccccttatgaacaggaataaaatagggatgcctgttctccc

SEQ ID NO: 590601 - DNA, 514 bp, Homo sapiens
gctctggaaaccatgggcaaaactgctttactgtactaaagagtgataacaaattctaagtactaaatttcactccccatctttgtatgtcctcgggtgtcttttgatgatgtgtcctctgctttcatatgctctagccttccttcaccgggtctttgtcaccccatgttgggcrccaggaatgttggggtgatcagacccaacactaggtcatgggggtgatgaagtccggcagagtcaaaggaatgagaaaaagacagtttgagagagaaagtgggaccaggagaccatcacgagtgtggagtctgcaaagtccccaagctctgggagcccacgctatttgttggtgctcaaacaaagaaacaggtggtgaggatgtgggggttaaaaggaaatggtgtatcaagtgaatgagaaacatatggccctgcctcagcttctcttccaacactcagcttttctcccaacacattccccttatgaacaggaataaaatagggatgcctgttctccc

SEQ ID NO: 590602 - DNA, 547 bp, Homo sapiens
tctgtgaatacacagagatataattataactgttaccagcatgtagagtaaagatgagaaggcattggtcatggtggcagctacctcaggagttacaaagcagacgtggttccaggacagtatatgtcagggcaaagctgtcctcggaggctattaggagctgcttatggctcagacattgtaagccagatggtctcattactttcaatgacaaaaccaaaattacttttgcatcagccaatacaacggcctggcaagagcacagaaaaacgccctgtgctgatgcagcacaattccttcattcccttctccraaaccccctcttccaattccactgaagagagaatctgatggaagtcctgtgtaagcaggctcagatatatctaccactatagatagtagaggtgattcacaaatccaagcctatcaaatacatcataaataagttacacgtttaattttttttgaaattagggatcatgatatgaaagttatcagaaacaaaactgtcactaatgtttaaaaagagaagaaaaaacctgaacaa

SEQ ID NO: 590603 - DNA, 547 bp, Homo sapiens
tctgtgaatacacagagatataattataactgttaccagcatgtagagtaaagatgagaaggcattggtcatggtggcagctacctcaggagttacaaagcagacgtggttccaggacagtatatgtcagggcaaagctgtcctcggaggctattaggagctgcttatggctcagacattgtaagccagatggtctcattactttcaatgacaaaaccaaaattacttttgcatcagccaatacaacggcctggcaagagcacagaaaaacgccctgtgctgatgcagcacaattccttcattcccttctccaaaaccccctcttccaattccactgaagagagaatctgatggaagtsctgtgtaagcaggctcagatatatctaccactatagatagtagaggtgattcacaaatccaagcctatcaaatacatcataaataagttacacgtttaattttttttgaaattagggatcatgatatgaaagttatcagaaacaaaactgtcactaatgtttaaaaagagaagaaaaaacctgaacaa

SEQ ID NO: 590604 - DNA, 547 bp, Homo sapiens
tctgtgaatacacagagatataattataactgttaccagcatgtagagtaaagatgagaaggcattggtcatggtggcagctacctcaggagttacaaagcagacgtggttccaggacagtatatgtcagggcaaagctgtcctcggaggctattaggagctgcttatggctcagacattgtaagccagatggtctcattactttcaatgacaaaaccaaaattacttttgcatcagccaatacaacggcctggcaagagcacagaaaaacgccctgtgctgatgcagcacaattccttcattcccttctccaaaaccccctcttccaattccactgaagagagaatctgatggaagtcctgtgtaagcaggctcagatatatctaccactatagayagtagaggtgattcacaaatccaagcctatcaaatacatcataaataagttacacgtttaattttttttgaaattagggatcatgatatgaaagttatcagaaacaaaactgtcactaatgtttaaaaagagaagaaaaaacctgaacaa

SEQ ID NO: 590605 - DNA, 547 bp, Homo sapiens
tctgtgaatacacagagatataattataactgttaccagcatgtagagtaaagatgagaaggcattggtcatggtggcagctacctcaggagttacaaagcagacgtggttccaggacagtatatgtcagggcaaagctgtcctcggaggctattaggagctgcttatggctcagacattgtaagccagatggtctcattactttcaatgacaaaaccaaaattacttttgcatcagccaatacaacggcctggcaagagcacagaaaaacgccctgtgctgatgcagcacaattccttcattcccttctccaaaaccccctcttccaattccactgaagagagaatctgatggaagtcctgtgtaagcaggctcagatatatctaccactatagatagtagaggtgattcacaaatccaagcctatcaaatacatcataaataagttacacgtttaattttttttgaaattagggatcatgatatgaaagttatcagaawcaaaactgtcactaatgtttaaaaagagaagaaaaaacctgaacaa

SEQ ID NO: 590606 - DNA, 527 bp, Homo sapiens
tttttgaaattagggatcatgatatgaaagttatcagaaacaaaactgtcactaatgtttaaaaagagaagaaaaaacctgaacaaatagattcagagaaggccttgaagagagggttctcatgcttctaggcctgataaaaactattacaaaataccacaaaaaccacaaccttgcacaaaggccatagcaaccttacacaaaatacacttctgtgaggacatctatccagcaactgcctgcccaaacttcaactgayattgaccttgttgttgatctttatattcaaaggtaactatatcaaaacaattatagaagcctcttcacttttcccttatttatttttttctactcccccatacttccaggttgatcatttttcttttaaagaccttctcttcctttaccatttgaatctatatagtttgctttgtcatgcatattcccattgcagtgccctcctccctaagatgtgtctttttcctttagagagcctttctctgtttgttatttaggtttacaatgag

SEQ ID NO: 590607 - DNA, 527 bp, Homo sapiens
tttttgaaattagggatcatgatatgaaagttatcagaaacaaaactgtcactaatgtttaaaaagagaagaaaaaacctgaacaaatagattcagagaaggccttgaagagagggttctcatgcttctaggcctgataaaaactattacaaaataccacaaaaaccacaaccttgcacaaaggccatagcaaccttacacaaaatacacttctgtgaggacatctatccagcaactgcctgcccaaacttcaactgacattgaccttgttgttgatctttataktcaaaggtaactatatcaaaacaattatagaagcctcttcacttttcccttatttatttttttctactcccccatacttccaggttgatcatttttcttttaaagaccttctcttcctttaccatttgaatctatatagtttgctttgtcatgcatattcccattgcagtgccctcctccctaagatgtgtctttttcctttagagagcctttctctgtttgttatttaggtttacaatgag

SEQ ID NO: 590608 - DNA, 527 bp, Homo sapiens
tttttgaaattagggatcatgatatgaaagttatcagaaacaaaactgtcactaatgtttaaaaagagaagaaaaaacctgaacaaatagattcagagaaggccttgaagagagggttctcatgcttctaggcctgataaaaactattacaaaataccacaaaaaccacaaccttgcacaaaggccatagcaaccttacacaaaatacacttctgtgaggacatctatccagcaactgcctgcccaaacttcaactgacattgaccttgttgttgatctttatattcaaaggtaactatatcaaaacaattatagaagcctcttcacttttcccttatttatttttttctactcccccatacttccaggttgatcatttttcttttaaagaccttstcttcctttaccatttgaatctatatagtttgctttgtcatgcatattcccattgcagtgccctcctccctaagatgtgtctttttcctttagagagcctttctctgtttgttatttaggtttacaatgag

SEQ ID NO: 590609 - DNA, 643 bp, Homo sapiens
atatactaagaaattatcacatttaatgaaatgctttaatcaaattcctgattgaatttttgatatcaatatctttttcattgtttaatccatctttagggtgaacagggctttataggccaaagttatsacttctgtctaaattgtctgagttacagaactttttgaatttattatgttgtcacaggaagtttcttattgctgtttaaaggagtgtctctcaatatgaggcagaatgcaaacgcactgaagggcatataccttgagattctgttactgaagccaaaggttgccaatttcttgtagatcctgctagagttaaacttcatttaagtaatcattaaaagctgcatttattccctcacttgaaattttgatttcacactattaggactaatcctctaagtctttgctaagttatgttcctctttttcttgtagcttgactttgatgatctctatatgcaacttcaattgacataaattaaagtacattcagggcaagagagtttacttaaatattattttgttattcaaaataatcacaaaagcactcatcgtaggaaaacttgtgaggactcaaatatagggaaatactttttctttctaaggcataattctgtaaaaaaattcaccttaatttg

SEQ ID NO: 590610 - DNA, 643 bp, Homo sapiens
atatactaagaaattatcacatttaatgaaatgctttaatcaaattcctgattgaatttttgatatcaatatctttttcattgtttaatccatctttagggtgaacagggctttataggccaaagttatcacttctgtctaaattgtctgagttacagaactttttgaatttattatgttgtcacaggaagtttcttattgctgtttaaaggagtgtctctcaatatgaggcagaatgcaaacgcactgaagggcatataccttgagattctgttactgaagccaaakgttgccaatttcttgtagatcctgctagagttaaacttcatttaagtaatcattaaaagctgcatttattccctcacttgaaattttgatttcacactattaggactaatcctctaagtctttgctaagttatgttcctctttttcttgtagcttgactttgatgatctctatatgcaacttcaattgacataaattaaagtacattcagggcaagagagtttacttaaatattattttgttattcaaaataatcacaaaagcactcatcgtaggaaaacttgtgaggactcaaatatagggaaatactttttctttctaaggcataattctgtaaaaaaattcaccttaatttg

SEQ ID NO: 590611 - DNA, 643 bp, Homo sapiens
atatactaagaaattatcacatttaatgaaatgctttaatcaaattcctgattgaatttttgatatcaatatctttttcattgtttaatccatctttagggtgaacagggctttataggccaaagttatcacttctgtctaaattgtctgagttacagaactttttgaatttattatgttgtcacaggaagtttcttattgctgtttaaaggagtgtctctcaatatgaggcagaatgcaaacgcactgaagggcatataccttgagattctgttactgaagccaaaggttgccaatttcttgtagatcctgctagagttaaacttcatttaagtaatcattaaaagctgmatttattccctcacttgaaattttgatttcacactattaggactaatcctctaagtctttgctaagttatgttcctctttttcttgtagcttgactttgatgatctctatatgcaacttcaattgacataaattaaagtacattcagggcaagagagtttacttaaatattattttgttattcaaaataatcacaaaagcactcatcgtaggaaaacttgtgaggactcaaatatagggaaatactttttctttctaaggcataattctgtaaaaaaattcaccttaatttg

SEQ ID NO: 590612 - DNA, 643 bp, Homo sapiens
atatactaagaaattatcacatttaatgaaatgctttaatcaaattcctgattgaatttttgatatcaatatctttttcattgtttaatccatctttagggtgaacagggctttataggccaaagttatcacttctgtctaaattgtctgagttacagaactttttgaatttattatgttgtcacaggaagtttcttattgctgtttaaaggagtgtctctcaatatgaggcagaatgcaaacgcactgaagggcatataccttgagattctgttactgaagccaaaggttgccaatttcttgtagatcctgctagagttaaacttcatttaagtaatcattaaaagctgcatttattccctcacttgaaattttgatttcacactattaggactaatcctctaagtctttgctaagttatgttcctctttttcttgtagcttgactttgatgatctctatatgcaacttcaattgacataaattaaagtacattcagggcaagagagtttmcttaaatattattttgttattcaaaataatcacaaaagcactcatcgtaggaaaacttgtgaggactcaaatatagggaaatactttttctttctaaggcataattctgtaaaaaaattcaccttaatttg

SEQ ID NO: 590613 - DNA, 493 bp, Homo sapiens
aagctgcactgagattcagacaatggcatgtatcacgcttgctctagcagatcattgatctttgtgggacygcttgtaaaccacacatgctgaggaggcaacatcaagtatgaggtgactcttgaaccgtttgtactagtgattatcttttccccatgtctttctgtctctttacttacactgttattggagctataccgtcttcactggtaatttccactcttaaatccaaatatagtgggtgactaattaataattatgggctgagtaaataataaatgagtcattttctatcctttagggatcatatgcttctaagagcaacatctgattgtattttatcatcgatatcattcaaaatctaatacgtcttctgtgtcctcaagttttctcatccttaatgcctccatttttgcgttttccatttacttattcaaccaatatttgagggcctactatgtgtggtagggacacagtttgaacaggcaggtct

SEQ ID NO: 590614 - DNA, 493 bp, Homo sapiens
aagctgcactgagattcagacaatggcatgtatcacgcttgctctagcagatcattgatctttgtgggaccgcttgtaaaccacacatgctgaggaggcaacatcaagtatgaggtgactcttgaaccgtttgtactagtgattatcttttccccatgtctttctgtctctttacttacactgttattggagctataccktcttcactggtaatttccactcttaaatccaaatatagtgggtgactaattaataattatgggctgagtaaataataaatgagtcattttctatcctttagggatcatatgcttctaagagcaacatctgattgtattttatcatcgatatcattcaaaatctaatacgtcttctgtgtcctcaagttttctcatccttaatgcctccatttttgcgttttccatttacttattcaaccaatatttgagggcctactatgtgtggtagggacacagtttgaacaggcaggtct

SEQ ID NO: 590615 - DNA, 493 bp, Homo sapiens
aagctgcactgagattcagacaatggcatgtatcacgcttgctctagcagatcattgatctttgtgggaccgcttgtaaaccacacatgctgaggaggcaacatcaagtatgaggtgactcttgaaccgtttgtactagtgattatcttttccccatgtctttctgtctctttacttacactgttattggagctataccgtcttcactggtaatttccactcytaaatccaaatatagtgggtgactaattaataattatgggctgagtaaataataaatgagtcattttctatcctttagggatcatatgcttctaagagcaacatctgattgtattttatcatcgatatcattcaaaatctaatacgtcttctgtgtcctcaagttttctcatccttaatgcctccatttttgcgttttccatttacttattcaaccaatatttgagggcctactatgtgtggtagggacacagtttgaacaggcaggtct

SEQ ID NO: 590616 - DNA, 493 bp, Homo sapiens
aagctgcactgagattcagacaatggcatgtatcacgcttgctctagcagatcattgatctttgtgggaccgcttgtaaaccacacatgctgaggaggcaacatcaagtatgaggtgactcttgaaccgtttgtactagtgattatcttttccccatgtctttctgtctctttacttacactgttattggagctataccgtcttcactggtaatttccactcttaaatccaaatatagtgggtgactaattaataattatgggctgagtaaataataaatgagtcattttctatcctttagggatcatatgcttctaagagcaacatctgattgtattttatcatcgatatcattcaaaatctaatacrtcttctgtgtcctcaagttttctcatccttaatgcctccatttttgcgttttccatttacttattcaaccaatatttgagggcctactatgtgtggtagggacacagtttgaacaggcaggtct

SEQ ID NO: 590617 - DNA, 396 bp, Homo sapiens
aaaaggtacaatcagtgtctttaccattcatcccccacccctatctcattagcaactttctgatctcgggtgttttytccaatagtaatgtgtatccctatatccaaacaatttctctaaagcccttctcactcattcaaaaacgtttaacaagtacattgcactaggtgatagaggaacagaaactgaatattgtccctgcctcagacatttcagtgcttttacgcctcacttccactcctaaccagtcttcttccacaggtaccctgtcccctaaaatcaaatgttgcttttaacagttgcctttacttgtcacctaaagtatttcaattcaaaatttcctcgaagtcaacttcacagctgctgataaaataatcattctatatgattacaaag

SEQ ID NO: 590618 - DNA, 396 bp, Homo sapiens
aaaaggtacaatcagtgtctttaccattcatcccccacccctatctcattagcaactttctgatctcgggtgttttttccaatagtaawgtgtatccctatatccaaacaatttctctaaagcccttctcactcattcaaaaacgtttaacaagtacattgcactaggtgatagaggaacagaaactgaatattgtccctgcctcagacatttcagtgcttttacgcctcacttccactcctaaccagtcttcttccacaggtaccctgtcccctaaaatcaaatgttgcttttaacagttgcctttacttgtcacctaaagtatttcaattcaaaatttcctcgaagtcaacttcacagctgctgataaaataatcattctatatgattacaaag

SEQ ID NO: 590619 - DNA, 396 bp, Homo sapiens
aaaaggtacaatcagtgtctttaccattcatcccccacccctatctcattagcaactttctgatctcgggtgttttttccaatagtaatgtgtatccctatatccaaacaatttctctaaagcccttctcactcattcaaaaacgtttaacaagtacattgcactaggtgatagaggaasagaaactgaatattgtccctgcctcagacatttcagtgcttttacgcctcacttccactcctaaccagtcttcttccacaggtaccctgtcccctaaaatcaaatgttgcttttaacagttgcctttacttgtcacctaaagtatttcaattcaaaatttcctcgaagtcaacttcacagctgctgataaaataatcattctatatgattacaaag

SEQ ID NO: 590620 - DNA, 396 bp, Homo sapiens
aaaaggtacaatcagtgtctttaccattcatcccccacccctatctcattagcaactttctgatctcgggtgttttttccaatagtaatgtgtatccctatatccaaacaatttctctaaagcccttctcactcattcaaaaacgtttaacaagtacattgcactaggtgatagaggaacagaaactgaatattgtccctgcctcagacatttcagtgcttttacgcctcacttccactcctaaccagtcttcttccacaggtaccctgtcccctaaaatcaaatgttgcttttaacagttgcctttacttgtcacctaaagtatttcaattcaaaatttcctcraagtcaacttcacagctgctgataaaataatcattctatatgattacaaag

SEQ ID NO: 590621 - DNA, 523 bp, Homo sapiens
taatatagagacctgcactgttgtttcttctttttaaaaaaatactaatgctaatcctttactgtttgagcagacttaatcttaccttttcttttgtcaataaatgccaggtgtttyttaaatcaatatcttgtcacttttgattatgatatactgatcactctatttgtatcttgaatgaaaagaccgctttgtgattttgctaatgatatgtaaactagaacttgagaaccactggatacagaagtactgctgatctttagatactttctgtctaaaaatgaagccctgtctccaaatttcaggaacagggagttaaggttccatgaagtgtttactttccaccctcaaattattaccttaatacttcagcttaagaattatgtgttctgtatatatcacgctgcttgtcaatatccacacataaaccttcttgttttgacaattaatctgaaaaagtccccatatagtctaagagggggaagagctaatttggaagaatataatatatgtcagtttccat

SEQ ID NO: 590622 - DNA, 523 bp, Homo sapiens
taatatagagacctgcactgttgtttcttctttttaaaaaaatactaatgctaatcctttactgtttgagcagacttaatcttaccttttcttttgtcaataaatgccaggtgttttttaaatcaatatcttgtcacttttgattatgatatactgatcactctatttgtatcttgaatgaaaagaccgctttgtgattttgctaatgatatgtaaactagaacttgagaaccactggatacagaagtactgctgatctttagatactttctgyctaaaaatgaagccctgtctccaaatttcaggaacagggagttaaggttccatgaagtgtttactttccaccctcaaattattaccttaatacttcagcttaagaattatgtgttctgtatatatcacgctgcttgtcaatatccacacataaaccttcttgttttgacaattaatctgaaaaagtccccatatagtctaagagggggaagagctaatttggaagaatataatatatgtcagtttccat

SEQ ID NO: 590623 - DNA, 523 bp, Homo sapiens
taatatagagacctgcactgttgtttcttctttttaaaaaaatactaatgctaatcctttactgtttgagcagacttaatcttaccttttcttttgtcaataaatgccaggtgttttttaaatcaatatcttgtcacttttgattatgatatactgatcactctatttgtatcttgaatgaaaagaccgctttgtgattttgctaatgatatgtaaactagaacttgagaaccactggatacagaagtactgctgatctttagatactttctgtctaaaaatgaagccctgtctccaaatttcaggaacagggagttaaggttccatgaagtgtttactttccaccctcaawttattaccttaatacttcagcttaagaattatgtgttctgtatatatcacgctgcttgtcaatatccacacataaaccttcttgttttgacaattaatctgaaaaagtccccatatagtctaagagggggaagagctaatttggaagaatataatatatgtcagtttccat

SEQ ID NO: 590624 - DNA, 416 bp, Homo sapiens
tgttatgagttttatcttagactaacatcatctgtaatgttgctataagccagtattcagttgctgtgtttgatgaatcataaaatggtgtaaaacttcaattagtgtactttttaaataaagtatctatgaatgcatccagcaaaatgtttatgatttgagtattcacacaatattacttttctctggatctaacaataatgtgaaaacccaaaatgaatataaaatattagctaataatagatttcaaagtattgtacaagtatgaaaaatatatgatatygttactttcatatatgtaaaacattaataatttttgtcaacataaacatcatctttacacctaaacttgtattaattcaattaagagttaatatagtatcctaaagtcatcaaatattcaaaaataggatgta

SEQ ID NO: 590625 - DNA, 503 bp, Homo sapiens
aataataataaccattttctgtgagtccaaagataaaatagcattacaaaatacctaataatcctgagtttggctttcttggttttattttttcatttagttttgttcactttgaccagtgggctggtggttcttaggtgcaccaaggttttcatttttcagktcaagattttaaaaccttaatgtggtaatttctctaatttttttgacagttacatcccaggttgcaagttaaaataaaattcccattttactaaagtccttggtttattaattattttataatgacttaatatataatttaataagtaatgaggggtactacatttcagaaatcaacactgaagaacttattcatggaaccaaacaccacctgtttctcaaacacctattaaaataaaaatacatataaataatttttaaaaatgaacactaaaaataaagtgaaaatgaaaaaatatatatccaggttaaaaaaaaactacttcagttaaacaataaat

SEQ ID NO: 590626 - DNA, 503 bp, Homo sapiens
aataataataaccattttctgtgagtccaaagataaaatagcattacaaaatacctaataatcctgagtttggctttcttggttttattttttcatttagttttgttcactttgaccagtgggctggtggttcttaggtgcaccaaggttttcatttttcaggtcaagattttaaaaccttaatgtggtaatttctctaatttttttgacagttacrtcccaggttgcaagttaaaataaaattcccattttactaaagtccttggtttattaattattttataatgacttaatatataatttaataagtaatgaggggtactacatttcagaaatcaacactgaagaacttattcatggaaccaaacaccacctgtttctcaaacacctattaaaataaaaatacatataaataatttttaaaaatgaacactaaaaataaagtgaaaatgaaaaaatatatatccaggttaaaaaaaaactacttcagttaaacaataaat

SEQ ID NO: 590627 - DNA, 503 bp, Homo sapiens
aataataataaccattttctgtgagtccaaagataaaatagcattacaaaatacctaataatcctgagtttggctttcttggttttattttttcatttagttttgttcactttgaccagtgggctggtggttcttaggtgcaccaaggttttcatttttcaggtcaagattttaaaaccttaatgtggtaatttctctaatttttttgacagttacatcccaggttgcaagttaaaataaaattcccattttactaaagtccttggtttattaattattttataatgacttaatatataatttaataagtaatgaggggtactacatttcagaaatcaacactgaagaacttattcatggaaccaaacaccacctgtttctcaaacacctattaaaataaaaatacatataaataatttttaaaaatraacactaaaaataaagtgaaaatgaaaaaatatatatccaggttaaaaaaaaactacttcagttaaacaataaat

SEQ ID NO: 590628 - DNA, 436 bp, Homo sapiens
gtgtgagccactgtgcctgaccagtgtaaccgctttgaaaaacaacgtggcagtttctcaaagactaaacgtatagtaatcacataatgcaacaatttcactcctgagtgtaaatccaagagaaataaaaatatatgttcacactaaaacttatgtacgagtgttcatagcagcctgactcatsatggtgaatacgcaaaaacaacacaaatgtccatcaactaatgaatggataaacataaactattactcagctacaaaaggaaagaaatcctgatacacactataacatgaaagaaatttgaaaacattctgctaagagaaaaaaaaagcaaattacaaaagatcacacattgtacaattctatttctataaaaggtccagattaggcaaaactacaatgacagaaaataaatcagtggttgcctatgaacat

SEQ ID NO: 590629 - DNA, 629 bp, Homo sapiens
tacacactataacatgaaagaaatttgaaaacattctgctaagagaaaaaaaaagcaaattacaaaagatcacacattgtacaattctatttctataaaaggtccagattaggcaaaactacaatgacagaaaataaatcagtggttgcctatgaacatggggtacgtaggaggtagcggctaagaggtgagggtttctcattcataagtgggtaactcacaagtgggtaatcacttctaagaaagactgtggtgatggatgcacagctccttgaatattctaaaaaccactcaattgtatactttcttwttttctttagttatttaaagacagggtctccttttgtcacccatgctgtagtgcagtggtgccatctggtctcactgcaacctatggcttctgggctcaagtgatcttccagtctcatgtccccaagtagttgggactacaggcatgagccaccacacccagctaatttttgtatttttgctagagatgctgttttgccatgttgcccaggctagtcgcaaactcctgaacacaagcgatccacctgcctcagctgcccaaagtcttagcgttataggaattagccactgcacctggcctgaattgcgtactttgataa

SEQ ID NO: 590630 - DNA, 490 bp, Homo sapiens
tgcacctgtagtcccagatgcttggaaggctgaggtgggagaattgcttgagcacaggtggttgaggctgcagttagctacaacaccatcactgcactccagattgggtgaaacagactctgtgttcaaaagaaaaagaaaagaaatacacatttggtttctgcccctcatcctggcamagagcttctcaagctcttataaaggccttggtgatgaaagtgatggggcatcttctgtttcaatatttggtcttagtcccaggtttctaacacaagagcctctaagacctttgggatcaccatagtaagaatgcatttggtgatgttactgagatgactgggtgactgaaagctcctagacagcttcagaaaaaggggtggttgttgtcagaagaacaaaccatgtgattagaggcttggaactgtcagcctcaccccctgggctccaggaagaaatagtggccgaagactgacttaattaccaatggtca

SEQ ID NO: 590631 - DNA, 558 bp, Homo sapiens
tgtttgaacgtaactactattcacgaaaaaggtctactcattagaactaaaaatcacaaaattgtaagttctacaaaaacaaatcaaccttatctacygcccagtcctactgaactacagaatgtgagaacagaaggtctgaccatggagtcgagagctgacgggaatgtcaccaccatcctgctctccaaggactcctcatcttcaacagacttctcatcttcaatgggcagggtggaaactgcaacttgtgccatgatccttgcacaagaaaagtagtaagaaaatgagtggtagaaatccagtgtcctaaactcacatccggagctgtgagagttttttactggctggataattcacagttttcttgaatcaggggaaaaataagactcagaaactagcaattcgttttgccctaaactctcatcagatacagaatccatccgctaactatctagtattatttccataagttagatcaattatcactcccaaaacaaatgcacatggcacccagaatctgtgcatttctcccaagtaaaagaggaggtggacggg

SEQ ID NO: 590632 - DNA, 518 bp, Homo sapiens
tagtaatggtttccttgggcgagctccctcaatttctgcacattttaagctctattatgttagtctcatacttaattttttttattgtggtataagaggcatacaggtaaggagatcatgaacatacaactcaaaattttcacatagttaacacctaagaaatggatatgaccarcaacccagaagtctctcttctgtttcattttagttgctgctcttacctcctcccaagacagggtgatctgcccgccttggcgtcccaaagtgctgggattacaggcatgagccaccacgcctggcctaaaatgaccatcttgtcttttgagacagagtcttgctctgtcaccccagctggagtgcagtggcatgatcatggctcactgcagcctcaatctccctggctcaagcgatcctcccaccttagcctcctgagtagctgggacaggaggcacacatgccacacccagctcaatctactgggctcaagcaaaagttatctcctattctgactttttaca

SEQ ID NO: 590633 - DNA, 535 bp, Homo sapiens
gaatttttttattcagcataattatcttgtgatccatcaaatttgttttgatatattttatcatttttctttttatatttcatgggacattacttctattgttttatacatttcacatttgtttagttttatccatatattcacctgtctttttcctgctcttcatttcttcttatatcccagatcttccacttgggatcattttcctcctgtctgaaatcttttagtatctgtttagtaatggtttccttgggcgagctccctcaatttctgcacattttaagctctattatgttagtctcatacttaattttttttattgtggtataagaggcatacaggtaaggagatcatgaacatacaactcaaaattttcacatagttaacacctaagaaatggatatgaccagcaacccagaagtctctcttctgtttcattttagttgctgctcttacctcctcccaagacagggtgatctgccckccttggcgtcccaaagtgctgggattacaggcatgagccaccacgcctggc

SEQ ID NO: 590634 - DNA, 555 bp, Homo sapiens
cagctgaaaccctacaagccagaaaagatattcaacttcttaaagaaaagaaatttcaygtagtatggcagagacagatataccatataataacatggtgttattataaatggttaaaagaaaaagaaatttcaacccagaatttcatgtccagcaaaattaagcatcataagtgaaggagaaacaagatccttttcagacaagcaaatgctgagagaattcattatcaccagatctaccttacaagagctcctgaattaagcactaaatatggaaagaaaagaccatcaccagccactacaaaaatgcaccgaagtacacagactagtaatgctaaaaaccaaccacatacacaagtctgcaaaataactagctgacagcatgacgacaggatctaatccacacataccattactaaccttaaatggaaatgggctaaatgctccgattgaaagacacaggggggcaagctggataaagaaccaagacccattgagtatgccgtctccaagaaacccatctcacattcagtgtcatgcataggctcaaaatgaa

SEQ ID NO: 590635 - DNA, 555 bp, Homo sapiens
cagctgaaaccctacaagccagaaaagatattcaacttcttaaagaaaagaaatttcacgtagtatggcagagacagatataccatataataacatggtgttattataaatggttaaaagaaaaagaaatttcaacccagaatttcatgtccagcaaaattaagcatcataagtgaaggagaaacaagatccttttcagacaagcaaatgctgagagaattcattatcaccagatctaccttacaagagctcctgaatkaagcactaaatatggaaagaaaagaccatcaccagccactacaaaaatgcaccgaagtacacagactagtaatgctaaaaaccaaccacatacacaagtctgcaaaataactagctgacagcatgacgacaggatctaatccacacataccattactaaccttaaatggaaatgggctaaatgctccgattgaaagacacaggggggcaagctggataaagaaccaagacccattgagtatgccgtctccaagaaacccatctcacattcagtgtcatgcataggctcaaaatgaa

SEQ ID NO: 590636 - DNA, 555 bp, Homo sapiens
cagctgaaaccctacaagccagaaaagatattcaacttcttaaagaaaagaaatttcacgtagtatggcagagacagatataccatataataacatggtgttattataaatggttaaaagaaaaagaaatttcaacccagaatttcatgtccagcaaaattaagcatcataagtgaaggagaaacaagatccttttcagacaagcaaatgctgagagaattcattatcaccagatctaccttacaagagctcctgaattaagcactaaatatggaaagaaaagaccatcaccagccactacaaaaatgcaccraagtacacagactagtaatgctaaaaaccaaccacatacacaagtctgcaaaataactagctgacagcatgacgacaggatctaatccacacataccattactaaccttaaatggaaatgggctaaatgctccgattgaaagacacaggggggcaagctggataaagaaccaagacccattgagtatgccgtctccaagaaacccatctcacattcagtgtcatgcataggctcaaaatgaa

SEQ ID NO: 590637 - DNA, 528 bp, Homo sapiens
cttaaagaaaagaaatttcacgtagtatggcagagacagatataccatataataacatggtgttattataaatggttaaaagaaaaagaaatttcaacccagaatttcatgtccagcaaaattaagcatcataagtgaaggagaaacaagatccttttcagacaagcaaatgctgagagaattcattatcaccagatctaccttacaagagctcctgaattaagcactaaatatggaaagaaaagaccatcaccagccactacaaaaatgcaccgaagtacacagacyagtaatgctaaaaaccaaccacatacacaagtctgcaaaataactagctgacagcatgacgacaggatctaatccacacataccattactaaccttaaatggaaatgggctaaatgctccgattgaaagacacaggggggcaagctggataaagaaccaagacccattgagtatgccgtctccaagaaacccatctcacattcagtgtcatgcataggctcaaaatgaaggaatggtgaa

SEQ ID NO: 590638 - DNA, 670 bp, Homo sapiens
atataccatataataacatggtgttattataaatggttaaaagaaaaagaaatttcaacccagaatttcatgtccagcaaaattaagcatcataagtgaaggagaaacaagatccttttcagacaagcaaatgctgagagaattcattatcaccagatctaccttacaagagctcctgaattaagcactaaatatggaaagaaaagaccatcaccagccactacaaaaatgcaccgaagtacacagactaktaatgctaaaaaccaaccacatacacaagtctgcaaaataactagctgacagcatgacgacaggatctaatccacacataccattactaaccttaaatggaaatgggctaaatgctccgattgaaagacacaggggggcaagctggataaagaaccaagacccattgagtatgccgtctccaagaaacccatctcacattcagtgtcatgcataggctcaaaatgaaggaatggtgaaaaatctttcaagccaatggaaaacagaagaactggggtgttacactcccagtttcgacaaaacgtatataccaataaagataaaaaaagacagagaaggacattacaaaggtggtcctgacctttgataaatctcgttattgattgataccaacctgggctatctttattgcccaaaccaa

SEQ ID NO: 590639 - DNA, 537 bp, Homo sapiens
atggaaagaaaagaccatcaccagccactacaaaaatgcaccgaagtacacagactagtaatgytaaaaaccaaccacatacacaagtctgcaaaataactagctgacagcatgacgacaggatctaatccacacataccattactaaccttaaatggaaatgggctaaatgctccgattgaaagacacaggggggcaagctggataaagaaccaagacccattgagtatgccgtctccaagaaacccatctcacattcagtgtcatgcataggctcaaaatgaaggaatggtgaaaaatctttcaagccaatggaaaacagaagaactggggtgttacactcccagtttcgacaaaacgtatataccaataaagataaaaaaagacagagaaggacattacaaaggtggtcctgacctttgataaatctcgttattgattgataccaacctgggctatctttattgcccaaaccaacaggataatttgctgaggttgtggagcttctcccctgcaaagagtccctgatctcccaaa

SEQ ID NO: 590640 - DNA, 543 bp, Homo sapiens
ctgaattaagcactaaatatggaaagaaaagaccatcaccagccactacaaaaatgcaccgaagtacacagactagtaatgctaaaaaccaaccacatacacaagtctgcaaaataactagctgacagcatgaygacaggatctaatccacacataccattactaaccttaaatggaaatgggctaaatgctccgattgaaagacacaggggggcaagctggataaagaaccaagacccattgagtatgccgtctccaagaaacccatctcacattcagtgtcatgcataggctcaaaatgaaggaatggtgaaaaatctttcaagccaatggaaaacagaagaactggggtgttacactcccagtttcgacaaaacgtatataccaataaagataaaaaaagacagagaaggacattacaaaggtggtcctgacctttgataaatctcgttattgattgataccaacctgggctatctttattgcccaaaccaacaggataatttgctgaggttgtggagcttctcccctgcaaagagtccc

SEQ ID NO: 590641 - DNA, 534 bp, Homo sapiens
caccagccactacaaaaatgcaccgaagtacacagactagtaatgctaaaaaccaaccacatacacaagtctgcaaaataactagctgacagcatgacgacaggatctaatccacacataccattactaaccttaaatggaaatgggytaaatgctccgattgaaagacacaggggggcaagctggataaagaaccaagacccattgagtatgccgtctccaagaaacccatctcacattcagtgtcatgcataggctcaaaatgaaggaatggtgaaaaatctttcaagccaatggaaaacagaagaactggggtgttacactcccagtttcgacaaaacgtatataccaataaagataaaaaaagacagagaaggacattacaaaggtggtcctgacctttgataaatctcgttattgattgataccaacctgggctatctttattgcccaaaccaacaggataatttgctgaggttgtggagcttctcccctgcaaagagtccctgatctcccaaaatctggttgagatct

SEQ ID NO: 590642 - DNA, 528 bp, Homo sapiens
cttaaagaaaagaaatttcacgtagtatggcagagacagatataccatataataacatggtgttattataaatggttaaaagaaaaagaaatttcaacccagaatttcatgtccagcaaaattaagcatcataagtgaaggagaaacaagatccttttcagacaagcaaatgctgagagaattcattatcaccagatctaccttacaagagctcctgaattaagcactaaatatggaaagaaaagaccatcaccagccactacaaaaatgcaccgaagtacacagactagtaatgctaaaaaccaaccacatacacaagtctgcaaaataactagctgacagcatgacgacaggatctaatccacacataccattactaaccttaaatggaaatgggctaaatgctccgattgaaagacacaggggggcaagctggataaagaacmaagacccattgagtatgccgtctccaagaaacccatctcacattcagtgtcatgcataggctcaaaatgaaggaatggtgaa

SEQ ID NO: 590643 - DNA, 504 bp, Homo sapiens
ccagccactacaaaaatgcaccgaagtacacagactagtaatgctaaaaaccaaccacatacacaagtctgcaaaataactagctgacagcatgacgacaggatctaatccacacataccattactaaccttaaatggaaatgggctaaatgctccgattgaaagacacaggggggcaagctggataaagaaccaagacccattgagtatgccgtctccaagaaacccatctcacattcagtgtcatgcataggctcaaaatgaaggaatggtgaaaaatctttcaagcmaatggaaaacagaagaactggggtgttacactcccagtttcgacaaaacgtatataccaataaagataaaaaaagacagagaaggacattacaaaggtggtcctgacctttgataaatctcgttattgattgataccaacctgggctatctttattgcccaaaccaacaggataatttgctgaggttgtggagcttctcccctgcaaagagtcc

SEQ ID NO: 590644 - DNA, 526 bp, Homo sapiens
caccagccactacaaaaatgcaccgaagtacacagactagtaatgctaaaaaccaaccacatacacaagtctgcaaaataactagctgacagcatgacgacaggatctaatccacacataccattactaaccttaaatggaaatgggctaaatgctccgattgaaagacacaggggggcaagctggataaagaaccaagacccattgagtatgccgtctccaagaaacccatctcacattcagtgtcatgcataggctcaaaatgaaggaatggtgaaaaatctttcaagccaatggaaaacagaagaactggggtgttacactcccagtttcgacaaaacgtatataccaataaagataaaaaaagacagagaaggwcattacaaaggtggtcctgacctttgataaatctcgttattgattgataccaacctgggctatctttattgcccaaaccaacaggataatttgctgaggttgtggagcttctcccctgcaaagagtccctgatctcccaaaatctggt

SEQ ID NO: 590645 - DNA, 532 bp, Homo sapiens
caccagccactacaaaaatgcaccgaagtacacagactagtaatgctaaaaaccaaccacatacacaagtctgcaaaataactagctgacagcatgacgacaggatctaatccacacataccattactaaccttaaatggaaatgggctaaatgctccgattgaaagacacaggggggcaagctggataaagaaccaagacccattgagtatgccgtctccaagaaacccatctcacattcagtgtcatgcataggctcaaaatgaaggaatggtgaaaaatctttcaagccaatggaaaacagaagaactggggtgttacactcccagtttcgacaaaacgtatataccaataaagataaaaaaagacagagaaggacattacaaaggtggtcctgacctttgataaatctcrttattgattgataccaacctgggctatctttattgcccaaaccaacaggataatttgctgaggttgtggagcttctcccctgcaaagagtccctgatctcccaaaatctggttgagat

SEQ ID NO: 590646 - DNA, 420 bp, Homo sapiens
ctgacagcatgacgacaggatctaatccacacataccattactaaccttaaatggaaatgggctaaatgctccgattgaaagacacaggggggcaagctggataaagaaccaagacccattgagtatgccgtctccaagaaacccatctcacattcagtgtcatgcataggctcaaaatgaaggaatggtgaaaaatctttcaagccaatggaaaacagaagaactggggtgttacactcccagtttcgacaaaacgtatataccaataaagataaaaaaagacagagaaggacattacaaaggtggtcctgacctttgataaatctcgttattgattgmtaccaacctgggctatctttattgcccaaaccaacaggataatttgctgaggttgtggagcttctcccctgcaaagagtc

SEQ ID NO: 590647 - DNA, 589 bp, Homo sapiens
gctgacagcatgacgacaggatctaatccacacataccattactaaccttaaatggaaatgggctaaatgctccgattgaaagacacaggggggcaagctggataaagaaccaagacccattgagtatgccgtctccaagaaacccatctcacattcagtgtcatgcataggctcaaaatgaaggaatggtgaaaaatctttcaagccaatggaaaacagaagaactggggtgttacactcccagtttcgacaaaacgtatataccaataaagataaaaaaagacagagaaggacattacaaaggtggtcctgacctttgataaatctcgttattgattgataccaacmtgggctatctttattgcccaaaccaacaggataatttgctgaggttgtggagcttctcccctgcaaagagtccctgatctcccaaaatctggttgagatctaagtttgattttgctgtacaactccttttctgaagttttactcatttccaacaaggaaggcaagttttcctgcttctgtggtgatggagagcaggcacctcctttcctgagtttcagcttgcctctgacagggaaggtg

SEQ ID NO: 590648 - DNA, 526 bp, Homo sapiens
caccagccactacaaaaatgcaccgaagtacacagactagtaatgctaaaaaccaaccacatacacaagtctgcaaaataactagctgacagcatgacgacaggatctaatccacacataccattactaaccttaaatggaaatgggctaaatgctccgattgaaagacacaggggggcaagctggataaagaaccaagacccattgagtatgccgtctccaagaaacccatctcacattcagtgtcatgcataggctcaaaatgaaggaatggtgaaaaatctttcaagccaatggaaaacagaagaactggggtgttacactcccagtttcgacaaaacgtatataccaataaagataaaaaaagacagagaaggacattacaaaggtggtcctgacctttgataaatctcgttattgattgataccaacctrggctatctttattgcccaaaccaacaggataatttgctgaggttgtggagcttctcccctgcaaagagtccctgatctcccaaaatctggt

SEQ ID NO: 590649 - DNA, 600 bp, Homo sapiens
taactctttttgtttgtttatgcttggggctttattgttgttgtttcacttttctcccgtctcttcctgacttggtcaaatccaaaggaattttccaaattgtgggcagcaaggcctctgaattggctaaaactcctatggctgcaaacaaacaaacaaacaaataaacaacaacaaaaaacattccagttagcagaaattattttttaaaacttttttttttacataagtggtctcatctacataacaaggccacccttttgctagccaaggctaaactgaaggagtagtggtggtgacccaatgtgaagattctgccctgttcactacagaaacctgagtttggttcctaagtctagttctttctgtttgatatttgtgttacttttaaagcgtcagcagtttgtcccagctatgatgtggtaataaaagattcaaaaggattttctttacaagttctatgattaaaagcttawttaaaagcaaatttctttttttttagttatactttaagttctggggtacttgttcagaacatgcaggtttgttacataggtatacacatgccatggtggcttgctgcatccatcaacccatgat

SEQ ID NO: 590650 - DNA, 469 bp, Homo sapiens
gttagcagaaattattttttaaaacttttttttttacataagtggtctcatctacataacaaggccacccttttgctagccaaggctaaactgaaggagtagtggtggtgacccaatgtgaagattctgccctgttcactacagaaacctgagtttggttcctaagtctagttctttctgtttgatatttgtgttacttttaaagcgtcagcagtttgtcccagctatgatgtggtaataaaagattcaaaaggattttctttacaagttctatgattaaaagcttatttaaaagcaaatttctttttttttagttatactttaagttctggggtacwtgttcagaacatgcaggtttgttacataggtatacacatgccatggtggcttgctgcatccatcaacccatgatctacattagttatttctcctaatgccatccctctcctagccccccaccctgacagac

SEQ ID NO: 590651 - DNA, 469 bp, Homo sapiens
gttagcagaaattattttttaaaacttttttttttacataagtggtctcatctacataacaaggccacccttttgctagccaaggctaaactgaaggagtagtggtggtgacccaatgtgaagattctgccctgttcactacagaaacctgagtttggttcctaagtctagttctttctgtttgatatttgtgttacttttaaagcgtcagcagtttgtcccagctatgatgtggtaataaaagattcaaaaggattttctttacaagttctatgattaaaagcttaattaaaagcaaatttctttttttttagttatactttaagttctggggtacttgtkcagaacatgcaggtttgttacataggtatacacatgccatggtggcttgctgcatccatcaacccatgatctacattagttatttctcctaatgccatccctctcctagccccccaccctgacagac

SEQ ID NO: 590652 - DNA, 663 bp, Homo sapiens
aaggggtcttgggagtaaggattgtgagatgggcagaggagcgtgtatcatccaggtgggcacaatggaatcaatcacaagcttccttataagcgggaagaagtgtcagactcaggygatacgaagatggaagtggtgattgcagtgatacacgatcaaaagccaaggtatgtggaaagccgtcaacagaaggaagaggcatggaaacggactctcccctggagcctccagatggaaccagcctttgattttagctccgcaagacgcgtttcagacttctgacctccaggctcataataagataagtttctgttgttttaagctgctacatttgtggtaactgattatagcagcaataggaaacttagaagagctatttttataattataagcaaagctgcaagaaacaatgtgtatctgacattttgcatttgggaaagtatatctgcagaataaatgtctagatgtggactaggtagttagttttgataattgttaaatcactctcctctagacaggttataccagtttatacttctagcagcaatatgagtgaatgcctctttcccacagcctcctcaactccatgtgttaccaaacttagaatttttactgttctgctagtaaaaagccctaatttctttggataacttactaattatt

SEQ ID NO: 590653 - DNA, 663 bp, Homo sapiens
aaggggtcttgggagtaaggattgtgagatgggcagaggagcgtgtatcatccaggtgggcacaatggaatcaatcacaagcttccttataagcgggaagaagtgtcagactcaggcgatacgaagatggaagtggtgattgcagtgatacacgatcaaaagccaaggtatgtggaaagccgtcaacagaaggaagaggcatggaaacggactctcccctggagcctccagawggaaccagcctttgattttagctccgcaagacgcgtttcagacttctgacctccaggctcataataagataagtttctgttgttttaagctgctacatttgtggtaactgattatagcagcaataggaaacttagaagagctatttttataattataagcaaagctgcaagaaacaatgtgtatctgacattttgcatttgggaaagtatatctgcagaataaatgtctagatgtggactaggtagttagttttgataattgttaaatcactctcctctagacaggttataccagtttatacttctagcagcaatatgagtgaatgcctctttcccacagcctcctcaactccatgtgttaccaaacttagaatttttactgttctgctagtaaaaagccctaatttctttggataacttactaattatt

SEQ ID NO: 590654 - DNA, 663 bp, Homo sapiens
aaggggtcttgggagtaaggattgtgagatgggcagaggagcgtgtatcatccaggtgggcacaatggaatcaatcacaagcttccttataagcgggaagaagtgtcagactcaggcgatacgaagatggaagtggtgattgcagtgatacacgatcaaaagccaaggtatgtggaaagccgtcaacagaaggaagaggcatggaaacggactctcccctggagcctccagatggaaccagcctttgattttagctccgcaagacgcgtttcagacttctgacctccaggctcataataagataagtttctgttgttttaagctgctacatttgtggtaactgattatagcagcaataggaaacttagaagagctatttttataattataagcaaagctgcaagaaacaatgtgtatctgasattttgcatttgggaaagtatatctgcagaataaatgtctagatgtggactaggtagttagttttgataattgttaaatcactctcctctagacaggttataccagtttatacttctagcagcaatatgagtgaatgcctctttcccacagcctcctcaactccatgtgttaccaaacttagaatttttactgttctgctagtaaaaagccctaatttctttggataacttactaattatt

SEQ ID NO: 590655 - DNA, 663 bp, Homo sapiens
aaggggtcttgggagtaaggattgtgagatgggcagaggagcgtgtatcatccaggtgggcacaatggaatcaatcacaagcttccttataagcgggaagaagtgtcagactcaggcgatacgaagatggaagtggtgattgcagtgatacacgatcaaaagccaaggtatgtggaaagccgtcaacagaaggaagaggcatggaaacggactctcccctggagcctccagatggaaccagcctttgattttagctccgcaagacgcgtttcagacttctgacctccaggctcataataagataagtttctgttgttttaagctgctacatttgtggtaactgattatagcagcaataggaaacttagaagagctatttttataattataagcaaagctgcaagaaacaatgtgtatctgacattttgcatttgggaaagtatatctgcagaataaatgtctagatgtggactaggtagttagttttgataattgttaaatcactctcctctagacrggttataccagtttatacttctagcagcaatatgagtgaatgcctctttcccacagcctcctcaactccatgtgttaccaaacttagaatttttactgttctgctagtaaaaagccctaatttctttggataacttactaattatt

SEQ ID NO: 590656 - DNA, 295 bp, Homo sapiens
catcatgcccagctaatttttggaacttttttttgtagagagagggtctatgttgctcaggctggtctcraactcctggggtcaagtgatctgtctacctcaacctcccaaagtgctgggataacaggcgtgagccactgcacccagcccctttaaggttttctagtctagcctttcacctgttttatggtatgtgaagttgaaaagaactgataatgcaaatgactcttgtttataaacatgcaaatcaacccgccttggaaagccaatccttctccatgtggcaaagccactt

SEQ ID NO: 590657 - DNA, 291 bp, Homo sapiens
catgctcagctaatttttggaaacttttttgtaaagagagggtctatgttgctcaggctggcctcgaaatcctggggtcaagwgatctgtctacctcaacctcccaaagtgctgggataacaggcgtgagccactgcacccagcccctttaaggttttctagcctagcctttcacctgttttatggtatgtgaagttgaaaagaactgataatgcaaatgattcttgtttataaacatgcaaatcaacctgccttggaaagccaatccttctccatgtggcaaagccactt

SEQ ID NO: 590658 - DNA, 291 bp, Homo sapiens
catgctcagctaatttttggaaacttttttgtaaagagagggtctatgttgctcaggctggcctcgaaatcctggggtcaagtgatctgtctacctcaacctcccaaagtgctgggataacaggmgtgagccactgcacccagcccctttaaggttttctagcctagcctttcacctgttttatggtatgtgaagttgaaaagaactgataatgcaaatgattcttgtttataaacatgcaaatcaacctgccttggaaagccaatccttctccatgtggcaaagccactt

SEQ ID NO: 590659 - DNA, 327 bp, Homo sapiens
atgttgctcaggctggtctcgaactcctggggtcaagtgatctgtctacctcaacctcccaaagtgctgggataacaggcgtgagccactgcacccagcccctttaaggttttctagtctagcctttcacctgttttatggtatgtgaagttgaaaagaactgataatgcaaatgaytcttgtttataaacatgcaaatcaacccgccttggaaagccaatccttctccatgtggcaaagccacttatgcatcaatttccagtttatttcaatattctgagtaatagatgtgtccatccctttggattcccttttgaactgcttgta

SEQ ID NO: 590660 - DNA, 327 bp, Homo sapiens
atgttgctcaggctggtctcgaactcctggggtcaagtgatctgtctacctcaacctcccaaagtgctgggataacaggcgtgagccactgcacccagcccctttaaggttttctagtctagcctttcacctgttttatggtatgtgaagttgaaaagaactgataatgcaaatgactcttgtttataaacatgcaaatcaaccygccttggaaagccaatccttctccatgtggcaaagccacttatgcatcaatttccagtttatttcaatattctgagtaatagatgtgtccatccctttggattcccttttgaactgcttgta

SEQ ID NO: 590661 - DNA, 661 bp, Homo sapiens
agaatggtattatttttaatatcacagagggtgcacaccccccttgtgatactgctcctaacatccaaggggtagaggatgaaattactcccaatatcacagtgggtatacaccccccgtggtattgttcctaatatccagggggtataggatgatagtactataaatatcgcaaggggtgtacaccccttctgatattgttactaatatccgtggggggagtcgatgatattacttccaatatcacagggcatgtacacccccttgtgatattgttcctaatatcctgggaggagactacgatattactggcaatatcgcagggtgtgtgcattcccgtgatattgttcctaatgtccagcaagggagaaaatattactcccaatatggtggggggtgtacacttcccatgcgatatcgttcctaatatccatgggggaaaaggatgatattactctaaatgtcgcaggaggtgtaaaccgcccctgtgatattgttctcaatatccatggggggagagaatgmtattactcccaatatcacaggtggtgtaaacccctcctgttatattattcctaatatccaggttgggagagaataatattacaggtaaaatagcagggggtgtacactccgcctgtgatattgttcctaatatctc

SEQ ID NO: 590662 - DNA, 491 bp, Homo sapiens
tagctgtccatattgcaggtggtgtacaaccccctgggaatttgttcctaatattcagtggggaagatgatattaattaaaatrtcacagggggtatacaacccctttgtgatattattcctaatatccagggaaagaaagaatattattcccaatatcgcaggggatgtacacccctctctgatactctttctaatatccctggggggagtctataatattactggcaatatcataaggagtgtatacccctcgttatattgttccttatgtccagcaagggagaaaatattaatcccaatatggaacagggtgtagacacccatgagttattgttcctaatatccagggagggaaaggatgatattactcccaatgttgcagtggtgtataaccccccgtgatattgttcctaatatctaggtggggaaagtacagtattactcccaatatagcaggggttgtacaccacctttgtgatattgttctac

SEQ ID NO: 590663 - DNA, 491 bp, Homo sapiens
tagctgtccatattgcaggtggtgtacaaccccctgggaatttgttcctaatattcagtggggaagatgatattaattaaaatatcacrgggggtatacaacccctttgtgatattattcctaatatccagggaaagaaagaatattattcccaatatcgcaggggatgtacacccctctctgatactctttctaatatccctggggggagtctataatattactggcaatatcataaggagtgtatacccctcgttatattgttccttatgtccagcaagggagaaaatattaatcccaatatggaacagggtgtagacacccatgagttattgttcctaatatccagggagggaaaggatgatattactcccaatgttgcagtggtgtataaccccccgtgatattgttcctaatatctaggtggggaaagtacagtattactcccaatatagcaggggttgtacaccacctttgtgatattgttctac

SEQ ID NO: 590664 - DNA, 420 bp, Homo sapiens
ataatattactggcaatatcataaggagtgtataccccycgttatattgttccttatgtccagcaagggagaaaatattaatcccaatatggaacagggtgtagacacccatgagttattgttcctaatatccagggagggaaaggatgatattactcccaatgttgcagtggtgtataaccccccgtgatattgttcctaatatctaggtggggaaagtacagtattactcccaatatagcaggggttgtacaccacctttgtgatattgttctacatatccatggggaaagaaaatgatagtactccccaatatcacaggtggtgtacaaccccttgtgatactgtttctaatatccatgttgggggaggatattactcccaatattgcacgtgttgcacagaccccctttgatattg

SEQ ID NO: 590665 - DNA, 420 bp, Homo sapiens
ataatattactggcaatatcataaggagtgtatacccctcgttatattgttccttatgtccagcaagggagaaaatattaatcccaatatggaacakggtgtagacacccatgagttattgttcctaatatccagggagggaaaggatgatattactcccaatgttgcagtggtgtataaccccccgtgatattgttcctaatatctaggtggggaaagtacagtattactcccaatatagcaggggttgtacaccacctttgtgatattgttctacatatccatggggaaagaaaatgatagtactccccaatatcacaggtggtgtacaaccccttgtgatactgtttctaatatccatgttgggggaggatattactcccaatattgcacgtgttgcacagaccccctttgatattg

SEQ ID NO: 590666 - DNA, 420 bp, Homo sapiens
ataatattactggcaatatcataaggagtgtatacccctcgttatattgttccttatgtccagcaagggagaaaatattaatcccaatatggaacagggtgtagacacccatgagttattgttcctaatatccagggagggaaaggatgatattactcccaatgttgcagtggtgtataaccccccgtgatattgttcctaatatctaggtggggaaagtacagtattactcccaatatagcaggggttgtacaccacctttgtgatattgttstacatatccatggggaaagaaaatgatagtactccccaatatcacaggtggtgtacaaccccttgtgatactgtttctaatatccatgttgggggaggatattactcccaatattgcacgtgttgcacagaccccctttgatattg

SEQ ID NO: 590667 - DNA, 552 bp, Homo sapiens
attaattaaaatatcacagggggtatacaacccctttgtgatattattcctaatatccagggaaagaaagaatattattcccaatatcgcaggggatgtacacccctctctgatactctttctaatatccctggggggagtctataatattactggcaatatcataaggagtgtatacccctcgttatattgttccttatgtccagcaagggagaaaatattaatcccaatatggaacagggtgtagacacccatgagttattgttcctaatatccagggagggaaaggatgatattactcccaatgttgcagtggtgtataaccccccgtgatattgttcctaatatctaggtggggaaagtacagtattactcccaatatagcaggggttgtacaccacctttgtgatattgttctacatayccatggggaaagaaaatgatagtactccccaatatcacaggtggtgtacaaccccttgtgatactgtttctaatatccatgttgggggaggatattactcccaatattgcacgtgttgcacagacccc

SEQ ID NO: 590668 - DNA, 423 bp, Homo sapiens
atggaatgcgatggagtcgaattgaatggaacgcaatggacacgaatggaatggaatggaatggtatggactagaatggactggaatggaatagtttagaatggarttgacgcgaatgcaatggaatgtaatggactcaaaaggaatggagaggactcaaacggaatggaatggactgggctcaaatggaatggaatggaattgaatggactcaaatggaatggaaagtaacggaatggaatgaactcgaatggaatggaatggactcgaatggaatagaatggatatgaatgagatggaacggaatgggctaaaatagaatggaatggaatggaatcgactcgaatgaaatggaatgcagtggaatggactggaatggcatgcaatggaatggaagaaactcgaatggaatcgaatgaactc

SEQ ID NO: 590669 - DNA, 564 bp, Homo sapiens
tcttcactctgaaaagctctgactctggctamtggtctctgttatgtactcatccctagagccatgtcttcaaatatttctcagaacttcttcacatctaaaaatctaggattaatttattgctctctgattatattcttctggtatttcaagtatcgtgtataacttcttcatctgtccttgcttttcttctacatcaagatgtcaagttcatggacttcccaattaatcattttaaaaatttatttcaagcctttatgagtcactacaatgtacatatgttctcaggaattatggccctacaatttgtatgtgagaatagttcctgtgtcaggcattatggacataagagtaaataaattctagcccctgcctacaaggagctaattcccagcctaagacagattgcaagccaataatttgcagagttgtaagtctaaggaaactgattgggatgtacctaattcgagctgggaatatcagaagaaaaactttttgaaagtcatgagacatgagctatgcctaaaagaataaaaaatagagagagaaataagaataaataaa

SEQ ID NO: 590670 - DNA, 569 bp, Homo sapiens
taatgacaatttctatttagtatacaacagtctttccccctgcaatgcaatttcttcactctgaaaagctctgactctggctaatggtctctgttakgtactcatccctagagccatgtcttcaaatatttctcagaacttcttcacatctaaaaatctaggattaatttattgctctctgattatattcttctggtatttcaagtatcgtgtataacttcttcatctgtccttgcttttcttctacatcaagatgtcaagttcatggacttcccaattaatcattttaaaaatttatttcaagcctttatgagtcactacaatgtacatatgttctcaggaattatggccctacaatttgtatgtgagaatagttcctgtgtcaggcattatggacataagagtaaataaattctagcccctgcctacaaggagctaattcccagcctaagacagattgcaagccaataatttgcagagttgtaagtctaaggaaactgattgggatgtacctaattcgagctgggaatatcagaagaaaaactttttgaaagtcatgagacatgagc

SEQ ID NO: 590671 - DNA, 560 bp, Homo sapiens
gctaatggtctctgttatgtactcatccctagagccatgtcttcaaatatttctcagaacttcttcacatctaaaaatctaggattaatttattgctctctgattatattcttctggtatttcaagtatcstgtataacttcttcatctgtccttgcttttcttctacatcaagatgtcaagttcatggacttcccaattaatcattttaaaaatttatttcaagcctttatgagtcactacaatgtacatatgttctcaggaattatggccctacaatttgtatgtgagaatagttcctgtgtcaggcattatggacataagagtaaataaattctagcccctgcctacaaggagctaattcccagcctaagacagattgcaagccaataatttgcagagttgtaagtctaaggaaactgattgggatgtacctaattcgagctgggaatatcagaagaaaaactttttgaaagtcatgagacatgagctatgcctaaaagaataaaaaatagagagagaaataagaataaataaattagggaatgagatgggtataat

SEQ ID NO: 590672 - DNA, 564 bp, Homo sapiens
tcttcactctgaaaagctctgactctggctaatggtctctgttatgtactcatccctagagccatgtcttcaaatatttctcagaacttcttcacatctaaaaatctaggattaatttattgctctctgattatattcttctggtatttcaagtatcgtgtataacttcttcatctgyccttgcttttcttctacatcaagatgtcaagttcatggacttcccaattaatcattttaaaaatttatttcaagcctttatgagtcactacaatgtacatatgttctcaggaattatggccctacaatttgtatgtgagaatagttcctgtgtcaggcattatggacataagagtaaataaattctagcccctgcctacaaggagctaattcccagcctaagacagattgcaagccaataatttgcagagttgtaagtctaaggaaactgattgggatgtacctaattcgagctgggaatatcagaagaaaaactttttgaaagtcatgagacatgagctatgcctaaaagaataaaaaatagagagagaaataagaataaataaa

SEQ ID NO: 590673 - DNA, 467 bp, Homo sapiens
tgcaatgcaatttcttcactctgaaaagctctgactctggctaatggtctctgttatgtactcatccctagagccatgtcttcaaatatttctcagaacttcttcacatctaaaaatctaggattaatttattgctctctgattatattcttctggtatttcaagtatcgtgtataacttcttcatctgtccttgcttttcttctacatcaagatgtcaagttcatggacttcccaattaatcattttaaaaatttatttcaagcctttatgagtcacyacaatgtacatatgttctcaggaattatggccctacaatttgtatgtgagaatagttcctgtgtcaggcattatggacataagagtaaataaattctagcccctgcctacaaggagctaattcccagcctaagacagattgcaagccaataatttgcagagttgtaagtctaaggaaactgattggga

SEQ ID NO: 590674 - DNA, 569 bp, Homo sapiens
taatgacaatttctatttagtatacaacagtctttccccctgcaatgcaatttcttcactctgaaaagctctgactctggctaatggtctctgttatgtactcatccctagagccatgtcttcaaatatttctcagaacttcttcacatctaaaaatctaggattaatttattgctctctgattatattcttctggtatttcaagtatcgtgtataacttcttcatctgtccttgcttttcttctacatcaagatgtcaagttcatggacttcccaattaatcattttaaaaatttatttcaagcctttatgagtcactacaatgtacatatgttctcaggaattatggccctacaatttgtatgtgaraatagttcctgtgtcaggcattatggacataagagtaaataaattctagcccctgcctacaaggagctaattcccagcctaagacagattgcaagccaataatttgcagagttgtaagtctaaggaaactgattgggatgtacctaattcgagctgggaatatcagaagaaaaactttttgaaagtcatgagacatgagc

SEQ ID NO: 590675 - DNA, 528 bp, Homo sapiens
aatatttctcagaacttcttcacatctaaaaatctaggattaatttattgctctctgattatattcttctggtatttcaagtatcgtgtataacttcttcatctgtccttgcttttcttctacatcaagatgtcaagttcatggacttcccaattaatcattttaaaaatttatttcaagcctttatgagtcactacaatgtacatatgttctcaggaattatggccctacaatttgtatgtgagaatagttcctgtgtcaggcattatggacataagagtaaataaattctagcccctgcctacaaggagctaattcccagcctaagacagattgcaagccaataatwtgcagagttgtaagtctaaggaaactgattgggatgtacctaattcgagctgggaatatcagaagaaaaactttttgaaagtcatgagacatgagctatgcctaaaagaataaaaaatagagagagaaataagaataaataaattagggaatgagatgggtataatagtagaaaaagga

SEQ ID NO: 590676 - DNA, 528 bp, Homo sapiens
aatatttctcagaacttcttcacatctaaaaatctaggattaatttattgctctctgattatattcttctggtatttcaagtatcgtgtataacttcttcatctgtccttgcttttcttctacatcaagatgtcaagttcatggacttcccaattaatcattttaaaaatttatttcaagcctttatgagtcactacaatgtacatatgttctcaggaattatggccctacaatttgtatgtgagaatagttcctgtgtcaggcattatggacataagagtaaataaattctagcccctgcctacaaggagctaattcccagcctaagacagattgcaagccaataatttgcagagttgtaagtctaaggaaactgattgggatgtacctaattcgagctgggaatatcagaagaaaaactttttgaaagtcatgagacatgagctrtgcctaaaagaataaaaaatagagagagaaataagaataaataaattagggaatgagatgggtataatagtagaaaaagga

SEQ ID NO: 590677 - DNA, 571 bp, Homo sapiens
gtatataggaggcttattaactcagtgtggttggagaaaacaggttgaaaggagaaatargagagaaagttacaaagggaatcaaatgtgttagtagttgagggaaaagcaaatattgaatacgacccatagatcttggataacccagtgtttggtagtagcttacataaaaggttgtgacaaaataaccagaggtatgcagagaaaataataactgagtgttatatttcctctcagtagaaacctaaaaaaaaaaatgtaatcacaccctgatcttttaactgacctccacttatcttgatgcctggattggtatacatattcctctgcctgaaaaattgctcagcacttctgaaaggttgtttctcactgttacacccaggcatttctgctaacaccagctgagttgtaaggggtcctccaggaggcctaggttgttctccttatcacatatattattttcatttatcaatttacccagaacatctaatgaaatattatggacaccaataacatgaatacaaatatagctatagaccctaaaaagtaaattgatgtatcttgaaaggct

SEQ ID NO: 590678 - DNA, 571 bp, Homo sapiens
gtatataggaggcttattaactcagtgtggttggagaaaacaggttgaaaggagaaataggagagaaagttacaaagggaatcaaatgtgttagtagttgagggaaaagcaaatattgaatacgacccatagatcttggataacccagtgtttggtagyagcttacataaaaggttgtgacaaaataaccagaggtatgcagagaaaataataactgagtgttatatttcctctcagtagaaacctaaaaaaaaaaatgtaatcacaccctgatcttttaactgacctccacttatcttgatgcctggattggtatacatattcctctgcctgaaaaattgctcagcacttctgaaaggttgtttctcactgttacacccaggcatttctgctaacaccagctgagttgtaaggggtcctccaggaggcctaggttgttctccttatcacatatattattttcatttatcaatttacccagaacatctaatgaaatattatggacaccaataacatgaatacaaatatagctatagaccctaaaaagtaaattgatgtatcttgaaaggct

SEQ ID NO: 590679 - DNA, 599 bp, Homo sapiens
tccaaacactttaccacatatggatgtttattatttagtagaatccaaaataattgcattttattaattaaacaaaacastaaaatattcagttccatttttatgttaaaagctttgtgcttggccaggcacggtggctcacacttgtaatcccaaaatttggggaggccgaggcaggtgaatcacttgaggtcaggagtttgagaacagcctggccaacatgatgaaacctgtctccagtaaacatacaaaagttagcaaggggtgttggcaggcatgtataatctcagatactcaggaggctgaggcaggagaatcacttgaacccaggagacagaggttgcagtaagccaagatcataccactgcactatagcctgggtgatggagactccatctcaaaaaaaataaaaataaaaaaataaaaatgtttgtgcttttcttacataagagtacatcttctgactgtaaaaatcctggaagaaaacctaggaaattctcctctagacatcatatttgtcaattaatttatggctaagtcctcaaaagcaattgcaagaataacaaaaattgacaagtgtgatccaatttagctaaata

SEQ ID NO: 590680 - DNA, 599 bp, Homo sapiens
tccaaacactttaccacatatggatgtttattatttagtagaatccaaaataattgcattttattaattaaacaaaacagtaaaatattcagttccatttttatgttaaaagctttgtgcttggccaggcacggtggctcacacttgtaatcccaaaatttggggaggccgaggcaggtgaatcacttgaggtcaggagtttgagaacagcctggccaacatgatgaaacctgtctccagtaaacatacaaaagttagcaaggggtgttggcaggcatgtrtaatctcagatactcaggaggctgaggcaggagaatcacttgaacccaggagacagaggttgcagtaagccaagatcataccactgcactatagcctgggtgatggagactccatctcaaaaaaaataaaaataaaaaaataaaaatgtttgtgcttttcttacataagagtacatcttctgactgtaaaaatcctggaagaaaacctaggaaattctcctctagacatcatatttgtcaattaatttatggctaagtcctcaaaagcaattgcaagaataacaaaaattgacaagtgtgatccaatttagctaaata

SEQ ID NO: 590681 - DNA, 479 bp, Homo sapiens
cttgctaccttagttcacccagaaagcacgatctctgcctgaatttcaaagggttggctagtttaaatatccttttgtaagacttttgtcttcctgtggggtgattttttcatcttacataccattgctaatctttttatcttgaatgtaattgaaatagttttaatctgtgttaccagcaacaagaaccccttttatgagatggagaggccaggtcagtctcataacatgtgtcccccttcgtgtgttgaatttatgtcagagccaggttctttcctatttgatgtctctcaccaaattccagtgtttatgccctaggaggtgcccaataaattctagagtkgatgcaagctgtaattttagagaaattaagttagcaagtagaattagattatatacaatctaatcaacttttttttttttctgaggatgaccaagatttggacttcagtgacaatagttgtcccctaaatatttat

SEQ ID NO: 590682 - DNA, 381 bp, Homo sapiens
cagctttaaaacaagaaatcccggcaatatgcaacatggatgaacctagaggacattaatgctaagtaaagtaaatcagtcacagaaggacaaactgtatgattccacttgtataaagtatctaagatagccaaattcattagaatcacagattagaatggtgatagctctttaagttgaaatcaattttgcattcctgggttttgtaggtttgctatcaggaattctgacacataaaaaagtttggaatttcccccttctttatttctgaaataatttaaaaattttattttttttaaacstttgaaagaattcaccagcaaaactctttggatgtggagtttgcttatttttttatttctttagttttatgtttttatg

SEQ ID NO: 590683 - DNA, 585 bp, Homo sapiens
atatgttccatttaatcttgtgaatttttttataagtttttttcaaggaattcaccctttcatccaagtaatgaaaattagtataaaatgtttcacaatattccattatcttgttaatgtctcttgtgtctacaactgtacagtctcattaatccatgatatttataatttatgttttctttctttctcacagaactaacttttggtcatgatgattttctcctgtttctgttttctgtctcattgatttctaatttctgttttatttcttttcttctacttgttttggacttrattttctctcttgttttagattttctttttaaggtagaaaattagttcacttgttttgaacttctcttttttagaataagcatttatacaaaaaatttactctgggtctgcttaactttatcccatacattttgatatagtatatttttatttgtattcagttcaatgtatttaaaggtgtttcttatgatttcttccttgagctaaagggcattttaagatgtatttaaatcttccaatagtgtagactttcctgggtagcttgtttttacccatttcaactcattttca

SEQ ID NO: 590684 - DNA, 585 bp, Homo sapiens
atatgttccatttaatcttgtgaatttttttataagtttttttcaaggaattcaccctttcatccaagtaatgaaaattagtataaaatgtttcacaatattccattatcttgttaatgtctcttgtgtctacaactgtacagtctcattaatccatgatatttataatttatgttttctttctttctcacagaactaacttttggtcatgatgattttctcctgtttctgttttctgtctcattgatttctaatttctgttttatttcttttcttctacttgttttggacttaatttkctctcttgttttagattttctttttaaggtagaaaattagttcacttgttttgaacttctcttttttagaataagcatttatacaaaaaatttactctgggtctgcttaactttatcccatacattttgatatagtatatttttatttgtattcagttcaatgtatttaaaggtgtttcttatgatttcttccttgagctaaagggcattttaagatgtatttaaatcttccaatagtgtagactttcctgggtagcttgtttttacccatttcaactcattttca

SEQ ID NO: 590685 - DNA, 585 bp, Homo sapiens
atatgttccatttaatcttgtgaatttttttataagtttttttcaaggaattcaccctttcatccaagtaatgaaaattagtataaaatgtttcacaatattccattatcttgttaatgtctcttgtgtctacaactgtacagtctcattaatccatgatatttataatttatgttttctttctttctcacagaactaacttttggtcatgatgattttctcctgtttctgttttctgtctcattgatttctaatttctgttttatttcttttcttctacttgttttggacttaattttctctcttgttttagattttctttttaaggtagaaaattagttcacttgttttgaacttctcttttttagaataagcatttatacaaaaaatttactctgggtctgcttaactttatcccatacattttgatatagtatatttttatttgtattcagttcaatgtatttaaaggtgtttcttatgatttcttccttgmgctaaagggcattttaagatgtatttaaatcttccaatagtgtagactttcctgggtagcttgtttttacccatttcaactcattttca

SEQ ID NO: 590686 - DNA, 376 bp, Homo sapiens
ttacatgtgtaaactataatttsaagttattcagtgctgtctttatccattcattcatttagagtgcctgttatgttgcagctctgttctagggattggggattgaacaacggatcagacagtgttagttttggtcatcccaggaaaactaagcagaggcttgctcaagaactactgaggtcttggtggggttcggagattgggggaagaggagatggacaaaggctcccaagaggaagtagtactgggtctgcagaatgacccaacaaagaatgagggcaagggattccaggcagtgggaattacttgtacataggccctgagacctgagagcagcgtgggtttgaggctcacagtaggaagattagtaaagctg

SEQ ID NO: 590687 - DNA, 376 bp, Homo sapiens
ttacatgtgtaaactataatttgaagttmttcagtgctgtctttatccattcattcatttagagtgcctgttatgttgcagctctgttctagggattggggattgaacaacggatcagacagtgttagttttggtcatcccaggaaaactaagcagaggcttgctcaagaactactgaggtcttggtggggttcggagattgggggaagaggagatggacaaaggctcccaagaggaagtagtactgggtctgcagaatgacccaacaaagaatgagggcaagggattccaggcagtgggaattacttgtacataggccctgagacctgagagcagcgtgggtttgaggctcacagtaggaagattagtaaagctg

SEQ ID NO: 590688 - DNA, 376 bp, Homo sapiens
ttacatgtgtaaactataatttgaagttattcagtgctktctttatccattcattcatttagagtgcctgttatgttgcagctctgttctagggattggggattgaacaacggatcagacagtgttagttttggtcatcccaggaaaactaagcagaggcttgctcaagaactactgaggtcttggtggggttcggagattgggggaagaggagatggacaaaggctcccaagaggaagtagtactgggtctgcagaatgacccaacaaagaatgagggcaagggattccaggcagtgggaattacttgtacataggccctgagacctgagagcagcgtgggtttgaggctcacagtaggaagattagtaaagctg

SEQ ID NO: 590689 - DNA, 376 bp, Homo sapiens
ttacatgtgtaaactataatttgaagttattcagtgctgtctttatccmttcattcatttagagtgcctgttatgttgcagctctgttctagggattggggattgaacaacggatcagacagtgttagttttggtcatcccaggaaaactaagcagaggcttgctcaagaactactgaggtcttggtggggttcggagattgggggaagaggagatggacaaaggctcccaagaggaagtagtactgggtctgcagaatgacccaacaaagaatgagggcaagggattccaggcagtgggaattacttgtacataggccctgagacctgagagcagcgtgggtttgaggctcacagtaggaagattagtaaagctg

SEQ ID NO: 590690 - DNA, 335 bp, Homo sapiens
aagtggtggtgccccctctctgatgttattctatctctgtgcttttctcttaatagtaataatcagaacttataattattttgttaatatttaaaatctagctggacatggtggctcaygcctgcaatcccagcattttgggaggccaaggcaggaggatcacctgaggtcaggggttcgagaccagtctggccaactggcgaaatcccatctctactaaaaatacaaaattagccaggtgtggtgttgcacgcctgtaatcctagctactcatgtggctgaggcagaattccttgaacccaggaggcggaggttgcagtgagccgagatagcac

SEQ ID NO: 590691 - DNA, 467 bp, Homo sapiens
aggactgtggctctgaacaagctttcctctctgtcagggatgctattccctcctgctatggcaggtctgactcctaatgtccttcaatctttgcctaaatttcacctcctccagcccttccctggcttcctaaagtggtggtgccccctctctgatgttattctatctctgtgcttttctcttaatagtaataatcagaacttataattattttgttaatatttaaaatctagctggacatggtggctcatgcctgyaatcccagcattttgggaggccaaggcaggaggatcacctgaggtcaggggttcgagaccagtctggccaactggcgaaatcccatctctactaaaaatacaaaattagccaggtgtggtgttgcacgcctgtaatcctagctactcatgtggctgaggcagaattccttgaacccaggaggcggaggttgcagtgagccgagatagcac

SEQ ID NO: 590692 - DNA, 335 bp, Homo sapiens
aagtggtggtgccccctctctgatgttattctatctctgtgcttttctcttaatagtaataatcagaacttataattattttgttaatatttaaaatctagctggacatggtggctcatgcctgcaatcccagcattttgggaggccaaggcaggaggatcacctgaggtcaggggttcgagaccagtctggccaactggcgaaatcccatctctactaaaaatacaaaattagccaggtgtggtgttgcaygcctgtaatcctagctactcatgtggctgaggcagaattccttgaacccaggaggcggaggttgcagtgagccgagatagcac

SEQ ID NO: 590693 - DNA, 358 bp, Homo sapiens
agtgcagtagtggcgcggtctcggcttactgcaaactctgcctccyaggttcaaggattctcctgcctcagcctcctaagtagctgggattacaggcacctgccgccacacttagttaatttttgtatttttagtagagacggggtttcaccatgttggccaggatggtctctatctcttgaccttgtgatctgcctgcttcagcctcccaaagtgctgggattacaggtgtgagccaccgtgcccagcccgattttaaccagtcttaagtgtgcagttatcggcattaagtgcattcatgttgttgtacaaccatcaccaccatccatctccagaacattcttatcatcccgaagtg

SEQ ID NO: 590694 - DNA, 358 bp, Homo sapiens
agtgcagtagtggcgcggtctcggcttactgcaaactctgcctcctaggttcaaggattctcctgcctcagcctcctaagtagctgggattacaggcacctgycgccacacttagttaatttttgtatttttagtagagacggggtttcaccatgttggccaggatggtctctatctcttgaccttgtgatctgcctgcttcagcctcccaaagtgctgggattacaggtgtgagccaccgtgcccagcccgattttaaccagtcttaagtgtgcagttatcggcattaagtgcattcatgttgttgtacaaccatcaccaccatccatctccagaacattcttatcatcccgaagtg

SEQ ID NO: 590695 - DNA, 358 bp, Homo sapiens
agtgcagtagtggcgcggtctcggcttactgcaaactctgcctcctaggttcaaggattctcctgcctcagcctcctaagtagctgggattacaggcacctgccgcyacacttagttaatttttgtatttttagtagagacggggtttcaccatgttggccaggatggtctctatctcttgaccttgtgatctgcctgcttcagcctcccaaagtgctgggattacaggtgtgagccaccgtgcccagcccgattttaaccagtcttaagtgtgcagttatcggcattaagtgcattcatgttgttgtacaaccatcaccaccatccatctccagaacattcttatcatcccgaagtg

SEQ ID NO: 590696 - DNA, 358 bp, Homo sapiens
agtgcagtagtggcgcggtctcggcttactgcaaactctgcctcctaggttcaaggattctcctgcctcagcctcctaagtagctgggattacaggcacctgccgccacacttagtkaatttttgtatttttagtagagacggggtttcaccatgttggccaggatggtctctatctcttgaccttgtgatctgcctgcttcagcctcccaaagtgctgggattacaggtgtgagccaccgtgcccagcccgattttaaccagtcttaagtgtgcagttatcggcattaagtgcattcatgttgttgtacaaccatcaccaccatccatctccagaacattcttatcatcccgaagtg

SEQ ID NO: 590697 - DNA, 434 bp, Homo sapiens
ggttaacacttaagccgtctgtggattcttttttcaaaakacaacgtatgtatggcaaacaaccatatgaaaaaatactcaacatcactaatcatcagaaaatcagaaccatgagataccatatcacaccggtcagaatggctataattaaaaaatcaaaacataacagacggtgccgagtttgtggaaaaaagggaatgcttatacactgctggtggtgatatagaaaggagacagggaaatactgggtagaagagagtggttccctggcaaagccctgcccacaagcctggaaacccatggccctaaatgggaacaggcattcctgcttttgcacccaaaagttgtctttcagctcaccatgcaccccctgtcctgtacccatatatgccccagaccccaggctccagaagcagacaagcagatgaggagat

SEQ ID NO: 590698 - DNA, 434 bp, Homo sapiens
ggttaacacttaagccgtctgtggattcttttttcaaaagacaacgtatgtatggcaaacaaccrtatgaaaaaatactcaacatcactaatcatcagaaaatcagaaccatgagataccatatcacaccggtcagaatggctataattaaaaaatcaaaacataacagacggtgccgagtttgtggaaaaaagggaatgcttatacactgctggtggtgatatagaaaggagacagggaaatactgggtagaagagagtggttccctggcaaagccctgcccacaagcctggaaacccatggccctaaatgggaacaggcattcctgcttttgcacccaaaagttgtctttcagctcaccatgcaccccctgtcctgtacccatatatgccccagaccccaggctccagaagcagacaagcagatgaggagat

SEQ ID NO: 590699 - DNA, 434 bp, Homo sapiens
ggttaacacttaagccgtctgtggattcttttttcaaaagacaacgtatgtatggcaaacaaccatatgaaaaaatactcaacatcactaatcatcagaaaatcagaaccatgagataccatatcacaccggycagaatggctataattaaaaaatcaaaacataacagacggtgccgagtttgtggaaaaaagggaatgcttatacactgctggtggtgatatagaaaggagacagggaaatactgggtagaagagagtggttccctggcaaagccctgcccacaagcctggaaacccatggccctaaatgggaacaggcattcctgcttttgcacccaaaagttgtctttcagctcaccatgcaccccctgtcctgtacccatatatgccccagaccccaggctccagaagcagacaagcagatgaggagat

SEQ ID NO: 590700 - DNA, 434 bp, Homo sapiens
ggttaacacttaagccgtctgtggattcttttttcaaaagacaacgtatgtatggcaaacaaccatatgaaaaaatactcaacatcactaatcatcagaaaatcagaaccatgagataccatatcacaccggtcagaatggctatwattaaaaaatcaaaacataacagacggtgccgagtttgtggaaaaaagggaatgcttatacactgctggtggtgatatagaaaggagacagggaaatactgggtagaagagagtggttccctggcaaagccctgcccacaagcctggaaacccatggccctaaatgggaacaggcattcctgcttttgcacccaaaagttgtctttcagctcaccatgcaccccctgtcctgtacccatatatgccccagaccccaggctccagaagcagacaagcagatgaggagat

SEQ ID NO: 590701 - DNA, 552 bp, Homo sapiens
aaaaatatcagatataacttatatacccaaaagtatgacttaaaaacagcatgacaatctttatgatgggatattgtgcaactactagaagcacattttcagagattatttattaacatatgataatgactacattgagtggtttttagaagcatgaattgaaaccatgtataagcatgactttattgaacttatatataacattacacacrcgtttacataattataaaataagtatgctcatgttcataatatgtatttatttatattcatatgtaaggccaataggaagtaatctctgtatctgagttattatttcataaataatttatgcttgttctgtgaaaatacaaacactgctatggatcttccaagtatcctgaaaggataccgtttataattaaacaataacaattttagaaataattattttaaataaggctatgataaatctggtttcattgcacactttaactttggaacatttcatgaagcgtcccttgatcacgactctcatattcaggagttttttgagatcaaaatgggacaatc

SEQ ID NO: 590702 - DNA, 552 bp, Homo sapiens
aaaaatatcagatataacttatatacccaaaagtatgacttaaaaacagcatgacaatctttatgatgggatattgtgcaactactagaagcacattttcagagattatttattaacatatgataatgactacattgagtggtttttagaagcatgaattgaaaccatgtataagcatgactttattgaacttatatataacattacacacgcrtttacataattataaaataagtatgctcatgttcataatatgtatttatttatattcatatgtaaggccaataggaagtaatctctgtatctgagttattatttcataaataatttatgcttgttctgtgaaaatacaaacactgctatggatcttccaagtatcctgaaaggataccgtttataattaaacaataacaattttagaaataattattttaaataaggctatgataaatctggtttcattgcacactttaactttggaacatttcatgaagcgtcccttgatcacgactctcatattcaggagttttttgagatcaaaatgggacaatc

SEQ ID NO: 590703 - DNA, 567 bp, Homo sapiens
tattatttcataaataatttatgcttgttctgtgaaaatamaaacactgctatggatcttccaagtatcctgaaaggataccgtttataattaaacaataacaattttagaaataattattttaaataaggctatgataaatctggtttcattgcacactttaactttggaacatttcatgaagcgtcccttgatcacgactctcatattcaggagttttttgagatcaaaatgggacaatcagtatgaatctattttttagacatgcaaatggataactttaaatagcagtagcgatataatcagagtgcacagttgctctgggacaaaacttggaaatgagcatatttttagattcttaatgttttacacactttagcattccacagcaccattacatactcatttttctactagaataccttggtaaaaattcacagtagagatcaggcttgtccttcatacattaactaatcaagtaggaaagtgcaaatgagaacacagtgcctaacataggcaccacatggaaacaagcatggaacttccaggaagccatttttgtagctt

SEQ ID NO: 590704 - DNA, 549 bp, Homo sapiens
actttaaatagcagtagcgatataatcagagtgcacagttgctctgggacaaaacttggaaatgagcatatttttagattcttaatgttttacacactttagcattccacagcaccattacatactcatttttctactagaataccttggtaaaaattcacagtagagatcaggcttgtccttcatacattaactaatcaagtaggaaagtgcaaatgagaacacagtgccwaacataggcaccacatggaaacaagcatggaacttccaggaagccatttttgtagctttgtagcccaattatatttttcctaatgtattgcacacaaaacttgggggaaaaaaaagaggcagagagaaaacaggttatatcagccctatctcacaatccacaacttcatcctattagaggagtaactatgtaaaacaaattttatctgttgaatgtcctatttagttaatcgcaaaactgtacgagaacacacttgtgacttatttagcagcttgtttgttcgctttccactggcttcacaaatgtcctttggaaat

SEQ ID NO: 590705 - DNA, 549 bp, Homo sapiens
actttaaatagcagtagcgatataatcagagtgcacagttgctctgggacaaaacttggaaatgagcatatttttagattcttaatgttttacacactttagcattccacagcaccattacatactcatttttctactagaataccttggtaaaaattcacagtagagatcaggcttgtccttcatacattaactaatcaagtaggaaagtgcaaatgagaacacagtgcctaacataggcaccacatggaaacaagcatggaactkccaggaagccatttttgtagctttgtagcccaattatatttttcctaatgtattgcacacaaaacttgggggaaaaaaaagaggcagagagaaaacaggttatatcagccctatctcacaatccacaacttcatcctattagaggagtaactatgtaaaacaaattttatctgttgaatgtcctatttagttaatcgcaaaactgtacgagaacacacttgtgacttatttagcagcttgtttgttcgctttccactggcttcacaaatgtcctttggaaat

SEQ ID NO: 590706 - DNA, 549 bp, Homo sapiens
actttaaatagcagtagcgatataatcagagtgcacagttgctctgggacaaaacttggaaatgagcatatttttagattcttaatgttttacacactttagcattccacagcaccattacatactcatttttctactagaataccttggtaaaaattcacagtagagatcaggcttgtccttcatacattaactaatcaagtaggaaagtgcaaatgagaacacagtgcctaacataggcaccacatggaaacaagcatggaacttccaggaagccatttttgtagctttgtagcccaattatatttttcctaatgtattgcacacaaaacttgggggaaaaaaaagaggcagagagaaaacaggttatatcagccctatctcacaatccacaasttcatcctattagaggagtaactatgtaaaacaaattttatctgttgaatgtcctatttagttaatcgcaaaactgtacgagaacacacttgtgacttatttagcagcttgtttgttcgctttccactggcttcacaaatgtcctttggaaat

SEQ ID NO: 590707 - DNA, 528 bp, Homo sapiens
ttttctcacatattatgggttgtcttttcactcccttgatagtatcctttgatgcataaagggttttttattttgattaaatctaattttcgtgtattttcttttgttatctgtgcttttctgtcatatttcaaaatacacttaaaactcaaaggtcataaaggtttaccgtgtgttttcttctaagagttacatatttttagtccttacatttaagtcttttattaatttagaattaatttttgtatatactgcaaggtaggggtctaacttctctcttgtacactgacatccagctgttgaagagactgttctttcctcccttgactagacttggccaccttgttgaacagtcwttgaccatatatgtgaggactaacttgtaggatctcaaatctgttctgttgtattggtctgaaagtctattggtcttattccagtaccacactctcttgattactgtagatttgtagtaggctgtgaaactgaaaaatgtgagttttccaatgttctttttcaagactgttt

SEQ ID NO: 590708 - DNA, 459 bp, Homo sapiens
gttgactcaccagttaatgcagctatttggtcataaatgtttctttgttaatcgctttcgattactaattcaatctcctaggttataggtctattcagattttctctttcttcttgagccactttggtagtttgtgtctttctagcgattcatccatttcatccagggcacctaatttgttgctagacagttgttcacagtatactcctgtaatccttttgtatttctgtaaagttggtagtaatggctctgctttcatttattattttaataattagtcttccatcttttgctcagtcaatatagtgaaaggcttgatctttcaaagaatctacattttttcattctactgctctccaaccttctatttkattgatttatgctctaattatgctctttattatttctttccttctgctagctttggatttagtcttccacctggatttattttgggag

SEQ ID NO: 590709 - DNA, 665 bp, Homo sapiens
cattgctatttatattttgtccagagtttcaaattgtgatcagtggaaacgacatgccgtagcatgcrtacgccatcctggccagcatcacagatggtcagtatatctttctgttgttgttttgagacagggtctcactctgttgcccaggctggagcacagtgacatgatcagggatcactgcattctcaacctgctaggctcaagtgatcctcccacctcagcctcccgaatagctggtctataggtgtgctgccatgcccagctaatttttgtattttttataaagatgggattttgccttgttgcccaggctggtctcaaactcctgagctcaggctatcctctcacccggacctcccaaaatactaggattataggcatgaccaccacacctggccagtacatcttaaaaataatttctgatccacgttgaataatgatggcctgtaaatattttttcttgcactagccttgttgggttttgatatcaaggttatttttattttaaccttgtaaaatgaactggggagtcttctttttttattctctgtttgtgttagtggcagagtttttttttgtttggttggttggtttctcttgtatgtttcctggaactttttggtgaaggcacttgggcctggaaatttctttatgggaagttt

SEQ ID NO: 590710 - DNA, 665 bp, Homo sapiens
cattgctatttatattttgtccagagtttcaaattgtgatcagtggaaacgacatgccgtagcatgcatacgccatcctggccagcatcacagatggtcagtatatctttctgttgttgttttgagacagggtctcactctgttgcccaggctggagcacagtgacatgatcagggatcactgcattctcaacctgctaggctcaagtgatcctcccacctcagcctcccgaatagctggtctataggtgtgctgccatgcccagctaatttttgtattttttataaagatgggattttgcctwgttgcccaggctggtctcaaactcctgagctcaggctatcctctcacccggacctcccaaaatactaggattataggcatgaccaccacacctggccagtacatcttaaaaataatttctgatccacgttgaataatgatggcctgtaaatattttttcttgcactagccttgttgggttttgatatcaaggttatttttattttaaccttgtaaaatgaactggggagtcttctttttttattctctgtttgtgttagtggcagagtttttttttgtttggttggttggtttctcttgtatgtttcctggaactttttggtgaaggcacttgggcctggaaatttctttatgggaagttt

SEQ ID NO: 590711 - DNA, 424 bp, Homo sapiens
taggcagagcttagaccagagttacatcacctgggtgatcagtgcagggatatgtcacaatgctcccataggcaaatccaagacaagagtctgtcacctgggtgatcagtgcagaaatatgtgacaatgctcccagtaggcagagcctagagaagagtcccatcacctgggtgatcagtgcagagatatttcacaatgcccctgcaggcagagcgcaagcaagctttacatcacctagatgatcagtgcagagatatgtcacaagccccccwataggcagagcctggacaagagttatatcacctcggtgatcaatgcagtgatatatcactatgccccgtaggcagagcctagtcaagcattacatcacctgggtgatcagtgcagagatatgtcacaaagcccccaaacccaaagcctagac

SEQ ID NO: 590712 - DNA, 424 bp, Homo sapiens
taggcagagcttagaccagagttacatcacctgggtgatcagtgcagggatatgtcacaatgctcccataggcaaatccaagacaagagtctgtcacctgggtgatcagtgcagaaatatgtgacaatgctcccagtaggcagagcctagagaagagtcccatcacctgggtgatcagtgcagagatatttcacaatgcccctgcaggcagagcgcaagcaagctttacatcacctagatgatcagtgcagagatatgtcacaagccccccaataggcagwgcctggacaagagttatatcacctcggtgatcaatgcagtgatatatcactatgccccgtaggcagagcctagtcaagcattacatcacctgggtgatcagtgcagagatatgtcacaaagcccccaaacccaaagcctagac

SEQ ID NO: 590713 - DNA, 424 bp, Homo sapiens
taggcagagcttagaccagagttacatcacctgggtgatcagtgcagggatatgtcacaatgctcccataggcaaatccaagacaagagtctgtcacctgggtgatcagtgcagaaatatgtgacaatgctcccagtaggcagagcctagagaagagtcccatcacctgggtgatcagtgcagagatatttcacaatgcccctgcaggcagagcgcaagcaagctttacatcacctagatgatcagtgcagagatatgtcacaagccccccaataggcagagcctggacaagagttatatcacctcggtgatcaatgcagtgatatrtcactatgccccgtaggcagagcctagtcaagcattacatcacctgggtgatcagtgcagagatatgtcacaaagcccccaaacccaaagcctagac

SEQ ID NO: 590714 - DNA, 329 bp, Homo sapiens
actaataatccctgcgatatgtgtagtgacttcatacttcaccccccccccggatattacggccaatatcagagtggagtgtgcaccccctgcaatatggggagtgatatcatcctctccccactggatgttatggacaatatcacaggaggtttactttctctgggttatggggaaaaatatcctcctgtccccgcctggatgttagacatatttagagggggktgtccaccccctgtgatatggggagtagtaatatcctctcctgccctggatgttatggacaatatatagggagatatacaatcccttcgatatggggagtaata

SEQ ID NO: 590715 - DNA, 329 bp, Homo sapiens
actaataatccctgcgatatgtgtagtgacttcatacttcaccccccccccggatattacggccaatatcagagtggagtgtgcaccccctgcaatatggggagtgatatcatcctctccccactggatgttatggacaatatcacaggaggtttactttctctgggttatggggaaaaatatcctcctgtccccgcctggatgttagacatatttagagggrggtgtccaccccctgtgatatggggagtagtaatatcctctcctgccctggatgttatggacaatatatagggagatatacaatcccttcgatatggggagtaata

SEQ ID NO: 590716 - DNA, 532 bp, Homo sapiens
aaagtaaacctcctgtgatattgtccataacatccagtggggagaggatgatatcactccccatattgcagggggtgcacactccactctgatattggccataatatccgggggggtgaagtatgaagtcactacacatatcgcagggattattagtatcagattgtttgaagggctcacagtaaggrtagtagtagggcgagttctaactcaaataggggaaatgtgatggctactagaaagaattttatggagaagggaatgtgggcagaggatagagggtcaaatctgcattcataagggctagatttttctatatatatttattttatacatatatatatttttctctctctctacatatatatatattaagttgtgggagccaaaatgtaataattattagtaaaagggctaatagggtgttgattactagggttaatgttaggtgaattactgtttttcggatgctatcaaaactttggaaatcatggtactatttatactaaaagagtaagatcctcatcaataa

SEQ ID NO: 590717 - DNA, 532 bp, Homo sapiens
aaagtaaacctcctgtgatattgtccataacatccagtggggagaggatgatatcactccccatattgcagggggtgcacactccactctgatattggccataatatccgggggggtgaagtatgaagtcactacacatatcgcagggattattagtatcagattgtttgaagggctcacagtaaggatagtagtagggcgagttctaactcaaataggggaaatgtgatggctactagaaagaattttatggagaagggaatgtgggcagaggatagagggtcaaatctgcattcataagggctagatttttctatatatatttattttatacatatatatatttttctctctctctacatatatatatattaagttgtgggagccaaaatgtaataattattagtaamagggctaatagggtgttgattactagggttaatgttaggtgaattactgtttttcggatgctatcaaaactttggaaatcatggtactatttatactaaaagagtaagatcctcatcaataa

SEQ ID NO: 590718 - DNA, 538 bp, Homo sapiens
atttattgatgaggatcttactcttttagtataaatagtaccatgatttccaaagttttgatagcatccgaaaaacagtaattcacctaacattaaccctagtaatcaacaccctattwgccctgttactaataattattacattttggctcccacaacttaatatatatatgtagagagagagaaaaatatatatatatatgtataaaataaatatatatagaaaaatctagcccttatgaatgcagatttgaccctctatcctctgcccacattcccttctccataaaattctttctagtagccatcacatttcccctatttgagttagaactcgccctactactacccttactgtgagcccttcaaacaatctgatactaataatccctgcgatatgtgtagtgacttcatacttcaccccccccccggatattacggccaatatcagagtggagtgtgcaccccctgcaatatggggagtgatatcatcctctccccactggatgttatggacaatatcacaggaggtttactt

SEQ ID NO: 590719 - DNA, 646 bp, Homo sapiens
gttaaaggaggtataaatgagcaaacttcacctttaaagttgtaaaatcaaaaaatacatgtgtaagtaattatagggttgaaaattataggccagacgcggtggctcatgcctgtaattccagcactttgggaggctgaggtgggtggatcacctgaggtcaggagtttgagaccagcctgaccaacatggaggatccccatatctattaaaaatacaaaattagccgggcatggtggtgcatgcctgtaatcccagctactcagaaggctgaggcaggagaagcgcttgattccgggagacagaggttgcagtgagctgagatcatgccattgcactccaacctgggcaacaagagtgaaactccatctcaaaaaaaaagaaaattataaaatttacccctaaaagagttaaaattaaactataaaacatccaaaatatttagaaaaacaggttagcttggaggtaaagggagggaaaaagaaaacagtaaatttgtaacaaaaacaaaaaattgccataaaatgaaagacagcaaagcatgcaagtctatatataagtaaactaaattcacctrtattaaaaaaaaaaaaacttcttggattatattaaaaaacaaacccagttccatgctatataacaaaca

SEQ ID NO: 590720 - DNA, 219 bp, Homo sapiens
agtacaagcaagaagataattctgtctcatgttctccagcgtttacattactattccagtccttagtacatatttagagatgctgctaatgtatgcatataattmtgcaggttaggaggtttctgtaggtaattcacagtggagttaggaatagaaccctttgaggctctttgctctacaaccacctcaaatggcacaggaaattaaaaaaaaattctt

SEQ ID NO: 590721 - DNA, 527 bp, Homo sapiens
tacacgttataaggcattggttcatgcgaatagagaagctgagaagccccaagatctccagtcaataagctggtgaccaaggagagctgatggtggagttccagtctgagtccaaaggcctgagaagccagacagatgacagcgtaagttccaatctgagtccaagtctgaaggcagaacaaaatctatgtcccagctcctagacagtcaaagagtgaatttttttttttttttttttttgagacagggtctcactttgtcacccaggctggagtgcagtggcatgatctctgcacacggcatccttgacctctgaggttcaagcgaccttcctgcctcagtcccccaagtagctgagactacaggcatcctggctaatttttgtattttttgtagagacagtttcaccatttgcttaggctggtcttgaactcctgaactcaagtgatccacctgccttggcctcccaaagtgytaggattacatatgtgagccactgcacctggctgaaagagtgaattctttct

SEQ ID NO: 590722 - DNA, 549 bp, Homo sapiens
ttcttgcgaaaatcattgggatatttagatcccttattaaaagaggaaaagtatacgtggtttgaagaaagtttgtgaatgaatgtttgagaactgctccatatctaatgactaatgctcagcagagactctgaacaaggaaatggctctgctctggcataaaatatttcaaaattattaatagctaaaataacctggaggtattccattttttacagtgtaattctgacagttctccataagcccttgatttaagtgatgattaaaaataaaagttaatagcattactagattatgttggaacacttttgaaagtagtttaaggtaatttcatggtatgactaaccatttttgtaatatagcatatcttatatataaataattgagaaagaagattaccaatcctttgattagtctccaaaatattaactcaatctttgtagtacaattgaagcaacagttwtgagcattgtattcaggggaaattataatcaacaaaaattctgcacacacacacacacaaagaattgaaccattctttaaatatta

SEQ ID NO: 590723 - DNA, 537 bp, Homo sapiens
cctcggatggccctttggagatgtcccaacctgaggcaaggcagggagcttgagactcctgaagatgccartttttgggtgtagtctgcccctgcagaggggtgtggccttgggggatatgactcctgttatgggtgaattagttctctccaaaagacatgttgatttcctacctacctatatttgtgaatttaatctcatttgaaaatggggtcttacagttataatcaagttaagatgagatcatactagagtgggccctaatccaatgactgatacccttacaaaatggggaaatttggacacctacacacaggaagaaggccaagtgaagacagaggcagagattggagtgatgcatctacaagtcaaagatgccaaggattgctggcaaccaccagcagctgggaagaggcaaggaagtgttctaccctagagccctcaaagagcctggccctgccaacactttgattttggacttccagccaccagaatgtgagacatacatttctggtgttttaagccacctagtttgtg

SEQ ID NO: 590724 - DNA, 537 bp, Homo sapiens
cctcggatggccctttggagatgtcccaacctgaggcaaggcagggagcttgagactcctgaagatgccagtttttgggtgtagtctgcccctgcagaggggtgtggccttgggggatatgactcctgttatgggtgaattagktctctccaaaagacatgttgatttcctacctacctatatttgtgaatttaatctcatttgaaaatggggtcttacagttataatcaagttaagatgagatcatactagagtgggccctaatccaatgactgatacccttacaaaatggggaaatttggacacctacacacaggaagaaggccaagtgaagacagaggcagagattggagtgatgcatctacaagtcaaagatgccaaggattgctggcaaccaccagcagctgggaagaggcaaggaagtgttctaccctagagccctcaaagagcctggccctgccaacactttgattttggacttccagccaccagaatgtgagacatacatttctggtgttttaagccacctagtttgtg

SEQ ID NO: 590725 - DNA, 619 bp, Homo sapiens
ggcctgggttgaaatccagaatttactatttattagttgtggatttaaaatkatattttaaggagacttttagccttctcagcacagacacattcaaagttctttcttttgtcatgggaacttttggataccacacgtttcaaagggaacattgattgtgtccctggataaatgatctatgacatcgtgtggacctctacttagctggcaacaaagaactgtaatccaggtatttttattcatggccattttgagctcttgtatttttattaatttctgagccagaattttttttagagatttttcttaaagggcacgtagtccatgtactgtaaaatatgatcaaatctacctcttaaacaatgtagggagctgcataacacacccattttagtgcatcctgtcatatcctccctgattatagttacttggtgcctttcagtatttttgaggggtgttatgaaaaacatcaactcattatggcctctaacattaagaagatgtcatgttttaatcaaccactgtcttcgttcctttgaatagtgggagaaattacagtgtagtctgagggccaagaatactacttatgcttttcaagagtaattgtttattttactat

SEQ ID NO: 590726 - DNA, 619 bp, Homo sapiens
ggcctgggttgaaatccagaatttactatttattagttgtggatttaaaattatattttaaggagacttttagccttctcagcacagacacattcaaagttctttcttttgtcatgggaacttttggataccacacgtttcaaagggaacattgattgtgtccctggataaatgatctatgacatcgtgtggacctctacttagctggcaacaaagaactgtaatccaggtatttttattcatggccattttgagctcttgtatttttattaatttctgagccagaattttttttagagatttttcttaaagggcacgtagtccatgtactgtaaaatatgatcaaatctacctcttaaacaatgtagggagctgcataacacacccattttagtgcatcctgtcatatcctccctgattatagttacttggtgcctttcagtatttttgaggggtgttatgaaaaacatcaactcattatggcctctaacattaagargatgtcatgttttaatcaaccactgtcttcgttcctttgaatagtgggagaaattacagtgtagtctgagggccaagaatactacttatgcttttcaagagtaattgtttattttactat

SEQ ID NO: 590727 - DNA, 647 bp, Homo sapiens
gcaaactaacacaggagcagaaaacctaacactgcatgttctcactcataagtgggagttgaacaatgagaacacatggacacagggtggggaacatcacacaccagggcctgtcggggggggtgggggcaaaggggagggatagcrttaggacaaatacctaatgtggatgacgggttgaggggtgcagcaaaccaccatggcacatatgtacctatgtaacaaacctgcacattctgcacatgtatcccagaacttaaaacataataataaatttttaaaatgttggtgcttattgttacattttaggtatcacttctaagggtttgtaccaggaggggatcctttggcaatagttcagttctgcattttgctgtatcaggataatctttttatgactggtgtccatcatacaactcccctgtcttcagcttccaatagcttccccatatggagaggaggagaggagacatctacaagatctcacctccacctaccactctgacgttattttgcaccacttttgttgctattatagagaccctggccttcattctgttcttcgaacacaattagcttattcccaccttctatcatttgtattcatgtttccttatgcctgaaataggtttcatcccatcttttca

SEQ ID NO: 590728 - DNA, 647 bp, Homo sapiens
gcaaactaacacaggagcagaaaacctaacactgcatgttctcactcataagtgggagttgaacaatgagaacacatggacacagggtggggaacatcacacaccagggcctgtcggggggggtgggggcaaaggggagggatagcattaggacaaatacctaatgtggatgacgggttgaggggtgcagcaaaccaccatggcacatatgtacctatgtaacaaacctgcacattctgcacatgtatcccagaacttaaaacataataataaatttttaaaatgttggtgcttattgttacattttaggtatcacttctaagggttygtaccaggaggggatcctttggcaatagttcagttctgcattttgctgtatcaggataatctttttatgactggtgtccatcatacaactcccctgtcttcagcttccaatagcttccccatatggagaggaggagaggagacatctacaagatctcacctccacctaccactctgacgttattttgcaccacttttgttgctattatagagaccctggccttcattctgttcttcgaacacaattagcttattcccaccttctatcatttgtattcatgtttccttatgcctgaaataggtttcatcccatcttttca

SEQ ID NO: 590729 - DNA, 616 bp, Homo sapiens
attttataaattaacatctgtatagaagttgagaattttagggaacattaagctttgcctgagaaattttattttctctgctggaatgtagaagaaactacaaagtcctttagtgccagaagccaacagagtcaaaattattcatagctattaaaagacaaaaggaaatttctcagggagcacaagaaaaggttcttttgtagtctgtctacagaagccagtwagaagaaatacttagaaagcctatctctattataaacaattactgcccaattagtgtattgatgggagtgtgtgttaatatgttggctctttttgttacagtggttacgtttaaatctttcacctccaattgctgtacgataaagtgagtagaagaacattaagacttttatttgtaaaattcaattttgaatgacaaattttccattcgtggataatgactctaagcctaaatgtgtataggcttaggaaccagctatgctcatctgaaagcagcagtaactgcaagaaaatacaaagagcatgtagcctgcatgcgaggaagacatttacgaggcagatgaaagtattgttctgaatatcactcaatgcaccaattaaataaggaaacggg

SEQ ID NO: 590730 - DNA, 616 bp, Homo sapiens
attttataaattaacatctgtatagaagttgagaattttagggaacattaagctttgcctgagaaattttattttctctgctggaatgtagaagaaactacaaagtcctttagtgccagaagccaacagagtcaaaattattcatagctattaaaagacaaaaggaaatttctcagggagcacaagaaaaggttcttttgtagtctgtctacagaagccagttagaagaaatacttagaaagcctatctctattataaacaattactgcccaattagtgtattgatgggagtgtgtgttaatatgttggctctttttgttacagtggttacgtttaaatctttcacctccaattgctgtacgataaagtgagtagaagaacattaagacttttatttgtaaaattcaattttgaatgacaaattttccattcgtggataatgactctaagcctaaatgtgtataggcttaggaaccagctatrctcatctgaaagcagcagtaactgcaagaaaatacaaagagcatgtagcctgcatgcgaggaagacatttacgaggcagatgaaagtattgttctgaatatcactcaatgcaccaattaaataaggaaacggg

SEQ ID NO: 590731 - DNA, 621 bp, Homo sapiens
agaatgacccaaacatagatgggtaataccaaccaagaaagtagaggtgcgattttctagtgacttaagattcaaagctggctttttttcagaattatttgtaaatatcaaataagcaaggaagatgtatgcctgggtcacttaggatccaagtaatacaaggaatatggggtccgtggggagctcatagcacaggggagagcaagacaatgaagtgaaggatcagagaagaggtgaagttcagggtattttgcagataattttgaattccagggggctcactggaggrgcttctagagttgcagagaggtgggagatgaggtctaccaaagagaatcacagtagatgacccggactttgggtgctgacagacctaatgagcagtaggaggtgtgatgcaattacttgtttgcttccaaggtagtttatgatgccaagactgtgagtgatactgaggggaggagagttacaggacttacaaaaaggagatggcatttctggggatccaacttgattattgctggagaggtagaggcctctgcagaggccatcttgctgtgaagtcacaggactcctaagatccctattatctccagcctaggcaggaggttagcaaaagct

SEQ ID NO: 590732 - DNA, 563 bp, Homo sapiens
acaaaaaaccaaacactgcatattctcactcataggtgggaattgaacaatgagaacacatggacacaggaaggggaacatcacactctggggactgttgtggggtggggggaggggggagggatagctttaggagatatacctaatgctaaatgacgagttaatgggtgcagcacaccagcatgacacatgtatacatatgtaactaacctgcacattgtgcacatgtaccctaaaacttaaagtatcaaaaaaaaaaaaaatcagagttattagcagcccatgaaccacaattggtataaagttacttctgcacatcaaagaaaattaatttagctattgtctaaattactaaattggggcaaaaagcccttttctagatgctacaagctttataaagggaaaatactatttckaatattcgacttaacatggctgctttggttaaaaaaaggataacatattaaatatttaaaatgaccagatggtaggtttgaatccactgaaaacaaacccagcagggcaaactcacaggcacaaaatgtaactcaaagcattaatag

SEQ ID NO: 590733 - DNA, 590 bp, Homo sapiens
  misc_feature 1, 2, 3, 4, 5, 6, 7, 8, 9, 10, 11, 12, 13, 14, 15, 16, 17,18, 19, 20, 21, 22, 23, 24, 25, 26, 27, 28, 29, 30: n = A,T,C or G
nnnnnnnnnnnnnnnnnnnnnnnnnnnnnngagcaagtgctatctattctcctaaacttcctctcatctgtaaaatatggatgataataacacctcttacagagttgttgtacatattaaataatagaactgtgaaatgtgtagtacttcattacgcattaggcaatcaataaatggttgatagtattactaaaaataatgaagaaaaatcttcactaaagcatccatagcaggaagtccttgctagaacataaccctttgtcctttcagtgtaaattagtgtgatgttaccagcacttacagcagatggtaaggaacacaatacaaaggaatgaatctctagtagtgaaatgtcagatactataacatttggatggaaaacaagcttttgtacatgtttgaatcatcttgctaactaccrtatcatttcatgttgacctagcatccttttcctttagtaagattgccctaataaaaacaaagcaatcgagttccaaagtaagtggagtctatacggatctgagggaggctgaggtaccagaataagtttgtgaaacactaatttaggataacaaaatacagttcctgat

SEQ ID NO: 590734 - DNA, 610 bp, Homo sapiens
tatatggaaatggaatggaatgtggtgaagtagagcaagattctgacacaaagaggcatgataagatagtctgtatggaagtatgttattgttaagattgctgtatccataacacatgccacaaagtttcttaatgctttggcttcaccaaaacttacaaaatttagtagattgaaaggtaatagaaagtacaattatttctagtgccactttttattgtttgcatatttaaatttcataaatgtaatcagcaatataaaaaagacaacatcgattaccttttagagtagcacaacttgcttccacactgctatacagggatttctttaaaagacatattgtgggtcatgttgataagcattaataaaattaatatatatgtggagttaatcagcttaatcaatctgtctytcttagtaaactaaattaaatatgtatattgtcacagtaaaggcctagtcagggagattatattactacacatcacggtttgaaagcatgacttcaaatgtaagtaacagccatgacatgaagtcagtgagatcttgccagagagtcagcacaatttagaaaatatttgtttcaggtgcactcagacctacctatcatt

SEQ ID NO: 590735 - DNA, 489 bp, Homo sapiens
tatatttgggagccatttgaggcctatgaagaaaaactgaatatccccagataaaaacgagaaagaagttatctgtgaaactgcttcatgatatgtaaattcatcttacagagttaaacttttttttgtgacttagcatgttggaaacactctaattcttaaatttgcaaaggtacatttcactgccctttgagccctgcagggaaaaatgtgaatattcccagattaaaactagaaagaatatttttgtgaaactgcttcgtgatgtgtggatacatttcatagaattaaaccattcttttgatccaagagatggaaactctctttctgtagtatctgggaagggacatttaggaacccatggagccctattggtaaaaacttaatgtccccacatraaaactagaaataagctaacattgaaactgctttgtgttgggtggattcatctcacagagcaaaacttttcttttgattcagcaggaggga

SEQ ID NO: 590736 - DNA, 619 bp, Homo sapiens
ctgtgaaaacagtttttccaaactgctgaatcaaaataaatatttaactctgtgagatgaatgcacacatagcaaagcagtttctcagaaagctttttatagtttttatctgaagatgtttcctatttcaaaataaccctcaatgctgtcagaaatatccctttgcagattctacaaaaacagtgtttccaaactgctgaatgtaaagaaagtttaactgtgcaagctgaacacacacatcacatagcaattcctcagatagcttgcatctagctttatcctgagatattcgatttttgaacattggcctctataagctctcaaatgtccattcacaaactgtagagaaacactctttccaatctactgaatccaaagaaaggttgaattctgtgagatgaatgcacacatcacaaagcaatkttcagaaagctactttctagtatttatctgaagatgtctcctttttaaatgtagatctcaatgctctccgaaattagcctttgcagattatagaaaaagagtgtttccaaactgctgaatggaaaggcaggtttaacactgtgatatgaatgcacacatcacaaaacggtttctctgatagcttccatctagtttt

SEQ ID NO: 590737 - DNA, 605 bp, Homo sapiens
tccttttgattcagcaggtcagaaacactctttttaagaatctatgaasggacatctgggagcctattgaggactacatggaaaaaaaggaatattccctgataaaaactggaaagaaattatctgtgaaactgctttgtgatatgtggattcatctaacagaattaaacatttctttttattcagcagattggaaacactctttttggataatctgcaaaggaacatttaaaagcctattgaagcctatggggaaaaaccaaataacgccagacaaaaaatagaaaaaagctgtctgtgaaactgctctgtgatgtgtggattcatctcacagatttaaaactttcctttgattcagcaggttggaaacacttttttgggagaatctgcgaagttaaatttaggtgtccattgtgtcctagaggagaaaataggatatcccaagttaacaactagaaagaagctatctgtgaaactgctttgtgatgtgtggatgcatcacagagttaaaactttattttgaatctacaggttacaaacactctttttagagaatatgtgaagggacatttgggagtcccttgaggcctatggaaaaaaactga

SEQ ID NO: 590738 - DNA, 539 bp, Homo sapiens
attcttttcaccgtaggcctcaattggttcccaaatgtccctttgcagatactttaaagagtgtttccaaacttctgcatcaaaagaaaagttttactctttgagatgaatccatacatcacaaagcactttcacaataacttctttcttgttttgtctcaggatattagggtttttgttaccatagtccccaaagggctccaaaaagtccatccatagatgttccaaaaagagtgttctcaaacgtgctgagtaaaaagaaaggtttaacactgtgaaatgaatccacacatcacaaagcagttttwcacaaagcttctttctagtttttctctgtgggtactgggttattccccatagtcttcactgggctccaaaatatcccttcgcagtatctccaaaaagagtctttccaacctactgaatcaaatgaaatatttaactatgtgagatgaacccacacatcacaaagctgtttcacagatagcttgtttctagtttttatctgggaatattctgtttttacccatagtcctcaa

SEQ ID NO: 590739 - DNA, 485 bp, Homo sapiens
ccttcgttggaaacgggatttcttcatataatgctagatagaagaattctcagtaacttgtttgtgttgtgtgtattcaactaacagagttgaacctttctttagacagagcagatttgaaacgctcttttcgtggcttttgcatgtggaggtttcaaacgatttgrggccaatggtagaaaaggaaatatcttcatataaaaactagagagaatcattctcagaaattactttctgatgtgtgcgtgcaactcacggagattaacctttcttttcatagagcagtttggaaagactctgtctgtaaggtctgcaagtggatatttagatttctgtgagggcttcgttgcaaacgggatttcttcatatactcacagaaagaagaattctcagtaactgtttgtgttgtgtgcattcaactcactaagttgaaccttcgtctattcagggtatttttgaaacactctttttgtggaatttgcaag

SEQ ID NO: 590740 - DNA, 485 bp, Homo sapiens
ccttcgttggaaacgggatttcttcatataatgctagatagaagaattctcagtaacttgtttgtgttgtgtgtattcaactaacagagttgaacctttctttagacagagcagatttgaaacgctcttttcgtggcttttgcatgtggaggtttcaaacgatttgaggccaatggtagaaaaggaaatatcttcrtataaaaactagagagaatcattctcagaaattactttctgatgtgtgcgtgcaactcacggagattaacctttcttttcatagagcagtttggaaagactctgtctgtaaggtctgcaagtggatatttagatttctgtgagggcttcgttgcaaacgggatttcttcatatactcacagaaagaagaattctcagtaactgtttgtgttgtgtgcattcaactcactaagttgaaccttcgtctattcagggtatttttgaaacactctttttgtggaatttgcaag

SEQ ID NO: 590741 - DNA, 485 bp, Homo sapiens
ccttcgttggaaacgggatttcttcatataatgctagatagaagaattctcagtaacttgtttgtgttgtgtgtattcaactaacagagttgaacctttctttagacagagcagatttgaaacgctcttttcgtggcttttgcatgtggaggtttcaaacgatttgaggccaatggtagaaaaggaaatatcttcatataaaaactagagagaatcattctcagaaattactttctgatgtgtgcgtgcaactcacggagattaacctttcttttcatagagcagtttggaaagactctgtctgtaaggtctgcaagtggatatttagatttctgtgagggcttcgttgcaaacgggatttcttcatatactcacagaaagaagaattctcagtaactgtttgtgttgtgtgcattcaactcactragttgaaccttcgtctattcagggtatttttgaaacactctttttgtggaatttgcaag

SEQ ID NO: 590742 - DNA, 625 bp, Homo sapiens
tgaggccaatcttagaaatggaaatatcttcgaattaaaacaacacagaatcgttcgcagaaactagtttgtgatgtgtgcgttcaactcacagtgtttaacgtttcttttcatagagcagtttggaaacgctctctttgtaaagtctccaagtggatatttggagctctttgagcccttcgttggaaacgggacttcttcatataatgctagacagaagaatactcagtaacttctttgtgctgtgtgtattcaactcacagagttgaacttttctttagacagagcagatttgatactctcttttcgtggcttttgccagaggagatttcaagtcattggaggccaatggtagraaagaaaatatcttcgtataataacgaaacagaatcattctcagaaacttctttgtgatgtgtgcgttcaactcacagagtttaacctttcttttcatagagcaggttggaagcactctctttgtaaagtctgcaagcagatatttggacctttttgaggccttcgttggaaacgggatttcttcatatactgctagaccaaagaattctcagtaacttctttgggttgtgtgtattcaattcacagagttgaacctttctttagaccg

SEQ ID NO: 590743 - DNA, 625 bp, Homo sapiens
tgaggccaatcttagaaatggaaatatcttcgaattaaaacaacacagaatcgttcgcagaaactagtttgtgatgtgtgcgttcaactcacagtgtttaacgtttcttttcatagagcagtttggaaacgctctctttgtaaagtctccaagtggatatttggagctctttgagcccttcgttggaaacgggacttcttcatataatgctagacagaagaatactcagtaacttctttgtgctgtgtgtattcaactcacagagttgaacttttctttagacagagcagatttgatactctcttttcgtggcttttgccagaggagatttcaagtcattggaggccaatggtagaaaagaaaatatcttcgtataataacgaaacagaatcattctcagaarcttctttgtgatgtgtgcgttcaactcacagagtttaacctttcttttcatagagcaggttggaagcactctctttgtaaagtctgcaagcagatatttggacctttttgaggccttcgttggaaacgggatttcttcatatactgctagaccaaagaattctcagtaacttctttgggttgtgtgtattcaattcacagagttgaacctttctttagaccg

SEQ ID NO: 590744 - DNA, 566 bp, Homo sapiens
ctttgaggccttcgttggaaacgggatttcctcctataatgctagacagaagaattcccagtcacttctttgtgttgtgtgcattcaactcagagatttgaaccttcctttagagagagcacatttgaaacactctttttgtgtaatttgctagtgcagatttcaagctcttcgaggacaatggtaggaaaggaaatatctttgtattaaaactagacaaaatcattctcagaaactactttgtgatgtgtgcgttccactcacagactttaacctttcttttaattgagcagtttggaaacactctctttgtaaagtctgcagtaggatatttggacctctttgaggccttcgttggaaacgggatttcttcatataatgytagatagaagaattctcagtaacttgtttgtgttgtgtgtattcaactaacagagttgaaccttcctttagaaagagcagttttcaaacactctgtttgtgcaatttccaatggagatttctagggatttgaggccagtcttagaaatggaaatatctttgtataaaaactagacagtgtcatt

SEQ ID NO: 590745 - DNA, 375 bp, Homo sapiens
acttccagctccacctgctgacctgtgggaagaggagaagggctggagattgagttcatcaccagtggccaatgatttaatcaatcatgactacgaaatggaacctccataatgaccctcagtgatggggttgaagagcttcctgattggtaaacacatctacgcgccaggagggaggcacaccccaaccccggcggtgcagaagctccttcactctggaccctgatggcccctactctgtacctcttcacttggctgttcacttgtgtctttcataataagccaggaagcataagtaaagttctcccctgcgttctgtgaaccattawagcaagttattaaacctgaggagggggttgtggccaagtctgaaca

SEQ ID NO: 590746 - DNA, 654 bp, Homo sapiens
ccgggcgacatagtgagacttcatctctataaaaataaaaaataaaataaaataaaatataaagtattgtgaataaaaaagaattcattatcatgacattttatcaattcatgctgaggccatatgtaaaataacatatgcagtgcatcccaaccatttattccatgagtattttttgactgtctacaaacagcccaatactcttttaagcatttggtaacaggcctaaaacccctttcatcatggagcattaccttctagtatttaactctgaaatctgtgacaaaccacaaaaaggaatgaaagtgaaggtcctggagctgacaataaaatagtcaatgaagattaggtgcagtggctcacgcctctaatcccagcactttgggaggctgcagcaggaggattgcttgaggccaagagttcaagaccaccctgggcaacatatcragaccttgtctctacaaaaaaatcaaaacattagccaggcatggtgatacacacctgtagtcccagctactcaggagactgaggtgggagaatctcttgatcccaggaggtcgaggctgcagtgagccaagctcaaagcacagaactccaagcctggaaaacagagcaaaactctgtctaaaaaaaaaaaaaaaaaaaaaaaaaaat

SEQ ID NO: 590747 - DNA, 581 bp, Homo sapiens
gggcagggcatattcacttcttttgtgattcttcagttacttcaggccatctgggcgtatatgtgcaggtcacaggggatgcgatggcttggcttgggctcagaggcctgacagtgcaccctatccatgacctacttgccagtgatgggaagcacatgggttagagccagcttaggttcttaattcattatacacttttctgccacttcattcaacaactgtttgctcatcttcagctacccttatcaaattgtcatggcaatagtgtagtttgggatcccacagctttgttttcaaggcttattatgatttagataaatttgggctcatgaggcagctttgtttggtgtcttcagcaggagtttaaaaggacagatggaaatgtgcccatggcatatcaatgccttgtaattcactggatggcggcagtgacacctgaattcctgggatgggggtggttggcgctcaraaatggttggagtctgacaatttggaaacgaagcagctacctttgaatatggaagaggattgtggttatgttaatattttacttctgaatatgcactttcgccaaaaggaaa

SEQ ID NO: 590748 - DNA, 582 bp, Homo sapiens
gtcaatgtgagtccttttcttcatttgtaagatgtagataggaaaatttatcactctagtttgtcatagtgattaaattagactatacaaagacttagaaggcatttgagtgttagcgagctttatactttccagaaatctagtgaataaggataaccaaggaaagactgggtagattttgtgttcrattctatgagacttctaggctagcagcctggaattcatgtgtatttactaaagcatgccagctccgtagtattttatgatttactgagcattgtcaacccattatttcactttattcttatgaaatccttttggtagatgtagggctagcattttacatgtatactatttgtttacagaagtcttgtgacttagccaaagtcacagaattgttaggagaagccaggataaaagtcaggtctcctgtcttcagcagtgccttcattaggggcctcttctgagaggagggaatatggtggtcttgcaaggttcatggcattcagatcaattgaacctacaatttctacttcatttattctcctgtaaaatatgcaccttaaagagaaaaaaaatgcc

SEQ ID NO: 590749 - DNA, 632 bp, Homo sapiens
tcttgatctttgggaaactgaccacccaagattccttaggtggtggtgacagaaagtagccagcagtcaacaccatggacccttcagcatggagggatttgatttgtgtcccagcgttctggctcatttcagcctctgcgaggccccacctcagtccagcagagcgtcccagtccgcagtgcggggaatcctggctgggcagtttgtcctctgcggcgtctttgccttgcactgctcagcttgcctccccactgcgtgctgctgcycgtgctctctagtgcggcgcattgctttccttcagattctggccccgaggccccacttccccaagtgtcaccctctgctatctcctttggcagcaggcaccccagggatgcgttcactgatgatgacaccctctttggcccagctttggcctcctttcctcatatgtggtctgcgtggtcaggttgcagcaggtgtgggccccacctttcatgcaggcagaagcagcagcctggagtcccctgtctagtatcttagacagacaatgtctcattgacacagccccttctttctgcagccagccctttgtttcctgtcctgagtccttgttattttctctagccatttcttgcatgtgtgcagtaggt

SEQ ID NO: 590750 - DNA, 625 bp, Homo sapiens
ctgtctgccctggcaaagagcagatggttagtacattgggttgaataaaaatgtcatagataacgaagtctgtgttaatccagaggacatgagacacattctgcttcccttaaagtgaggtcctcgatgcatgaagatgaaactgcaccaactaggaaaggtcaggagaggtactaacacatctgctatcagggaactcggaacattacagctgggggcgagggtcttggagaagatcagaacatttgaaaaaagagctgtacaaagaaaagggggagagaacagatgagagaagtgcagcttgtgtgtgcgggtggggagtgagggagagtgctgaggcaggatgaccttgtactttatttmatgaccctgaagtaccccaggatgctgctccaacctctcctatggctcccagatgctgtgggtccctttttttcttaacttgtattttaggttcaggggtacatgtgcaggtttgttatataggtaagttgtgtgttgcggggggtttggtgtacaaattatttcatcacccaggtaataagcatagtacccaataggtagttttttttatcctcaccctcctcccaccctttacccttaagtaggccctggtgcctgctgt

SEQ ID NO: 590751 - DNA, 625 bp, Homo sapiens
ctgtctgccctggcaaagagcagatggttagtacattgggttgaataaaaatgtcatagataacgaagtctgtgttaatccagaggacatgagacacattctgcttcccttaaagtgaggtcctcgatgcatgaagatgaaactgcaccaactaggaaaggtcaggagaggtactaacacatctgctatcagggaactcggaacattacagctgggggcgagggtcttggagaagatcagaacatttgaaaaaagagctgtacaaagaaaagggggagagaacagatgagagaagtgcagcttgtgtgtgcgggtggggagtgagggagagtgctgaggcaggatgaccttgtactttatttaatgaccctgaagtaccccaggatgctgctccaacctctcctrtggctcccagatgctgtgggtccctttttttcttaacttgtattttaggttcaggggtacatgtgcaggtttgttatataggtaagttgtgtgttgcggggggtttggtgtacaaattatttcatcacccaggtaataagcatagtacccaataggtagttttttttatcctcaccctcctcccaccctttacccttaagtaggccctggtgcctgctgt

SEQ ID NO: 590752 - DNA, 553 bp, Homo sapiens
aatcctggttgtgtctgtgtgggtgttgccaaaagagattaacatttgagtcagtgggctgggggaggcagatccactcttaatctggtggacacaatctaatcagcttccagctaatataaagcagccagaaaaacatgaaaaggagagctgggcctagcctcccagcctacatctttctcccatgctggatgtttccttgtgatcgtgtaagttaacacttaataaatctcccctctctctctctatatatatcctatgagttctgtccctctaagagaaccctgactaatacagattttggtaccaggagtggttctagagaaacagaatattaaggattgagttctttcgttggttttggggtttctggaattggctgcttaatatggttagaccccaaaatgctaaggactgtatgtctaatagtatggagaagactgatagtccttggtgtgaacggtttagatagttargcaaaataaatgcatttgacactcctgatttcactgctcatgagaggcaaggagtttagtgactctatacataatac

SEQ ID NO: 590753 - DNA, 365 bp, Homo sapiens
actacagcccctttctaggacatccctgaaggagagcagtgaagggaaatgttcccagtgggcagaacttcgagcagtgcactttacatgaaatgagaaatggtcaggtgtgcgattatatactgattcatgggctgtagccaatgacttggctggatggtcagggacttggaagaagaatgattggaaaattggtgacaaagaaatttgaggaagaagtatgtagatggacctctccgagtggtcaaaaactgtgaagatatttgtrtcccctgtgagtgctcaccaacaggtgacctcagtggaggaggagtttaataatcaagtggataggatgacccattctgtggacactactcagcctc

SEQ ID NO: 590754 - DNA, 537 bp, Homo sapiens
tcctcaatttttataactgtctcttttaacagcttccagaatgaaagtggctgaggctggcatgtctgtgccaaccccaccaagttctggtgccaagtgcatcattgatctcagagtcaaatccctgagtgacctggaagcaacaagacactgttacgtttgtggcagattaggaagcagggacccaggccctagggacgtcccttcaattcctgaacctacccctacccaagcaaccacactctgggactcttcttaacatgcatttcaacttatctagactatttaatttttgtaatgtatttctatgcgttcttgactgcttgtcagaagggacctcacaacaccctctacgccccttcctcagcccctccagtcacacagcggctgacacatattcaggcacatggctattctttgtggctctcrtacaaggtgggtggctacgttcagctttttctagaggacattgttccaaagctgtcaaccaacaaatatttatagaacattatttaccatttctatgttcagctatgt

SEQ ID NO: 590755 - DNA, 346 bp, Homo sapiens
ccctctctctcttgctcctgctctggccctgtgatatgcctgatctcctctcaccttccacaatgattgtaagtttcctgaagcctccccaraagccaagtagataccagcttcatgctacctgtatagcctgcagaaccatgagccaattaaacctcttttccttataaattacctagtgtctgatatttcttgataacaacgtgagaatgatctaatacatacaaaagtatggataaatctcaaaagcagaatgataaacaaatgagtccagactgggaaaaagctacaaacagtattattccatttacataatagaatgtataaggcaaaactatagagacaa

SEQ ID NO: 590756 - DNA, 418 bp, Homo sapiens
ctggctaacgtggtgaaaccccgtctctactaaaaatacaaaaaattagccgggcacggtggcactcgcctgtaatcccagctactggggaggctgaggcaggagtattgcttgaacctgggaggcaggggttgcagtgagcccagatcgcgccattgcactccagcctgggcaacaagagtgaaactgtatctcaaaaaaaaaaaaaaaaatttttactctacccaaatraacagaataaacaagcatcactgtgcaccatttgtgaggtcaatattcccattgcctaaaataaaacttcactcttgcttgatatgctgatactaggagggatatgacaaggctcagatatactggtaggggatacttcaagaaaacgtattgaaataatgtcttttaaattttataaaataaaata

SEQ ID NO: 590757 - DNA, 621 bp, Homo sapiens
attcaacaaaataaattacaaacttcatattgcccaataaatatgaaaatgaaaggtgtcttgaaagattcatgcacgtctgagagcacaagaatggcaatgttctttataaggggctttatatgcttgagggcttaccctttcaatgtcttccgtatttaaatactgaacaagagygatagatcctttgccccacagctgaggaaataaaaggatcacacgcaggcaagcagggctgatggaaaaatatgtgagagaaggacactttttttattttgctccacaatccagaagcctgattcaagagggtgcttcattgtggttagtaattcatccaaacatgaacctcagagagagcaccaccctcccacggggcatgagatgaggtgctggcccacagacacatgactaatgcaaggtcatcccagggtccacaggctgaacaagttctgaacctcaaccctaccaatgtcaggccattgcttcacaggagctgcatttcctctttaaaaggcaagaccaagaatataaaaccaaagacctccatggccccaaccaacccatcttaggaacacagaggctcctttcaacagatccaacttcctttagaaattctggcat

SEQ ID NO: 590758 - DNA, 537 bp, Homo sapiens
ctcctcccagggttgaggggcagtcaaaatatccycaaacctaatgtgatttctcacctgccaagtggcagcagtgtggcatcggggcataaaagctgctaacagtggggaaaggcctggcccagtgccaagcaggctgtgggcgtccctagaagaatgagcagcgcaactacagcaggagtcccaggccctgggcagagagacacccctttatcgagacctactacctgccaggcactttatttattggtaaatttaatcagattttgaaaaccacaaaatctggatacatttgcattgtggtatttgttgtaattgttggatataattacatatacatgctataaaatataagatagaactagaacaagagttcttaatctggcatctaagggaacccgaaagatcaaaggatagagttcaaggagtctaaaaatttggaagagaaaaaatatatatctttattttcactaatttctacctgaattttagcattctcttcaacgatgaatgtaggcaacaaaccacagcagtatt

SEQ ID NO: 590759 - DNA, 537 bp, Homo sapiens
ctcctcccagggttgaggggcagtcaaaatatccccaaacctaatgtgatttctcacctgccaagtggcagcagtgtggcatcggggcataaaagctgctaacagtggggaaaggcctggcccagtgccaagsaggctgtgggcgtccctagaagaatgagcagcgcaactacagcaggagtcccaggccctgggcagagagacacccctttatcgagacctactacctgccaggcactttatttattggtaaatttaatcagattttgaaaaccacaaaatctggatacatttgcattgtggtatttgttgtaattgttggatataattacatatacatgctataaaatataagatagaactagaacaagagttcttaatctggcatctaagggaacccgaaagatcaaaggatagagttcaaggagtctaaaaatttggaagagaaaaaatatatatctttattttcactaatttctacctgaattttagcattctcttcaacgatgaatgtaggcaacaaaccacagcagtatt

SEQ ID NO: 590760 - DNA, 537 bp, Homo sapiens
ctcctcccagggttgaggggcagtcaaaatatccccaaacctaatgtgatttctcacctgccaagtggcagcagtgtggcatcggggcataaaagctgctaacagtggggaaaggcctggcccagtgccaagcaggctgtgggcgtcyctagaagaatgagcagcgcaactacagcaggagtcccaggccctgggcagagagacacccctttatcgagacctactacctgccaggcactttatttattggtaaatttaatcagattttgaaaaccacaaaatctggatacatttgcattgtggtatttgttgtaattgttggatataattacatatacatgctataaaatataagatagaactagaacaagagttcttaatctggcatctaagggaacccgaaagatcaaaggatagagttcaaggagtctaaaaatttggaagagaaaaaatatatatctttattttcactaatttctacctgaattttagcattctcttcaacgatgaatgtaggcaacaaaccacagcagtatt

SEQ ID NO: 590761 - DNA, 504 bp, Homo sapiens
ggctggctgccactaagcccttccctactggaaactccttccctgtcccctcccccagacaacctcaggaaagggtctaggtgtttccacagtggtctaggaagggctagaccaatgtggagtggacgacatgcctggtgtctccctctggaragtgcactctggatactaatctgagtctccaaaaaggagaaagggttagggatcatttggtctcaccttccctcctgcttttacagaaagggaaccagagaggtatagtgacttgtttatgtcatgcagtgacttgacagcacagtgggacatgaacttggagtcttggatgtgcagtcctgatcttgctcccagcactgctcagggaagacattcttcctgctctgccttcccacctctcctcccaggctcctgtgatccccacagggagagctagagcttctataaaaactgctgtaattgattcttaacaggaagtgagggctttttcactttgagttgacaaccaca

SEQ ID NO: 590762 - DNA, 504 bp, Homo sapiens
ggctggctgccactaagcccttccctactggaaactccttccctgtcccctcccccagacaacctcaggaaagggtctaggtgtttccacagtggtctaggaagggctagaccaatgtggagtggacgacatgcctggtgtctccctctggagagtgcactctggatactaatctgagtctccaaaaaggagaaagggttagggatcatttggtctcaccttccctcctgcttttacagaaagggaaccagagaggtatagtgacttgtttatgtcatgcagtgacttgacagcacagtgggacatgaacttggagtcttggatgtgcagtcctgatcttgctcccagcactgctcagggaagacattcttcctgctctgccttcccacctctcctcccaggctcctgtgatccccacagggagagctagagcttctataaaaamtgctgtaattgattcttaacaggaagtgagggctttttcactttgagttgacaaccaca

SEQ ID NO: 590763 - DNA, 579 bp, Homo sapiens
atttggcaatcttggctctaccccaggttttaatgttaaaggcagtctctttctagggcatgggaatgcaatggaagtaaatctcttcctacacaaatcctcttactaaatgtaaaactaacttttagatctgttgaatcatccttttgaatcacaggttctatttgaaaaatataatagaatgtctcacaaataagtgcattatcatctaaargatagcaaaatgtctgaaattgtagaaaacaaagttccagaaatgtgtttactcactaagtacattctacagccctacctgtatctggtattaaagacagtcacagggaatatagcagtaatgatccaaagcatttgaaataggaacttcttgctttcgtggaactattaatttactgggaaagacaagagatgcagaacaaccatgacatgaagatataaatgttcagaactaagagagtggtatggtgtgatacaaatttaggtcacgaaaaaggctattcctattagctttgaaatgcccacgtatgttcaagcatccatcattaattctatgcatattcatattttggtgtataagccaaa

SEQ ID NO: 590764 - DNA, 579 bp, Homo sapiens
atttggcaatcttggctctaccccaggttttaatgttaaaggcagtctctttctagggcatgggaatgcaatggaagtaaatctcttcctacacaaatcctcttactaaatgtaaaactaacttttagatctgttgaatcatccttttgaatcacaggttctatttgaaaaatataatagaatgtctcacaaataagtgcattatcatctaaaggatagcaaaatgtctgaaattgtagaaaacaaagttccagaaatgtgtttactcactaagtacattctacagccctacctgtatctggtattaaagacagtcacagggaatatagcagtaatgatccaaagcatttgaaataggaacttcttgctttcgtggaactattaatttactgggaaagacaagagatgcagaacaaccatgacatgaagatataaatgttcagaactaagagagtggtatggtgtgatacaaatttaggtcaygaaaaaggctattcctattagctttgaaatgcccacgtatgttcaagcatccatcattaattctatgcatattcatattttggtgtataagccaaa

SEQ ID NO: 590765 - DNA, 549 bp, Homo sapiens
taacaatcttttgaaaagaaatacaataaagtaacaaagctgtgaatcagaaaaaaattgaaaaaagaatgccaattcaaaccttaagaaaactagaggagaagtggaggagtgggcaagatggctgaccagaagcagctagtgtgtgtggctgtcatggaaaggaacagaaggggtgagcattaggtmtttgcaaccctcaagtcaggagatctccttgtgaacccactccaccagggctttcagtcttcagtctaatacacagagctatgtggagtcttggcagagcagccactcaggccagcatggagtcctcgaaggcttagatacttgggttttctggtaaaagtagctgcagccccagcaaagttggaggttagactcctgtatataaccctaggaaagaggctgaatccaggggtgttaacagcaacaacccacaggccccacttccatgccacctcacaagataagatccactggcttggaattccagacagctaccagtagtggcattgtacctccctaagaaggagctcaaagggaaga

SEQ ID NO: 590766 - DNA, 604 bp, Homo sapiens
aggcagcaatatttgctgttctgcagcctctgctggtaatacccaggaaaacagggtctggaatggacctccagcaaactcccacagactgagcacctccaacaggctgagggacctgattgttagaagaaaaactaacaaacagaaaggaataacatcaacatcaacagaaaggacatccacaccaaaatcccatctgtaggtcaccaacttcagagaccataggtagataaaactacaaagatggggagaaactagagcagaaaagctgaaaattgtaaaaccagagtgccccttctccttcaaaggattgcagctcctcaccagcaatggaacaaagcaggacagagaatgactttgatgagttgatagaagtaggcttcagaaagtcagtaataacgaacttctctgagctaaacaaggatgttcgaacccatcgcaaggaagctaaaaaccttgaaaaaagattagacaaatggataactataataaacagtatagagaagaccttaaatggcttgatggagctaaaaaccatggcatgaggactacgtgaaaaatgcacaaacttcagtagcckattccatcaagtggaagaagggta

SEQ ID NO: 590767 - DNA, 633 bp, Homo sapiens
ataccttgttgtttccctacttgccctctctttttccttctcatttggacagaattcagttaatcatacattgtgttcagggcacattagttcctagaagtctcctcttggttaatttttgaacattggagkattttctgatttttgttgttcttagtgcttcctgacttaattcccatgaggtcagaaaatgttctgtatgaatttaaaacttttgaaatgtactaacactactttatggcccagaagtatatgactaatctttctacattttctgtgtgaatgtgaaataaaaatgcatagtcagaagtttatagatgtagtatcatatataaatcgcaagtttatttcaaatattctctccctgatcatttttatctcacttctccatcaattactgagaattgtgtgttaataattttcactgtaatgattaatttttatatttcttccagtagttattatttttcatattgaagtcaaataactagagacatgtaaattcagaaggctattttgcaattattaatgcagatatactatgtttttttgtggtagttgtatgtgatatcataatttcatcaacttttgaataatttggatacatttatttttttaagtagggttttaaaa

SEQ ID NO: 590768 - DNA, 633 bp, Homo sapiens
ataccttgttgtttccctacttgccctctctttttccttctcatttggacagaattcagttaatcatacattgtgttcagggcacattagttcctagaagtctcctcttggttaatttttgaacattggaggattttctgatttttgttgttcttagtgcttcctgacttaattcccatgaggtcagaaaatgttctgtatgaatttaaaacttttgaaatgtactaacactactttatggcccagaagtatatgactaatctttctacattttctgtgtgaatgtgaaataaaaatgcatagtcagaagtttatagatgtagtatcatatataaatcgcaagtttatttcaaatattctctccctgatcatttttatctcacttctccatcaattactgagaattgtgtgttaataattttcactgtaatgattaatttttatatttcttccagtagttattatttttcatattgaagtcaaataactagagacatgtaaattcagaaggctattttgcaattattaatgcagatatactatgtttttttgtggtagttgtatgtgatatcrtaatttcatcaacttttgaataatttggatacatttatttttttaagtagggttttaaaa

SEQ ID NO: 590769 - DNA, 590 bp, Homo sapiens
ctgtcaccaaaaagaccacgaagcagccaccatcagggctcttgctataaagccgtggagttcaaggaaggcaaatgaaatgactaaacaatataaaaatatttgctgcagcctycacttccttaactggctgtgatgtctgagctgacagtcaaagtggccctcttgcacttcccatcccatgctcttacttctgtagcatcttagctgggcggggttctcaacctgggggcataccgtgcaggattggaatgcttgttagtttgtcttactgcatcgttacagtttacttctttctttttgagacaagagtctcgctctcgcccaggcgggagtgcagtggcgcgatctcggctcactgcaagctctgcctcctgggttcacgccattctcctgcctcagcctcccgagtagctgggactacacgcgcccgccaccccgcccggctaattttcttttgtattttttagtagagacggggtttcaccgtgttagccaggatggtctcgatctcctgactttgtgatccaccggcctcggcctcccaaagtgctgggattacaggtgtgagccaccgcgcccggccatcg

SEQ ID NO: 590770 - DNA, 628 bp, Homo sapiens
attcccccagggctgcttgacaaatatttctaagcctcattttccttatatgagaaatgagaatgataatagtaactacctcataagattgttatgaggatgaattgagataatgcatggaatttcttggcatagagtaactactcaaccaatatttgatattatctagtcattaaatcaacaaaaatgatgctgacatttctgtgagagaattctgtagaagaaaaaagttaacaattcaaggaattgaaagaaatctttggtacttcagtggttggtgttattatgtatcctacacgaacacaaaatttggcctactttcattttcgaatttccatataactcaagctagtaaaaattcccagcatgagactccttccactagagaaaagaaggaaaagtaaacgggaytttgtctttcacctttggtaccaactcagccacaggtgggtagagcatcaggtgggttcttggggtccctgattccaggacttggctcatggatggcattgctggacctgccttgggccagagaggagcccagtgtcctaaatggtgagtcccaggccaggcagcattcaccacgagctgactgaagagctcttggaccttaagggaacatgtatgg

SEQ ID NO: 590771 - DNA, 579 bp, Homo sapiens
ggttatgctatggtgtcatgacatcctgctccctgaagcataaacagtcctgtgcagttgagaacttttacatccttacaaggaaaggtaatgtggagtatagagtgactggaaaatcaccaccaccatccctgagaaacagtrgtgttcttttgccctcagcgtgagtaggtgaatgggatgggtgagtatggggtggtcttgaggggatggcaaagacagacttttccctaagaccatattgagtgaaaaagaggctgatgtcccttacctggcagggaataaaatctactctctgggtcagcaattaacagactcagctttggaactcatttgggcctagagaaaggttagtgaggacacaaaaacagattactcctaggaacgcagtaaaaggaaatgaggtcattatgatcatatttcctctcttttacctcctcagggcagagcatgtatcattattcaaaactgtcgtgtatgaccagctgtgaggacatcaacttcctggggttcacgaagagggtagagctcatctgttgtgatcatagtaactactgcaacctccctgagggagtttag

SEQ ID NO: 590772 - DNA, 463 bp, Homo sapiens
taagttacagttttttaggaaattggcttgtttcacttaagttttcatattcagggtcataaacctttatattgtattctttattaatttttaaatctttacttttagttttgtccctctttttcttcctaacatagtttatttgtactttttctttttttcttgtccatttcactggtctttgcaaataatcagctgttggcaaggatactctcaagccctcttgtataccttttacctaaattctccaatttttaacatttgccacaytgaatgtatcattttctccctctcccacacgcacacacccacatacacaaaaaacactttttttctgaactatgtgatgtaagttgcattacagcctgctttttaccctaattgttcagtgtatttttcctaagaacaaggatattctcttacaaaattatagtgtatttatcatatttaggaaattaacata

SEQ ID NO: 590773 - DNA, 463 bp, Homo sapiens
taagttacagttttttaggaaattggcttgtttcacttaagttttcatattcagggtcataaacctttatattgtattctttattaatttttaaatctttacttttagttttgtccctctttttcttcctaacatagtttatttgtactttttctttttttcttgtccatttcactggtctttgcaaataatcagctgttggcaaggatactctcaagccctcttgtataccttttacctaaattctccaatttttaacatttgccacattgaatgtatcattttctccctctcccrcacgcacacacccacatacacaaaaaacactttttttctgaactatgtgatgtaagttgcattacagcctgctttttaccctaattgttcagtgtatttttcctaagaacaaggatattctcttacaaaattatagtgtatttatcatatttaggaaattaacata

SEQ ID NO: 590774 - DNA, 620 bp, Homo sapiens
ccattaattttgtcatttgtcttgccggacaaggacaggacacaatttaattaaaatagattcaagaaaattatttattaataatagatacagttatttcaatgcaaaaaatagtcattgcagtgccagaaatatttatcatatgcttgctatgtgtaaggcagtgtgccaaacattgctggtatgtgagtatttgcatatgtactaggagacattgtgctgtgaatgttttttttttttttttttactgkggctctttttccctagatacatatttaaggggtagaggtaggtgtataacaattgtaaattatgtcattatccattaattcaaatgacttaggatttttatattatataaatatgcggaagtgttatatatatagcatttgtttacatgtacctccttttagtgcactatcatttcataattagagtaatactatacacccgttaaatgatattgtttcataattgtaacattatacactcattaaatgatacatatttgctaaccacagttaagcactttatgttgttgcgtttaattctcacagtagcttcatgagttggtcttatttttcccatgtttcaggtgagcaaacagacttaaattgact

SEQ ID NO: 590775 - DNA, 620 bp, Homo sapiens
ccattaattttgtcatttgtcttgccggacaaggacaggacacaatttaattaaaatagattcaagaaaattatttattaataatagatacagttatttcaatgcaaaaaatagtcattgcagtgccagaaatatttatcatatgcttgctatgtgtaaggcagtgtgccaaacattgctggtatgtgagtatttgcatatgtactaggagacattgtgctgtgaatgttttttttttttttttttactgtggctctttttccctagatacatatttaaggggtagaggtaggtgtataacaattgtaaattatgtcattatccattaattcaaatgacttaggatttttatattatataaatatgcrgaagtgttatatatatagcatttgtttacatgtacctccttttagtgcactatcatttcataattagagtaatactatacacccgttaaatgatattgtttcataattgtaacattatacactcattaaatgatacatatttgctaaccacagttaagcactttatgttgttgcgtttaattctcacagtagcttcatgagttggtcttatttttcccatgtttcaggtgagcaaacagacttaaattgact

SEQ ID NO: 590776 - DNA, 620 bp, Homo sapiens
ccattaattttgtcatttgtcttgccggacaaggacaggacacaatttaattaaaatagattcaagaaaattatttattaataatagatacagttatttcaatgcaaaaaatagtcattgcagtgccagaaatatttatcatatgcttgctatgtgtaaggcagtgtgccaaacattgctggtatgtgagtatttgcatatgtactaggagacattgtgctgtgaatgttttttttttttttttttactgtggctctttttccctagatacatatttaaggggtagaggtaggtgtataacaattgtaaattatgtcattatccattaattcaaatgacttaggatttttatattatataaatatgcggaagkgttatatatatagcatttgtttacatgtacctccttttagtgcactatcatttcataattagagtaatactatacacccgttaaatgatattgtttcataattgtaacattatacactcattaaatgatacatatttgctaaccacagttaagcactttatgttgttgcgtttaattctcacagtagcttcatgagttggtcttatttttcccatgtttcaggtgagcaaacagacttaaattgact

SEQ ID NO: 590777 - DNA, 470 bp, Homo sapiens
agcgagactccatctcaaacaaacaaacaaccaacaacaacaacaacaactccagtcaggggttagatccatttacaaatggtatgccaattcttcaggtgtcttctccacagctagagaaaagagagttcagaaaggaaaaaaaaattaccaggagtgcatggctttgtgagtgccttcaatattccctttttataatgcaaattctcccaggaggggccacaccagatgttaccaatctattttccctgcataattcactgggctgcaacacacagatactccagaagagagcaattctggtcactgcagsacctccgagtagagtagagcttgttaatcagtacactcttctgccaagaaccttgatgtgtttgagaatgaaacttgggatttgaggatggttggatagactctaatttgtagaactgggaggacccagctggcatctggcttacaaagctatttta

SEQ ID NO: 590778 - DNA, 479 bp, Homo sapiens
attgtaaatcaaaggttggaaaagtcttctgtgaaagtggttctctcataactgataagggccatcttcttcactattgttatcagtattctgacttacaaacactcattaaaatattgtatttattagccacacgagtggtcatatactcctcttctgaatatttattctttcttcaagggcatgaattcatgggatatgaggggcaagaatctcacttctagaattcatctaaggtagaggattctaagatgkgatccacaggcaaaatggttacagaacagttttcagcaactgtctttcacataactattacatcagaactactactaaagtgcactgtttattcaccgagaaggcttttaaaggaaagctaccattaatctgggaggaaccctgtagacttacagactcagtaaacataatacttctttaaaaaaaaaaatcaagaaactagaactcaggaaaatgggttaaaa

SEQ ID NO: 590779 - DNA, 479 bp, Homo sapiens
attgtaaatcaaaggttggaaaagtcttctgtgaaagtggttctctcataactgataagggccatcttcttcactattgttatcagtattctgacttacaaacactcattaaaatattgtatttattagccacacgagtggtcatatactcctcttctgaatatttattctttcttcaagggcatgaattcatgggatatgaggggcaagaatctcacttctagaattcatctaaggtagaggattctaagatgggatccacaggcaaaatggttacagaacagttttcagcaactgtctttcacataactattacatcagaactactactaaagtgcactgtttattcaccgagaaggcttttaaaggaaagctaccattaatctgggaggaaccctgtagacttacagactcagkaaacataatacttctttaaaaaaaaaaatcaagaaactagaactcaggaaaatgggttaaaa

SEQ ID NO: 590780 - DNA, 656 bp, Homo sapiens
accctgtctcaaaaacaaacaaaaaaaccaaaagctctcaattgtctcattaaaatagtcaaagaaaagaaaccaaatgaaaagaacattcacaccttaatattggttaggtttttaaaaatcttaacttttaagacttttcctcaaaacttttgagtgccaactatgtatgtgattagcactatactacacatcaggaataaaagataagaaagataggattttaaattcaaatgatgatctgttataaaaccctccaaagacagatatgaaatagaaaggtaaatttctttgttgacttatgataattgatgaagacattaattgttgaaagcagaaagttgtccaatagcttatgaagraaatgtctagcagttattggtgcagaaataggtactcaaatatttgttgaattaattaatgaacatccaaaagggagaggatttccactcttgacatttaatgccttcaaaacatttatttaaatataacattatcattacttttactgttaaaaaattagataatgcattattcttttaaactatattagttgtctttgcaaacaattgccaatgaagtaaacccgatataaacaccaccttaaaccataatctgtattcaaaacatttatgccaagcccataagatgaatta

SEQ ID NO: 590781 - DNA, 539 bp, Homo sapiens
tttctctgaaagtatactatctctagctacccctgcccctagtttctcccaaatactcaaaattactaggcagattataattacrttgctctggtgatgctaagatgtgatttattcaatttttctaaatgctttgacccaggaaacagtatttagtacccataaccaggattttagttgctttagctaagatggaaaacaaatgagttttaatccactattgacagttaatggccaattgttgttactgacttttttgcatcaacgtctctgtacagattttcatgctgttaagagtacctttagtttcaataaattaataagaaaggatttgtcctagcaaagtactcttagttcatgctacccttgagaggcacagcttagcacggagtaggcatgagataagaagaaatgcgccctttggaaagagcagcatattttatctttttgtcacagaaggtcgagtaaaagcaatttgagattgttgaaagtctatatagcagctgataataatgctagctaatgttttttaatgttca

SEQ ID NO: 590782 - DNA, 447 bp, Homo sapiens
ggaagagagaggaagagacatagcctgaccaatattgtctttatcctttcttatttttagggtcattttagtgagatttaggagaggatataaatatttgtgcaaattctcatcttaaacttaagaccttattaaaacattaaaaactgctttagcatactttgtttgagggcttgggagtatccattttggtcatttttctgttatcatcttcttagcctaacaatagcatttgacacaggtcacggtcaatcagttcctttttcaaacatgttctgcagttggcttccaagatgccatactctgtcttactgtccactcaaacttagtcaccattgccacttctcccaaacctcttaccattggcatgcccaaagcctggtcttggatctcttcttggtatctrcaccctgctttgtgagctagcccctcctcatggcttcaaat

SEQ ID NO: 590783 - DNA, 471 bp, Homo sapiens
cacaggacccaggcctgctgacttcagctgtaagaagggagctggaacagacaattgctgaggctccatctggttttcaaattctgtgatctcagtggccactgtgaaaacaaatggctagaacaggttccattgaatgttcattgaaattccattgaaaggttaataggaagaataagaggagaaaagtaagactagaattagtgaggaaagttataattagcggattgtacaagcctaatatggaaaaatggaagaataaaataaaaggcaacaagtggaatccttaagtaggtaattgggcatattcaataggaacagagaggaatctttggagaataaattaagcagttatttctgaaacargagcaactttcaggaatttttttttaaggaaccaagaaatactttaaccagtgggtgggcagaccttttgtgtgaaaggccagattgtaaatagcttgactttgt

SEQ ID NO: 590784 - DNA, 536 bp, Homo sapiens
ttgttgatggcactttttgggggcctgatccacacacacacacacacacacacacaccaagcactctacagttcataaacatgactcacggttctccctgttcctcagttaccttgtcagttgcctggttctcctttctttgctatgcttatatctgagcagctgctgtgccaatctcatttttgattcttcgatgataatagcaataagagtaaatgattacttaatgctcactacatgccagtctcctaagtgcttatatgtattaactcttctaatccttaagaygaaagagacaaatactattattgtcactcttttaccaatgagtaaccatctgaggcaggttccattattgcccccattatacagatgtaggtactcttagtacccccattttacagatcagtacactatagcacaggcaggttaagtaagtttcacaaaagttacacagactgataagtaacaaaagtagggtttgaacccaggcattctctgtccttagcttctgctctaacttctacatgatggaa

SEQ ID NO: 590785 - DNA, 630 bp, Homo sapiens
aaaaattagataccatttcagttgtactagattggcacaattttgaaatkaaaacttgtagtagtaaagatgtcagaaaacaaaacatttttagagtattcacatggatatacatggtgacagtacacgtatatttcattttaattgtcttatatatggatatgtcacgattatttcatacatttatctagtgatggcatttggattctgcctatttttttctccttaataatgtcataaaatgttgttatgcctagatggtaagcttgtgaatggttttccttaaaagaaaactccttctgacttatgaattgtaaaataatcaataaaataaaatagagcatatcactaagtgatcaaggaaagttgagccatatatgggttggtgtattagtctattttcatgctgctgataaagacatacccaagactgggtaatttatacaggaaaaagggtttaatggacttacagttccacatagctgtgaaggcttcacaattatggtggaaagcaaggaggagcaagacgcatcttacatagatggcagcaggcaaagagagagaatgagaaccaagcaaaagaggttttcctttataaaaccatcagattttgtgagacttattcactac

SEQ ID NO: 590786 - DNA, 599 bp, Homo sapiens
atttcattttaattgtcttatatatggatatgtcacgattatttcatacatttatctagtgatggcatttggattctgcctatttttttctccttaataatgtcataaaatgttgttatgcctagatggtaagcttgtgaatggttttcyttaaaagaaaactccttctgacttatgaattgtaaaataatcaataaaataaaatagagcatatcactaagtgatcaaggaaagttgagccatatatgggttggtgtattagtctattttcatgctgctgataaagacatacccaagactgggtaatttatacaggaaaaagggtttaatggacttacagttccacatagctgtgaaggcttcacaattatggtggaaagcaaggaggagcaagacgcatcttacatagatggcagcaggcaaagagagagaatgagaaccaagcaaaagaggttttcctttataaaaccatcagattttgtgagacttattcactaccaccagaagagaatgggagaaaccaccccagttgttcaattatctcccacagggtccctcccacaatccatgggaattatgagagttacaattaaagatga

SEQ ID NO: 590787 - DNA, 536 bp, Homo sapiens
ggaggagcaagacgcatcttacatagatggcagcaggcaaagagagagaatgagaaccaagcaaaagaggttttcctttataaaaccatcagattttgtgagacttattcactaccaccagaagagaatgggagaaaccaccccagttgttcaattatctcccacagggtccctcccacaatccatgggaattatgagagttacaattaaagatgagatttgggtggagaaacagccaaaccatatcattccaccctggcccctcccaaatcacatttcaaaatcaatcawgccttttcaacagtcccccaaagtctttttttttttttttttttttttttttgagatggagtcttgctctgtcacccagcctggagtgcagtggcgtgatctcagctcactgcaacctctgcctcccaggttcacaccattctcctgcctcagcctctcgaatagctgggactacaggcacacgccaccatgcctggctaattttttgtatttttattacagacagggtttcaccatgttagcca

SEQ ID NO: 590788 - DNA, 536 bp, Homo sapiens
ggaggagcaagacgcatcttacatagatggcagcaggcaaagagagagaatgagaaccaagcaaaagaggttttcctttataaaaccatcagattttgtgagacttattcactaccaccagaagagaatgggagaaaccaccccagttgttcaattatctcccacagggtccctcccacaatccatgggaattatgagagttacaattaaagatgagatttgggtggagaaacagccaaaccatatcattccaccctggcccctcccaaatcacatttcaaaatcaatcaagccttttcaacagtcccccaaagtctttttttttttttttttttttttttttgagatggagtcttgctctgtcacccagcctggagtgcagtggcrtgatctcagctcactgcaacctctgcctcccaggttcacaccattctcctgcctcagcctctcgaatagctgggactacaggcacacgccaccatgcctggctaattttttgtatttttattacagacagggtttcaccatgttagcca

SEQ ID NO: 590789 - DNA, 632 bp, Homo sapiens
tttatcacatgatacaagtgtcaagttaataaaatgtagaatttgaatcttatggatggcatagggtttccatttcattagaatgtttccatttaaattcctaaataatccttaaaatagctggttactgggttttgaattgagccgtggcttggacgttgagttgcattccagtatcatacaatttcccttccctgtatctcctgcctaatccagcataggaggttcttatgaggctggtagggaagaagagatttggcttacttaggaagctactagtagcatccaatctacatggattgccttcctgtgctttaaaccacggtaatccacatgccatctggcctacacttgtaagggaatagtattcttttgccattctaggctgtgcatggcaaaagtcttaaattgtgttgattcatttcagcctctgtttctacctttttgatattccactccggcccttatgtgattgcttacttttgacttcctttactgattcaggttcttcatccttttaactatggatatttttcagggtcagaatctgcacttggtcttgggtactcttgctcctggctgctcatctacattatcaacacctggttygagtcactatcctatttgaccag

SEQ ID NO: 590790 - DNA, 652 bp, Homo sapiens
tgtgactgtgttccaatgatacttcatttacagagacaaaaattttgatttcgtataattttcacatgtcacaaaaatattcttctgaatcttgaattttttcaaatattttaaaatgttaaacccatgcttagctcacaggccatagaaaaacaagcagcagtctgctttgactggtggccatagtttgccaacccttggtttagagtctagagcacaacttctcttttttaagcaaactctactggaaccagccygatgctgcacacccagtgagtactcaataaatgttgagcaacactccaggatgcttcacagggacatggtggaggaaacaccgtgacctcgaaagagcatgtgactagggattagaagaccaacctggagtctcagatcattatttactaacagtaaccttgagacagtcattaatctccaactgggctttggtttcctgctcatttgtcattgccaataataggccgtggtatccttatgatagctacatttacttatattgtatttacaaggcaggaattttgcctatgttaacttaatctttaggacagtcctatgagatagatactaatagtatcctcattctacagatgagaaacagagagactaagtaacaagcccaaggtcacacagc

SEQ ID NO: 590791 - DNA, 410 bp, Homo sapiens
caggtttgtgttcttcccttcaggttggtgagttccccaggccccaggcaggtccagagactctgtttgggagccaatgattggaatcaaaagccttagaaatctacctggtgttctattctactgtggttaagttggcactcaaaccacaaaatgaagtccttcccactcyttcctcccctttccacaggcagaagagcttttccccatggccaccaccaccagcagcccataaggagttctgccggatgcctgcgactcacccttcagggcagtgggctccgctctggcccagggcaggtccagaaatgctgtccaagtgcctaggccagaacttgggaatcccaagagcctgcttgttactctatctcactgtagccaagtgggtacttagggtggaagacaaagaa

SEQ ID NO: 590792 - DNA, 586 bp, Homo sapiens
gactaagtccaatgaaaatacatttcaagataaaaactgtaagaagttcattcaatcaataactatcttaagattgaaataatttaaaagaatcaagcagaaatactggagttgaaaatgcaactgacatattgaagaatgcatcagaatctcttaatagcagaattgatcaaacagaagtcaaaattagtgagcttgaagacaggctatttgaaaatatacagtcagaatagacaaaataaaaaagaataagacatacctacaggatctagaaaataagcttaaaaagggcaagtctaagagttattgaccttaaagaggaagtagagaaagatatagggataaaaagtttattcaaagggataatatcagagaacttcccaaacctagagaaagatattaacattcaagaagatataacaagaaggttatagaataccaagcagatttaacccaaagaagactatctccaagcatttaataatcaaactctcaaaggtcaaggataaagacataatcctaaaaggagcaagagaaaataaacaaatgaaatgcaatagagktccaatatgtctggcagcagagt

SEQ ID NO: 590793 - DNA, 645 bp, Homo sapiens
atttatgcaaaaaccctagcaaaatactagcaaacctaattcaacagtacattaaaaagatcattcatcatgaccaagtgggatttatcccagggatgcaagcatggttcaacatatacaaattaatcaatgtggtacattatatcaacagaatgaagaaaaaaatgataatttcaattgctgctggaaaagcatttgataaaattcaacatctcttcatgataaaaatcctcaaaaaactgggtatagaaggaatacacctcaacataataaaagccgtatatgacagacccacagctagtatcatactaaatgaagaaaaactgaaaaactttctcctaagatccagaacaaaacaaggatgcccattttcactactgttattcagcatagtactggaagccctaactagggcaatcagacaacagaaataaataaagrgcatccaaattggaaaggaacaagttaaagtatacttgtctgcagattttatgttcttatcttcagaaaaagctaaaggctccaccagagaactactacaactggtaaacgaatacagtaaagtcgcaggatacaaaatcaacatacaaaaatcagtagcacttctatatgccaacagtgaacaatctgaaaaagaaataaaaa

SEQ ID NO: 590794 - DNA, 581 bp, Homo sapiens
tgatcatcaggaaaatgcaaatcaaaactacaatgagatatcatctcatcccacttaaaatggcttatatccaaatgacaggtgataacaaatgctggtgaggatgtgaagaaaaggaaatcctcatatactcttggtaggaatgtaagttattgcaactactgtggaaaacagtatggagggctctcaaaaaactgaaaatagaactatcatacaatctagcaataccactgctgggtatataccccaaagaaaggaaatcaatatattaaagagatatctgcactgccatgtttgytgcagcactgtttacaatagccaagatttggaagcaacctaagtgtccatcaacagacaagtgaataaagaaaatgtggtacatatatacaatggagtactattcaaccataaaaacaatgagatcctgtcatttgcaccaacatgactggagctaaaggtcactgtgttgtgaaacaagccagatacagaaagacaaactacatgttctctcttattttgttgtagctaaaaattaaaacaattaaactcatagaaatagagaaaatagaaggatagttacc

SEQ ID NO: 590795 - DNA, 581 bp, Homo sapiens
tgatcatcaggaaaatgcaaatcaaaactacaatgagatatcatctcatcccacttaaaatggcttatatccaaatgacaggtgataacaaatgctggtgaggatgtgaagaaaaggaaatcctcatatactcttggtaggaatgtaagttattgcaactactgtggaaaacagtatggagggctctcaaaaaactgaaaatagaactatcatacaatctagcaataccactgctgggtatataccccaaagaaaggaaatcaatatattaaagagatatctgcactgccatgtttgctgcagcactgtttacaatagccaagatttggaagcaacytaagtgtccatcaacagacaagtgaataaagaaaatgtggtacatatatacaatggagtactattcaaccataaaaacaatgagatcctgtcatttgcaccaacatgactggagctaaaggtcactgtgttgtgaaacaagccagatacagaaagacaaactacatgttctctcttattttgttgtagctaaaaattaaaacaattaaactcatagaaatagagaaaatagaaggatagttacc

SEQ ID NO: 590796 - DNA, 542 bp, Homo sapiens
aaaattaaactattagcatagaaatgtaaagctttgaaagaatccactcatgtcaaattgaaagcagagcaaaacacgctggcaggtggagtagacagttatggctagcacttctagaaaccagaacagaggcaggtagacaagaagtgatcacaatgtagtcagtcaatctcgcctgtggcctgtggcataatgtaagtgtgcattgtagccctatctgctaacattgacttattcattcttgcaaataaaatacatgttaatacatttataytcatagtatgctttatactcatcctaaaaatggcatttcagcaattaagtttgaaagcaaaataagttcctatatttacaatttgacacatgattatgtgtcgtgctttttatccttgcaaagaaatactaacgttgtgttatctgaataccacccaaaaatgctcacttgccatcttacagttttgaatatttgctaagatacaggattttaaaaaacacattaatagaagaaatgcattgggcagacgtgaacatgatttactgaa

SEQ ID NO: 590797 - DNA, 457 bp, Homo sapiens
atgcatgaaataattttaataaatccaagtacaaaggtgaacctaccagctgcacagctccactgcaattctaggaaattaaaattttcatgcattatctgargcattggtagtttttcaacccctgcctacctctctcttttcccccttttgttgtcttcagtgtctattggttcccatatttatgtccatgagtacccaatgtttagctctcacttattagtgagaacatgcagtatttaattttctgtttcagtgttaatttgcttaggataatgtcttccatctgcattcatattgctgaaatggacaggatttagttcttttttgtggctgtgtagtaatccatggtgtaaaaatgccacattttatttatccaatccacagtaaatgggaacctagattgatctcatgtctttgctattgtgaattgtgctgtgacaaacatgcaaataca

SEQ ID NO: 590798 - DNA, 585 bp, Homo sapiens
aagtgcttctctggcttccactgcctgtaccgtccttagtttaactcaccccatcttgattctaacaatgcttaatgaactttccctctgtactactgcaaytttgttctcctggaagtattggtctaaagcatccactataggttttgaaatgcatcaaagagaaaaatgagaatgcccatcacaaagcagccagcatgtgagatgtgggatgcatgcacatagctggattaacatgcactgcaccagaaggtaaatagttttctctgttcattcagacaagtcatttggttctttacaggtgctcactcatttcttaacacttatgtttagtatgcctcctgctatagtttgccttttttccttactaactttccgttggacacaaaccatggttcttcatgaaaaccaaagactactatttataaaggcctttcaggtgaaattgtttcatttcttagaacattcctatgaggtaccaatttatatcccacttgtgtccttcttggttttgtttccttgtttttcctatcatttgttagatcttgattaacttaataaaacattagcaagaaaggtttagat

SEQ ID NO: 590799 - DNA, 538 bp, Homo sapiens
atggcccaggatggagtgtttctctctcttcccttgtcctagacagtcttcttctacagatacagtcaaatagctcagtaaatcctgctttcctctctaaatgctcacagaacactctttcattggtgagttctaaactgtggagcggaatgggtatcaaactcacttttaataatttcaacaatttacctttttctactccttgaaattgcattatctcaatttcattctctcccaatcataaagttgcattttcaaagtttcctgctcatattttagggatctcagtactttgagctcagctccttacttctcttagacttcaatttccccttaacgatgtttcttctatatctatctatctatctatctatctatctatctatctatctatctatctatctatcttgaagyttatcctatttgaaagccaaagaggggttgacaaatttgtccagatagctttcattcattatcactgtgtcttcaataccaagctaaaggtctgttatcttttcctttagaaaatgtctttcaa

SEQ ID NO: 590800 - DNA, 518 bp, Homo sapiens
ggatgccagggtctatgcccatattcttcccactgcagccagctactttttgcttattgctgtttacaatgttacctagagtgagttctgcagaaataaagtacttcrcctagattatcacattcagtcctcaccagtggataccattatttttttccagctttccagaggaagaccctgaagtttaaaagtttaatagtctgaataacaacacatagctcatatctcagggacagatataataggtatatacatatacatggaaaaaatgttttggaacttttgacaaaggccttagctcacactgtcttgaatcactactgctgaaaaaaaaaaaaaaaaaaacaccttttctttccctctatctctttggcttttctatcatattctcatttctaattatctaaagttttaagaaatcaatccccttccccatctttattttttatcagaaaactatttcctgtgggcctctttcaattcaaactgcctcagtcttggatctgaaagtcaggtta

SEQ ID NO: 590801 - DNA, 609 bp, Homo sapiens
atttgtaccatagaccaaagcaatagtcttctaagtactttgtctgtcagaagctatttttctcattacagccacagcaatctttttaaaatctattttttttttttttttttttttgagacagagtctcattctatcacccaggctggagtgcagtggtgcaatcttggctcactgcaacttccaccttccaggttcatgcgattctcctgcttcagccttctgagtagctgagattacaggcacacaccaccacacctggctaatttttgcatttttagtagagatgggatttcttcatgttggccaggctgttctagaactcctgtcctcaagtgatctttttgcctcagcctctcaaagtgctgggattacaggcatgagccactgctcttggcctaaaaatttaacatttaatagactgtgaaacctcttacttgaaatccaacattttcycaatatatgaactccctaccatagccttcaaggcagtgcataatcttgcccctatacaccttttctatctcatctcatgattcttcctggcttgcttcaccgacattacaggtccttttactgttcttcctggtatacatcatcccattgtga

SEQ ID NO: 590802 - DNA, 632 bp, Homo sapiens
atttcctagaaaccaatcctaactatatgctcactctacagctagctcagtttatgattaaaaagcattcwatacatttattctaagagttcaaagttattttcctaaaaaaatacatataatttctaggcagtcaaaatagatatcaaaattttgagaaggtttatttgggacttaggcctatatgtgtcaggcctattttctttacatgaaaataatggaactaattaccaatagcccacacccctcatatttagtctgggttcctacttggtgtctgctgccatactaaagatggaaaccaagcaaaagtcatgttgattagcagagctgtatcctcactgtctctgattctcatcctacctgactcatccccagggccagttccctgttgaaggagaggaggcaggcttttgtggagcacaaaatgcatacatcggcggggcatggtggctcacacctgtaatccggcactttgggaggcctaggtgggtggatcacctgagatcaggagtccgagaccggcccagctaacatgccaaaaccccatctctactaaaaatacaaaaaattagcccctgcatggtggtgggcaccctgtaatcccagctacttgggaggctgaggcaaga

SEQ ID NO: 590803 - DNA, 309 bp, Homo sapiens
gggtttcaaccatgttggccaggctggtctcgtgctgycttatgtctatagacacatttactgactatggttatttttttaaaaatgtaattgagtaaaatgatttcctcatcgggcattcttcaagccctttaagctcacaaaatgtccactcttccagaattattataacagtgaccaaatcacatcctggcaatatctattcagtgatgtgaatgaactcttctcttctggtgcttttttctttgcttttacgatttcttagattcagggtctgcacttaagtcttttggtcgatttttttaattt

SEQ ID NO: 590804 - DNA, 511 bp, Homo sapiens
gcattattagtaatagaaaaacaactgcatttgagaactgtttatttttatgtatggaaacattttcagaagtataagtgtaaaaaattgggtatatttttatttgtggcagccaatgtgctggattttagtggatgtttgccccttatgcctaaacccagtatcgtattctagttgtccgtgggaagtttcttctgaaaaggaagtctaagtggtctaagagccccccttgttctctggaaggcatatgctataagctagtctagataattggttattctgacttggaactttgactctttagaaagtgatgcacacctaaagttctaatctctcatttgtagcagctgcctttcctcctgtagcttgcttttgctcattgcacttttccttcagggcatggggatgaacatgggaagaytgaaaccagtgaacaccactggcctccagtgactacaaggtcaaagtgtaggcatgcccagagactctacgagtccaagagtcaattaat

SEQ ID NO: 590805 - DNA, 545 bp, Homo sapiens
atcaaacccttttcagtaatatttttactgtttatcagcaccactgttgatgatggttttaacttggttgactttcaccttagcttgggccatgttgctggtttgggtttagaggggtaagggatttatcaaaggaagactgaaagtaataatttttgagtatttaccctgagactcactctggctagagagagatgcatacatttcataacaacctgtgagtaatgcattatcaaactgagaatgtccatgacaaaaactggaaagcaaaagtcagctaactcattcaaggtgtaactgagtagtacagcctagatatgaaacaaggctrcttcattccaaaacctaggcttcgctacctgctgctcccaggtcattacatggctctactgctgcctatggggtcctgctgggctcatttccaggtttagggtttctctacgtgtctttgaggacacagaatgaatagctaatcccaatgtagggcatgccctttcttctctcagagggtggaatagcagaaatagaataagaaacatgctaca

SEQ ID NO: 590806 - DNA, 620 bp, Homo sapiens
atgcattgactccttcaaaaatatatatttagtgcctgttttgtatcagtaaaagtactaggcagtgggagtagataattaagaattatatgatactttccagaaggaaagtcaaagaagtaaacagatataaattgggttgtaagttataagaatttatagtgaaaatgtggctttctgaaatataaaagtactgaaaatttattaagtgattgttggtaaagtctttgtgtgtgcatgagtatggctttagtgtttttcttcatttatattttttcaaatgtatcagtttaaaactgtatttccacaagaaacatatatttttggatacaaatataaaacttgaaatataaaatttaaaaccaataaaaataataatttttaaaattgaaataatataaagtcaagtagtggagaagagattttcccctaagaatctagacaataattcttccactggagaaagtgatatgcctctcttcacagacacaggcaaataaatayagttaacttaataattgcaggttgtacttaaatactaatattaaaaagtaatttttgttattagtatggaagtaaacctaggcctcttttgtgaataaactttaagtaataagtca

SEQ ID NO: 590807 - DNA, 623 bp, Homo sapiens
agccccacagacataagattattttctatcaggctttgtgcattttcctaggaaacagctgctctgattttggaggcagttgtggtcaacaagggttgtgtgaggttcttgtgacctcctgactctgggaatcaatgtgcagttgaggggtattgggggctccctgacctttgttcttccagcctttctaatagttgtatcagtatccagttcaccttattcaatctctccctgcttgaagtaattgacgtgttttgttttctgaataaagctgcgagatacagagatcttcataaaaataaaatgacattggtagatttcaaaacacctctctcggaattgtcagatataactttaagaaaaagaaaaaaagaaagaaaatagataaactgaataaaagtgttgacaaattcagcttaataggtatatagaraatttatataacttgaaattatatttctggaagcacataaaaatatcaatctcataactaacaaatgtatatcaacaactatttagaagtagggattttataaactaaaacactttcaccatgataacccttggctgaaagcataaattagataatcaattatgaaatatctttgaaaataattttaaag

SEQ ID NO: 590808 - DNA, 610 bp, Homo sapiens
aaagaaaaaccaggaactagtttcaataatgaggtgtcatggttccctgtggcaaatttagaacacttatcgtttggcaggacacagagaggtaggtgaacattccaggaaagaagcagyttagagaaaatgtggaggaaataatatgacacttagagaaaaaggaaggtttattcttgtcttatgtcttgacctgtttctgagtgcgaacacaaaccaggtgtttctgtctctttctgagtcacgtctgcccctgttctggcccttccccatctagaactgccattatcagtggagtagtgggtccctggtctcctacaaatcctgggacattggatccccaagctgtgccaatactgcctactgtgctagcctgacttcaagctcaggtgagaggcacagaatccacacacttattgccatcctctcctatttatctctgaggatcgaccggggactgggatagaggaagggtgagctcctcattcaggaaatagaggagtgtttcctctttatttttgctgagtcctgcagccaggagggtaatacactctgatcccctcagtctgaatcttctcattgtcttataggattcaagaaatggaaggat

SEQ ID NO: 590809 - DNA, 355 bp, Homo sapiens
gtcttctcttatctcctctcttctccactttctttgaatctctctcctggattgggacactggtgaaggtgagggagaggctttaacttctaggctaaaacctgggatgccccttcattggattcacaagcttcctcagccccattccatttatgtcttctgtctctccagcatttctgaggtggaaagattataactgtaatgtgaggttaccctatgtctgcaagttcactgactagtgcaggagggaagtcagcrgcctgtgtttggtgtgcaactcatcatgggcatgagaccagtgtgaggactcaccctggaagagaatattcgcttaattcccccaacctgaccacct

SEQ ID NO: 590810 - DNA, 355 bp, Homo sapiens
gtcttctcttatctcctctcttctccactttctttgaatctctctcctggattgggacactggtgaaggtgagggagaggctttaacttctaggctaaaacctgggatgccccttcattggattcacaagcttcctcagccccattccatttatgtcttctgtctctccagcatttctgaggtggaaagattataactgtaatgtgaggttaccctatgtctgcaagttcactgactagtgcaggagggaagtcagcagcctgtgtttggtgtgcaactcatcatgggcwtgagaccagtgtgaggactcaccctggaagagaatattcgcttaattcccccaacctgaccacct

SEQ ID NO: 590811 - DNA, 391 bp, Homo sapiens
tttaccctgtggtcacaatcagaatacatgggcaatggtatattgtcaccttagagagacagagatgcctcagtgttgtaggaaggagtgaggaacacagtgtgctccagacaaggtggtccacaataagggagaaagaatttgtgtcacgtgtatataaaccaaccacttttcctagtttcagatcgatgggtaaaaagaagcgtggacccttctctccaaagatacaaacaatagacatttgtatttaagagtcgcagggygtggtgcactggctcatacctgtattcccagcactttgggaggccaaggtgggtgaaccacttgagcccaggagtttgagaccagcctgggcatcatagtgggaccccgtcactacagaaaattaaaa

SEQ ID NO: 590812 - DNA, 519 bp, Homo sapiens
tctgcccacacacaggtgtagccttttctattatcaacatctgccaccagactggtgcattgttgcaactgatgaacctacactgtcacattatcatccagagtccataatttacattagggctcactcttggtattgtatattctgtgggtttggacaaatgtacgacatgcaccaacattgtaggatcatacagagcagtttcactgtcctaaaaatcctctgtgctttgcctattccttccttcttcctccgaaattctggcaacscttgatcttttttactgtctccatagttttaggttttccagaacgtaacattgttggaatcatacagtatgtagctttttctgattggcttcttttacttagtaacatgcatgtaagtttcctctattcatggcttgatagcttatttctttttagtactgaactatatttcattgtctggatataacacaatttgttttgttttagtgtgtgtgtgtgtgtgtgtgtgtgtgtgtgtgtgttccacagt

SEQ ID NO: 590813 - DNA, 519 bp, Homo sapiens
tctgcccacacacaggtgtagccttttctattatcaacatctgccaccagactggtgcattgttgcaactgatgaacctacactgtcacattatcatccagagtccataatttacattagggctcactcttggtattgtatattctgtgggtttggacaaatgtacgacatgcaccaacattgtaggatcatacagagcagtttcactgtcctaaaaatcctctgtgctttgcctattccttccttcttcctccgaaattctggcaacgcttgatcttttttactgtctccatagttttaggttttccagaaygtaacattgttggaatcatacagtatgtagctttttctgattggcttcttttacttagtaacatgcatgtaagtttcctctattcatggcttgatagcttatttctttttagtactgaactatatttcattgtctggatataacacaatttgttttgttttagtgtgtgtgtgtgtgtgtgtgtgtgtgtgtgtgtgttccacagt

SEQ ID NO: 590814 - DNA, 555 bp, Homo sapiens
  misc_feature 552, 553, 554, 555: n = A,T,C or G
tgaggtcaggagatcgagaccatcctggctaacgtggtgaaaccccgcctctactaaaaatacaaaaaaattagccaggcgtggtggcaggttcctgtagtcccagttacatgggaggctgagacagagaattgcttgaaccgaggaggcagagcttgcagtgagctgagatagctccactgcactccagcctgggcaacagarcgagactccatctcaaaaaaaaaaaactgatgaagaaactaaaacatgaaaaatttgagagatattttttgctcatgagttataaaaaacattgttaaaatagctatgctactcaaggtaatctacagattcaatacaaattctttaaaaatactaatgacatttttttcacagaaatggaaaaaacaggcctaaaatttatagggaacaaaaaaaaaaaaaactccccaaatagccaaagtaagcttgcggaaaaagaacaaagttgaaagcatcaaactacctgacttcaaaatatactgcaaagctatagcaagcaaaagagcatgatactggcatagaaaatgnnnn

SEQ ID NO: 590815 - DNA, 555 bp, Homo sapiens
  misc_feature 552, 553, 554, 555: n = A,T,C or G
tgaggtcaggagatcgagaccatcctggctaacgtggtgaaaccccgcctctactaaaaatacaaaaaaattagccaggcgtggtggcaggttcctgtagtcccagttacatgggaggctgagacagagaattgcttgaaccgaggaggcagagcttgcagtgagctgagatagctccactgcactccagcctgggcaacagagcgagactccatctcaaaaaaaaaaaactgatgaagaaactaaaacatgaaaaatttgagagatattttttgctcatgagttataaaaaacattgttaaaatagctatgctactcaaggtaatctacagattcaatacaaattctwtaaaaatactaatgacatttttttcacagaaatggaaaaaacaggcctaaaatttatagggaacaaaaaaaaaaaaaactccccaaatagccaaagtaagcttgcggaaaaagaacaaagttgaaagcatcaaactacctgacttcaaaatatactgcaaagctatagcaagcaaaagagcatgatactggcatagaaaatgnnnn

SEQ ID NO: 590816 - DNA, 444 bp, Homo sapiens
ataaattttcatcattaataataataacagccctagtaataaaactaggaatagccccttttcacttctgaatcccagcaaaaaccaaaggaagctctctaatatctggcatacttctcctcacatgacaaaaactagcctgtatcttgattatgttycaaattttccatcaataaacatgaatattctcctatctatcacaatcttattcattatagtgggtggttggggaggacttaatcaaaaacaacttcataaattcctagcctactcctcaattactcacataggtagaataatagcagtactaatttataacccaaatattaccattctaaacctgattatttacttttaacaactactgcatttctaatacacaacctaagtaaaagcactaagtgattatacaagaagatatgccaaatctccttgtctttgagg

SEQ ID NO: 590817 - DNA, 444 bp, Homo sapiens
ataaattttcatcattaataataataacagccctagtaataaaactaggaatagccccttttcacttctgaatcccagcaaaaaccaaaggaagctctctaatatctggcatacttctcctcacatgacaaaaactagcctgtatcttgattatgtttcaaattttccatcaataaacatgaatattctcctatctatcacaatcttattcattatagwgggtggttggggaggacttaatcaaaaacaacttcataaattcctagcctactcctcaattactcacataggtagaataatagcagtactaatttataacccaaatattaccattctaaacctgattatttacttttaacaactactgcatttctaatacacaacctaagtaaaagcactaagtgattatacaagaagatatgccaaatctccttgtctttgagg

SEQ ID NO: 590818 - DNA, 444 bp, Homo sapiens
ataaattttcatcattaataataataacagccctagtaataaaactaggaatagccccttttcacttctgaatcccagcaaaaaccaaaggaagctctctaatatctggcatacttctcctcacatgacaaaaactagcctgtatcttgattatgtttcaaattttccatcaataaacatgaatattctcctatctatcacaatcttattcattatagtgggtggttggggaggacttaatcaaaaacaacttcataaattcctagcctactcctcaattactcacataggtagaataatagcagtactaatttataacccaaatattaccattctaaacctgattatttacttttaacaacyactgcatttctaatacacaacctaagtaaaagcactaagtgattatacaagaagatatgccaaatctccttgtctttgagg

SEQ ID NO: 590819 - DNA, 570 bp, Homo sapiens
cttcgatggtgacaccattaacagtgaactgggcatgtatatgagagttacaatctcacgtgtttcctgggccattgtatgaaggttttatacagcatgcatgagagttgcaaaccactctaaggcctacatgctcatatagatttatgatcttacacattgccataaacccaggtataatagtcaacatctcttctgtaggctgtgttcagggaggagacccattattatgcctgtgagctgggtccagaaatgagtcaccatcacacctgtggccagatccacatatgaaggtcacaattccaactttttactatattcacttgttagactcaggaccttaacagtgggctttggacatgtgggatggtgacaacatttgctttcacctgggtgaaatcaaatcaagggtcctaatctgaactttttgctggtccctgtcatgaaactctctctaccacgcaaggagtttgtacattamgagttagtgttgtaagcttctgtgagcttggtaaaaatatgcatcccaggaccttacctattgccctaagcctagcgatgaaaggcaaa

SEQ ID NO: 590820 - DNA, 394 bp, Homo sapiens
  misc_feature 208: n = A,T,C or G
gcctccattgatgtcccctggccaagaggtgtcaaaagacctacaggaagaacgctgaggcacaaaatacaattttaaagagttaatttcagttgaagtgaggacagctgtcggagacgcacttccaagttgcctgtgggaatggtctgcttggcttttgttacaagcaggttttttgtttttttttggagacagaatcttgctctancgcccaggctggagtacagtggtgtggactcgctcaccgcaacctctgcctcccarattcaagtgattctcctgcttcagtctcctgagtagctgggattacaggtgtgcaccaccacgcccagctaattattgtatttttggtagagacagggtttcaccatgatgggcaggctggtattgaatt

SEQ ID NO: 590821 - DNA, 406 bp, Homo sapiens
atatttatgatgttttccttttttttttttttgagacaagagtctcgctctgtcacttaggctggagtgcaatggtgcaatctcggctcactgcaacctccacctcccaggttcaaacaattctcctgcttcagcctcctgagtagctgggactataggcatgcaccaccatgcctggctaatttttgtatttttagttgagatgggtttcaccatgttggccaggctggtctcaaacaactcttgacctcagtcgggtgatccacctacctcggccttccctaagtgctggrattacaggtttaagccactatgccaggcatttatgatgtttctcttacacaactaatagcttagttagttataacagtgcaaatgtttatatttttaaaagttaatattttta

SEQ ID NO: 590822 - DNA, 648 bp, Homo sapiens
gtacacaaacaaacacagaacattatgacactgtgactgtgatgtgtaaactactcatattaggtagaaatacaaaacaatgaaccaatcaaaaataataactataacagcttttcaagacagaagaagtacaacaagatatacacagaaataataaaaaaatgcagagaacggaggtaaagtgcacagcttttattagttttctttttgcttctttatgcaaacagtattaagttttaatcagcttacaataataggttatgaaataaaatttgtaagcctcttgttaacctcaaatcagaaaacatatascagatgcacaaaaaataaataccaagaaaataaatcataacaccaaagaaaagaaagagaggaaggagagaaattaggagaaaaagactagaaaagaaccagaaaataaataacaaaatggcatgagtaaatccttaattctcaataataatactggatataaatggactaaactcttcatttgaaaaacaaagtgtggctgaatgaataataaaacaagaactaatgatctgttgcctataagaaacacaattcacctataaaaacacacatatcctaaaaataaaaagatgggagaaatatattccatgccaatggaaagcaaaaaagagcagg

SEQ ID NO: 590823 - DNA, 555 bp, Homo sapiens
ctcttctctccttcactcctttttgctgaaacttaaaacagaaacatatatattgtaaccttctattacacagtgacatacaggaggaatcgttattatttcaaaataatatatacacatacataatatgtatatcatacatttgataaaatttctcaatggccataaatatgaagaaaacccatatccccagcatttctgccagttgcaaaactgctccaggcttggacctattggcctgtaaagtcaaataggtargtaaagactgaaatgaacatcctcaaagggccctgaattcaaagagaagatacttcctcttccaagccaggaaatctaaagcaaataacaaaatttcttctggacactgaggttcaagttagtcatccctcggtattcatgaagattggttccaggaccacgactttcaccctccacccacctcataccaaaatccacagatgctcaagtcccttatataaaatgtcatacgatttgcctataccctatgtacatcctcccatataatttaaatcatctctagattacttttaatat

SEQ ID NO: 590824 - DNA, 555 bp, Homo sapiens
ctcttctctccttcactcctttttgctgaaacttaaaacagaaacatatatattgtaaccttctattacacagtgacatacaggaggaatcgttattatttcaaaataatatatacacatacataatatgtatatcatacatttgataaaatttctcaatggccataaatatgaagaaaacccatatccccagcatttctgccagttgcaaaactgctccaggcttggacctattggcctgtaaagtcaaataggtaggtaaagactgaaatgaacatcctcaaagggccctgaattcaaagagaagatacttcctcttccaagccaggaaatctaaagcaaataacaaaatttcttctggacactgaggttcaagttagtcatccctcrgtattcatgaagattggttccaggaccacgactttcaccctccacccacctcataccaaaatccacagatgctcaagtcccttatataaaatgtcatacgatttgcctataccctatgtacatcctcccatataatttaaatcatctctagattacttttaatat

SEQ ID NO: 590825 - DNA, 604 bp, Homo sapiens
aagtagctgggagtataggcatgcatctatttcttaattgaatacattttcatttaaatctcaatacaattttagtgtatgtttttaaatgtaaaaatatattagtataaaatgtgtgtaatgtgtatrtaagtttaatatatatgttaacttttactttctgttttacaactcctacagtgcataataaaaaatgtctggagagaatttgtttataaaattctgaagcatgagctgagatcactttctatataataatactaataatgataataataattataatttattgaacactatgtgcatcactgttctggagaattaacataattataaatgttctttacaacattcctgtgagtagatttatattattattatgaatgaagaaaacaatgcccatagaatttaattaatttgaccaagattgtcttaaataaattgctctttcagtggagtcaaggctctttccagccgctcattgggaagcagaatgggagaaataggtttagctaaccgtggattgatgcttcatgctgctgaaccccctgagtgtctcatttaaaccagtttgtttatttcaagccaccctcgaaccatgatt

SEQ ID NO: 590826 - DNA, 494 bp, Homo sapiens
taccactttgggcagaaatcagttggtcaaatctcaattttctcattttcctcttctcttgcttcaggaaaactagtagatttactttcyccttgtttcttactttttgaaaaatgatagtagccaattaaaaattattgactagtatgttatagtatattctggtttttggcatggttgcttatccacaaaaaatagctctgatattggccaacatagttaactatattgtcaagcacactggtctcccccacttattttcattcagatctgtgcccaaaaaatatctacaattgttttcttttgagtggtaagggcatataactcctctgccactctcaccaggaagaatgcatatatttatctgtgtgagattaaggtagaaaaagacatatgtaattatgatgggtctgcatttgactaatgagtaggatatttgaaacatcgaaggtcttaagatgttattaaattgtgcacttaggatgggtaaattt

SEQ ID NO: 590827 - DNA, 560 bp, Homo sapiens
gatacatgcatttatatttgcctccacttcaaatcctaccacaataagtgtaaagaaaagaaaaagttataaatctgtagcagtcaagtaaccagaagtggagaaaacaattaattaagaagaaatgctaataaaatttataatgactgaaagtgaagagaagaacctaaatcttacatgcctgcagagatrgataccaatatgtagtcaaccacagggcctcagaaaatggcaatgacagatggtctcagaaattgtttcgagtactccaaaatgagcgactgaagtatggagctgaaaatggagtgatcaagagtcagaccaaagaagggtcagcctgtctttgaagatttgtgagaatgacaactcagacttggttcaagattcttttttttccattggtactagcaaatcattccaaagctaattccaaaacagagatacaagggagtatccagctgtcagggtctctgcatttctcccacacaagtacattggaattgtcggaaaacagcttcatgtgcaagaaattcacaaagcagaagatccctattatccta

SEQ ID NO: 590828 - DNA, 590 bp, Homo sapiens
gtctcatatttttcaagaagaaaactagattctatacccagggaagccacgtagttgtggtaaacccaagattcctaggcatgagtagcccagtgccagtgaggtcaagtgaacattaagccttacctagctcattaagccccarctgcacacttcaggacctcagcatattctcttcagggtcttgcactccctccatgccaccagtgtttctgaaatttttgaaatgtttttcatttgtgtttgtaggtcagttaagtctgctaggagtctctgtcctgctgcatgtagctcaaggcacagctatattgtcaatgctttccctctgactaactaaaaaccagatttttcttttttaaaaattttggaatctgatgggcttcatgtcattgccttcaagtggcatcatcaccgttgcttgaagaatgctgagaggatgttcttttactaggagatggcagtgtagtgagcatcgcaataaggattatgagctatgaaataggaaaagaccagctgcctgttcaagaccttgaggaaaaaggagatgggtgaaggtagcttcaaagtaaaactaggcactggtggaggct

SEQ ID NO: 590829 - DNA, 522 bp, Homo sapiens
atcttcacagtattcactgactatccaggaccatagccctaatcaccatcctgctctgctttcactgtattcagaatgatgagaggaagagggtgacttaggcagccaaagcgtaatctttgagcctgggattagtgaatagaatagttcatgatgtttggctaggatccaagggactgcaagtagtgtcctcctttctgggactattttgttatttccattatggtacttcctttttaaaaaactttttgactggtagcttaacttctatgccaccttattaccttctttctctgtcttgaattcttttgaaattgccataatatcttgtattgagtctttcattttttatcagctaatgcttstgctcaacacttctgttcagtgactaacgactatatttctggttttgactggggcccgagcctctatttctcacaactatttgcttaatgcattggttttagatccacatcacctcagaaccatggttagcacagggatattaggactggccttgtc

SEQ ID NO: 590830 - DNA, 619 bp, Homo sapiens
ttctggtgcttacggcttgccaaacaccagagcagcgtggccttgtgcacttccagatgtgggtaccagcaattgcaaatcacccagagcatcttgaaatggtagagtttaagggatatggatggggcactgacaatatccactgtgtttacactttgaaggataaacatgttgaacatctttgatttcaactaaatattataactcagttctgactcaaattctgttgtcttctctgagtagtaacattatacacagccaggattttctgtaagtgatttcttagattgctgtttcattgaatctgtactaaattgtartcatgagaaagagtctaggtttggagtcactcaggctgaactttgaatataagctctcctgcctcttacctgtggtcttggacaaggttttgagagctagacatctcagtttttggtgttttgtttttttgtttgtttgttttgttttgtttttgcctgtaaaatacgaataatactaccttcctcatagcaattattgtgatgaagacatggtatatttagagtttgaaacagcaagccttcactaaatagcaatccaaagggattcagaggtaatttagaatttgcattagtgtaat

SEQ ID NO: 590831 - DNA, 619 bp, Homo sapiens
ttctggtgcttacggcttgccaaacaccagagcagcgtggccttgtgcacttccagatgtgggtaccagcaattgcaaatcacccagagcatcttgaaatggtagagtttaagggatatggatggggcactgacaatatccactgtgtttacactttgaaggataaacatgttgaacatctttgatttcaactaaatattataactcagttctgactcaaattctgttgtcttctctgagtagtaacattatacacagccaggattttctgtaagtgatttcttagattgctgtttcattgaatctgtactaaattgtagtsatgagaaagagtctaggtttggagtcactcaggctgaactttgaatataagctctcctgcctcttacctgtggtcttggacaaggttttgagagctagacatctcagtttttggtgttttgtttttttgtttgtttgttttgttttgtttttgcctgtaaaatacgaataatactaccttcctcatagcaattattgtgatgaagacatggtatatttagagtttgaaacagcaagccttcactaaatagcaatccaaagggattcagaggtaatttagaatttgcattagtgtaat

SEQ ID NO: 590832 - DNA, 635 bp, Homo sapiens
ttcttcccccttctctgcactcctggaagctgacctgtgtctcctacttctgtgggttctcaagccccccastttcctattgggctggccaacaggatgcaaggggaagaaatcagagaacaggaggaaatgaggtcaagacatctattcaccccataaccttccttttgggtcatcatatgttggctgcgtgcctccattaaaggtcaaagctgttgacaggtgactctcttcatatagcctctatctggattccaataacttctcagtcccattgtttttcaaacctgggtgtgataatggcttcccagtgtttctgtgccctatggaactccactatactctcttggtttcctaaccacatcttcgtaaataatctctccctaattattcccagtttgaatgtgtcacctttttcccaccaggatcttcactaagatattcacaaacgggcagatttcctcataccagcctcataggtatgataataggtttgccagcagggaaagggacagaagtgcatgcttctgtacatgtaaatgtacagaaaatgtagaccaagacagctatcattaattccagtgtatttcaagacaccacatgtaatgcatcaggtacgcacatgcacacacact

SEQ ID NO: 590833 - DNA, 501 bp, Homo sapiens
taatcccagctactcaagagcctgagsgaggagaattgcttgaacctgggaggcgggggatgcagcgagccaagatcgtgccattgcactccagcttgggcaacacagcgagactctgtctcaaaaacaaacaaacaaacaaaaaaaaacaaaaaactttttggctgggtgtggggaaagctgaacaagaggaaagtgaaaatattccaaagttatcaccttactgaggagggatgtaagcaggagacagaagttattatagcaaagacaagttggtggggaaagtcacatgttttatttttaaataatggcatataaacatttctgagtacagggaaagaaaagatcaccattaatggaatggaaatatacagtagaatttccaaagtaacaagacattttttaaaaaagaaacccaaaataaattgatcaaaccagcaaaaaccagatataacaaactgcaagttaaaatatgcagcaaagaaagcaagaaaaaactat

SEQ ID NO: 590834 - DNA, 501 bp, Homo sapiens
taatcccagctactcaagagcctgagcsaggagaattgcttgaacctgggaggcgggggatgcagcgagccaagatcgtgccattgcactccagcttgggcaacacagcgagactctgtctcaaaaacaaacaaacaaacaaaaaaaaacaaaaaactttttggctgggtgtggggaaagctgaacaagaggaaagtgaaaatattccaaagttatcaccttactgaggagggatgtaagcaggagacagaagttattatagcaaagacaagttggtggggaaagtcacatgttttatttttaaataatggcatataaacatttctgagtacagggaaagaaaagatcaccattaatggaatggaaatatacagtagaatttccaaagtaacaagacattttttaaaaaagaaacccaaaataaattgatcaaaccagcaaaaaccagatataacaaactgcaagttaaaatatgcagcaaagaaagcaagaaaaaactat

SEQ ID NO: 590835 - DNA, 595 bp, Homo sapiens
agctactcagtgttgtgggaagtcagggactctgaatggagggaccagctgaaactgcgatagaagaacataaattgtgaagatctcatggacatttatcagttcccaaaattaatacttttataatttcttatgcctgtctttactgcagtctctgaacataaattgtgaagatttcatggacatttatcacttccccaatcaatactcttataatttcttatgcctgtctttaatcttttaatcccatcatctttgtaagctgaggatgtatgtcgcctcaagaccctgtgatgattgcgttaactgtacaaattgtttgtaaaacatgtgtgtttgaacaatatgatatgaaatcagggtaccctgaaaaagaacagtgtaacagtgattttcagggaatgaggaaagaaaaccctaaggtctgactgcctgtggggttgggcaaaatagagccatatttttcttcttgcagacagcctatcgatggacatgtgagtaagagaatatcrctgaattcttttcccagaaagcaatattattaattaatacccttggaaaggaatgcattcccaggggtaggtctatagatggc

SEQ ID NO: 590836 - DNA, 553 bp, Homo sapiens
acttttaaacaaccagatctcgtgagaactcactcactatcacaagagcagcaagaggaaaatccaccctcatgacccaatcacctcccaccaggtccctcctctgacactggggattacaattcaacatgagatttgggtggggacacagagccaaaccaaatcaactagtaaggatttgggaaactggtaagctccaattggtgagcaagggtggtgggcaaaattagtcctgaagttgcagcaggttatctcagaagctatagacgaaacacttcaggttacaacaagcagttttagcagttttatcagtcaggcttgcagagaattatattctcagagcaatattttgtaccctgtgtgmttttccccctagcttttcagttctattttagttgagcatgacaagaatgacccaatttttataatcaactttcacatactgccaaggctgagagtggattcaagactgcaggtcacactcagggttcctctccttataaatgacttggtgagagcaaaaagcacttctactagattggatcagacttct

SEQ ID NO: 590837 - DNA, 556 bp, Homo sapiens
cagaagacacctattcacagggcagygggagagagaatgagtgccagcagaggaaatgccagatgcatataaaaccatcaaatctcatgagaactcactatcatgaaaacagcatgggggagccacccccatgattcaattacctcgcatcgggtccctcccacaacatgtgggaattatgaggactacaattcaagatgagatttgggtggggacatagccaaccatataagttatttgacctctctgtgcctcagttattcattactcctagagaacaaagcccgtaacagtatctcatgtgctgttgtgaaaattaaataactttggagtacttagtttctggaacacagtgagtgctgtataaatgtatgctattattagaatggaaaggatagttgaggtctaaaagaatcattaaatacaaccaaagtaagataattttctcactttgaatctgtagattctttcaaagaatcctagggcaagttgggagaaaggagtcctttggaaatcatttgatcaggtaggataacagctgtagctcccacactcc

SEQ ID NO: 590838 - DNA, 473 bp, Homo sapiens
ttcaaactcccaccttggcctccagggtagctgggaccacaggcaggagccaccatgcccagctaatttttgtgtgtgtcaggggagagcagtttgtaaagatggggtgtcgctattttgcccaggctgctttcaaactcctgggctcaagtgttcttcctgctccggcctcccaaagtgctgggattaaagatgtaagcctaatttatttcttaaaacaggaacactgcattacactgttaatagaaatccagtagtacctaccatcataggaagtaactataggaaataagtattgtgcaaattaatatgataaaatgttacaaaatcacagctattcttttctgcagaggcttctcagtctgrgtttggctctctctctaaaacatattacaaattcactgatggcaaatactctctctcttttatgtaatcaaaaggtctgaaggacaatcgaaatgaaaatatgtgat

SEQ ID NO: 590839 - DNA, 548 bp, Homo sapiens
tggtaaattagttccactgattatgatagcagaggttaatatagccctatggtcaaagtcttggatatattcatatctggagcagattaaggaattttgctaactgacttcaacttcttagcaatcttaaaatgtaagcttaaatatcttgtaggtgtcagtgaaagaggagtatgttcatcttgtggccacaattcagcaattagtgcagataagaatgatcttgtttgaagagcagtggggaaaagctgggtaaatgaaggaaggtatatgtgggaagttcatgtttcttccatgaattctgtgcgtattgtttaataataatgctgtttctttttttttttttgagatggagttttgctctcatcgcccaggctggagtgcagtggcatgatcttggctcactgcaacctcyttctgcctcctgggttcaggtgattttctgcctcagcctcccaagtagctgggattataggcgcccactaccacgcccagctaaattttgtatttttagtagagacagagtttcaccatgttggccaggctgt

SEQ ID NO: 590840 - DNA, 567 bp, Homo sapiens
gaagtggggggatattaaaacacaaaatatacatttgccatgataacttttgttctccgggacagaggcgtacattttgcagtattgtgaaatagcggttaggaggggactaactcatggatgctaggccagaatcaccacatgagtgctgtggggaccagtaaaatttttaaagttttataatacaaaatactcagtgttcttttagtgccctctgtagttctctgcagaatcaacttaatgtggaatgatttctactgagtgcttctttgtccttttygttttcttcgtaaaccacttccttctttcagtctctactactaccagagatctggattcctcattttctattctgggagaaagcctattctgcaggaggattatcatccccccgcccctagttatttatgtactatatataaaacatatattaatatatataattttataacaaaactgtgtagattcattgaagaaaatgtagaagatatgggagtaaaagcaagatttttaaatcacctttagtctcactatctagatattaatactaataatattttgtgggat

SEQ ID NO: 590841 - DNA, 444 bp, Homo sapiens
tgcccatggctggctggggccagagtaaacactggaacttgtaacagaattaaaggtgaatgtttccaagtaaaaaaataaattaaataaaaaattaaaatgactctgtggtttttgacttctgattgggccttaactgatgcaggtaccattctaaatctttctccagccctgagacaccaagggctggacatgtggtctggcctaaggaacgagtaatagaaaagcctcgggaggaaaggcagtcagtctttctgtctcagccctattctgtctgagaccacaggattccctcatctgtgcttcattcttctcccttgacagatcaacatgctttgcttctccaggcactyggccaagtatggccaacctttcatttccaagtttacctgtccttgcatcatgtagccagcagagattaactagcacccatggctgccacag

SEQ ID NO: 590842 - DNA, 590 bp, Homo sapiens
atagagaacccagaaacaaatccaaatactaacagccaattgatctttgacaaagcaaataaaaacataaagtggggaaaggacacccttttcaacaaatggtgctgggataattggctagccacatgcaggagaatgaaactggatcctcatctctcaccttatataaaaatcaactcaagattgattaaggacttaamtctaaaacctgaaactataaaaattctagaaggtaacattggaaaaacccttctagacattggcttaggcaagatttagtgaccaagaacccaaaagcaaatgcaataaaaacaaagattaatagctgggacttaattaaacaaaagagcttttgcacggcaaaaggaacagtctgcagagtaaacagacaacccacagagtgggagaaaatcttcacaatctatacatctgacaaaggactaatatccagaatctacaacaaacaaatcagtaagtaaaaaacaaacaatcccatcaaaaagtgggctaaggacatgaatagacaattctcaaaagaagatatacaaatggccaacaaatatatgaaaaaacgctcaacatcactaatg

SEQ ID NO: 590843 - DNA, 465 bp, Homo sapiens
tttaactctgtgagatgaatgcacacatcacaaaggagtttcaggaaatttctttctagcttttatttgaagatatttcctttttcaccttagccctcaatgtgctcccaaatatcccttcagagattctaccaaaacagtgtttccaaaatgctgaatgaaaaggagtttttaactctgtgagttgaaggcacacataactgagcagtttttcagatagattccttctagtttatatcctcagatatttgctttatcgcctttggcctcaatgagttgccaaatatccttatgcagattctacaaaactagtgtttacaaactgctgaatccaaagacatgtttaactctctgagatgaaaacacayatcacaaagcagtttcccggaaatcttctttctagtttttaactgaagatatttcccttttcatgagaggcttcaatgtgctgctgaatatcccttc

SEQ ID NO: 590844 - DNA, 601 bp, Homo sapiens
acagattttaccaaagcaatgattccagactgctgaatgaaaagcaagttttcagtttgctaaatgaacacacacatcacaaagcagtttctcagattgcttccttctagtttttatccttagatattccctttttctcctttgcccacaatgagctcccaaatatccctttgcagaatctaccaacagtgttttcaarttgctgaatccaaaaaaaattttaaatctttgagattaatgcatacatcacaaggcagtttctcagcaatcgtctttcttatttttatctgaagatatttccttttcaaccagagatgacaatgcgcacccaaatatccttcgcagattgtaaaatacactgtttccacactgatgaatgaaaagagaagtataactcctctgctagatgaatatgcacattatacagctttttctgatagcttccttctagtttttatatgaggataaaaacttttgcaccattggcctcaatgagttcccaaacgtccattcactgaatggacaaaaacagtttttcaaaactgctaaatgcaacgaaagttttaactctgtgaggtgaatgcacacatcacaaagcggt

SEQ ID NO: 590845 - DNA, 601 bp, Homo sapiens
acagattttaccaaagcaatgattccagactgctgaatgaaaagcaagttttcagtttgctaaatgaacacacacatcacaaagcagtttctcagattgcttccttctagtttttatccttagatattccctttttctcctttgcccacaatgagctcccaaatatccctttgcagaatctaccaacagtgttttcaaattgctgaatccaaaaaaaattttaaatctttgagattaatgcatacatcacaaggcagtttctcagcaatcgtctttcttatttttatctgaagatatttccttttcaaccagagatgacaatgcgcacccaaatatccttcgcagattgtaaaatacactgtttccacactgatgaatgaaaagagaagyataactcctctgctagatgaatatgcacattatacagctttttctgatagcttccttctagtttttatatgaggataaaaacttttgcaccattggcctcaatgagttcccaaacgtccattcactgaatggacaaaaacagtttttcaaaactgctaaatgcaacgaaagttttaactctgtgaggtgaatgcacacatcacaaagcggt

SEQ ID NO: 590846 - DNA, 641 bp, Homo sapiens
caatgggtccaatggaaaaaagagaatatcccaggataaaaactagaaggatgctatctgataatccactttgaatgtgtgtattaatatcacagagataaacstttctttcattaagcagtttggaaacactgctttggaagaatctgcgaaggagtatttgggagcacattgaggccaaaggggaataataaaatatgccatgattaaaactagaaggaagctatatgagaaatcatttcatgatatgtggattcatatcagataattaaacctttcttttcattcagtagtttgaaaacactcttttggcagaatctacaaagggatatttgggagtgcattgaggctagtggtgaaaaaggaaatatcttcagctaaaaactagaaagaagttttctgagaaactgctttgtgaagtgtgcattcatcttacagagctaaatctctctttggattcagcagtttagaaacactgtttctgtggaatccgcaaagagatatttgggagttcattgatgccgaaggtgaaaaaagtgaatatcccaggataaaaattagaacaaagcaatctgagagactgatttgtgatgtgtgcattcatcccacagagttaaaacttccttttcattcacgagttt

SEQ ID NO: 590847 - DNA, 492 bp, Homo sapiens
aaagaaagttttaactctgcgagataagtgcacacatcagaaagtggtttctcagatagctttcttctattttttataatgggatatttgctttttggtgtgtggcctagatgagctatcaaatatccttttgcttattctacaaaaatgttttcyatgattctgaatccaaagaaagattgaactctttgagatgaatgcacacatcacaaagcaatttttcataatgcttctttatattttttatctgaagatatttcctttttcaccataagtgtcaatagtctcccaaatattacctcacagactctaccaaaacagtgtttccaaactactgaatgaaaagaaaggtttaagccagcgaggtaaatgcacacatcacaaagtggtttctcaaagagcttccttctagtttttatcctgggatgataccttctttgccattggcatcaacgagcttccaaatatcccttcacagcatctacaaaaaca

SEQ ID NO: 590848 - DNA, 588 bp, Homo sapiens
tcctttttcaccatagacctcaatgagctcccaaacaccccttcacagattctacaaaaacagtgtttccaaaatgctgactgaaaagaaagttttaaacctgtragatgaaatcaaccaccacaatgtggttcctcatagagcttccttctagtttgtatcatgggttttttatgttttcagctatagcctcaataagctctcaaatatcccttcacagattctataaaaacagtgtttccaagctgctgaatccaaaaaaaagtttaattctgctagatgaatgcacacaccacaaagcagtttctcagaaagttttttctgaagatatttccttttccacaataggcctcaatgcactcccaaatatcccttttcagattctaccaaaacagtgtttctacactgctaaatcaaaataaagtttaacactgtgagttgaatgcacacatcagaaagtggcttctcagataactttcttctagattttatcctgagatattcactgttttgcctttggcctcaatgagctaacaaatgtctattcgtagaatggacaaaaaaagtgtttccagactgctgaaatcc

SEQ ID NO: 590849 - DNA, 574 bp, Homo sapiens
tgttttgcctttggcctcaatgagctaacaaatgtctattcgtagaatggacaaaaaaagtgtttccagactgctgaaatccataggaaggtttaactctgcgagatgaatgcacacatcacaaagtggtatctcatgtagctttgttctattttttgtccaggaatatttgctcttttgaatttggcctctatgagctcccaagtatacatttgcagaaaggacaaaaacagtgtttcctaactgttgaatgaaaataaatgtgtaactctgagagactaatgtacacatcacaaagaggtttctcagatagatttctagtttttatcctgggatagtttctttttcccctgtgaccrcaatgagctcctaaatatccattcacagattctaccacaacagtgtttccaaacccctgagtccacagaaacgtttaactctgtcagatgaatggacacatcacaaagcagtttctcagaaaacttatttctactttttatctgaatatatttccgttttgaccataagcctaaatgggctccgagatagccctttaaagattctacaaaaacaa

SEQ ID NO: 590850 - DNA, 615 bp, Homo sapiens
cttttcagattctaccaaaacagtgtttctacactgctaaatcaaaataaagtttaacactgtgagttgaatgcacacatcagaaagtggcttctcagataactttcttctagattttatcctgagatattcactgttttgcctttggcctcaatgagctaacaaatgtctattcgtagaatggacaaaaaaagtgtttccagactgctgaaatccataggaaggtttaactctgcgagatgaatgcacacatcacaaagtggtatctcatgtagctttgttctattttttgtccaggaatatttgctcttttgaatttggcctctatgagctcccaagtatacatttgcagaaaggacaaaaacagtgtttcctaactgttgaatgaaaataaatgtgtaactctgagagactaatgtacacatcacaaagaggtttctcagatagatttctagtttttatcctgggatagtttctttttcccctgtgaccacaatgagctcctaaatatccattcacagatyctaccacaacagtgtttccaaacccctgagtccacagaaacgtttaactctgtcagatgaatggacacatcacaaagcagtttctcagaaa

SEQ ID NO: 590851 - DNA, 574 bp, Homo sapiens
gctctcagcactgaaggctgtgaaatccctgattttccacttcactcctctatatttctgtgttttttctttaattcctctagcacttctagcttagggtctccctgaccaagctggtcttggcaaatggcatctatcatgggggctctaatccagatcaacggtcaccagagcaaggtttggagaatgtggaactagctggaggacttccaagtactcttaaagcaatcccccttgtgagtaagaaggggagcttggaaacatcatgttaacaatgggacaagtttggtctctggttcgtttcaccttagagatttttcacactaatgatgaggaggacggagagtatagggaagtaacagaagaggtcacagagcaggcttatttgcctgttaaagctaaagtggcaaaggagggagaggttcatccttacccttctgcacaccttcattaagattttgaagaaaaagaccctccagatctttcttttctagatgacactggacaaaatttgttgccccgggaactgtttgagcagcacattgagtgacwgctcttagttctattcaggcag

SEQ ID NO: 590852 - DNA, 552 bp, Homo sapiens
gttttgcagtgatgggcattccatattctattaaaacagataatgccccaggctatactatacaagctctagctatatttttctctatgtggaatattaaacacattrctccctaaaacagcagttgcaaaagcagaaagggggagacagagaatatggaacagtgcagacacaactgaatgtagcattattaactttaaattttttgagcgtgctgaaaggccagatgttatcagcagctgaacagcatctacagaaaccagctgcaaagacagaagcagaacaactgatttagtggagagatctgattacaaaaagtagggaaaaaacgtaaaatcataacttggggtagaggttatgcttgtgtttctccaggccaaaatgaacagccgttttggataccattaagaccctgaaaacttatcgtgagccagatgccaaggaagagactctgggaggatcctgagggcatcccagttgcagccatgttgagattgatgctgaggtggacccccaactgccacgagcaacacccattgaacacagccaccc

SEQ ID NO: 590853 - DNA, 585 bp, Homo sapiens
taagcaaaatctctacattacygtgacaagttaatgatggtcataatgcccatgctggaaggttactggtttactgaaatgagggcaaagaacacctggcccacccagggtgaaaaaccacttaaagtcgttcttaaaccaaaaacaatagcatgagcaatctgtgctttaagggcatgctcctctgctgatgaccagccagatccacaactttaaattggcccatcccttcatttccaataaggtatacttttaattaatcaaataactgtagaaacaattcgaataacagattgctcttaataaatttgtggataaacatttgtttggggctcacagctctgaaggctgtgagacccctgaattcccaattcacacctctatatttctctgtgtgtgagtttaattcatctagtaccactggtttagggtcttcttgactgggctcatcttgggaatgtttcatttttcaccacaggcctcaatgaactcccaaatatcacttcgcagattccacaaaaaaaatgtttccaaaatgttgaatgacaagaaaagtttaactctgtgagatgaatgcacacatca

SEQ ID NO: 590854 - DNA, 621 bp, Homo sapiens
ctgaatgaaaagaaatgtttaactctgcaagaagaatgcacacatcaccaagaggtttctcagatagattccttctcttttttaggcagagatattcacttttttgctattggcctcaatgagcttccaaattttgatttgcagaatggataaaaacagtgtttccaaaatggtgactccaaagaaaggcttagctctgtgagatgaatgcacacatcaaataacagattctgagaaaacttctttctcattgttatctgatgatgttttgtttctgccataggcctcaatgagcacccaaatatcccttcacagattctacagaaacagactttccaatctgccaaatgaaaagaaaattttaattttgttagatgaatgtgcacatcacaaagttgtttccatatggctttcttctagtttttatgtagcatattcgctttttcactattatcctcagtgagctccaatatgtgcattcacagaattgacaaaaatagtgtttccccactgcygaatccaaagaaagctttaactctgtgaggtgaatgcacacatcacaaagcagtttctcagaaagcttctttctaggtctatctgaagatgtttcctttttgccac

SEQ ID NO: 590855 - DNA, 511 bp, Homo sapiens
aagaaagttttacctctgtgagaaaaatgtacacaacacaaagccatttctcagaaaacttctttctagtttttatctgaagatgtttcctttttcaccataggtctcaatgcactcccaaatatccactcagagattctaaaaaaagtgtttccaaactgctgaatgaaaagaaaggtttaactctgggaggtcaatgcacacatcagagagcagtttctcaggtagcttccttcgagtttttatccagagatacttgctttttcaccattggcctcaatgagctccctaatatccataagcagaatgggcwataatactgtttcaaagctgctgaatccaaagaaaatttaaatctgtgagaccaatgcacacatcatgaagcagtttctcagaaatcttctttctagtttttatccaaagatatttacttttctccataggcttcagtgcactcgcatatatccctgtgaagatacaaaaaaaaaaaaaaaaaaaacagtgttgctga

SEQ ID NO: 590856 - DNA, 470 bp, Homo sapiens
tgcagattacacaaaaacagggtttcaaactgctgaatgaaaagaaaggttttactctctgagattctaccaaagcattmtttccagactgctgaatgaaaagaaagctttaacttggcaaggcgaatgaatacatcacaaagcagtttctcagatagcttctttctagtttttatcctgggatattcactttttcgccattggcttcaatgagctcccaaatgtccattcacagaatggacaataacggtgtttccaaactgctgaatgcacagaaacgtttaactctgttaggtgaatgcaaacatcacaaagcagtttctcagaaagcttctttctagtttttatctgaagatatttcctttttcaccataggcctcaaggtgctcccaaatatcccttagcagattctgtgaaaacagtgtttccaaaccactgaatgaaaggcaaggtttaactctgagacttga

SEQ ID NO: 590857 - DNA, 470 bp, Homo sapiens
tgcagattacacaaaaacagggtttcaaactgctgaatgaaaagaaaggttttactctctgagattctaccaaagcattctttccagactgctgaatgaaaagaaagctttaacttggcaaggcgaatgaatacatcacaaagcagkttctcagatagcttctttctagtttttatcctgggatattcactttttcgccattggcttcaatgagctcccaaatgtccattcacagaatggacaataacggtgtttccaaactgctgaatgcacagaaacgtttaactctgttaggtgaatgcaaacatcacaaagcagtttctcagaaagcttctttctagtttttatctgaagatatttcctttttcaccataggcctcaaggtgctcccaaatatcccttagcagattctgtgaaaacagtgtttccaaaccactgaatgaaaggcaaggtttaactctgagacttga

SEQ ID NO: 590858 - DNA, 553 bp, Homo sapiens
ttccaaactgctgaatgaaaagaaaggtttatctctgttagttgaatacacaaatcatgaagcattttctcatatagcttctttccaatttttaaactgaagagatttcctctttcaccataagcctcaatgctgccccagatttcactctgcaggttctaagaaaacagtgtttccagactgctgaatgaaaagtaagttttatctctgtgaagtgaaagcaaacatcacaaagtggtttctcagatagcttctttcaattttttaatcctttgatawtcgctgttttgccattggagtcaatgagctcccaaatgtccattcacagaacggacaaaaacagtgtttggaaacttcagaatccagagaaatatttacttccatgaggtgaatgtgcacatcaccaaggagtttatcagaaagcttctttctagtttttatctgaagatatttcctttttcaccataggcctcaaatcacaccaagatatcactccacatattctacgaaaacagtttttccaaaatgctgagttaaaagaaaggtttaactc

SEQ ID NO: 590859 - DNA, 553 bp, Homo sapiens
ttccaaactgctgaatgaaaagaaaggtttatctctgttagttgaatacacaaatcatgaagcattttctcatatagcttctttccaatttttaaactgaagagatttcctctttcaccataagcctcaatgctgccccagatttcactctgcaggttctaagaaaacagtgtttccagactgctgaatgaaaagtaagttttatctctgtgaagtgaaagcaaacatcacaaagtggtttctcagatagcttctttcaattttttaatcctttgatattcgctgttttgccattggagtcaatgagctcccaaatgtccattcacagaacggacaaaaacagtgtttggwaacttcagaatccagagaaatatttacttccatgaggtgaatgtgcacatcaccaaggagtttatcagaaagcttctttctagtttttatctgaagatatttcctttttcaccataggcctcaaatcacaccaagatatcactccacatattctacgaaaacagtttttccaaaatgctgagttaaaagaaaggtttaactc

SEQ ID NO: 590860 - DNA, 553 bp, Homo sapiens
ttccaaactgctgaatgaaaagaaaggtttatctctgttagttgaatacacaaatcatgaagcattttctcatatagcttctttccaatttttaaactgaagagatttcctctttcaccataagcctcaatgctgccccagatttcactctgcaggttctaagaaaacagtgtttccagactgctgaatgaaaagtaagttttatctctgtgaagtgaaagcaaacatcacaaagtggtttctcagatagcttctttcaattttttaatcctttgatattcgctgttttgccattggagtcaatgagctcccaaatgtccattcacagaacggacaaaaacagtgtttggaaacttcagaatccagagaaatatttacttccatgaggtgaatgtgcacatcaccaaggagtttatcagaaagcttctttctagtttttatctgaagatatttcctttttcaccataggcctcaartcacaccaagatatcactccacatattctacgaaaacagtttttccaaaatgctgagttaaaagaaaggtttaactc

SEQ ID NO: 590861 - DNA, 460 bp, Homo sapiens
gattcagcagtgtggaaacactgtktttgtagattccctaaagggacatttgggagtgcattgaggcctatggtgaacaagcaaatatctccaggcaaaaacaagaaagaagctatgtgagaaactgctttttgatgtatgcattcacctcacagggttgcactattttcttgattcagtaatttggaaacactgttcttatagaatctacaaaaggacattcgtttgcactttgaggtttacagtgaaaaagaaaatgtcttcacaaaaaaactcaaaagaagctatctgagaaactgcattgtgatttgtgtattcatctcacagatttaaagctttcttttgattcaatagtgtgtaaacaaacactgtttttgtagaatctgtgaaagaacatctgggagctcattgaggccaatggtgaaaaagcaaatatccccagataaaaactagaaagaag

SEQ ID NO: 590862 - DNA, 679 bp, Homo sapiens
gaatctgtgaaagaacatttgggagctcattgaggccaatggtgaaaaaggaaatatcccgattaaaaactagaaagaacgtatgtgagaaacagcattgttatgtttgcgttcagctaacacaattaaacctatgttttgattcagctgtttggaaacactgtttttgtagaatctgagaaagaagatttgagagctccttcaggccaatggtgagaaagcaaatatctcctgttaaaaatcagaaagatgttatctaaggaactgctttgggatgtgtgtattcatctcatcggtttaaacccttctttggatacagcagttgggaaaaactgttttmatagaatctgcgaaaggacatttgggagcgcttcaaggcttatgttgaaaaagcaaatgtcttcacataaaaacatgaaagaagctatctgaacaactgcattgtgacgtgtgaattcatctcacagagttaaaattttcttttcattcagcagtttggaatcactgtttttgtagaatctgcaagagaacatgtgggagttcattgaggccaatggtaaaaaagcaaatatccccagataaaaactagaaagaagccatttgagaaacaggtctttttatgtgtgcattcagctcacacagataaacctatattttgattcagcagtttggaaacact

SEQ ID NO: 590863 - DNA, 679 bp, Homo sapiens
gaatctgtgaaagaacatttgggagctcattgaggccaatggtgaaaaaggaaatatcccgattaaaaactagaaagaacgtatgtgagaaacagcattgttatgtttgcgttcagctaacacaattaaacctatgttttgattcagctgtttggaaacactgtttttgtagaatctgagaaagaagatttgagagctccttcaggccaatggtgagaaagcaaatatctcctgttaaaaatcagaaagatgttatctaaggaactgctttgggatgtgtgtattcatctcatcggtttaaacccttctttggatacagcagttgggaaaaactgttttaatagaatctgcgaaaggacatttgggagcgcttcaaggcttatgttgaaaaagcaaatgtcttcacataaaaacatgaaagaagctatctgarcaactgcattgtgacgtgtgaattcatctcacagagttaaaattttcttttcattcagcagtttggaatcactgtttttgtagaatctgcaagagaacatgtgggagttcattgaggccaatggtaaaaaagcaaatatccccagataaaaactagaaagaagccatttgagaaacaggtctttttatgtgtgcattcagctcacacagataaacctatattttgattcagcagtttggaaacact

SEQ ID NO: 590864 - DNA, 414 bp, Homo sapiens
aatgctttgtgatgtgttcatttatctcacagagttaaacttttcttttaattctgtagtttggaaacactgtcttggtataatctgtgaggcaatatttgggagcgcattgaggcctatggttaaaaaagaaatatcttctagtaaatattagcaagtagcattctcaggaactgttttgtaatgcgtgtattcatctcacacagttaaaccactgtttggattcagcagtatggaaaccgtgtttttgyagaatctatgaagacatatttgaaagctccttgaggccaaaggtgaaaaaagagaatatcccaggataaaaactggagagaaactttctgagagacagctctgtgatgtgtgcattcacctcacagagttcaacctttctttttattcagcagttaggaaaca

SEQ ID NO: 590865 - DNA, 466 bp, Homo sapiens
tttctcagaaagcttctttctagtttttatctgaagatatttcttttttcaccatagacctcaatgcactcccaagtatcctttcacagatcctacaaaaacagtggttgcaaactgctgaatgaaaagtaaactttaactctgagagataaatgcatacataacaaagtggtttctcagatagcttccttttggttttctcctgggatactcgtttwtttgtctgtggcctcattgaactccaattatcccttcacagattgtacaaaaatagtgtttccaatctgctcaatgcaaggaaatgtttaacttggcaaggtgaatgcatacatcacaaagcagtttctcacatagcttctgtctggtttttattctgggatatttgctttttggcttttggcctcaatgagctccaaaacatccctttcaagattctaaaaaaacggtgtttcaaactattgaatcc

SEQ ID NO: 590866 - DNA, 500 bp, Homo sapiens
aagtttctcagaaagcttctttctagtttttatctgaagatatttcttttttcaccatagacctcaatgcactcccaagtatcctttcacagatcctacaaaaacagtggttgcaaactgctgaatgaaaagtaaactttaactctgagagataaatgcatacataacaaagtggtttctcagatagcttccttttggttttctcctgggatactcgtttttttgtctgtggcctcattgaactccaattatcccttcacagattgtacaaaaatagtgtttccaatctgctcaatgcaaggaaatgtttaacttggcaaggtgaatgcatacatcacaaagcagtttctcacatagcttctgtctggtttttattctgggatatttgctttttggmttttggcctcaatgagctccaaaacatccctttcaagattctaaaaaaacggtgtttcaaactattgaatccaaataatgatttaactctgtgagatgaattc

SEQ ID NO: 590867 - DNA, 567 bp, Homo sapiens
aggagtaaaacattccacacagaggaaatggggtggggctctccaagaaaaaggaataatgtgtataaagacttggtagtgttcaagtgcctggtgaagaattctactaggtttacagtttgttttctaaggtaataggtggtaaattttttttttttttgagtcagagtcttgctctgtcacccaggctggagtgcagtggcacaatctgggctcactgcaagctccgcctcccagcttcacaccattctcctgcctcagcctcccgagtagctgggactacaggtgcccgccaccatgcccagctaattttttgtatttttagtagagacggggtttcaccatgttagccaggatgatctcgatctcctgacctcgtgatccacccgcctcagcctcccaaagtgctgggattacaggcgtgagccaccgtgcgcggccaataggtggtaaatattttttgagtctaaaatatgctcagtragaactgtgaaaaatatgtccataaaatgtttatttacctttctgtacagattaatattttgttttcagtaagcattttactca

SEQ ID NO: 590868 - DNA, 507 bp, Homo sapiens
tgaacaatgtgcactgaggatataaaaacctacttgtgaatatttatgtagagcttatcaaaaaattatcttggtgcttaacacctaagtggttttaggtactaaaaacatagaaaatacaaatcaaaaaagatagaaatkatattaaaaacatatcactatttcaatgtaagtttgtagcaaaatctgaagttacactaagccattcagaacattcttgattaatgactaatcaccattttagaatactatgaaatacaaagtacaaagagaatgacatgatataatgccagacagctattaacagatttagtttcttgtttaaatttcatatagaaaatcatagtaagatattggagataaggtgaaactgagaccactaaacaaaagtcttattcattaagactaacaatagaaagaataaaaattttaatgactagattgatatatcatctaaagaaagaaaagagtgaaaaaatgttaataaacagtaataaatacacatac

SEQ ID NO: 590869 - DNA, 507 bp, Homo sapiens
tgaacaatgtgcactgaggatataaaaacctacttgtgaatatttatgtagagcttatcaaaaaattatcttggtgcttaacacctaagtggttttaggtactaaaaacatagaaaatacaaatcaaaaaagatagaaatgatattaaaaacatatcactatttcaatgtaagtttgtagcaaaatctgaagttacactaagccattcagaacattcytgattaatgactaatcaccattttagaatactatgaaatacaaagtacaaagagaatgacatgatataatgccagacagctattaacagatttagtttcttgtttaaatttcatatagaaaatcatagtaagatattggagataaggtgaaactgagaccactaaacaaaagtcttattcattaagactaacaatagaaagaataaaaattttaatgactagattgatatatcatctaaagaaagaaaagagtgaaaaaatgttaataaacagtaataaatacacatac

SEQ ID NO: 590870 - DNA, 575 bp, Homo sapiens
aaagtcttattcattaagactaacaatagaaagaataaaaattttaatgactagattgatatatcatctaaagaaagaaaagagtgaaaaaatgttaataaacagtaataaatacacatacaatgtttgtattagcatttttgttttgaattagcaggaaacaattagcaccatcgtctggattattgcaacagccttctgtctcatcttcctgctttagtagccactagtctttgaatctgttgtaagccttttaaatctaagagatcacatcacttctccacttaaaaatttctggccggggtaaaaggcaaggtcttccacaccccttaggatccagcttctggcccttctgtgacccaatctttactactttactccttccccctctgtatcagccacattggccatagccagtcctcaaacactgcaccacattcctgcctggggcctgtgcacttgctattcctttatctaaaaagacttttgccaaatragtagaaattttaaaacacctttatttaatatttaggagatagctggtacataaccaaggccaagtcttgaagaaaaaa

SEQ ID NO: 590871 - DNA, 578 bp, Homo sapiens
cccattgtcaatgattgaatgtacttattattgacactttaaccattcatattgtatagaatatctgtgtatgtatgattattttaaaagctgatttttaaaaatctcattaattcatgtggcttaaattaaatcatctggtatctagatgctagtcaggaccgagctttaccttttgtatacctggaaagatactttttcttcaagctgttaaaatatagaaggtaaattaagtaagaattttctatcttatggtccaaatagagttctatgttctcagaaatctaactaatttctgctcttctactgtagtcaagkcagtgttgtccaggaaatcttgagtaattccttcaatctgacttctctcagaattcctatagcacaaagtagaattagaaacccttttgtatttttagctagttgtgttttataaataaattgtcaaacagaatttaagctcttggagacaaaaatgatgtgtttgttttctccggaattctccacacaatctagacaattaactggacatgaagttgtcatttgtgacatgtttgttgagttttccccaaatgcaagtt

SEQ ID NO: 590872 - DNA, 578 bp, Homo sapiens
cccattgtcaatgattgaatgtacttattattgacactttaaccattcatattgtatagaatatctgtgtatgtatgattattttaaaagctgatttttaaaaatctcattaattcatgtggcttaaattaaatcatctggtatctagatgctagtcaggaccgagctttaccttttgtatacctggaaagatactttttcttcaagctgttaaaatatagaaggtaaattaagtaagaattttctatcttatggtccaaatagagttctatgttctcagaaatctaactaatttctgctcttctactgtagtcaaggcagtgttgtccaggaaatcttgagtaattccttcaatctgacttctctcagaattcctatagcacaaagtagaattagaaaccmttttgtatttttagctagttgtgttttataaataaattgtcaaacagaatttaagctcttggagacaaaaatgatgtgtttgttttctccggaattctccacacaatctagacaattaactggacatgaagttgtcatttgtgacatgtttgttgagttttccccaaatgcaagtt

SEQ ID NO: 590873 - DNA, 578 bp, Homo sapiens
cccattgtcaatgattgaatgtacttattattgacactttaaccattcatattgtatagaatatctgtgtatgtatgattattttaaaagctgatttttaaaaatctcattaattcatgtggcttaaattaaatcatctggtatctagatgctagtcaggaccgagctttaccttttgtatacctggaaagatactttttcttcaagctgttaaaatatagaaggtaaattaagtaagaattttctatcttatggtccaaatagagttctatgttctcagaaatctaactaatttctgctcttctactgtagtcaaggcagtgttgtccaggaaatcttgagtaattccttcaatctgacttctctcagaattcctatagcacaaagtagaattagaaacccttttgtatttttagctagttgtgttttataaataaattgtcaaacagaatttaagctcttggagacaaraatgatgtgtttgttttctccggaattctccacacaatctagacaattaactggacatgaagttgtcatttgtgacatgtttgttgagttttccccaaatgcaagtt

SEQ ID NO: 590874 - DNA, 326 bp, Homo sapiens
tttgtccctggtatctggaagctttgtctatgtcacatacatagtccatttatcaagacatgattttttgggctacatgtactttagctctctcttcttcctctctcaaaattaagtttttggtcacctgatcatctgcttaataattaatagctgttagttcatcttattgtctcccacaggtcatcagggaaataaaggcagagakatgtttctgatgtcacaatgcttcaccaaggtttgtagttgggcctctgttcctttcttctgcgatctaggaaacaggaacttccactccttctttccctatttgtcttggtagaggg

SEQ ID NO: 590875 - DNA, 657 bp, Homo sapiens
acttgtttatggacttcagaccctcttgagccccatcctgaatataccatttccattgtacaatggattgttgccgttacttcctgatattatgatttggtggatataatatattcattttgtgatgggcacttctggttgcakaattacttaatgttccatggtcaggagcttcctgccctagggtcagggaacaatggcattatagaagttgtttttcaagctctgaatatttttctctgctgcagattggatggccttgctccagaacctaaggagtgagtactatgactttcttactgaagctggaagagattccacatagcatccttatatacaatggataccagcagtatatttgccatcatgcagagggataagtggttgaggtaaagatatccatgaactcgtggcagtgatcaatggcttggctggtagtcaaaagtctggaagaagggttctatgactcttacattggggcttagagaaactccacatagctcctgccggatcatatgatccaaacaatgttgcagcttaaacctgctataaactcttctgttctggacctgttctggaactcttctgttctgttctggaccactcaaaactagcagttttctgagtaactcaataaataagatggatcagtataac

SEQ ID NO: 590876 - DNA, 564 bp, Homo sapiens
  misc_feature 1, 2, 3, 4, 5, 6, 7, 8, 9, 10, 11, 12, 13, 14, 15, 16, 17,18, 19, 20, 21: n = A,T,C or G
nnnnnnnnnnnnnnnnnnnnnatattgtaaaagaatttagttgtacattttaaaataactaaaagatataattggactgttacacaaaggataaatatttgaggggatggatacccaattttctgtgatgtgattattacgyattgcattcctgtgccaaaatacctcaggtactccataaatatatacacctcctattaatatgtacccacaaaaattaaaaattaagaaaatgataaaaataccttattgctaatgatcatcagaggcttcagtgagtgataaatttttgctggtagtggtattcacctcaatattgttgtttgctgacatcaggatggtggttgctgaaggctgtagtggttgtggcagtttcttaaaataagagaaaaataatgtttgtcacatcaacactttccttcacaaaagatttctctgtagcatgcaaagctgtttgatagcattttgcccacagtagaactttcaaaactggagtcagttttctcaaaccccgctactgctttatcaactaggtttatgaaatattctaaatcctttgttgtc

SEQ ID NO: 590877 - DNA, 564 bp, Homo sapiens
  misc_feature 1, 2, 3, 4, 5, 6, 7, 8, 9, 10, 11, 12, 13, 14, 15, 16, 17,18, 19, 20, 21: n = A,T,C or G
nnnnnnnnnnnnnnnnnnnnnatattgtaaaagaatttagttgtacattttaaaataactaaaagatataattggactgttacacaaaggataaatatttgaggggatggatacccaattttctgtgatgtgattattacgcattgcattcctgtgccaaartacctcaggtactccataaatatatacacctcctattaatatgtacccacaaaaattaaaaattaagaaaatgataaaaataccttattgctaatgatcatcagaggcttcagtgagtgataaatttttgctggtagtggtattcacctcaatattgttgtttgctgacatcaggatggtggttgctgaaggctgtagtggttgtggcagtttcttaaaataagagaaaaataatgtttgtcacatcaacactttccttcacaaaagatttctctgtagcatgcaaagctgtttgatagcattttgcccacagtagaactttcaaaactggagtcagttttctcaaaccccgctactgctttatcaactaggtttatgaaatattctaaatcctttgttgtc

SEQ ID NO: 590878 - DNA, 564 bp, Homo sapiens
  misc_feature 1, 2, 3, 4, 5, 6, 7, 8, 9, 10, 11, 12, 13, 14, 15, 16, 17,18, 19, 20, 21: n = A,T,C or G
nnnnnnnnnnnnnnnnnnnnnatattgtaaaagaatttagttgtacattttaaaataactaaaagatataattggactgttacacaaaggataaatatttgaggggatggatacccaattttctgtgatgtgattattacgcattgcattcctgtgccaaaatacctcaggtactccataaatatatacacctcctattaatatgtacccacaaaaattaaaaattaagaaaatgataaaaataccttattgctaatgatcatcagaggcttcagtgagtgataaatttttgctggtagtggtattcacctcaatattgttktttgctgacatcaggatggtggttgctgaaggctgtagtggttgtggcagtttcttaaaataagagaaaaataatgtttgtcacatcaacactttccttcacaaaagatttctctgtagcatgcaaagctgtttgatagcattttgcccacagtagaactttcaaaactggagtcagttttctcaaaccccgctactgctttatcaactaggtttatgaaatattctaaatcctttgttgtc

SEQ ID NO: 590879 - DNA, 507 bp, Homo sapiens
aatagagactgaagatgatgtccgtgtcaacctaagtgagaatcatccaatgcagatgaataaagcttttaaaacactctgtgagtcacttttgagagtacatggaagaaagagagggaaggagaggattagcagctgcatgtgtktgggtaggaaggggctcccaagaggcaggctcttggctttagtccttccagagaaaaggaaggtggaggacacggatcagtaagggaaggcattccacataactttgaacacctgtgtttccatttctaaagtcacaaagccacagaatcagaaccaactgatccatggaaagaaaggacagggatcaatgtgaggtgggagcaaaatctgcctctttgtttttcttttcccactaatggcttgtctcatataaagaatgggtcttaaaatcagacttacctattttactttttggcaaggatcaaggcaggaaattatcttgttaatttcttatttaaattttctgcttttattattggc

SEQ ID NO: 590880 - DNA, 654 bp, Homo sapiens
tctgactgatccctgctcaaatgcaactaggtggccgtcctttccaacctctgagggtctacacttggtctgtggagaagctgtgtattcarttgttctgcctccttgttggctcagttcttgttatttggcctggctttctcctgcctttctaatgctttcacctaaaaattcttgtttttttagatggagtcttgctctgtcacccaggctggagtgtagtggcatgatctcagctcactgcaacctttgccccctgggttcaaacaattctcttgcctcagcctccctagttgctgggattacaggtgtgcactaccacacccaggtaatttttgtgtttttagtagagacgggatttcaccacgttaactgactggtctcgaactcctgacctcaagtgatccacctgcctcagcctcccaaagtgctgagattacaggcatgagccacaagcctggccacaaaaattcttatgatagcccttatcatcagaggccaaaatgatcaataactaaaattagcactagccttgaaatagatgaggataagctggtttctactgaggacagattcgagtggggttcctggggactcacctttggttgtaatggggtatcagttatatggaatttaaagctaattcataaattg

SEQ ID NO: 590881 - DNA, 518 bp, Homo sapiens
acttattaaatgagaaagaatggagtgttttttgtctttctcagttccaggaggcattcagaagcagacaagaatgtctaaagaactagctctaattaaaggagatatttggctgtctstttgacacagagcttagcataacacaggtcagaagacatctataactataatccaaggaggaggatgttatcagaatcttgagtttccctgaacagcaaaagagcttacagctttctggacacacaagccattccttgtaattctgagaatttagcccagagggtggtctcaaaaacttgggaaatcagggaactgtttcaggctctgtattagatactttttgctgcacccccctcaaaaaaaaaaatcacaaaacttggtactttacaacactgtcttgattattgtaactatcttaaaattgagtaggctgattcttctagcttttttctttttcagaattattttaattatcctattttctttgcatttccatatacattttagaataatgtcta

SEQ ID NO: 590882 - DNA, 518 bp, Homo sapiens
acttattaaatgagaaagaatggagtgttttttgtctttctcagttccaggaggcattcagaagcagacaagaatgtctaaagaactagctctaattaaaggagatatttggctgtctctttgacacagagcttagcataacacaggtcagaagacatctataactataatccaaggaggaggatgttatcagaatcttgagtttccctgaacagcaaaagagcttacagctttctggacacacaagccattccttgtaattctgagaatttagcccagagggtggtctcaaaaacttgggaaatcagggaactgtttcaggctctgtattagatactttttgctgcacccccctcaaaaaaaaaaatcacaaaacttggtactttacaacactgtcttgattattgtaactatcttaaaattgagtaggctgattcttytagcttttttctttttcagaattattttaattatcctattttctttgcatttccatatacattttagaataatgtcta

SEQ ID NO: 590883 - DNA, 642 bp, Homo sapiens
tttaaaaaaatttcttagacattttaaatatcttctgattcatcatgtttcctgattttaaaattactatttcaggactgggcacagtggctctggcctgtaatccctgcactttgggaggccaaggcggacagatcacttgaggtcaggagttccagaccagcctggccaatatggcgaaactccatctctaataaaaatacaaaaattagctgggcctggtggtgtgtgcctgtaatccagctacttgggaggatgagggaggagaatctcttaagcctgggaggcagagtttgcagtgagccgagatcatgccactgtactccagcctgggcaacagagtaagactctgtctcaaaagaaaataaataaataaataaataataataataaattgctatttgatcatttkggaaattttgaaaatataaaaatgtatatgtattataatcagatgtttctagggtttgacttgtatcaggcaagctgttgagcagttattttttgtcagaatatgagagtaacttttactagtttgtaaaaagtattgctttttgctaaattttaattgaatttagataagtgtctatcatttgatgtaagtatatgaataaatagatgtactggtacaacatatcatat

SEQ ID NO: 590884 - DNA, 505 bp, Homo sapiens
aacaagttgcatgaagacaaataacactgttagggaggcagcccctgaagagctgcactgcaacacttgatatgctcccacagaccattattcttaagcacatctctgacgggatatttctttttccttctggcttggatcttctttctctgtaaatacattttttgtctttctgccacttttttttttctgtacttttaactaagcttggctttggggagggtatgcttagcagctttggaaaaaggtgcattctattacaaaatcttagcagtttagmgtcgagaggcagtttggaaatcacctagtttgacttcctcctctcacctacctagaacccacagtctagcaatgcagaaatataaattactgccatgacaaaaattttctgtatactatatgcactgtctgatatggtatccactccctgaatgttgttgttacacactttaaatctggttagtttgactaaggctagcaattttaaactttaatttaaattcaa

SEQ ID NO: 590885 - DNA, 518 bp, Homo sapiens
acagactgggtaatttataaaggacagaaatgtatttctcacagttccgaaggatgggaagtacaagatgaaggcacaaacatttgctgtctgctgagagccttcttgctgcgtcctctatatgacaaagcagaaggtaaaaaggatctttgctagttccctcaagcccttttatgaggcacgaatacattcataagggcagagccctcatgacttaatcacttcccgaaaggccccctccccataataccaccacaaccgggattcggttttaacacatgaattttgggagacattgagaccatcatatcagcagaccatcaaaaacacatttctttatagttggaaggaaactttgacatcgttatgtccagcactagatgctatgaaaaaagtaaagccygtctcccaagaccaatctagaaaggttcgaaaattctagatttggtgcacaattttaagcaacatatgaaactcccaatgtccatccatgaaactccagtgcggtccatggaact

SEQ ID NO: 590886 - DNA, 565 bp, Homo sapiens
tctgtttctgtattaattcacttaggataatggcctccaactacatccatgttactgcaaaggatatggttttgttcttgtacatggctgcatagtactccatggtgtatatgtaccacattttctttatgcagtccaccactgatgggcatctgggttgatttcacgtctttgctattgtgagtactgctgcaatgaacattcgagtgaacatatctttttggttggagaatttagtttcctttgggtgtatacccagtaatgggattactaggtcgaatgatagtcctacttttagttctttgagatatctccaaactgctctccactaatagtgatttaaaaaaaaaaaaaaaaaaaaccattgaattatctcacatttccgttgagattttttacctggtagaaagctgaatatggtggttggtgtttaatgggagattgtagtagatggaagtttattatgattcacggtagagtcacagagaagaagataaagttatgaaatgttgtgatttcrtacattagactacttgaaattaagtgcctccatttcttccttcct

SEQ ID NO: 590887 - DNA, 559 bp, Homo sapiens
gtcaaaaagaataaactatgtctgctatttttccttttatgtcctttctctaaatatttttgctttatgtatccctcaaaactatttcctcagatggacatacaatataatatcttaaaagaatgcatattattagcaaatgtattttgtacttaagagctccctgagattgtttccaaacaatcaaaatcgtttcatttttttttttagattgtgkgaccatttaactgagaaccagagtaagataaattattcttcctttgccttttaatatactactctcagatacttgttgattgaaaataaagtgctcctagggtgctttatgttggagattgcactgtagaagtattaggtttggaagaaatattgaagagtttcatgaagactctgctaggttttccatggggccttattttcctgggttctactatagtggcaatcactctatatatcaaaattgcttatttcttccttaaaattctgcagtgcctgatagaatgaatttcttaaggggttaaagatcccattgacttaaatattttctggcatagattta

SEQ ID NO: 590888 - DNA, 603 bp, Homo sapiens
attgagttgaatctgcagattaatttggggagtattgccatttaaacaataggatgtctgatctatgaacatgagatatcgttccatttgtttagattyttacttcagaaatgtttcctagttttcagtatatcacttttgcacttattaaatttgttcttatgcaattttttctttttgatgctgtggtaaatggaattgtttcttaatttcacttctgcatgctctatgctagtatattaaaatataatttttgtgttcatcttgtatcatgcaaatttgttgaatttttattagttctaatagtttttaaaagtatatttttaagaattttctatacacaaaatcatgtcatctgcaaacagatattttatgtttctttcaataatgatgcctgctatttgttagtttatttatttatttgtttattttgacacagggtctcactctgttgcccaggctgaaattcagtggtgtgatcatggctcaccacagcctctatcttcagggctcaagtaatcctcccacctcagcctcctgagaagctaggactacagacatgtgtcaccatgcccagctaatttttgtattttttgtagagat

SEQ ID NO: 590889 - DNA, 603 bp, Homo sapiens
attgagttgaatctgcagattaatttggggagtattgccatttaaacaataggatgtctgatctatgaacatgagatatcgttccatttgtttagatttttacttcagaaatgtttcctagttttcagtatatcacttttgcacttattaaatttgttcttatgcawttttttctttttgatgctgtggtaaatggaattgtttcttaatttcacttctgcatgctctatgctagtatattaaaatataatttttgtgttcatcttgtatcatgcaaatttgttgaatttttattagttctaatagtttttaaaagtatatttttaagaattttctatacacaaaatcatgtcatctgcaaacagatattttatgtttctttcaataatgatgcctgctatttgttagtttatttatttatttgtttattttgacacagggtctcactctgttgcccaggctgaaattcagtggtgtgatcatggctcaccacagcctctatcttcagggctcaagtaatcctcccacctcagcctcctgagaagctaggactacagacatgtgtcaccatgcccagctaatttttgtattttttgtagagat

SEQ ID NO: 590890 - DNA, 529 bp, Homo sapiens
ccgaggtggaaggatggcttgagctcaggagtttgaggctaaagtgagctatgatcgtgtcactgcactccagtcagggcaacagagtgagaccccaatctctaacaaacaaacatacaaaaccgaggtttcaaagcaccaggaagaaagttcttttcaaaactcagaatgtctccttagaaaaatgtttgcctactcaaatatcgcctgaagatgggttctcaaaaatttagaggaawaagtgtcaagatatctggatttaaatcagcctggagactatatagggaaattagccatatctaactcagcctgattctgaacctgtgacctgtaggtaaaggctgaaacttttccctccagagaaaatgtgaaagcagcagttttctttgggcagcccctgcttttgagttagccaggaacccacctctcactggcactacactcaggaggcttacacgtgcatttgatactctaccagttttattctatgagttactgccttagattatttttttcttgttattaccct

SEQ ID NO: 590891 - DNA, 548 bp, Homo sapiens
agtggtgcaaacattgctccctgcagacttgacctcctaggctcaagtgatgctcctacctcagcctcccaagtagctgggaccatgggtgtgtgccaccacacctggctagaattttttgtagagacaaggtctcaccgtgttacccaggctggtcttgaactcctgggctcaggtatcctcccaaagtgctaggtttacagrcatgaaccagtgtacctggccaattcctggagctttttactgctacagactgccatgtgattcaaattaggctttcagaatgacctcctactccacagaactccattttcactgtcagccacagtcctagaaattccacccttagaaagtctttcctgtaagttaaaccttgttatgagtagttaaaatacagatgtcctagagaagggccataccatcttatcagtcatgtgaacctcagtataaatgaaatttatgagagcttttttttggaacagactgtcattggagagggaggaaagaatatgggggccctggacatcctagggcaggcaaagggctcc

SEQ ID NO: 590892 - DNA, 560 bp, Homo sapiens
cacatttacaggtatttttayagcaatgtcccactcttaagtactaatttttctgtgttagtccattcttgcactgttataaaggaatacatgagaatggatcatttataaagaaaagaggtttaattggctcacagttctgtaggctgtacaggaagcatggcagcatctgcttctgaggaggcctcagggagcttttactcatgatggaaggcaaagcaggagcaggcatcttccacagcaggagcaggaccaagagaggggggaggtgccacacactttgaaacaaccagatctcatgagaactctatcattatcatgagaacagcatcaaaaggatgatgctaaaccatttgtgcaggattcatccccataatctgatcacctcccatgaggccccacctccaacattgggattgcaagtgaacatgaaatttgggtaggaatacagatacaaataatatcacaattttatagttagtagagaaattcaagaaatgtcaactatgttaatgttacttaaatatcatctatttaccatcaaataattactatgtagt

SEQ ID NO: 590893 - DNA, 411 bp, Homo sapiens
gctaaactccatgttaaaatgggctttgggagaagcccaaccagggacaaaagattagtgataatatagaaagggcctaattactaattcatyatccaagaagaaagtgaacacttgtatagtcatcatcaaacaattattttatactataaatttccatgacagttagtagtagctgctgctacggaggcagaaaacacactagcacatagtcaagaacaaagttagcttaatctctttaaaaattatagaataattcaggcctaatatagattaatagagaaatagggaagccttgtagataatttatgctaaaatgtacttacacataaaatgcctacataaatgaagcagaatttttcttctatatttatgatttaactcatattttcatcagttttcaaattgtga

SEQ ID NO: 590894 - DNA, 502 bp, Homo sapiens
gtccactcttcacttctattcaacattgtactagaggttctagccagaacaactaggcaagaaaaaacaatgcatccacaaagcaaaacaacacacaaaataattttttttttttttttgagacagagtcttgctctgtcgcccaggctggagtgcagtggcacgatcatggctcaatgcaacctccgcctcccaggttcaagcaattctcctgcctcagcctcacaaataactgagattacaagcatgtgccaccaygcccaagtaatttttgtatttttagtacaggcagggtttcaccatattgaccaggctggtcttgaacttctgacctcaggtgatccacccgcctcagcctcccaaagttctaggattacaggcgtgagccaccactcctggcttaagaaaaataattggtatttgcatatgacataatcttgcatataaaaaaatccataggaatccactaaagaactattagaactaataaataaatgaattc

SEQ ID NO: 590895 - DNA, 521 bp, Homo sapiens
tgggaattcaaaaagagatttgggtagggacacagccaaaccatatcagatgtccactcttcacttctattcaacattgtactagaggttctagccagaacaactaggcaagaaaaaacaatgcatccacaaagcaaaacaacacacaaaataattttttttttttttttgagacagagtcttgctctgtcgcccaggctggagtgcagtggcacgatcatggctcaatgcaacctccgcctcccaggttcaagcaattctcctgcctcagcctcacaaataactgagattacaagcatgtgccaccatgcccaagtaatttttgtatttttagtacaggcagggtttcaccatattgaccaggctggtcttgaacttctgacctcaggtgatccacccgcctcagcctcccaaagttctaggattacaggcgtgagccaccactcctggcttaagaaaaataattggtatttgcatatgacatmatcttgcatataaaaaaatccataggaatccactaa

SEQ ID NO: 590896 - DNA, 592 bp, Homo sapiens
tattttttggtggctcacgcctgtaatcccagcactttgggaggccgaggtgggcggatcacgaggtcaggagatcgagaccatcctggctaacacggtgaaaacccgtctctactaaawgtacaaaaaattagctgggcttggtggtgggcacctgtagtcccagctactcaggaggctgaggcaggagaatggcgtgaaccgggaggcagagcttgcggtgagccgagatcgtgccactacactccatgcactccagcctgggcgacagcaagactcggtctaacaaaaaaaaaaagaaaaaaaaagaaatacgtattttttatttcaattgtttatgggtacttaaaattgttaactcttagttttactattccttttgtcacaattttccaagttatatgtaggaatcaagcctttttgttaaaagataataattgataagtttcagtctgagctttgtccaaactagaattaatatacaaattatgaagtctgaattactgaatttcttcgatgttcaaatatctgggtgtctatttctattactttgatcattcattcattgtgctttctaaattaaatacattct

SEQ ID NO: 590897 - DNA, 592 bp, Homo sapiens
tattttttggtggctcacgcctgtaatcccagcactttgggaggccgaggtgggcggatcacgaggtcaggagatcgagaccatcctggctaacacggtgaaaacccgtctctactaaaagtacaaaaaattagctgggcttggtggtgggcacctgyagtcccagctactcaggaggctgaggcaggagaatggcgtgaaccgggaggcagagcttgcggtgagccgagatcgtgccactacactccatgcactccagcctgggcgacagcaagactcggtctaacaaaaaaaaaaagaaaaaaaaagaaatacgtattttttatttcaattgtttatgggtacttaaaattgttaactcttagttttactattccttttgtcacaattttccaagttatatgtaggaatcaagcctttttgttaaaagataataattgataagtttcagtctgagctttgtccaaactagaattaatatacaaattatgaagtctgaattactgaatttcttcgatgttcaaatatctgggtgtctatttctattactttgatcattcattcattgtgctttctaaattaaatacattct

SEQ ID NO: 590898 - DNA, 592 bp, Homo sapiens
tattttttggtggctcacgcctgtaatcccagcactttgggaggccgaggtgggcggatcacgaggtcaggagatcgagaccatcctggctaacacggtgaaaacccgtctctactaaaagtacaaaaaattagctgggcttggtggtgggcacctgtagtcccagctactcaggaggctgaggcaggagaatggcgtgaaccgggaggcagagcttgcggtgagccgagatcgtgccactacactccatgcactccagcctgggcgacrgcaagactcggtctaacaaaaaaaaaaagaaaaaaaaagaaatacgtattttttatttcaattgtttatgggtacttaaaattgttaactcttagttttactattccttttgtcacaattttccaagttatatgtaggaatcaagcctttttgttaaaagataataattgataagtttcagtctgagctttgtccaaactagaattaatatacaaattatgaagtctgaattactgaatttcttcgatgttcaaatatctgggtgtctatttctattactttgatcattcattcattgtgctttctaaattaaatacattct

SEQ ID NO: 590899 - DNA, 592 bp, Homo sapiens
tattttttggtggctcacgcctgtaatcccagcactttgggaggccgaggtgggcggatcacgaggtcaggagatcgagaccatcctggctaacacggtgaaaacccgtctctactaaaagtacaaaaaattagctgggcttggtggtgggcacctgtagtcccagctactcaggaggctgaggcaggagaatggcgtgaaccgggaggcagagcttgcggtgagccgagatcgtgccactacactccatgcactccagcctgggcgacagcaagactcggtctaacaaaaaaaaaaagaaaaaaaaagaaatacgtattttttatttcaattgtttatgggtacttaaaattgttaactcwtagttttactattccttttgtcacaattttccaagttatatgtaggaatcaagcctttttgttaaaagataataattgataagtttcagtctgagctttgtccaaactagaattaatatacaaattatgaagtctgaattactgaatttcttcgatgttcaaatatctgggtgtctatttctattactttgatcattcattcattgtgctttctaaattaaatacattct

SEQ ID NO: 590900 - DNA, 539 bp, Homo sapiens
taaagtgcagtctgacagagaatgtggcaaaaatcaaacattaggatgttgtgcactctagagagtaattctaaaaggtgttaaaggaattaaaaaatacagggatgccatcagtccagttctgaatggcagctaatatatgaaattatggaggaatatgtaagatggaatagccatatagtctgggaatagtgagaacaaaaataatgctgagacacaggagagtatgaaagctgtgtgtgctgacctaaagtgacagcagtcatgcagataattacaaaagagaaggacaggtgacagagagtgaatggaaagaaggatgggtcttgagaagtctattcagtaatagaggcccttggagagaccaaagtggctctcaggcctgttaaagtatagaaatagagaggagaaggtatccttggaataaagacaatatcccacaaactaaaaaacttttctctttcctattgttagttaattgagaggtgtgaacccaaytcaacatcacagtggaagcctagtgtataatcaaagacaga

SEQ ID NO: 590901 - DNA, 580 bp, Homo sapiens
tagtactagcattccaatgctatgacaattacacagattttaaaacttctatttcatgaatacttattatatgcctactggtattatgctagatactatgctatgtcccaagtagagagacattctagactttccacgatctcaaaataatgttgaactctgtcctcaatgccaaagtttaggatggactctaagttttaagtgtccataataagggagggcttggaacttatcttgattaatggggatattcagcttggtcaagataaaacttctcatcatataatatgtcataagacatgtgatatctattatacacaagcaggcagaaccttagggtaattatgaagggtttacatgatgaagagcctcatttcaagaactagtacaaaattgttcaactttgaaagagggatttttattcattccacagagatttactagggctactctagtaaatcctaactagggttaggatgttatttatttatttatttatgtttattacactttaagttctgggatacatgtgcagaacgtgcaggtttrttacatgggtatacatgtgccatggtggttt

SEQ ID NO: 590902 - DNA, 545 bp, Homo sapiens
aaaaaaaaaaaaaaaaaaggactaaagtgttgaagtagcatttytaaccaactcattttttgattgcagcaaacaaagttcagggaatttgcaaggaatcaagggtaaagggggtagaaaatgaaaaatacccataaaaagggccaagctgatgagagttgtagagtgaaatgatttgaaattggatttataaagatctatacatcagttttcttttctggttagaaaactaaaaccaaaacaaaacaaaaaaaaaaaaacaaacaaaatttaaaaaagattaaagtcccaagcagttttaaagccataaaattttagaaatggtgtgtaaccaaagttaaccaatcagccttcttcctcttcctattttaaatgaggaaactgaggctgagaatgaggaaataaatcatagagtttttaaagaaaagactgaaatcatatagttcaatctgctctttgtgattcagagagattgaaagatttcaaaggaacacaaaggtatttactacccaagccaggactatccactggccactttctttctg

SEQ ID NO: 590903 - DNA, 545 bp, Homo sapiens
aaaaaaaaaaaaaaaaaaggactaaagtgttgaagtagcatttttaaccaactcattttttgattgcagcaaacaaagttcagggaatttgcaaggaatcaagggtaaakggggtagaaaatgaaaaatacccataaaaagggccaagctgatgagagttgtagagtgaaatgatttgaaattggatttataaagatctatacatcagttttcttttctggttagaaaactaaaaccaaaacaaaacaaaaaaaaaaaaacaaacaaaatttaaaaaagattaaagtcccaagcagttttaaagccataaaattttagaaatggtgtgtaaccaaagttaaccaatcagccttcttcctcttcctattttaaatgaggaaactgaggctgagaatgaggaaataaatcatagagtttttaaagaaaagactgaaatcatatagttcaatctgctctttgtgattcagagagattgaaagatttcaaaggaacacaaaggtatttactacccaagccaggactatccactggccactttctttctg

SEQ ID NO: 590904 - DNA, 545 bp, Homo sapiens
aaaaaaaaaaaaaaaaaaggactaaagtgttgaagtagcatttttaaccaactcattttttgattgcagcaaacaaagttcagggaatttgcaaggaatcaagggtaaagggggtagaaaatgaaaaatacccataaaaakggccaagctgatgagagttgtagagtgaaatgatttgaaattggatttataaagatctatacatcagttttcttttctggttagaaaactaaaaccaaaacaaaacaaaaaaaaaaaaacaaacaaaatttaaaaaagattaaagtcccaagcagttttaaagccataaaattttagaaatggtgtgtaaccaaagttaaccaatcagccttcttcctcttcctattttaaatgaggaaactgaggctgagaatgaggaaataaatcatagagtttttaaagaaaagactgaaatcatatagttcaatctgctctttgtgattcagagagattgaaagatttcaaaggaacacaaaggtatttactacccaagccaggactatccactggccactttctttctg

SEQ ID NO: 590905 - DNA, 594 bp, Homo sapiens
tgtatttttcacatttctatttctgtaataaagaaaaataattttacatataaatgagataatgcttaaaatttcaaattacatcatttcctgcaatgaagacctatacaaccctattttagttagaaagtattccatacttcatatttggaataataccttcatgagtcacgttaagttgggatgtaaatgtagcaaaaataccttcatttttcatgttaagttgagacgtgaatgtaattctcaggaggcaagaataaatcgttagctttttycattagaacagcaaactagggacagccttctaaatgatatggtaagaaagaacctgcaagctcacattatgaacaaatatgctgacagatacgactcaactaaaatgatcaaaaaaagagaaaataggcggagtgaatttattatctccaaagtatagagaggttatgcttgaaagggtattttatgctgatcctaatctgtgttctccttcccttctttctctaaatctttttaattttaattgatagtagatggtgaggcaatatatgtttaggtaaagttaatataaagagttcaggtaataaaacaaaagttgtg

SEQ ID NO: 590906 - DNA, 457 bp, Homo sapiens
ataataaaaagaatttgaggcttagggccccatagacctgtgttacagtcagagccataccagttccaggtcatataaccttcgggaaattatttaatctccctattttatgtggcataaaagtggagatgatatgtatcatgtaggaggactgtgaggattattttagatgatacggatgaattgctgggcacattagcaggccctcaaagaatagtaattttctttccttatttaaaaaccagtggcccaaaggtctctttctttgagaaaattcacaaatgaaaactttgggagcatgttatgaaaatgctttcaatatagacctaaaggacttttaaaactagttagggstgggcgcagtggctcacatctgtagtctcagcactttgggaggccgaggcggcggatcacgaggtcaggagttcaagacaagcctggtcaacttggtgaaacc

SEQ ID NO: 590907 - DNA, 596 bp, Homo sapiens
catttttgtaattacgaattgtgctgctatataaatgcatgtgcaagtatctttttcatataatgacttattttcctctgggtagatacccagtagtgggattgctggatcaaatggtagttctacttttacttctttaaggaatctccacactgttttccatagtaattgtactagtttacattcctaccatcactgtagaagtgttccctgttcaccgcatccatgcgaacaactwtttttttttattattttttttttattatggccattcgttcaggagtaaggtggtatcacactgtggttctgatttgcatttccttgataattagtgtatgtagagcatgtttttcatgtttgatggccatttctatatcttcttttgagaattgtctattcatgtccttagcccactttttgatgggattatttgttttttttcttgctgatttttttgagttagttatagattctggatattagttctttgtcagatgtatagattgtgaaggttttctctcactctgtgggttgtctggttactctgctgactgttctttttggcatgcaaaagctctttagtttaattaagtccc

SEQ ID NO: 590908 - DNA, 559 bp, Homo sapiens
ttttttaagataagaacgtattttctgaagtggattctgatagctattagttttggtggtctggagtatgcttttactctttctccctgatactggcaatagaacacataggtccacaggtttggatatgagactaggttcttgctaattgtatagtccgcttcattttgacatagtgactgattcataagggtaggacagtcaatcaaatatatttgtagaattaaatgtggaagaaaaaatatttgtgcatttggttaaaatatcaaggactggatttaccctctttccagaaacaagtaaaaactgtatacagcatttgaagcaatggcactcgacattggcatgaggcagtggatggaagtgattgctagaagatggataatgaaagaggtgactggtaagagtgccccagtgcactgcctgctacaaattgcaagctgggtttagggaggggcaatataggcagagcaagacttctcccagcattgagaaggagctgggagtttgggaaagcccaaargtcacaagagtttacattcatttttattgctaagct

SEQ ID NO: 590909 - DNA, 570 bp, Homo sapiens
atgaaaaccaggttgactagatcctatggtgtgaggaattgagacctaaacaaattgtgagcttctgagatcagataacttctattgcatgatggcttggtatctgttttcaccttgaaatttataattcatgagttttagatatcttttctcatgtggaaatgattgagtagattcaaataacttcaacaatttttatgtgtttttaatagttgaaatcaatccagtgatggcagaattttgtgttgagatttttaaaatgttcaccaatgtcaagtttcaagatttattggacactctaaagacatgaagttattgtcataatgttgacccctgatggaggcatgtggtgcggcttgcagtgtttctttcaccataactgcagagtagagcatttcattgctttctccccaggagttgctgcattaccagctaggatatmtctaacagcatatcattaaccaggcaccatcagatcatcaaaacaaagaaactgctcaagctgtattatatgttctcactctgataataagcatagtgacattatataaaatcaagacatcaacaaca

SEQ ID NO: 590910 - DNA, 515 bp, Homo sapiens
cttgctggaatccctaccctgggtattgtgggcaggaattccagaggtgctgcccctggtgggactgggaagcaggcagtagatggagcctccccagaaccttggcattgccaagccagctcccyggccagggacacagtattgggcaacacattccaggtgcaaacctcaggtactcgtttgtaaaatggagatcatgctaatagaggatggggttgccttgactgtggagtgaggcagattcagctagcagcagcctcctgggttgttgcaggggttgatgtgaatgcaggagagaagtccatgaaatggaaaattctatggatggaagcaagtgtttttgctgtttatgtgcatgtgtttatgtcagccacggtggtgattttttttttttcccttgacgtgagccataaagtccttaaaaagcctcatagagctgggtttggtgaactggagggagccaggccccagacactttaaacatggcctcaagaaactcccttccccttttgagg

SEQ ID NO: 590911 - DNA, 574 bp, Homo sapiens
tgtctttttaagcttttcttagacaacacttggttagcatactgttagtaattgtgagaacttcaataacttaatttcttggtgggaaaaatattcagatgatgtttttttcttgacacttggatccaagagactcagtttaaattcttgggcaagtacatttatggatttcactttcatcatctgaaaataaaataatcatacttttgttacagtatcaatgtgaggattaaatgggatgaaaaataaaacatctgtcggagtgcctggaatatggtaggttccaaataaaacctttttgaatctgagtgtaaacttttaacaaaatctgattttctttttcccaaatattgtaattaccaaggatttttttctagaaaatttatgtccatatttcctttaagggttcctttagaaacattcccttactttcaatgtctatttttaaaaattatatagctctctattaaaatattargctgggcatggtggttcatgcctgtaatcacaacactttgggaggctgaggtggaagaattgcctgagcccagaggtccaaggttacagtgagcta

SEQ ID NO: 590912 - DNA, 587 bp, Homo sapiens
cttattacagctgcacagttgcaaaatgagtcatcatgattacatctattacaatggctaccaaggaaaccatgtatgagtttccatcctgtaaagtatctggtcacatgaaaccaacaaccaatgagtaacatgaataacatcccatggatcttatggcatcatagacaatgaataagtcatttaacacatcaaatgggaatcatagggacaatatttattttggccctacagtgtacttcgttttcagtaacttaaaaattaaattaaagttataatcatttcatatatctttaattattcacatataccttttgcttttagggaagccataaaataaaagaataactaaaactatatgatatatgataatgtaaaagtatacagatatcccaaagttgtatttagttaaaaatgttatttagtaatctacatagcaaacatagaataccaaatctactacacagttctttgaaaaacagcactaaaataaggaacaaaacattattctctcttcccatgattaaatcatttcttagaaaataattttacaactctayaggtatattccacaggttagttttaaa

SEQ ID NO: 590913 - DNA, 601 bp, Homo sapiens
aactgtatgccctagaaatgtcaaaacaaataagaaaaggtatgacatgaatgcataaaatatgtgtagatactagtcaattttatcatttactaccataaaaaatacacaagtctactataaaaagttaagattggccgggcactgtagctcatgcctgtagttctagcagtttgggaggctgaggctgtcagattgcttgagctcaggagtttgagaccagcaggggcaacatggtgaaaccccatatccacaaaaaaaaaaatacaaaaatacaaaaaattagccgggcrtggtggcataggcctgtggtctcagctactctactcaactactctactggagaggctgaggtgggaggattgctcaagcctcatgagctgtgattgtgccactgtactccagcctggacatcagagcaagactctatttcaaacaaacaagaaagttaagatttatcaacacttatgcacacacttacagaccacacatggcaccatttgcagttgagagaaatgcaaacaaattaaagatgcagtattaaatcataactgcttaaaattaactgcaggacatactgtactactgaaataattttgca

SEQ ID NO: 590914 - DNA, 489 bp, Homo sapiens
gtggctgttggtaaaacttaaagtattaattcgcatggtgtttacatcttaacaatgagctaaactttacagaaagaacacactgaaggtgggaatagaaacatcagatcagtatgtgagagggttttggagcattttccagacttttccagtatctcagaaattataccaaagaggtctgcctctgcctcaacttgtaaagttgatgtaggtatcagttcatgataaaacaaataatacaactcaataagccaccataatattttatttatacccttcatttccagacactgttaggtgtttttacacattatcttcagttctaaaacctgatggaaagttaggaattgttagtcccattttggatgagaggcccagagagacgaaatcacttatgcagacacrgatgtgaggctgtaacctcaatccacctgacttcaaatctaagctctttccactcctccatacttcttccccaagggtgatcat

SEQ ID NO: 590915 - DNA, 569 bp, Homo sapiens
tcacccaggctggagtgcagtggtgcgatctcggctcactgaaagctccgcctcccgggttcatgccattctcctgcctcagcctcccaagtagctgggactacaggcgcctgccacgatgcccggctaattttttgtatctttttagtagagacggggtttcaccatgttagccaggatggtctcgatctcctgacctcgtgatccacccgcctcggcctcccaaagtgctgggattacaggcgttagccatggtgcccgacctggttggctaatttctaatcgctccatctacctggcatttaccttatttcaccacaaagttagacatatatttgtaagcaaataggccttatattctacccaggggagaaaagaggaaaacagatacaggggaaggacaattacatcaatagatgatatttagataagtaagcaatgaccagctcttcctttcctgaaaaaataacccatgctcagcaaytaaatctttaatttgaccctttctctatgatgacaatgacaaagtatgttccacttcatagaagcttccagaggcagcagtaatt

SEQ ID NO: 590916 - DNA, 569 bp, Homo sapiens
tcacccaggctggagtgcagtggtgcgatctcggctcactgaaagctccgcctcccgggttcatgccattctcctgcctcagcctcccaagtagctgggactacaggcgcctgccacgatgcccggctaattttttgtatctttttagtagagacggggtttcaccatgttagccaggatggtctcgatctcctgacctcgtgatccacccgcctcggcctcccaaagtgctgggattacaggcgttagccatggtgcccgacctggttggctaatttctaatcgctccatctacctggcatttaccttatttcaccacaaagttagacatatatttgtaagcaaataggccttatattctacccaggggagaaaagaggaaaacagatacaggggaaggacaattacatcaatagatgatatttagataagtaagcaatgaccagctcttcctttcctgaaaaaataacccatgctcagcaactaaatctttaatttgaccctttctctatgatgacaatgrcaaagtatgttccacttcatagaagcttccagaggcagcagtaatt

SEQ ID NO: 590917 - DNA, 600 bp, Homo sapiens
tccttgacaacaggcctgtatgaatccaaagcctgagcagttatggtgagggaaggggagtggggccaaaggtatttcaggcagatgatttgccaattgcggaagtccagggcatgatcctaacactgtacttcatgtatgttgcttcccctctgatttttgtaaatactgtgaatttgataagttgcatgaaaggtagaaaaggttcatatcatcatatcattttcagcatagaaaagaataagggaartacaggtttacaggcacattttgtttttttgggcttcccttattgtgccttgcttctttgtgattttttacaaattgaagatggtggcaaccctgtgtagtgaggctattggtgccatttttccaacagcattgctcactttgtaactctgtgtcagcctgttttaacaataaggtattcttaaattaaggtatatacattggttttttttaggtgtaatgctactgcacacttaataactgcagcatagtgtaaacataactttcatatgttgtgggaaatcaaaaaattgtgactcactttattacaatatttgttttaatattgtaattgacctagaaacaaatctg

SEQ ID NO: 590918 - DNA, 600 bp, Homo sapiens
tccttgacaacaggcctgtatgaatccaaagcctgagcagttatggtgagggaaggggagtggggccaaaggtatttcaggcagatgatttgccaattgcggaagtccagggcatgatcctaacactgtacttcatgtatgttgcttcccctctgatttttgtaaatactgtgaatttgataagttgcatgaaaggtagaaaaggttcatatcatcatatcattttcagcatagaaaagaataagggaaatacaggtttacaggcacattttgtttttttgggcttcccttattgtgccttgcttctttgtgattttttacaaattgaagatggtggcaaccctgtgtagtgaggctattggtgccatttttccaacagcattgctcactttgtaactctgtgtcagcctgttttaacaataaggtattcttaaattaaggtatatacrttggttttttttaggtgtaatgctactgcacacttaataactgcagcatagtgtaaacataactttcatatgttgtgggaaatcaaaaaattgtgactcactttattacaatatttgttttaatattgtaattgacctagaaacaaatctg

SEQ ID NO: 590919 - DNA, 571 bp, Homo sapiens
ttctatgtttaaatatgttcagtaacacaaatccttatgattgtgttacagttgcctacagtatrcagtacaggtatatgccatactgtacaggcttgtagcctaggagcaataagctatcccatatagcctaggtgtgtagtcagctataccacctaggtttgtgtaaatacatcctatgatgtttgcacaaatacattctatgatgtttgcacaatgacaaaatcacataacacatttctcagaatgtacctctgtcattaagcaactcatatctgtataatcattttctaagttctgccatattaatttgaatacattttataaagccatcatatttgtcagatctctggggagtatactttgaaaaatcaaaccaattttatccatattatgtatatctttgggagtggttttgcaatccaggatttctcttgcccatagtgtcatttacttggcagcacacagttgggagtcacttgtgctttccatggtcatatttaatgagcatatggatggcaaccttcatctgtcctggctcaatgtcatccctcaatgtcatccctccttc

SEQ ID NO: 590920 - DNA, 571 bp, Homo sapiens
ttctatgtttaaatatgttcagtaacacaaatccttatgattgtgttacagttgcctacagtatgcagtacaggtatatgccatactgtacaggcttgtagcctaggagcaataagctatcccatatagcctaggtgtgtagtcrgctataccacctaggtttgtgtaaatacatcctatgatgtttgcacaaatacattctatgatgtttgcacaatgacaaaatcacataacacatttctcagaatgtacctctgtcattaagcaactcatatctgtataatcattttctaagttctgccatattaatttgaatacattttataaagccatcatatttgtcagatctctggggagtatactttgaaaaatcaaaccaattttatccatattatgtatatctttgggagtggttttgcaatccaggatttctcttgcccatagtgtcatttacttggcagcacacagttgggagtcacttgtgctttccatggtcatatttaatgagcatatggatggcaaccttcatctgtcctggctcaatgtcatccctcaatgtcatccctccttc

SEQ ID NO: 590921 - DNA, 647 bp, Homo sapiens
tacataccctgctcttgtttacattgctggtttacactgtttctccaagccatcacagctgatatctcctggtgctatccccaaactgccactcttaactcytgaagtaaataaataatctttgctgacaggactatgctgaatttccttaggcactctaattagatgtcctaagtcctcccaattcttagacctttaatatctgtttttctccttctcttattccgtttagtttttcaattcatacaaaactgtatccaggccatcaccaataattctaaatgacaattgtttcttctaacaatatcacctcttaccacaaaatcttccttcagcttaatctctcccactctaggttcccacgccgcccctaatcccgctggaagcagccctgagaagcattgcccattatctctccataccaacccccaaaattttcgccaccccaacactttaccactattttgtttatttttcttattaatataagaagacaggaatgtcagcctctgagcccaagctaagccatcatatcccctgtgacctgcacgtacacatccagatggccggttcctgccttaactgatgacattccaccacaaaagaagtgaaaatggcctgttcctgccttaactgatgacattgtc

SEQ ID NO: 590922 - DNA, 647 bp, Homo sapiens
tacataccctgctcttgtttacattgctggtttacactgtttctccaagccatcacagctgatatctcctggtgctatccccaaactgccactcttaactcttgaagtaaataaataatctttgctgacaggactatgctgaatttccttaggcactctaattagatgtcctaagtcctcccaattcttagacctttaatatctgtttttctccttctcttattccgtttagtttttcaattcatacaaaactgtatccaggccatcaccaataattctaaatgacaattgtttcttctaacaatatcacctcttaccacaaaatcttccttcagcttaatctctcccactctaggttcccacgccgcccctaatcccgctggaagcagccctgagaagcattgcccattatctcyccataccaacccccaaaattttcgccaccccaacactttaccactattttgtttatttttcttattaatataagaagacaggaatgtcagcctctgagcccaagctaagccatcatatcccctgtgacctgcacgtacacatccagatggccggttcctgccttaactgatgacattccaccacaaaagaagtgaaaatggcctgttcctgccttaactgatgacattgtc

SEQ ID NO: 590923 - DNA, 579 bp, Homo sapiens
aaagagttagtgctgtttcaaagtttgcattcacagcttccttcatcttgataagaaagatatacttttgtattattaaagcacttaaagctcctttgcctgtgtttgttttgttttttctctatatataatggagaaaaatgcataaatttaggcataacatgaaataatagtttaatttgacagractaattaatctagataaaacagagatcacatttagaataaatattattcattttccaaatacattatgtgacaaaattgtagattttgcagttccaggaggacatcaaaatactatgactggattcaaggtaagattaaataattgctaaaaatacctctagtttgcaaagtaagcattgtgaagatatagataattaaatctgtggtctagggtataaaataactacctctggagaataagattaataagctacatccttaccacacagttttcatacatcatgctgaaaaaacatcagcatatgcttgatgtgccttaggagatcatttgtagtaataaaatgaaaaagaaattatccaaattattcttacataaaatacatataaaat

SEQ ID NO: 590924 - DNA, 610 bp, Homo sapiens
gcaatcttggttcactgcaacctctgcatcctgggttcaagcaattctcctgcctcagcctcccgagtagctgggattayaggcacccactaccacacgcagctgatttttgtatttttagtagagacggggttttgccacgttggccaggctggtctcaaactcccaacctcagatgatccacctgccttggcctcccgaagtgctgggattccaggcgtgagccaccgcacctggcctagtatcccttttttaaaagagtaaccttctcatctgatttctagatcacttcctgattcgtgaaacacttccattcgtctaatacacaaaaatatttactaataattcacctcatactgtctcaggatgggctgggttaagctttaataattgataacctgaaaatctgaattacttttaaaaacaaaaactgatgtcacacttactctacatttttttttcatgggttagctattgttcttatatgtttccttaatctagattatagactaacagagcttcctctgtgtgaaatgttgccaatcattctggaaaaggagaaaatagagcaaagtcaagatgtatggacacataacttccgtcctgaagt

SEQ ID NO: 590925 - DNA, 610 bp, Homo sapiens
gcaatcttggttcactgcaacctctgcatcctgggttcaagcaattctcctgcctcagcctcccgagtagctgggattataggcacccaytaccacacgcagctgatttttgtatttttagtagagacggggttttgccacgttggccaggctggtctcaaactcccaacctcagatgatccacctgccttggcctcccgaagtgctgggattccaggcgtgagccaccgcacctggcctagtatcccttttttaaaagagtaaccttctcatctgatttctagatcacttcctgattcgtgaaacacttccattcgtctaatacacaaaaatatttactaataattcacctcatactgtctcaggatgggctgggttaagctttaataattgataacctgaaaatctgaattacttttaaaaacaaaaactgatgtcacacttactctacatttttttttcatgggttagctattgttcttatatgtttccttaatctagattatagactaacagagcttcctctgtgtgaaatgttgccaatcattctggaaaaggagaaaatagagcaaagtcaagatgtatggacacataacttccgtcctgaagt

SEQ ID NO: 590926 - DNA, 455 bp, Homo sapiens
caatgtgagtttattttttaaatataaaattgacaaatctttagctagagtaagaaagacaagactcaattaaacaaaatcagaaagagtagacattaaaactggtaccacaaaaatacaaagaatcataaaatacagctatgaataattgtataccgaatattgaatatccttttctctaatatcaggagtaagatacttatgcccattcttaccacttctattcaacatacttctggaagtcctagccagagcaattggacaagtaaaagaaataaatacattccaattaaaaaggaagacgttgactgggaatagtrgctcatgcttattatcccagcactttgggaggtcaaggcgggcacatcacttgaggtcaggagttcaagacaatcctggccaacatggtgaaaccctgtatctactaaaaatacgaaaattagccatgcatggtg

SEQ ID NO: 590927 - DNA, 455 bp, Homo sapiens
caatgtgagtttattttttaaatataaaattgacaaatctttagctagagtaagaaagacaagactcaattaaacaaaatcagaaagagtagacattaaaactggtaccacaaaaatacaaagaatcataaaatacagctatgaataattgtataccgaatattgaatatccttttctctaatatcaggagtaagatacttatgcccattcttaccacttctattcaacatacttctggaagtcctagccagagcaattggacaagtaaaagaaataaatacattccaattaaaaaggaagacgttgactgggaatagtagctcatgcttattatcccagcactttgggaggtcaaggcgggcacawcacttgaggtcaggagttcaagacaatcctggccaacatggtgaaaccctgtatctactaaaaatacgaaaattagccatgcatggtg

SEQ ID NO: 590928 - DNA, 583 bp, Homo sapiens
tcctaactgtgctttcttaatctatttgtaaccacagctttctttttgaaaataattatttccctgattgtcttcttaatatttttagggtttattttcttatttcttcccaccaatcccagatttcagtgtgttgtcatctatgacataaaatagcaaaataataataacaatagtatttatcaaatagttattatatactatgcactatgctaggtgaattacatgcatttttcatttaattttcttgtcagttctatacagtagacactattattacttcccatcttatgtatgagggaagcacaagcatgtatctaaaaagcgatagagcccatattctctatcactgtgctgtgtcaacactttatattacaaagtaccccgatccacaggtaactgttttacttaaatcaatgttaatctccttgrtcatttattcatggccatcctctttcatttggaaaatattaattaacacctactatgtgcctgacactttgaaaggctctgggaatataaggatgaatgagtccagttcttgtccttgagatggttacagatgaattaaataaaacatagc

SEQ ID NO: 590929 - DNA, 453 bp, Homo sapiens
aatctagttatataaacttaaaaaaggtatttaccttttctaactctgttttctcattgcaaaatgaaaacaataaaacctatcccaaagaatggtagcaaggactaagtgatataaagcatttagctgccattattaatgagagtgtcagctcttgagtgggatgagactgaaagaaagattaaaaaccmcaattatagatgttaaccctaagtaagcacttttaataatattcatattccaactcaatccattctacaacacatcttaatgttaagcaagcaaatcaaaattctcaatcttaaaaaatagctcatagtctggatccagtggtttattcctttgatcccaggcatgatgtagcctgctttgagaggccaaggtgggaggatcacttgaacccaagagtttcaggttacaatgaactacaatggccagcctgggcaagagagt

SEQ ID NO: 590930 - DNA, 565 bp, Homo sapiens
gggacaacatggttgatttaaatatttgatcagaaaataggtgaatttttggcttgttcttaagtttccagttgacgtttcaaatcattgaattaaaatcttaaagctggacctttttaagtgtcttcatcagatgtcctgatctaaactctttactgtaatgacatcaacaatgggccctagacatatccaaggaagtcatttataaagtaccttgaataatgcttagcacatatcacattcttaataaatgtacatttctgtatctattttcaagaactggtggaatcctacaggattatgttaggatcaaggactggctyttttttttttttttttttcctgagacacggtcttactctgtcaccctggctggagagtgcagtggtgtgatcttggctgactgcaacctccgcttccctggttcaagtgattctcccacctcagcctcctgagtagctggggttacaggcaactgccaccacacccaactaatttttatatttttagtagagacggggtttcaacatgttggccaggctggtctcgaactcctgacctcaag

SEQ ID NO: 590931 - DNA, 604 bp, Homo sapiens
gtgcagatttgtctgttcactcccagctgcattgaaaatgttttctgaacaaagggaggaggaggacaccttaacgattgcagtggaagtcaaggaaaaccataatttamatttcagaatataaatgccccacggaggccttcttcccctgctgcctggaactttgattggcatttcaatagaattctaccaaattggaggttggtcccaggaaactcatcctcgtggttaccaatgactctaattccaggcatctgatctgggcaaataatatttatgagaacaggacatttaaaaagtcgagacaactatgaaagccaatgagagtcagaaaaccaacataagaaggagaataaggacgtgggtagtaaggatttgtgggtgcttccttctggaaaacagatgtatttctagttaaagttaattctgcttttctaattgttgataaactggcaaacagcaattatttgtgtatttgtgtgggcgtgtgtgtgtgtgtgtatcatatgttttttcactctcactcaaaaacccatcttctccagaaaggattatcttctataatcttataaatttaaagcactataaaaattggattattttg

SEQ ID NO: 590932 - DNA, 555 bp, Homo sapiens
agaataaaattggcccagaaggacaataaagtaacaggcccagagagtaacttgtttggactgaagcaagaggatgagagtaccagagagatagctagggtggaactgaggagaacagaaaagggaattgagtgatcaacagatatatagaccacctggaaaagaatttggagcaagttagtgacatgtcaagtcatgtaagaagccagtaaaaaatgaagcaattttgccgggcgcaggggctcacacctgttaccccagcactttgggaggctgaggtgggcggatcacaaggtcaggacattgacmccatcttggccaacgtgttgaaaccccgtctctactaaaaaaaaaaaaaaaaaaaaaaaaaaaaaattagccagagtggtggtgcatgcctgtagtccgagctacttgcaaggctgacgcaggagaattgcttgaatccgggaggtagaggttgcagtgagccgagactgcaccactgcactccagcctgggccacagagtgagactcccatctcaaaaaaaaaaaaaaaagaaggaactgttaat

SEQ ID NO: 590933 - DNA, 236 bp, Homo sapiens
cacaaccaacctggaggatgcactaaagtgatcaaaacctggctcaaagggaactgggtgcagcactggcagtctgctacacaccccaaatcataaccctacgtatcaccatcctatagaacatacctcttatatattcccaagccagctatccatctattttttwaaaaaatatagaaccacacagttcaaactgttaaaagaaggctacttcaaagtaggtggtattctgattg

SEQ ID NO: 590934 - DNA, 476 bp, Homo sapiens
acctctgcctcctgggttcaggtgattctcctgccttagcctccctagtagctgggattacaggcatgtgccaccatgctcggctaattttgtatttttagtagaaacaggtttcctccatgttggttaggctggtctcaaactctggacctcaagtgattcacccaccttggcctcccaagtgctggaattacaggtgtgagccaccatgcccagccttttttttcttttttttttttgacagtgtctcactcttattgcccaagttggagtgcagtcgcacgatctcggttcactgcagcctcaaattcctgggctcaagtgatcctccacctcagccctccaagtagtggggactacaagcatgcaccaccacacccaggtatttttttktgtgtgtgtgtatttttagtagagatggggttttgccatgttgcccaggcttaataatagacattctcagttgtgtgagattg

SEQ ID NO: 590935 - DNA, 458 bp, Homo sapiens
gcttctgccacttttcttaagacctctattgcccctcctaagcagataataagacctgtgatgcttcatctagatgcacagagcttatggtgagaacaacaatttaaagggaggcaactcatgctgatgtaattggtgtaaatcttggattgaatcatagtgtcytaagattaatctaatttgtaaaccagtggcattttttgttagtctttttttccttaaccttatgtatgtcactagaatttatcaaatcaatataatcaacatcctggtaatgactgaatttgaagggaaaccagtagtatgctggatattaagagcaaagccatacaaagatagacaattaacaaatcaccatacatgtctgaacatcaaggcttattttgaaaagcaaaaggtcaacagtgattattcactttctcatgaagcttgtctgtaatctgccaatagacaggaaa

SEQ ID NO: 590936 - DNA, 663 bp, Homo sapiens
ggttcaagaatccttctcaaaatatttcatctttggttacttggttttagattcatgacacasaatatcttaactaccatagccactgtaaaatgttctatgtttgggaaatgttacatgttgaattttattctccaaaagatatgctgaagtccgaatccccaggacctgtgaaagtggtcttatttgggaataaggtctttgatgatgtaatcaagttatgatgaggtcggactgaattaggatggaccctaatttaatgtctggtgtctgaataagatgaggaaaattaggacgcagacacataggagaatgccaggtaaaaacatggaaagagactcccagaggaaagacagtggaatggtgacagaggtggagatgggagcaatgcaccgaaagccgggaacgccaaggacggctggacattgccagaaactaggagagtggggagcaaaagtgacctcaccttgatgtcaatctgccacggtgacttctgatcaaccccagtcttgtgaatgcctcctgattcctactttacgtactgtcaccttgtgtaaatgtcaaccttgacattattgcgcaaatcataggctgtgatgtacctggcattcttgccccttctggagagctgcccttagttattcatacagacgatgtacacct

SEQ ID NO: 590937 - DNA, 663 bp, Homo sapiens
ggttcaagaatccttctcaaaatatttcatctttggttacttggttttagattcatgacacacaatatcttaactaccatagccactgtaaaatgttctatgtttgggaaatgttacatgttgaattttattctccaaaagatatgctgaagtccgaatccccaggacctgtgaaagtggtcttatttgggaataaggtctttgatgatgtaatcaagttatgatgaggtcggactgaattaggatggaccctaatttaatgtctggtgtctgaataagatgaggaaaattaggacrcagacacataggagaatgccaggtaaaaacatggaaagagactcccagaggaaagacagtggaatggtgacagaggtggagatgggagcaatgcaccgaaagccgggaacgccaaggacggctggacattgccagaaactaggagagtggggagcaaaagtgacctcaccttgatgtcaatctgccacggtgacttctgatcaaccccagtcttgtgaatgcctcctgattcctactttacgtactgtcaccttgtgtaaatgtcaaccttgacattattgcgcaaatcataggctgtgatgtacctggcattcttgccccttctggagagctgcccttagttattcatacagacgatgtacacct

SEQ ID NO: 590938 - DNA, 663 bp, Homo sapiens
ggttcaagaatccttctcaaaatatttcatctttggttacttggttttagattcatgacacacaatatcttaactaccatagccactgtaaaatgttctatgtttgggaaatgttacatgttgaattttattctccaaaagatatgctgaagtccgaatccccaggacctgtgaaagtggtcttatttgggaataaggtctttgatgatgtaatcaagttatgatgaggtcggactgaattaggatggaccctaatttaatgtctggtgtctgaataagatgaggaaaattaggacgcagacacataggagaatgccaggtaaaaacatrgaaagagactcccagaggaaagacagtggaatggtgacagaggtggagatgggagcaatgcaccgaaagccgggaacgccaaggacggctggacattgccagaaactaggagagtggggagcaaaagtgacctcaccttgatgtcaatctgccacggtgacttctgatcaaccccagtcttgtgaatgcctcctgattcctactttacgtactgtcaccttgtgtaaatgtcaaccttgacattattgcgcaaatcataggctgtgatgtacctggcattcttgccccttctggagagctgcccttagttattcatacagacgatgtacacct

SEQ ID NO: 590939 - DNA, 663 bp, Homo sapiens
ggttcaagaatccttctcaaaatatttcatctttggttacttggttttagattcatgacacacaatatcttaactaccatagccactgtaaaatgttctatgtttgggaaatgttacatgttgaattttattctccaaaagatatgctgaagtccgaatccccaggacctgtgaaagtggtcttatttgggaataaggtctttgatgatgtaatcaagttatgatgaggtcggactgaattaggatggaccctaatttaatgtctggtgtctgaataagatgaggaaaattaggacgcagacacataggagaatgccaggtaaaaacatggaaagagactcccagaggaaagacagtggaatggtgacagaggtggagatgggagcaaygcaccgaaagccgggaacgccaaggacggctggacattgccagaaactaggagagtggggagcaaaagtgacctcaccttgatgtcaatctgccacggtgacttctgatcaaccccagtcttgtgaatgcctcctgattcctactttacgtactgtcaccttgtgtaaatgtcaaccttgacattattgcgcaaatcataggctgtgatgtacctggcattcttgccccttctggagagctgcccttagttattcatacagacgatgtacacct

SEQ ID NO: 590940 - DNA, 521 bp, Homo sapiens
aaatgcaccaatgagcactctgtgtctagctccaggtttgtgaaagcaccaatcagtgctctgtgtctagctaatctagtggggacttgaacttttgtgtctagctaaaggattgtaaatgcaccaatcagtactcttgtgtctagctcaaggttyataaacgcaccaattagcaccctgtcaaaacggaccaatcaggtctctgtaaaatgggccaatcagctctctgtaaaatgggccaatcagctctctctaaaatggaccaatcagcaggatgtgagtggggtcagataagggaataaaagcaggccacccgagccagcagcagcagcagtagccctccctggttcccttccatggtgtggaagctttgttcttttgctcttggcactaaatgttgttggtgcttattgtttgggtctgcgcagctataacgctcaccatgaaggtctgcagcttcattcctgaggccagcgagaccgtgaacccaccgggagggatggacaactccagacgcgcca

SEQ ID NO: 590941 - DNA, 569 bp, Homo sapiens
attgggggatttttctccaatatttagaatgtgaacctggycaaccttgagagataagaatacaaaagcatgggggctccctataactggaacttcatggaatttttaactctcagacttgttcacactgatcctccaacaatttatcaattaaagttcagatttccttaccctggcactggttcctgcagagaattttgctccagtatggtgtgattctctgtatatgcctttttgttttcaatctggaggcagcagtttgacctaatttttcttatggctcttggcatacttgttgatttttcactttttttttcaagtttatacttgttagaataaagttgtgacttccaagttcttttcatgaggaactcaagattcatctatttttaacatttttatccatttccattttccatttggctgtcctttctctgtaaatatacccatgcatatttcataagaattgggatattctctgacagaactacattacagttaccaacttcaggaaatgagattaaatcttttaatccaatcgaccatcagtattctaattctgtcaaatg

SEQ ID NO: 590942 - DNA, 569 bp, Homo sapiens
attgggggatttttctccaatatttagaatgtgaacctggtcaaccttgagagataagaatacaaaagcatgggggctccctataactggaacttcatggaatttttaactctcagacttgttcacactgatcctccaacaatttatcaattaaagttcagatttccttaccctggcactggttcctgcagagaattttgctccagtatggtgtgattctctgtatatgcctttttgttttcaatctggaggcagcagtttgacctaatttttcttatggctcttggcatacttgttgatttttcactttttttttcaagtttatacttgttagaataaagttgtgacttccaagttcttttcatgaggaactcaagattcatctatttttaacatttttatccatttccattttccatttggctgtcctttctctgtaaatatacccatgcatatttcataagaattgggatattctctgacagaactacattacagttaccaacttcaggaaatgagattaaatcttttaatccaatckaccatcagtattctaattctgtcaaatg

SEQ ID NO: 590943 - DNA, 477 bp, Homo sapiens
ataaaggatactataggccaggtgcggtggctgacacttataatcccagcactttgggaggccggggcaggtggatcacctgagttcaggagtttgagactagcctggcccacatggtgaaacccggtctctactaaaaatacaaaacttagttgggtatgatggtgggcacctgtaatcccagctacctgggaggctgaggcagaagaattgcttgaacccgggaggagaaggttgcagtgagcagagattgtgccactgcactccagcctgggtgacagagcaagactcatctaaaaacaaaaattatatatttatatatatatataaaatctcattaacacacaggattttatcagagcaaccgatgggtacaygctgtcccatatcagagcaaccgatgggtaatatcagagcaaccgatgggtacacgctgtcccaaagagccaggctgcctttagctataatgctgaggcc

SEQ ID NO: 590944 - DNA, 662 bp, Homo sapiens
atttgctgtgcctagcatagggtctgccaatgtgtactaaattcataaataattttatttcatgaaatagtagaaggtctgcctttctatcaatggaattatattgtaaaaaatggtgatgacaaaacttaagcctatttcctttagccttttgtccaagacaaaatcaaacatagcaggtaggaccacctgctcatgatttttggaagcacgttacttcaggaattgattcataggaagaaaagaccactttcctataaagttattatatgtcagtgttgcaaaatttagtggtaatttatatgaccttctttctatttgggtttcttgaaatacatttgtattggtcagagttctccagaaaaataaaaccataaaatatacttctatatctctagaaagggatatattacaaggaattggctcatatgattatggagactggcaagtccaaatctgcaggcagatttgcaagcccaccaggcagagaggcaagagaagacccaatgatgtaaatgaagtctaaaggttgtcttctggagaattccctcttacaagggtctttagctggtctttacattctagtctggtcttcaactgattggacaagacccacccacattatggagggcamcctattttactctaccaattaaaatgtt

SEQ ID NO: 590945 - DNA, 546 bp, Homo sapiens
ctcttttttttttgagacggagtcttgcttwgtcgccagaatggagcgcaggggcgcgattccggctcactgcaacctccgcctcccaggttcaacggattcccctgcctcagccgagcagctggaactacaggcatgcaccatcacgcccggctgatgttttgtattttagtagagtcggggtttctccgtgtttgccaggatggtctctatctcctgaccttctgacctgccctccttggcctcccaaagtgctaggattacagacgtgagccaccgcgcctggcccactttcagaaaaaagagtcacactgagtcttttagatgtgtctgattgggttgatgtaaagctggtggtttcctatctttctttttctgtctccaagtttcagtttttgtgtttgggtcacaaaccaaaatcaagtgtgactcctttctctgagttgctccttagtttgtgagcaaagagatagaaactttagggtacaaagaaattaaagtgttgactgccatttttgcatccatttaaaccatgctaaacagcag

SEQ ID NO: 590946 - DNA, 546 bp, Homo sapiens
ctcttttttttttgagacggagtcttgctttgtcgccagaatggagcgcaggggcgcgattccggctcactgcaacctccgcctcccaggttcaacggattcccctgcctcagccgagcagctggaactacaggcatgcaccatcacgcccggctgatgttttgtattttagtagagtcggggtttcwccgtgtttgccaggatggtctctatctcctgaccttctgacctgccctccttggcctcccaaagtgctaggattacagacgtgagccaccgcgcctggcccactttcagaaaaaagagtcacactgagtcttttagatgtgtctgattgggttgatgtaaagctggtggtttcctatctttctttttctgtctccaagtttcagtttttgtgtttgggtcacaaaccaaaatcaagtgtgactcctttctctgagttgctccttagtttgtgagcaaagagatagaaactttagggtacaaagaaattaaagtgttgactgccatttttgcatccatttaaaccatgctaaacagcag

SEQ ID NO: 590947 - DNA, 546 bp, Homo sapiens
ctcttttttttttgagacggagtcttgctttgtcgccagaatggagcgcaggggcgcgattccggctcactgcaacctccgcctcccaggttcaacggattcccctgcctcagccgagcagctggaactacaggcatgcaccatcacgcccggctgatgttttgtattttagtagagtcggggtttctccrtgtttgccaggatggtctctatctcctgaccttctgacctgccctccttggcctcccaaagtgctaggattacagacgtgagccaccgcgcctggcccactttcagaaaaaagagtcacactgagtcttttagatgtgtctgattgggttgatgtaaagctggtggtttcctatctttctttttctgtctccaagtttcagtttttgtgtttgggtcacaaaccaaaatcaagtgtgactcctttctctgagttgctccttagtttgtgagcaaagagatagaaactttagggtacaaagaaattaaagtgttgactgccatttttgcatccatttaaaccatgctaaacagcag

SEQ ID NO: 590948 - DNA, 509 bp, Homo sapiens
gttggacgttctattgtttccaaatttcctattacataaaaatgttgtaatatctttttcagacataactcgtcccttytttttttttttttttttgatggagtttcgctcttgttgcccaggctggagtgcaatggtgcgatctcggctcaccaaaacctagtctcccaggttcaaagattctcctgcttcggcctcctgagtaagctggggtacagggcatgggccaccaaatcgggttacctttgaatttttagtagaaacggggtttctcaagttgggcaaggctggtctcgactccggacctcaggggatcggcccgctcatcctctgaaagtgctggggattacaggcgggagcaccgcgcccggcccacctctcttcttttgaaggacttttcctttggataaatacccagaagtgtaattattggtccaaaagtttattagttatctccatttggatttgtctagaagcaaaccctgagatggagatttgagtccatttga

SEQ ID NO: 590949 - DNA, 241 bp, Homo sapiens
taggaaaatatttcttataataggarccactaacagcatttcagatatggttcttgccctcaaggagaccatagctagcctagaaaagactactcccaaggaggaattagccacactaaaatcacatagtgaagcattgaagtctattgagaattccaacgagagaatgctggaagacaacatttcattaaatacgcataggaatgtgttggtctactagtctcctagagctgccacaaca

SEQ ID NO: 590950 - DNA, 563 bp, Homo sapiens
ttcagaaatagaaagaaatttgaagtttttaatttttttaaattaatagactttacagttttasatttacagaaaattgagcagatagtacagagttcccatataccctccttccccatgcagttctccctactgttcacattttatatcagtgtggtgtatttgttacaattaaccactattggtgcattctgaactacaatccataggttgcattttcactcttgtctcatatagtttttctttaacttttcattttgaaataattacagacttacccaaagtcgcagtagtagtacaaagtttctatataccccttaatcaatttcacttaatgttaacatcacatcagaataatactattaactaaactgaatactgtaatagaatttcaccaattattgcactaatgttcctctttctgttccagggtccagtccaggatttaacattttatttggctgtaacatctccttggtttcatcataatcaacaatttgatgtatatgtgttctttaaaaaaaatttttaaaagactttggtgagataactcacataccata

SEQ ID NO: 590951 - DNA, 563 bp, Homo sapiens
ttcagaaatagaaagaaatttgaagtttttaatttttttaaattaatagactttacagttttagatttacagaaaattgagcagatagtacagagttcccatataccctccttccccatgcagttctccctactgttcacattttatatcagtgtggtgtatttgttacaattaaccactattggtgcattctgaactacaatccataggttgcattttcactcttgtctcatatagtttttctttaacttttyattttgaaataattacagacttacccaaagtcgcagtagtagtacaaagtttctatataccccttaatcaatttcacttaatgttaacatcacatcagaataatactattaactaaactgaatactgtaatagaatttcaccaattattgcactaatgttcctctttctgttccagggtccagtccaggatttaacattttatttggctgtaacatctccttggtttcatcataatcaacaatttgatgtatatgtgttctttaaaaaaaatttttaaaagactttggtgagataactcacataccata

SEQ ID NO: 590952 - DNA, 563 bp, Homo sapiens
ttcagaaatagaaagaaatttgaagtttttaatttttttaaattaatagactttacagttttagatttacagaaaattgagcagatagtacagagttcccatataccctccttccccatgcagttctccctactgttcacattttatatcagtgtggtgtatttgttacaattaaccactattggtgcattctgaactacaatccataggttgcattttcactcttgtctcatatagtttttctttaacttttcattttgaaataattacagacttacccaaagtcgcagtagtagtacaaagtttctatataccccttaatcaatttcacttaatgttaacatcacatcagaataatactattaactaaactgaatactgtaatagaatttcaccaattattgcactaatgttcctctttctgttccagggtccartccaggatttaacattttatttggctgtaacatctccttggtttcatcataatcaacaatttgatgtatatgtgttctttaaaaaaaatttttaaaagactttggtgagataactcacataccata

SEQ ID NO: 590953 - DNA, 563 bp, Homo sapiens
ttcagaaatagaaagaaatttgaagtttttaatttttttaaattaatagactttacagttttagatttacagaaaattgagcagatagtacagagttcccatataccctccttccccatgcagttctccctactgttcacattttatatcagtgtggtgtatttgttacaattaaccactattggtgcattctgaactacaatccataggttgcattttcactcttgtctcatatagtttttctttaacttttcattttgaaataattacagacttacccaaagtcgcagtagtagtacaaagtttctatataccccttaatcaatttcacttaatgttaacatcacatcagaataatactattaactaaactgaatactgtaatagaatttcaccaattattgcactaatgttcctctttctgttccagggtccagtccaggatttaacattttatttggcygtaacatctccttggtttcatcataatcaacaatttgatgtatatgtgttctttaaaaaaaatttttaaaagactttggtgagataactcacataccata

SEQ ID NO: 590954 - DNA, 650 bp, Homo sapiens
cacccacacgatctgcagctccccaggcctttgatgagcaggaagcaggtgctgcagagggcaggggtacagcagggattgtgtgtgacagcaggatagctgaaaatcttgacaattgtaacaggatgctactgtttctctttggggctctgtggtgaaccatatttacatggccataataatgatttactcttgtttcaaccccaaatcttgatattaatatattttgttgataaaggaggaaaattgtaaaagggtagtgataaaagagacagagagctaagtctccatcaaggcaagaagtgaacagtcacttctgaagttgacaaatcaaggaatagtgggattcyatgggtaactggttccaggacccctcccacccatggctaccaaaattcacagatgttcaagtctcttatacaaaatggtgtggcatttgcatataactcacacacattctctgtatactttaatcatctctagattagttaaaatgtctaatacaatgcctacacacagctttgtctgcatggattcaatgtagtacttgacgcacagcaaattcaagttttgctttatggaattttttggaattttattttctgattatttttgatctatgtgtcgttgaacacacggctatggaaccc

SEQ ID NO: 590955 - DNA, 443 bp, Homo sapiens
ctggcctttgtatgtagtgaagcttgtgccctccaactgctctctggtgctgcctccctagtcctgtacgtaggacgtggctgtctcagcatgggggagggaagcacaggcatagcagccacagagatggcttgggcagaggtgaggaggtgarctcgtcccatctggtgcaagggccgtgcctagagccagacgaagtgagggtgatcctgagtttccacttaagtttccactgagacaaaggactgtgagtctaggtcaatggatgtatcatactttccacaaataacactgaagagcttgaaaggctgcctctcaagataggcttccatgatcattcgggagagctgattccagaacactcctgcagagatgttcagtggggcatcagtgatcattaataaagaaaatctctgtctctctgtaacatacacacaccttct

SEQ ID NO: 590956 - DNA, 220 bp, Homo sapiens
aaacccctgccccaatgggaagcctgctaaatcaaagtaacccagaaggaagagtctctggggtataaaccatttaggatatttctaggggagtaggagastaggatgtgatggttggttgagagttcgctgtctgcatcatggacctgtcagtaaaaagggctattataaagtttcagtcaaaccaaaccaaacaagatggcacaaaacaaaacccata

SEQ ID NO: 590957 - DNA, 588 bp, Homo sapiens
taaactataaactgaattcttcccaaagttagtgtggtcyacacccaggaaggatcaaggatagtgtggaggtcagaagcaagatggagtcaactatgtcagatttctcttactgtcataattttgcaaaggtggttttagaactgaaattaaaattgatacctggaggtaaagtgtttctattaaaaaaaaaacctaaaatatatgtaattggctttaggactagtagctagcatagggcagaaagccctcaaaaattataaatggaggctggacagactgtaaggacattgttattgaagactgaagaaaagattacccatgttatgtagtcgtaaaacatttggcaacatttttgcttgcaatagtatggaagatggcttgtagatataactaagaacattttcagatggcattttttgaaagtgccaagtgttgttttttaattgtgtgtgataagaaaaaaaatagatgaactgaagaaaaagttgttctgttttcaagtagcatatagaggaaacatttccaatcccagaatcactggtttggaaaataaatttttttgtcattctcaaactcccaggtcac

SEQ ID NO: 590958 - DNA, 588 bp, Homo sapiens
taaactataaactgaattcttcccaaagttagtgtggtctacacccaggaaggatcaaggatagtgtggaggtcagaagcaagatggagtcaactatgtcagrtttctcttactgtcataattttgcaaaggtggttttagaactgaaattaaaattgatacctggaggtaaagtgtttctattaaaaaaaaaacctaaaatatatgtaattggctttaggactagtagctagcatagggcagaaagccctcaaaaattataaatggaggctggacagactgtaaggacattgttattgaagactgaagaaaagattacccatgttatgtagtcgtaaaacatttggcaacatttttgcttgcaatagtatggaagatggcttgtagatataactaagaacattttcagatggcattttttgaaagtgccaagtgttgttttttaattgtgtgtgataagaaaaaaaatagatgaactgaagaaaaagttgttctgttttcaagtagcatatagaggaaacatttccaatcccagaatcactggtttggaaaataaatttttttgtcattctcaaactcccaggtcac

SEQ ID NO: 590959 - DNA, 588 bp, Homo sapiens
taaactataaactgaattcttcccaaagttagtgtggtctacacccaggaaggatcaaggatagtgtggaggtcagaagcaagatggagtcaactatgtcagatttctcttactgtcataattttgcaaaggtggttttagaactgaaattaaaattgayacctggaggtaaagtgtttctattaaaaaaaaaacctaaaatatatgtaattggctttaggactagtagctagcatagggcagaaagccctcaaaaattataaatggaggctggacagactgtaaggacattgttattgaagactgaagaaaagattacccatgttatgtagtcgtaaaacatttggcaacatttttgcttgcaatagtatggaagatggcttgtagatataactaagaacattttcagatggcattttttgaaagtgccaagtgttgttttttaattgtgtgtgataagaaaaaaaatagatgaactgaagaaaaagttgttctgttttcaagtagcatatagaggaaacatttccaatcccagaatcactggtttggaaaataaatttttttgtcattctcaaactcccaggtcac

SEQ ID NO: 590960 - DNA, 588 bp, Homo sapiens
taaactataaactgaattcttcccaaagttagtgtggtctacacccaggaaggatcaaggatagtgtggaggtcagaagcaagatggagtcaactatgtcagatttctcttactgtcataattttgcaaaggtggttttagaactgaaattaaaattgatacctggaggtaaagtgtttctattaaaaaaaaaacctaaaatatatgtaattggctttaggactagtagctagcatagggcagaaagccctcaaaaattataaatggaggctggacagactgtaaggacattgttattgaagactgaagaaaagattacccatgttatgtagtcgtaaaacatttggcaacatttttgcttgcaatagtatggaagatggcttgtagatataactaagaacattttcagatggcattttttgaaagtgccaagtgttgttttttaattgtgtgtgataagaaaaaaaatagatgaactgaagaaaaagttgttctgttttcaagtagcatatagaggaaacatttccaatcccagaatcactggtttggaaartaaatttttttgtcattctcaaactcccaggtcac

SEQ ID NO: 590961 - DNA, 619 bp, Homo sapiens
aggataatagcataggatcaacaggagcaaacaaaataactgttttttttgcaggaactactggaagagaaagccaccagcttcatttgatccagatttaatgccccaggaagaagcatccacttaacagaggctttgtcatataccatataccataccactttggctggcaaggaagtgcttaaaacgtagttgattctcaaccattgaatgaatgagtgaatgaatttgttgagtttctaattataaaatatcttttgttcgaggcacttctatatgtcaagaccatatgctgaattttattttattttctgacaccttcaaagggctaatgagtcatagattatttttttctgtctgcaattcagtgagtcattataactaactmcattttatttcagcccttgtttattcccctccaaaaggggaagctggatgatattatgagggggcaggctgggcacagtggttcacacctgtaatcccagcactttggaaggccgaggcttgagcccaggagttcaagagcaccttaggcaacatggggaaactctgtctctgcaaaacaataaaaaataaaaaaattcgccaggcatggtggcatgcacctgtagtccca

SEQ ID NO: 590962 - DNA, 367 bp, Homo sapiens
ggtaggatggtttgtaagcctctggaccacattgtggggggtgggtaatcactctgtggttctctccaagtacaggttaaatacatttacatgcttttcctccaaayaatctgccctttgcaactgatttttcaatgaaccttcagagggcgaagggcaagtttcccttggcctctacaggtgcatatttttaacccaactttttaaatttagtattaaaaagctggctaattgtggaagacaatgtggcagttcctcgaagatctaaagacagaaattccatttgacccagcaatcccattactgagtatatacccaaagggacatgaattattctattataaagacacatgcatgtgtatgttca

SEQ ID NO: 590963 - DNA, 434 bp, Homo sapiens
aacctttcaggaagtagtaacagatcattagtcgcatggagaaggtagtccattctaagccatttcatataaacttattgggcatctcctctgtgccaggcaccattagagtyactgaggatgagatgttaaaatccaggcatgcctttgccctacgtagcatatagactcaattttgatccacatgaactagatgtttttccaattagtacagaaaagttgacacacatttaaaggagtggaagttattagtttataattttgcttaagattattgcaaaaaactactgatatcatttctattttcattcaggcagtcactgaacagatattgattgaatgcctgctgtgtgccaggtactatgctaggccaaaccagcctaatattggcaagtctgcatggccctttgtgtgctaccattgcccaggtaaat

SEQ ID NO: 590964 - DNA, 542 bp, Homo sapiens
aggcacagaacctgctcaggagggcatagtgattaagagcagggcttggtgtcaggatgacctgagtgtgagtgttggtactggcatttactctatatgccttttggtcaattacttaacgtctctcagtatcacctaacttgtgtaaaatgatggagctaagaaacagtattcgcctcttagtgtaattgttaggattaaatgagacatatgcaatgcatttagcacagtgcctggtataaaatgagcttcataaaattctaacttcattcagtgttttgattaagcccagtttctgaaatggaagggctgagccctcccctggaaccccaccagaaggagctcagcagccagccatgcaccttttccctggcaacaatccctgcatcatcagccactcttcaaactttggtggcctcattgaaaatcagtttttgccaaactttattractttctttttttgacaggtattagtatgaggttgacagaccaggagaatgtcatagatatagtgtctttgattccaataaagcacttgatg

SEQ ID NO: 590965 - DNA, 445 bp, Homo sapiens
cctcgagataatctggggcttgatgggtttccccaaaatagtgggcagccctggagtgttcacttctgttgaatcagccctttgatcttcttctttcattgcacatgttcctattactccttagtagtaaaaggaaacataaggatgttcactgaatgtgtttttctctaaatttagaattattagcaaaaagtctcagaattttgtttacctctctagggttgaacacagggttaagaaccaagsaacactgtgtctctttagcctgttccagaatcttctctttccttggctgccagttttgaagtttattatagttgttaatgttcctttccttgagtggttactgttggaacttctttttttcattttactaatgtttactctttttttctcctttggttagatattgaggaagggaagttctgtgaagcagtttaaattt

SEQ ID NO: 590966 - DNA, 599 bp, Homo sapiens
gagttcattccttttggtggctgtgttgtattccatggtgtatctgtaccacattagttttatctagtctacgattgacaggcatctaggttgattccatgtctttgctattgtgaatagtrctgtgatgaacatacgcatacgtgtctttatggtagaacaatttatattcctttgggtatgtacccaataatggactgctgggtcaaatggtagttctgttttaagttctttgagaaatctccaaactgctttccacggtgaactaatttacattcccaccagcagtgtataagtgttccctttgctccacaacttcaccagcttctgttatttttttgactttttaattatagccattctgactggtgtgagatggtatcccattgtggttttgatttgcatttctctaatgcttaatgattttaagcattttttcatatgctttttggccatgtgtatgtcttcttttgaaaagtgtctatgtcctttgcctactttttaatggggttgttagttttatgcttgttaattaatttaaattccttacagattttggatattagatctttgtcagatgtacagtttgaaaatatttt

SEQ ID NO: 590967 - DNA, 596 bp, Homo sapiens
attccattacccaggctcgagtgcagtgacgtgatctcacactgcaacctccacctcccgggttcaagcaattctcctgcctcagcctccctcgtagctgggattacaggcgtgtaccaccacccctggctaatttttgtatttttagtagagatgaggtttcaccatgttgaccaggctggtctcaaacttctgacctcaaatgatccacccacctcggcctcctaaagtgctgggattacaagcaggagacactgcgcctgaccttttcatgcatttttaaattatgtagatttttatctagactttatgcttctttggggcgggcaaatgtttcataatgctttgtctgtyacatttccctccctaccatagagccttacactaatagagatttaataggcatttttttttttaattaactgattgtcttcagtcactttggggcagaataagatatttaggatttggaaaatagagagatggtgtaaaccatatttcactttctcagagaattataccctacattttaaaactttttattttaaaatacttacagactcacaagaagttgcacacagaaaaatacgtgcaga

SEQ ID NO: 590968 - DNA, 534 bp, Homo sapiens
caaaaaccatattttcatactttctagcatgcttttagtctaaggactggctagatagactcctaccccagcctctgtatgtatatgtctgtgtgtgcagtaacttcagtattagagacttgatggcttattgacaatagcaaccttttactctgagtggttccagctaaattatgtcatttcctatttatttctgattaaaacttctttgaaatttcatttttccctaatgggtccctttctataacaaaatgtatagatcctatttagacatctttatccactctgaagatacagtttgagatgagaaraaatcaggacattgctataaccagttttagtatataacttagtgttcaaactgtgacatttctggagtaaaaggggagtgttattaataattacttcggtacaacaagcacaagccagaattgtcctaggtaaaatgagatatatagtcaccttatctataaacagctacaaataggattgatcactcatccatgcttctagatttggaataagaaaggagaa

SEQ ID NO: 590969 - DNA, 539 bp, Homo sapiens
ccaatattatgaaggtattctcctatataaccatctggaagctttattatgcgtttcacatttagatgtacaagccacatgcaactgatgtgtgtgtgtggtctaaggaaatgtcaaattttacatttttwccatgcagctctccacttgttgaaaagacttggccttttccctactgctctgtagtgccttccttgccataaataatacattcatatatctagatctgtttctggactgtctattcagttccattaatgtgtatgtgtgtaattaatcttgatttctgatagtgtttcatcttgttctttaattttttatttatctcaactggtttttgggggaactggtggtgtttggttacatgaataagttctttagtggtgatttctgagattttggtgcacccatcaccagagcagtgtacactgtacctaatgtgtagtctcttatccctctccaccccccacactttctcccaagtccccaaagtccaacgtaccattcttatgcctttatgacctcatagcatagctccc

SEQ ID NO: 590970 - DNA, 600 bp, Homo sapiens
ataaattgtgctttttggtcttcttattactgatatgtagatgtgctttatatattatcaaaataaaatttgtcatgtaattatattgcaaatcttttctctcattgtgatttaattttgattgttattttgatgagcagatgtttttaattatttagaaatatatgtattttaaatgcatatgtcttacacgttttctatgaaatttattactagcttttaaaaaataattgataacatcctaaatgatattttaaaataattaccaatatttcccacttttggctacaatatacattcaatttttctgatacctgtatttaccttatgtcttgtgagaattctggaaaaatttccagaagttaaaatcttcagtgaataaaaataagtaacaataaatttggtagaaggtaagaagttctatatttacagggattatttartcaagtgtttaattacatcatatggcattcactatactgttgtcagcactttcttaatggtagtaaaattcctgtgctttcatttttttttttgacggggtggggggttctagtttaaattcaactccattgcaaaacacttccagttcctagtact

SEQ ID NO: 590971 - DNA, 560 bp, Homo sapiens
atttatttttatctccgtgcctctgcctagaacatttctcttcccaatgttcaaggtttgatgtatttactacattttattcaaataccatcttgcatatcaatatttctgtttatatcaaatattatgtaatatgatattacttctttgtttgttcattttttcaatggtttccttcttaactgagtgcagattatatggtctgtcctggttactgctgcatccccagtgtgcagaagagtgctagagatattcttggcatttaatatataacacttgagtgaaaaaactgttctgtgattcatgtatgttcgtaacataaaattagatatactgactggttattttttttttcctgcctctgcaaatattttaccctacactgtgtctcaggatgctgtttaaaataggttcccatgccctttcagttccrttatggttgagaaaatggaaagtacttttagaagatcagctaattgggagagaatgatgatggaggttttttttttttatttttataaaaatgtgttttattgttttaaaacaagtctataaaagta

SEQ ID NO: 590972 - DNA, 510 bp, Homo sapiens
ccatctcaaacaaaaaaacaatgatattatgtcctttgcagggacatggatggagctggaagccattatcctcagcaaactaataaactaatgtaggaacagtaaacaaacacctcatgctgtcactcataagtgggagctgaaatgagagacatggacacagaacaacacacactggtctgttagtgggggtaggaggagggagagcattaggaaaaatagctaatgtatgctgggcttaaatcctaggtgatgggttsataggtgcagcaaaccaccatggcacctgtttacctgtgtaacaaacctgcacatcctgcacatgtatcctggaacttaaaataaaataatatttacttaatgcatcattattcttgacactaacttattctttgtgccacctgtgaatactgaactccaaatactctcttaactgtttttactatactttatggtaatgacaacaaaagcaaatttacccagcatatgcaatataatgtgaaaaataat

SEQ ID NO: 590973 - DNA, 510 bp, Homo sapiens
ccatctcaaacaaaaaaacaatgatattatgtcctttgcagggacatggatggagctggaagccattatcctcagcaaactaataaactaatgtaggaacagtaaacaaacacctcatgctgtcactcataagtgggagctgaaatgagagacatggacacagaacaacacacactggtctgttagtgggggtaggaggagggagagcattaggaaaaatagctaatgtatgctgggcttaaatcctaggtgatgggttgataggtgcagcaaaccaccatggcacctgtttacctgtgtaacaaacctgcacatcctgmacatgtatcctggaacttaaaataaaataatatttacttaatgcatcattattcttgacactaacttattctttgtgccacctgtgaatactgaactccaaatactctcttaactgtttttactatactttatggtaatgacaacaaaagcaaatttacccagcatatgcaatataatgtgaaaaataat

SEQ ID NO: 590974 - DNA, 621 bp, Homo sapiens
atgttttcatttaatcatataggaccatttcaattgccaataatacatccgatgtaacaataataaagttatgtaatatataaatacagtagcatccgtcacttctaaaactaaataatggactagggaagtcactttagaatgatagmgtaagaccctctgcaaagttgcttgtccataaagacaatgagaacactagcaaaaattgtcaaaatcaaattttttcatgaatctggaaattaatcaaaggcttgcaaaaatcagtgatcactcattcaagacaaagagtaaatctcactatgtcattttaacttgctttactgcaatcctacttttcccagctctgtatgtagcagcattgaaaaccgtcagcctagcaactacagtggctgtgtaaaccaacagtttaaaagccattggaggggacagaatgggtataaagttcttcaaaaagtgtttcaggtaatgaatatggtaattatcctgatttgatcattacacaatgtatatatgtattgaaacaccacactgtacaccattagtatttacaattaacatgtgtcaattaaaaacaaaacttaaaaaaaatgtatcttttctagagaattgtcattaactgac

SEQ ID NO: 590975 - DNA, 621 bp, Homo sapiens
atgttttcatttaatcatataggaccatttcaattgccaataatacatccgatgtaacaataataaagttatgtaatatataaatacagtagcatccgtcacttctaaaactaaataatggactagggaagtcactttagaatgatagcgtaagrccctctgcaaagttgcttgtccataaagacaatgagaacactagcaaaaattgtcaaaatcaaattttttcatgaatctggaaattaatcaaaggcttgcaaaaatcagtgatcactcattcaagacaaagagtaaatctcactatgtcattttaacttgctttactgcaatcctacttttcccagctctgtatgtagcagcattgaaaaccgtcagcctagcaactacagtggctgtgtaaaccaacagtttaaaagccattggaggggacagaatgggtataaagttcttcaaaaagtgtttcaggtaatgaatatggtaattatcctgatttgatcattacacaatgtatatatgtattgaaacaccacactgtacaccattagtatttacaattaacatgtgtcaattaaaaacaaaacttaaaaaaaatgtatcttttctagagaattgtcattaactgac

SEQ ID NO: 590976 - DNA, 623 bp, Homo sapiens
accaaatggtcttatttatcatttagtgctaaatgaatgcatccaccttttatacttaggcttagagtgtcctgggtttcaacagtgctcattggtcctgcctttcattcttcttccttccttccttcttaccttccttccctcctctctctttctcttatcttgtcttcttttctacagttcattgttttattgtacatagtctacatggtttcataatttagtttagctattgatagttttagtaagtttaattctaaatatctgctcctttttattttcattttttaacagacagagtctcactctgtcgcacaagctggagtgcagtagtgcaagtatagctcaccgcagcctcaaattcgtaggctgaagagatcatcacacctcagcctcctaagtagcttggactccaagtgtacaccacccaacctggttattttttaaaatttctatacagactgggtctcagtatgttgcccaggctggtctggaactcctggcttcaagtgatcctcccacctcagcctctcaaatgctgrgattacaggtgggatccactgcacctgtcctctgctctctccttctttttaactcttatgtatggttctttagcgaatagc

SEQ ID NO: 590977 - DNA, 441 bp, Homo sapiens
aaagtaagtcttcctccctcctctgctctcagcttcccaattctcctcctcctcggaggtaaacactcttattagtttcttctctatccttccagaaatcaaatattctcttctaggaattttttaaaaagcattgtttatcaagatgtggtctacagaccccctcagtcrgaatcgcccacatcacaaacattcaagttggagaacactgctttgaagaatttgccgggtatcatcctgtgatgggaaggatatttccagatggccttatttcctcacatgatctcggctcgccgcaacctctgcctcccaggttccagcgattctcctgcctcaccctccagactagctgggattataggcacgtgccaccacgcctggctaatttttgtatttttagtagagacggggtttcaccatgttggtcaggctggtcttgag

SEQ ID NO: 590978 - DNA, 573 bp, Homo sapiens
aggtgagtggaggagtcttttgtgtgtgtgtgtgtgtgtctgtgtgtgtgtgtgtgtgtgtgtgtgtgtgtatgtgtgaaacagtcttgccctattgcccaggctggagtgcagaggtgtgatcttggctcactgcaatctctgcctcctgagttcaagagattctccttcctcagcctcctgagtagctgggactacaggcatgcaccaccatgcctggctaatttttttttgtatttttagtagagacagggtttctccatgtcggccaggctggtctcaaattcctggsttcaagtgatccatccacctcggcttcccaaagtgctgggaatacgggtgtgagccactgtgcccagcctagaggagtgttttgaagacagggaaaatagcaggtgagaacttgaataagcttcacgcctcactgagatcctagggcaatctgtttagaaccttccccacgattgaggacccaactccacacacctattgcttaatcctcatccttgagcaagtgacaccacttgctttttccttgagattatgacaagcctggatattttgttctcactt

SEQ ID NO: 590979 - DNA, 573 bp, Homo sapiens
aggtgagtggaggagtcttttgtgtgtgtgtgtgtgtgtctgtgtgtgtgtgtgtgtgtgtgtgtgtgtgtatgtgtgaaacagtcttgccctattgcccaggctggagtgcagaggtgtgatcttggctcactgcaatctctgcctcctgagttcaagagattctccttcctcagcctcctgagtagctgggactacaggcatgcaccaccatgcctggctaatttttttttgtatttttagtagagacagggtttctccatgtcggccaggctggtctcaaattcctgggytcaagtgatccatccacctcggcttcccaaagtgctgggaatacgggtgtgagccactgtgcccagcctagaggagtgttttgaagacagggaaaatagcaggtgagaacttgaataagcttcacgcctcactgagatcctagggcaatctgtttagaaccttccccacgattgaggacccaactccacacacctattgcttaatcctcatccttgagcaagtgacaccacttgctttttccttgagattatgacaagcctggatattttgttctcactt

SEQ ID NO: 590980 - DNA, 573 bp, Homo sapiens
aggtgagtggaggagtcttttgtgtgtgtgtgtgtgtgtctgtgtgtgtgtgtgtgtgtgtgtgtgtgtgtatgtgtgaaacagtcttgccctattgcccaggctggagtgcagaggtgtgatcttggctcactgcaatctctgcctcctgagttcaagagattctccttcctcagcctcctgagtagctgggactacaggcatgcaccaccatgcctggctaatttttttttgtatttttagtagagacagggtttctccatgtcggccaggctggtctcaaattcctgggttcaagtgatccatccacctcggcttcccaaagtgctgggaatacgggtgtgagccactgtgcccagcctagaggagtgttttgaagacagggaaaatagcaggtgagaacttgaataagcttcacgcctcactgagatcctagggcaatctgtttagaaccttccccaygattgaggacccaactccacacacctattgcttaatcctcatccttgagcaagtgacaccacttgctttttccttgagattatgacaagcctggatattttgttctcactt

SEQ ID NO: 590981 - DNA, 639 bp, Homo sapiens
tttaggttttttgaactgcacctaagagctctgaaacttgtttttcatttttagtgctctgcccagcagaggtaaggaatactctttgttttcatagcataccaaaatcatgagccacaccaatggcatacctgctgtcagtataaacatttgcagtttttycttcaactaagaaacaaacacgagttgaagttgctaattctgccttctgggctgatgaaacattaggtaatcatccatcctcgataacatccttgatcacgtacttgaaactactgtataacctgcagaaaatttcctatctttacttctcaagtaggatccatctgtgaaccaaataaaatctggattgtacaaggttctttcctgtaactcagctcttgggagaaggagttgagcagttaagtgtcaaacagttatggtgagatgcgttgaatggaaggggcaaaagcgtagcagagttcaactattgcattgagtaatagttacgttaggagatgaaagtaaaaggatctcataagaagccagtggactcattgattaacattgggtgtgatatgaatttaagagtgcttcaatggaatgaatggagcatatatagttatgggggacccattgttatttcttctatagacctaa

SEQ ID NO: 590982 - DNA, 567 bp, Homo sapiens
gaactctcaaggcattcccatgtgtttaatgcacaaataaagagaaaggcattttgtaatttgggtgtcctaaagctggagttccattagggcttgtttagtttgatttatggctttctggcttttttctgtccatattaatagctctggctggtcaatttttagtaattcacaaagaggttrggtcattggagaaaaatcaggattacagttttgacgatatcctgccaatcagaggaagcctcatagctatttcttagtgtttggttttagaaaggcaattatgcctttaactctatcagagttgatggaaaacccctccttagatattgaatgacccaaacatttaacttgttcttggcataactggagtttttctttagagagtttgtgacatttgcctgtgagttgccttagaagatgcaggcacccccatatgagtgagcatatgtgatatttgtctttctgtgcctggcttaaataagctacttaatataatgtcctccagttccatctgcattgttgcaaatgataggatttcaatcttttttatggctgaataatatt

SEQ ID NO: 590983 - DNA, 567 bp, Homo sapiens
gaactctcaaggcattcccatgtgtttaatgcacaaataaagagaaaggcattttgtaatttgggtgtcctaaagctggagttccattagggcttgtttagtttgatttatggctttctggcttttttctgtccatattaatagctctggctggtcaatttttagtaattcacaaagaggttaggtcattggagaaaaatcaggattacagttttgaygatatcctgccaatcagaggaagcctcatagctatttcttagtgtttggttttagaaaggcaattatgcctttaactctatcagagttgatggaaaacccctccttagatattgaatgacccaaacatttaacttgttcttggcataactggagtttttctttagagagtttgtgacatttgcctgtgagttgccttagaagatgcaggcacccccatatgagtgagcatatgtgatatttgtctttctgtgcctggcttaaataagctacttaatataatgtcctccagttccatctgcattgttgcaaatgataggatttcaatcttttttatggctgaataatatt

SEQ ID NO: 590984 - DNA, 567 bp, Homo sapiens
gaactctcaaggcattcccatgtgtttaatgcacaaataaagagaaaggcattttgtaatttgggtgtcctaaagctggagttccattagggcttgtttagtttgatttatggctttctggcttttttctgtccatattaatagctctggctggtcaatttttagtaattcacaaagaggttaggtcattggagaaaaatcaggattacagttttgacgatatcctgccaatcagaggaagcctcatagctatttcttagygtttggttttagaaaggcaattatgcctttaactctatcagagttgatggaaaacccctccttagatattgaatgacccaaacatttaacttgttcttggcataactggagtttttctttagagagtttgtgacatttgcctgtgagttgccttagaagatgcaggcacccccatatgagtgagcatatgtgatatttgtctttctgtgcctggcttaaataagctacttaatataatgtcctccagttccatctgcattgttgcaaatgataggatttcaatcttttttatggctgaataatatt

SEQ ID NO: 590985 - DNA, 582 bp, Homo sapiens
gtagaggtggtcaccaactcactaataactgattaacttcatatcctgactcctggtggctgccartaagattaatgaaccttttttttcattcaaagaacaataatccttatatcatgcagacctccttgatgttgtccagaagtttgatcagccaagggaggtaagcagctttgatcattgaggtctcacctcctacatacctactgtattcataaatgttcaaaggcagtaatgttcaaaggcaggtcagattaaatattttgcctgtcctgtcttgaggatttggccaaattgtataaacctttctctgctcctaagcactaatgtgtcagtatttggcttaggatgcatgcagtacttgaaacttgcttttggtgttctacggcaacagtgcttcctcaggaaacttcagcgttttattcctcaaaatctctcttcctacaaggattgaaagagaaagtgtcagtttattattatattttcttattccatgctcctctgaagagtcttcccaacgtcctatctcttagccttgaagagcttgcaatctcattggagataaattacagaaaataagca

SEQ ID NO: 590986 - DNA, 437 bp, Homo sapiens
atatatatgtgatatgtttatctccatggaaaatgacaccttaaagactatttatttagcactttgcattggagcttacaataatacatatgcaaaacaaagaaattgattaarctatagtaaatggttaaatgcattagtaatttgacttaatttgttttataatatatattaaataatagtttaggatttaaggtatagaaatattattaaaacttaaaaaactaaaattagtaaaacttctttttacaatttgaccctcaaacctcgatactgtatttaaacataacttattttttattttctctcttcattttattttactgaatctctagaaaaccaacattgcattttttttctagagaatagtctatatttgtgtttgtcagacaaaaacacggttaagcatgattactgccattctatatttctagagt

SEQ ID NO: 590987 - DNA, 590 bp, Homo sapiens
ttgtaagtctcacaaaagtacttgattcctatatgttcagtgaattccacagcctcaaagacagaaaacatgattgttgcatcttctaataatctttaatctcttcaaaatggaatgctgaaaaaacattaacataaattaaattatcctgccatcaatttagtggatttcacatttaccattatcaatatcaagaaagtgtttctaacgtgatcaagaaaagcttttatcttgtgatatgtaggttatttttgtaaaagcatttattaatatattatgtatctttgacatcattttggcttccatctttataattgacatggtagattttcaagaactttttttgaggtaaagaaataaagcataatttaaaattctgttttcacttttattttttaaaaaacaatgagaatctgatggatatacttttaagttttgaggaaatacatttgtttatattatgaaatcctatgagttttattttcaaaataacagtcactaaagaaacatacgattttcttaatatatttcagcactttacccacaaaaagataaaaaacccrtaagtatgtatggtctcatccaggaaa

SEQ ID NO: 590988 - DNA, 380 bp, Homo sapiens
acttttcccttttttaatggcagtgtctatccagtatctatactccaatagtatcttagaagtaaataacttgttataattttacacaatcatagatgaatggaactcatcaccagatgagactttgaacttgggacttctgagttrattctggaatcagttgagactttagggaactttggaaaggcatgattgtattttgcaatgtgagaaggacatgagatttttttgggccagaaatagaatgatacagtttgaatgtcttctccaaatctcaggttgagatgtaattcccagtgttggaggtgtggcctggtgggaggttcttgggtgatgggggtggatatgtcacggcttagcactgtccttatgatagaggg

SEQ ID NO: 590989 - DNA, 587 bp, Homo sapiens
tactttcattttctttaatgacatttttgtagaatggtatcagaagtttaaaacagtctaatctcaaacttcttaaatagttgaaagaaaaatctctaggataacaactgaagtagtataatcttttcttataactgttcaggaataaaaggtttatgtttgcttgtgtgtgtgtgtgtgtgtgtgtgtgtgtgtgtgtgtgtgttcataatcagtgattcatactgaatcaataccttttgtggttttattgaaataatatgtttgaagtaatcaagaaaatttttaacctcgattcaaatttcaatacttaaagcttagtaaattatttataacttctgtgcattcaaagggaacaaccaaaagatgaaaagataacctatggaatgggagaattcacaaatcatatatctgataaggggttaatatccagaatatctaagaaacttgtgtttttacaacaacaacaaaaaaaacacctgatttaaaaatgwacaaaagacttgaatagacatttctccaaaaaagatacacaaatgaccaacaagcacaggaaaagatactcagcatcactaatcataagagaa

SEQ ID NO: 590990 - DNA, 625 bp, Homo sapiens
tattatatataggaaaaaaacatagtatgtaaggttcagtactatccaccattccagatatccactgggagtcttgaaatgtattcctcctggatgagggggagctattttacttctgctctttgaaagatgtgtataagaaaatcaaaagataagccacacattggaacaaataatayttgcaaatcacatatgttataaagaacttatatctaaaaatcacaaaataactcaattaaaaaaatagaacagtgtgctgtggctcacacctgtaatcccaacactttgggaggatgaggtgggcagattgcttgagtccaggagtttgagaccagcctgggcaacatggcaaaaccctgtctgtacaaaaaatagaaaaaattagccgggtatggtggcatgcacctgtggccccagctactcaggaggctaaggtgggaggactgcttgagcccaggaaggggaggttgcagtgagccaagatcgtgccaccacactccaacctgggtgacagacagagaccctgtctcaaagaaaaaaaaaaggcaaaagatctgaacagacatttcaacaaagtagatatacagaggacaaataagcacatgagaagatgctcaacagcatt

SEQ ID NO: 590991 - DNA, 625 bp, Homo sapiens
tattatatataggaaaaaaacatagtatgtaaggttcagtactatccaccattccagatatccactgggagtcttgaaatgtattcctcctggatgagggggagctattttacttctgctctttgaaagatgtgtataagaaaatcaaaagataagccacacattggaacaaataatacttgcaaatcacatatgttataaagaacttatatctaaaaatcacaaaataactcaattaaaaaaatagaacagtgtgctgtggctcacacctgtaatcccaacactttgggaggatgaggtgggcagattgcttgagtccaggagtttgagaccagcctgggcaacatggcaaaaccctgtctgtacaaaaaatagaaaaaattagccrggtatggtggcatgcacctgtggccccagctactcaggaggctaaggtgggaggactgcttgagcccaggaaggggaggttgcagtgagccaagatcgtgccaccacactccaacctgggtgacagacagagaccctgtctcaaagaaaaaaaaaaggcaaaagatctgaacagacatttcaacaaagtagatatacagaggacaaataagcacatgagaagatgctcaacagcatt

SEQ ID NO: 590992 - DNA, 509 bp, Homo sapiens
ctggctggcttttctacctactgactgcagagccctgtagccttgagcaaacattggtggtagccaggtagtggttacactaggccttgagcaatacccggtgctgtgttggtttcaggtctgatccagcacagccccagtggtgatgcccatagggttgcttatgtcctatcacccacagctctagagagctcagcaaagatagagagactgcttgtttgggagaaagtaagggaaagtaacaagagcctctgactggtaattgaaataactcttttgcatcttattcaagaccaaaatgtcagtatctctatgagtctgcaaaaaccgcagcattactaggctttaggggtcccccaatgcagatatggcttagacaacaacacccaagtcattctgaatacctgaaaagtcttcctgaggacackaaaaaaaaaaaaaaaaaaaaaaaccgactgggaaaaccacaataaaaaactaacttttcgatgcccaaacactgatgaata

SEQ ID NO: 590993 - DNA, 509 bp, Homo sapiens
ctggctggcttttctacctactgactgcagagccctgtagccttgagcaaacattggtggtagccaggtagtggttacactaggccttgagcaatacccggtgctgtgttggtttcaggtctgatccagcacagccccagtggtgatgcccatagggttgcttatgtcctatcacccacagctctagagagctcagcaaagatagagagactgcttgtttgggagaaagtaagggaaagtaacaagagcctctgactggtaattgaaataactcttttgcatcttattcaagaccaaaatgtcagtatctctatgagtctgcaaaaaccgcagcattactaggctttaggggtcccccaatgcagatatggcttagacaacaacacccaagtcattctgaatacctgaaaagtcttcctgaggacactwaaaaaaaaaaaaaaaaaaaaaaccgactgggaaaaccacaataaaaaactaacttttcgatgcccaaacactgatgaata

SEQ ID NO: 590994 - DNA, 587 bp, Homo sapiens
agttgataagtgacagagacaggattggaattcagatctgcttgccttgggaaataacattcttgatctctattctccactgtcttggctcaatttaactagatcyggtttcctttctgggtatatatattgctatgataatgattcactaacatgctccttccattccattgttttaagtatcaatggtttcaataatactgaatttcaaaggtccagagattggggattttccttgagactaccttaacctactatgagttattcttcataaaaaatgcaaacattaatttcttataagtgtcctaaactttttcatacatgtgttcttttcatagggataatttatcacaaatgtacaagcctgcttcccccttcccttggcaattattgctgacatagagagttctcaaagggaactgcagtccacactgatatcacttcagaattcagaatattaacataaggaatagcagacttggatgaatgtcttgttatatgaattttgagcatacactttacttcatcaaacagtaatactagaaatattttacattaatattttcaagttctttcacatttaaaat

SEQ ID NO: 590995 - DNA, 438 bp, Homo sapiens
actggtgttaattcttccttaagtgtttactagaattcaccagtgaagcccttaggtcctagacttttcttgttcagaagtttttaatgactgattcaatctccttaccggttatttgtctgttcaggttttctacctcttcatggttcactcttggtaggttatatgtttctaggaattcatctctttcttttargttatttaatttattggcacaaaattgctcatagcagtctcttataatcttttgtatttctgtggtatcagttgcaatgtctcctctttcacttataattttatttacttgagtcttttcttagtctagctgaaggtttgtcaattttgttccttttcaaaaaacctacccttagtttaattgaacttttctattatttttcttcagttgagagaatttgtgatttttttccctcttacact

SEQ ID NO: 590996 - DNA, 581 bp, Homo sapiens
caagtcaggacagaactagagaggttaagtgaccagttagacaatttggaggaagaaccaaactaaagctcatggttttcctgtaaattttcagcccagtgggatttctgcttgcactgccactgcccagctgccaccttatcatgcaagtgacctaactctgtcatttatatgctcatgacagtattcgcgtttgaaaatacaagaggtttaggtttggtgtaggttcggcttgggagggtagtaatatttgccttcaggacttcttctttcagcttcaattcccttgcatactcstgtggacttctagtcacacagggtcagctcggactacaactgccttaggcccagatatggtctctgcccaaggttcctttacttctcccaagccatcaaaactcttccctgagatcttctctttgaaaatgaatgttaacattggtccaatcacataaatatagctactattacaactctagcagtgatactgcacttctattactacgggctaactcatgtttacagaactatgtgccacatttcacataatggaatagcttaattgttggtttaccagcact

SEQ ID NO: 590997 - DNA, 643 bp, Homo sapiens
agaattcacttgctgctatgaactcccctagccctctctattgccgctgcaatcatggaggtacttgttaagagtgtggtgtcacaaagtggaagaaactttacatgctgagcttgtataaggaggacagccagcctcagagaayagcctgaactcaccactgattttgtgtgcccaagaaacaactcttttgtgttaagccactgaggtttttggtgctatttgtcgaagcagcgtaacaaatcctattctgattgatatacatttcttcaagatccagcttcttgatcactactttgaagtgattttttctttctctgtgcttctaaaaaaatcatacggagaaaattttctttagatgctggttagaaatttctttgtaggaagaatcagctctattgaaaaggatctttgataagcctgtgggttgaaaaataggggttgaaataaatcccccaggcctgtgtttctaatggcaggcaagtttcttgtcaaagcaggaagctactcagcctgaattgctgagaagctgtgttgagagctgcctaggagaagaggtggagaggcgattaaagttaagaggcgaggcctgggaagagattgcataaagggagtttttcaagtgatacgtgtgctatgtgat

SEQ ID NO: 590998 - DNA, 474 bp, Homo sapiens
aatgattagattcaggagaaagtaaaaacccaayccaattgaaggaatccaataaaatgataggagctgaaagatgaaagagcaattgtaagagggtaccaaactcatctgatagagctgaaaaactcaccacaagaatttcataatacaatcagaagggtatttttttgtttgttttgagacagagtctcactccatcactcagagttcaagtgattctcctgcctcagcctcctgagtagctggaattattacaggcatgcacctccacacccagctaatttttgtatttctagtagagtttctccatgtaggccaggctggcctcaaattcctaacatgaaaaggaacaactggtaccagccactgcaaaaatatgccaaattgtaaagaccatcaaggctaggaagaaagtgtctcaactaatgagcaaatcaaaatgacagctgacatcaaaatgacaggatcgaattc

SEQ ID NO: 590999 - DNA, 373 bp, Homo sapiens
agtttcaactatgtgagttgagtgcagacatcacaaagaagtttctgacaatacttctgtgtactttttatgtgaagatattcccgtttccaaggaagtcctcaaagcgctccaaatatccacttgcagacattacaaacagagtgtttcaaaactgctctaacaaaagaaaggttaaactctttgagttcaacacacatatcacaaagtagtttctgagaatgattatgtctagtttttatatgaagatatttccttttctaccataggcttgaaagygctctatgtatccatttggaaattgtacaaaaacagtgtttcaaaactactctatcaaaagaaaggttcaactctgtgagttgaatgcacacat

SEQ ID NO: 591000 - DNA, 572 bp, Homo sapiens
  misc_feature 563, 564, 565, 566, 567, 568, 569, 570, 571, 572: n = A,T,C or G
cgcaggcaagtcttcttgtcttctgagcccacttttcctacagacttcacatcttagctgcttaaaaaaagatgtgttcttctaaataaattcccaagtcatatttgatatcttggaacttcatcctatgatatgtgtattctactagatgttatagtagaattgaagcttctttttacattattatagcaactgaccaaaagagaaaaagaatgagggcagactgaagagaggttgattgatgagaacaaatatacacttggagagaagaaataagctctggtggttgataggactgtagggtaactatagttaacactaattgtacatttcaaaatagctagaagagaatgatttgaatgtttctaacataaagaaaagacaaaaatgtaaggtgatggatatcccaattaccctaatttaattatatgaatgtatcaaattatcacatacaccccaaaactatgtacaactaytatgtatcaatataaaagataagtaagaagagttatgggaaagatgaacgttatattcaatatacgtaggttcagatttttccagtnnnnnnnnnn

SEQ ID NO: 591001 - DNA, 611 bp, Homo sapiens
tggtgaactgaatggatggcagaacacgtaatgaggaggagaaaaaagtatgtgtatcaataaatcctgtttattgacctagggtgcagcaatgacatttctttaaggaattctttttcaatttaaaaagtttgaaactcttctgaacttgaagaaagatggaggattgccatagttcatagctgcaattatcacctacttgccaatgacttccaaacatgcatcttgtttgagctctggcccaggctctagattttcatttctataactaccgaacaatttctttcaattgcctgtaggtttctaagactcaacaattaaaaaccaacctaatactatcawccacctccaccaacacctgttcctcacccatggtgccatccaagaacccacctgagtctaccacccctcagtctatgcaaatccctctcctccttcactccccacatcaatttggagcaaatgactttaggactatctttcaccatctagtgtcagttcacctgcatgatacaaaaggtagtttaaaagccacttaacctcaaaactcttttaaccataaaagcaagcatcagttgtaactgatagatttaaactcactaaagactagc

SEQ ID NO: 591002 - DNA, 611 bp, Homo sapiens
tggtgaactgaatggatggcagaacacgtaatgaggaggagaaaaaagtatgtgtatcaataaatcctgtttattgacctagggtgcagcaatgacatttctttaaggaattctttttcaatttaaaaagtttgaaactcttctgaacttgaagaaagatggaggattgccatagttcatagctgcaattatcacctacttgccaatgacttccaaacatgcatcttgtttgagctctggcccaggctctagattttcatttctataactaccgaacaatttctttcaattgcctgtaggtttctaagactcaacaattaaaaaccaacctaatactatcatccacctccaccaacacctgttcctcacccatggtgccatccaagaacccacctgagtctaccacccctcagtctatgcaaatccctctcctccttcactccccacatcaatttggagcaaatgactttaggactatctttcaccatctagtgtcagtwcacctgcatgatacaaaaggtagtttaaaagccacttaacctcaaaactcttttaaccataaaagcaagcatcagttgtaactgatagatttaaactcactaaagactagc

SEQ ID NO: 591003 - DNA, 586 bp, Homo sapiens
ctaaggcaggagaatggtgtgaacctgggaggtggggcttgcagtgaactgagatcttgccactgcactccagcctgggcgacagagygagattccatctcaaaagaaaaaaaaaaggtctccccctcctccccacccaccttgtccccaagcctgccccttccctctagttcttatctgtggagctagctgacaaccagtgttattaatttcttgtgcatcattccctgggaagctgttctggtctaagaaaaacctacattcagcttcacagagtagtgtgacagagacatgattagaataagaaaatacggctgggcatggtggctcatgcctgtaattccagcactttgggaggccaaggtgggcggatcacctgaggtcaggaattcgagaccagcctggccaacatggtgaaaccccatctctactaaaagtacaaaaattagccaggtggtagtggtgcatgcctgtaatctcagctactcaggagactgaggcaagagaatcacttgagcccaaaaggtggatgttgcggtgagctgagattacaacactgcactacagcctgggtgacacagtgaga

SEQ ID NO: 591004 - DNA, 586 bp, Homo sapiens
ctaaggcaggagaatggtgtgaacctgggaggtggggcttgcagtgaactgagatcttgccactgcactccagcctgggcgacagagtgagattccatctcaaaagaaaaaaaaaaggtctccccctcctccccacccaccttgtccccaagcctgccccttccctctagttcttatctgtggagctagctgacaaccagtgttattaatttcttgtgcatcattccctgggaagctgttctggtctaagaaaaacctacattcagcttcacagagtagtgtgacagagacatgattagaataagaaaatacggctgggcatggtggctcatgcctgtaattccagcactttgggaggccaaggtgggcggatcacctgaggtcaggaattcgagaccagcctggccaacatggtgaaaccccatctctactaaaagtacaaaaattagccaggtggtagtggtgcatgcctgtaatctcagctactcaggagactgaggcaagagaatcacttgagcccaaraggtggatgttgcggtgagctgagattacaacactgcactacagcctgggtgacacagtgaga

SEQ ID NO: 591005 - DNA, 582 bp, Homo sapiens
tgatcaagttcattatcaggaggcatacacccaaacaatagggcagtgagcacctaccacgtacagagctctctgctaggttctctgggggcagcagttcccaacctggcaattcatcggcatcrtcggaatcagccagcagcttgttggatatgctgagtccagagtcccgcccatattacacctaacgttctgtgcctattacacccagatttatgagatcctcctctcccatgcagtcaaagaatctgcattctaataagttcctcagaggaagctcttttgcagccagtttgcactggtctgtgggttggtcacttatggaaaccactgctccagggaatgaatcatgatttccagtctcattagggaaagatgatatgcatatgcacacatgtaaagaggagtgacagtaattagccaaaagctctgtggacataattgcctctgatgaagtgctgactgatgacatcagacagtaggctattgacagtgtaccccggggaaagctaaatgcaaaagagaagcgaactgcctcatgaagtgagatcaggattacagggtcagaaatgtggagagggt

SEQ ID NO: 591006 - DNA, 603 bp, Homo sapiens
gctctgaaacttgcttatctgtgaatgctgccttttgtgctgatgtggggctctggggctggatttccggttcctggacatggtccccgtctccccgcgggtgggactcgttmccttatggcctctgacttctgctgcggaccatgagaagggtggcaaatgtgtgattcttttgtttttttcctttattgagacggggtctcactgtcgcccaggctggagtggagtggcacaatcacagctcactgcagcgttggcctttcaggctcaggtgatcctcctgcttcagcctcccaagtagctgaaactacatgcacgcaccaccacgcccacctaattattgtatttttgctagaaaccgggtcttactttgttgctcggctggtctggaactcctgggatcctgggctcaagtgatcctcccgcctcggcctccaaaagtgctgggattacaggcgtgagccactgtgctggtccatttttcctttctgcccccttacctgtgtttttttttttccccatcccaaagtgtgcactcctcgttatacccatattatttaggaattcctgggggaaagcgtaagacccgcccctccccagccc

SEQ ID NO: 591007 - DNA, 603 bp, Homo sapiens
gctctgaaacttgcttatctgtgaatgctgccttttgtgctgatgtggggctctggggctggatttccggttcctggacatggtccccgtctccccgcgggtgggactcgttaccttatggcctctgacttctgctgcggaccatgagaagggtggcaaatgtgtgattcttttgtttttttcctttattgagacggggtctcactgtcgcccaggctggagtggagtggcacaatcacagctcactgcagcgttggcctttcaggctcaggtgatcctcctgcttcagcctcccaagtagctgaaactacatgcasgcaccaccacgcccacctaattattgtatttttgctagaaaccgggtcttactttgttgctcggctggtctggaactcctgggatcctgggctcaagtgatcctcccgcctcggcctccaaaagtgctgggattacaggcgtgagccactgtgctggtccatttttcctttctgcccccttacctgtgtttttttttttccccatcccaaagtgtgcactcctcgttatacccatattatttaggaattcctgggggaaagcgtaagacccgcccctccccagccc

SEQ ID NO: 591008 - DNA, 186 bp, Homo sapiens
gtgttcagtttcctcctgcccacccaccagcctggggagagcaatattcccaggctcctgaatctcctcttctcatagctccctggtgttgcactattgtctrggtaatgaaaaaggcagggagggaagacagcaaaaggagtccagcagcctccctgcaggaggaggtagggatgctggaaaaag

SEQ ID NO: 591009 - DNA, 362 bp, Homo sapiens
attttatgtgggctttgatggatgcctaagaacttactagaaagaaacgaaagaaggatgttttaggtaagggagcagtacgtgtgtgaaagtgtggaaatacacagcatagcrtacttgaatagctatatgccatgccagagtgttgaggattgattcatataggactgacatcaaatttgcattttatggttgatataaacatatcctctagacatacagctggtaataattgaaagtaagatttagtataactgtgtgctgtaatcagaagttagattttggtggcttgggtttctgtggcactttatttttttttattatactttaagttctaaggtacatgtgcacaacatgcaggt

SEQ ID NO: 591010 - DNA, 572 bp, Homo sapiens
ctgtttccttgaaatgatcagcactgacttttctgaagaaaggaaggtcatgaagcttatgtaaaacaatttaatttttaaaaggtttcaaaccaataaaaaacgtcactactgtttagagatagtyagaaacataggtggtgaagtttgccattcgttcaacatgatactgatctaccaaaagtgggaaagggaagaaaacacattttgtgactcgggtaacagcatgtattctgtactgtcatcaagattgaatcaaatgatattcatagactggggttaaaagccctagtatatagtatatttttataataccatccttggtaatcatttttttttttttgagacaggatcttactctgtcacccaggctggagtgcaaaggcatgatcacggctcactgcagcctggacctccagcactcagcctcccaagtagctgagaccacaggtgcccaccaccatgtccagctaatttctctattttttctagagacagggtctcgccacgttgcccaggctggtctcaaattcctgggttcaagcgatcctcccacctcagcctcccaaatc

SEQ ID NO: 591011 - DNA, 611 bp, Homo sapiens
tttagtcttttagagcaacaagattgcctctttgaatgccaggtgcctgtccctaaattgtgttccctaatcacttgagggtatagctaaaatgattttggaagtagcctttgttaaacaagtgctttgtttatatattttttgctacttattaggatatctgctatgttatctgcttaatgttatatttttatttttcagtattttcataaagttgctggccagcttttacctcttgcatataatctgttgaagaggaatctgtttgcagaaattatgaaggatcatctggcaaacagaagaaaagagaacatagaccaatttgctgcatgagtaaggtggtttgtttggtgtataatatttcaaaggactagtattaaacttgtaatttttgttttgtttttaaggaatacaaaaaaataaacatttactaaaaaygtttataaggttcttctgcctggttttccttctttaatgtgcaagcaattggcagtcaaatcatctaaatggtaaccctaatcacattttggaagacaactaaagtcaccctctgatatgtcacaggaagccactgtctaattcctgtggctaactagaccatccttacagag

SEQ ID NO: 591012 - DNA, 611 bp, Homo sapiens
tttagtcttttagagcaacaagattgcctctttgaatgccaggtgcctgtccctaaattgtgttccctaatcacttgagggtatagctaaaatgattttggaagtagcctttgttaaacaagtgctttgtttatatattttttgctacttattaggatatctgctatgttatctgcttaatgttatatttttatttttcagtattttcataaagttgctggccagcttttacctcttgcatataatctgttgaagaggaatctgtttgcagaaattatgaaggatcatctggcaaacagaagaaaagagaacatagaccaatttgctgcatgagtaaggtggtttgtttggtgtataatatttcaaaggactagtattaaacttgtaatttttgttttgtttttaaggaatacaaaaaaataaacatttactaaaaatgtttataaggttcttctgcctggttttccttctttaatgtgcaagcaattggcagtcaaatcatctraatggtaaccctaatcacattttggaagacaactaaagtcaccctctgatatgtcacaggaagccactgtctaattcctgtggctaactagaccatccttacagag

SEQ ID NO: 591013 - DNA, 611 bp, Homo sapiens
tttagtcttttagagcaacaagattgcctctttgaatgccaggtgcctgtccctaaattgtgttccctaatcacttgagggtatagctaaaatgattttggaagtagcctttgttaaacaagtgctttgtttatatattttttgctacttattaggatatctgctatgttatctgcttaatgttatatttttatttttcagtattttcataaagttgctggccagcttttacctcttgcatataatctgttgaagaggaatctgtttgcagaaattatgaaggatcatctggcaaacagaagaaaagagaacatagaccaatttgctgcatgagtaaggtggtttgtttggtgtataatatttcaaaggactagtattaaacttgtaatttttgttttgtttttaaggaatacaaaaaaataaacatttactaaaaatgtttataaggttcttctgcctggttttccttctttaatgtgcaagcaattggcagtcaaatcatctaaatggtaaccctaatcacattttggaagacaactaaagtcaccctctgatatgtcacaggaagccactgtstaattcctgtggctaactagaccatccttacagag

SEQ ID NO: 591014 - DNA, 521 bp, Homo sapiens
gggtctcactctgtcgcccaggctggagtacagtggcgcgatctcagctcactgcaacctccgcctcccatgttcaagcctcagcctgcctcagcctcctgagtagctgggactacaggtatgtgctgccacacccagctaatttttgtattttttagtagagatggggtttcaccatattggccgggctggtcttcaactactgaccttgtgatctgcccgcctggacctcccaaagtgctgggattacaggcgtgagccactgcactgggcctaattaaatatttttttaaatagatgacacttccccatgtctaggaatcttttggaggtcttctytggaattatatcaaaaatacttctcaaactttttgttcataaagtggacttggctctaaacagaaagtaaaagacaactataaggcggcttctctagagtctacagaccctttctctaattttttagctataagcagttgaccttacatattttatttcaccttttaacttcatgactaagt

SEQ ID NO: 591015 - DNA, 372 bp, Homo sapiens
gtggcatggactaggtctttgtgtcggctgtggggtggggkggtggggggcattgatctcaatagagaatggagaattgatgagccataaattctcccaatcagtactccgtgttggctttcctttctcggagctccagatgagggcttccctcccttgtctactcactcacaacaggctgcagccagcagggccctagagaggttctggaggcacacgagccacacctgggaggcagcaccacctcttcctactgggaaaacatcttacccttcctgttgtctcagacactgcccttctgtcctgcagcaggcaagttctgcaatgagaatttttaccagatcccctgctctcctagggcaacatcacaca

SEQ ID NO: 591016 - DNA, 372 bp, Homo sapiens
gtggcatggactaggtctttgtgtcggctgtggggtgggggggkggggggcattgatctcaatagagaatggagaattgatgagccataaattctcccaatcagtactccgtgttggctttcctttctcggagctccagatgagggcttccctcccttgtctactcactcacaacaggctgcagccagcagggccctagagaggttctggaggcacacgagccacacctgggaggcagcaccacctcttcctactgggaaaacatcttacccttcctgttgtctcagacactgcccttctgtcctgcagcaggcaagttctgcaatgagaatttttaccagatcccctgctctcctagggcaacatcacaca

SEQ ID NO: 591017 - DNA, 613 bp, Homo sapiens
ggaggaaggagtcaaaaggctcagagaaggaggtgtgtagcattgctatagtacttgtggtgggcacaccgttacatgaccctcaatgagccatgcccttgtataatccctccgcttgagtgcagacagaacctgtgacttgcttctagccaacagtgtctggcaaaggtaatgggatagtcattctgtggttatgttacattatacagtactctaggttggcatcctggaatgagagattctcctgctggcttgaagaagtgagctgccatgttgtgagaggccctgcaggaaggaactgcagatcacctctaggaattgagagcagcacccagctgaccatcagcaagaaaacaaggacttcagtcctacaaccacaaggaactgaatgctgccaattagcacatgagtttgaaagaggatcctgagctccagttaggagtgcagcctggccaacrctttgactgtagccttttaagaccccaaacaaaggacttcaggtaagccatgtccagatttctgacctccagacactgtgagaaaatgactgtatgttattctaaactgctaattttgcggtaagttgttatgtagcatagataactaatataac

SEQ ID NO: 591018 - DNA, 461 bp, Homo sapiens
aatggactatagctgtgggcaactggggctcaagcttcctgggtatcccccaaaagcctctatagaatacacctcagaaagttttcatcaggggtaaagaaactggggtatttatccaccaattgcctgctttctttgtttgaagatttctcccaggagttaactccctggcacttcagatctcttccccaatcccaatacatgggctgagcatgatgtttccaccagagaacactctcaggcagcgagacaaagatgcctgagttagaattcccttggcctggatgaaaactgtccaccaaagcttctggtgacctccttggtggatgaatgctgataaccaaaaaaaaaaaaaaaaaaaaaaaaaaaaccctctgtaaaatattgaaggaggtttattctgaccatggcctgggaaacagtctcaaraaagcttgagaaagtgtacccaaggtgactga

SEQ ID NO: 591019 - DNA, 521 bp, Homo sapiens
ttggttgcaatgtaaaagtcaaaacctgactacagttaagtttgtaggggccctggcactgctacctgcctaggaattgatgacctacggttttcaacctctcctagaaatatgaactgggttcttggcatagagtctccacraaatcaccagtgcagtacttcctaaatacagatatccctcattctctttctctaagtatgaaatggaatccaaactttggtcaagctttcaaaagacatccttctcactaattcttccctaggatctctgctttaatctaagagaatgataggcagccatgccaacttcctacatctattatcaattccgaaaaagctgttcccatttcctttgagccacatgctaaaacatcttctcaccctcaccataaaatcgttcaatgctgtaagaggatattatagacttccacttaaaagtggtggatggaacataaacattatttctgctccctcccagaaattccaataaatattacagcaaaggaatttttttttttt

SEQ ID NO: 591020 - DNA, 631 bp, Homo sapiens
atgtgttgttccccctgtcgaaccccagaatgccttcctaatttattgaagttaaaagccaaaaatgttataatgcctgataaagcctcaatccaacatgcttcccatttgctccctgactcatctgccacctctcttcctcttgcctagtctactccagccacaccagctgccttgctattcttgtaacaagcagtaatgtgcctgccttgtggtcttcacagccccttcctgtcccttctgcctagaaagggcccatgctgtcacctcttacagatctttcctcgaagatcatctctcaatgacactcaccctgagaaaattggaaacttcttccaacacttgacttcctatccttctctatttttctccaaaacacttactacttctaacatatgtacatacatgcacacacaaaataaatttatttatatatttatatattcttagtgccccccattgcaatgcaaattcaaaraaaattgagattttctttttcgtgtgttcggttgatttcactgctctatccctaggacctacagtaagagctggtttatagcagatgcttaaaactctattgttgattgaattaattaattaaaaactttcatgttaaagtatgtttgcatgt

SEQ ID NO: 591021 - DNA, 631 bp, Homo sapiens
atgtgttgttccccctgtcgaaccccagaatgccttcctaatttattgaagttaaaagccaaaaatgttataatgcctgataaagcctcaatccaacatgcttcccatttgctccctgactcatctgccacctctcttcctcttgcctagtctactccagccacaccagctgccttgctattcttgtaacaagcagtaatgtgcctgccttgtggtcttcacagccccttcctgtcccttctgcctagaaagggcccatgctgtcacctcttacagatctttcctcgaagatcatctctcaatgacactcaccctgagaaaattggaaacttcttccaacacttgacttcctatccttctctatttttctccaaaacacttactacttctaacatatgtacatacatgcacacacaaaataaatttatttatatatttatatattcttagtgccccccattgcaatgcaaattcaaaaaraattgagattttctttttcgtgtgttcggttgatttcactgctctatccctaggacctacagtaagagctggtttatagcagatgcttaaaactctattgttgattgaattaattaattaaaaactttcatgttaaagtatgtttgcatgt

SEQ ID NO: 591022 - DNA, 444 bp, Homo sapiens
gtatatcccagtattgtccataataaatgcagtctttaaaaatcacacatactgaagtgattctttacacttttgtccattgctttttctcaaaakaataaatccataaataagtccataggggttaaaatcctaagtgagtgtcaaaaaataatgtgtgagtctatttttcattgctataaagaaatacctaagactggtaacatcaaattattatttataaagaaaggaggtttatttgccttatcattctgcagtctgtacaagcattgcactcacatctgcttggcttctggtgaggccttgggaagcttttagtcatagcagaagagaggggacctggtgtgtcacatagtgagagaggaagcaagagagagaggagaggagtcccaaactctttttaacaatcagctctcatgtgaactaatagagtgagaactcact

SEQ ID NO: 591023 - DNA, 550 bp, Homo sapiens
ttccagctttatccatgtccctgcaaaggacatgaactcatccttttttatggctacatagtatttcatggtgtgtaagtgccatattttctttatccagtctatcattgatgggcatttgggttggttccaagtctttgctattgtgaatagtcctgcaataaacatacatgtgcatgtgtctttatagtagaatgatttataatccttgaaaatgaacaattattccaataagtgttaatttatgctttgattgatagttacacaaatttttcttttttttttcccgccagattggagtgcagtggcacaatcacggctcaccacaacctcccactcccaggctcaagtgatcctcccacctcagcctcccaagtagctaggaccacaggtacacaccaccacacccaggtrattttttgtctttttggtagagatgggttttcaccatgttgaccaggctggtctcaaaatcatgagctcaagcaatctgcccacctcagcctcccagagtgctggggttacaggagtgagccaccgcacctggacc

SEQ ID NO: 591024 - DNA, 560 bp, Homo sapiens
cccaatcccactgaagtactcaatagatttccattactgacggctgcacctgcttcactcttctaagcatcccattataatctcagcattttctagtttactaagtcttgtatctcctgttcctggaattatgtarcccttctggatcttacaatcatgtgaatatcttttcttttcgggtttgtttttgctatcggttagtgtccctgatatctttggtatcctctttagtttagattctataattcataaaaaactatcccctttcatataacttcaacttgagtgtcactctctcccacaactgtactcacaggcaaaatcccaacctcattaaactcacctttttgcctactttgtgctttttccttagaaactaaatattgctgaagaacaacactcaatcataggtttcacctaaatttatggaagtatatctcaactgagcttcagaagtgcctggaaatcctattctatttctctatcaattttctgttccactttctaaaataatctgtgcctgtttttttttcctttcctcaaaacttccttgcccatcc

SEQ ID NO: 591025 - DNA, 580 bp, Homo sapiens
tccccaagcttctcttgtgacagtgagtgaattctcatgagatctgatggttttataaggggcttcccccttcacttggcactcattttctctcctgctgcctgcctgtgaagaggtgctttccaccatgattgtaagtttcctggggcctccccagccatgcagaactgagtcaattaatcctcttctctttataarttacccagtctcgggtatttcttcatagcagcatgagaatggactaatacatccactctcaataatagaaacaacaaccagacagaagataagtaaggaataaaggacttaaacaacatgataaaccaattagatttaacagacatgtacagaacattctcccaaatgagagaagcatacacaatattctcaagtacatatggaatattttctaggataaactacatattaggccacagattaagtctcaataaataaaaaatagagatattatacaaagtatcttctccatccataacaggatgagattagagataacagaaataaaattataaaatacacaaaattgtagaaattaaacaagatagtcaaaccaccaatg

SEQ ID NO: 591026 - DNA, 581 bp, Homo sapiens
ctcagtggaagacgtcaggagagtggacatgcaggttttagagatcctccctttgtgggttccccttctccggggttttctcctcaattttcagtagtttgggcagctgtgaactccatcccctgactcctcagggtatgaagatgatgacattttgcttgatttgcaccctgtgcactgcagggtctggcagtttcttccagaaagccgagtaaatgcagattctacctcrtgcacctcccttcttgtaggggtgttctcctgtattcgtctgttctcaaatcactataaagaaatacccaagactgggtaatttacaaagaaaagaggtttaattggctcacagttctgcaggctgtctagggagcatgatgctggcatctgctcagcttctggggaggcctcaggagacttacaatcatggcggaaggcaaagggaaagcaggcatgtctccatatggccagtgcaggaggaagagagagaggggcagcgattttctttctcagtgttatggaaaggatgatgcctcctgctgtttacttagatttgataaaatgcggtgtctccccctgccagggtg

SEQ ID NO: 591027 - DNA, 599 bp, Homo sapiens
  misc_feature 450, 478: n = A,T,C or G
gcaaaatacatgattggctcacattcaccaaccaataacaatggagcaggctgaaagtatggatagttttgagcagagttgagagaaaaatactgatgatagctctatgaagagaaactgaaggaaactaagatcgagggctatacttttgtgcttcagaattcaaggcaaatataccctcctataaaatactagktaataccacagtcaacggaataaagattagctgaaatggaacattgtcatgataatattccttagggtcagtgacccacgatctgcataatagagtaacacttactttagaattgcaggtgctgttattcagcacaaaagacatgcattaaatatatttagtgattctaaaagatgatatataaattcaaggtattaatagcattattttcatcgatttattggtttcatattttctgaatgttcttaactcangataattatgagttttaactaagtacanttgtagtcaacatctttgcataatagatattcagatacacttatctaaaataaactaggatattatgtattccagttcaattaaatataacaattttttgaacattcaataagtgccaaga

SEQ ID NO: 591028 - DNA, 438 bp, Homo sapiens
gttgccacagattcctgtgatagatctgggcacagaaactaaaaatcttctgggaaggattcaccattatagatgctattgtttgtgatttatgagcagaggtcaacatagcaacattaatggaagtttgggaaaagttcattctagccctcatgggtgacttcgaggggttcaggacttcagtgaaggtggtaagtgaagacatgatagaaatagcaagagaactagaattaaaagtggggtctgatgatgtggctaattgctgcagtctcatgataaaatttgaacagataaggggctgcttcttgtggatgagcaaaraaagtggtttcttgagatggaatctactcctggtgagatgctaagaacgtttttgaaatgacgacaaaggatttagaatattacataaattagttgataaaatagtgacagagtttg

SEQ ID NO: 591029 - DNA, 642 bp, Homo sapiens
caggaaagaaggccttcccagtgtgcctcgttgtcagagacacctctaagccacggcgagagggtctggaggttgatggcgtgtgggttggggagggagtggctgaagaggggcgagagtgttccgggactggggaatcatctgtcygctgctccctgcacacaagggtttccatgacgccctgacctagtggcctacattccgataggttttgaagtttcaaaagacaatagtaaccacacagcatggagaaaagtgctgggaaaggcaccagagagtgcagagtccagctcaggatacaccggaatctaccatatggtaaagggagctttgcaatcagtgaggaaaagataggttaggcctcaaatcattattttattaaaacaatttttaaaacaaaatatttaactcattccttgcaacagataagctccagataaaatacattttaattttaaaaaaattataaaagtaaaataatacaagctaatttaggtgaatattttaatattattttcacaagcagccaaagtttaaacactgacacatcatcaaagccagaagctataaagaagaatatccatggggtttatctataactttttaaatatcaattttttttctcatggataagattaagga

SEQ ID NO: 591030 - DNA, 258 bp, Homo sapiens
gaattcccagacactcccagctctctgcgcaggaggctgaagagagtcgagtagttttctagcctttttctgaragtttcaggagctgtagaaaccaaagaacaaagaagctgagataggggtgtactgaaactgaggttcccggatttggcaagtgcacatgcaggacaaatattgcaaggaccatgcttgcactaaaaatgggcttgccgttgatctgacattcacacataactgtctcctgtctcgcatctggca

SEQ ID NO: 591031 - DNA, 443 bp, Homo sapiens
ctgctttcaaacttcagcagcactgctgggtagtgtgacagagaccgtatggctgacaaaaccaaaatatttattatctggccttgtaaagaatatgttaaatcgattacattctaaatcactgctaccacaactagcacacaaccaatttgccaccayagtttgtttaaaaaatatataatgggcctggcacagtggcccacgcctgtaatcccagcactttgagaggctgaggcagtcggattacttgaggtcaggagtttgagaccagccaggccaacatggtgaaaccccatctctactaaaatacagaaattagctgggcatggtggtggacacctgtaatcccacctactcaagaggctgaggtaggagattgcttgaaacagagagacagaggttgcagtgagctgagatcgcagcactgtgctccagcataggcg

SEQ ID NO: 591032 - DNA, 581 bp, Homo sapiens
cagtgtctccttggcaatatgctgaggcccataaatgcaagatcctgcttgtacctcaaagaaccttaagaaatgggcagggaaaatatgattatttctgtaataagggtgaaaaactaaagtctcaaattgacttgacctctgatttaaatttctgacttggacattgtaacaagtcagctatagtttgggtggtctcatcccaactttactaacattgaasatcagtaacatatgaacatggttgaagagtttaataataaagttttcccatgaaagtaaaacttccatcagcgtatccatactcttatgccacagaatccataagatttaaccatttctggttttctgtcattattgtcttttatgtaatttgtttacattattcttcatgctttatccgttgtgaactttctcaattgacaccttgatatgagtattaatatgttacatcacttctgtttcccatgtcttcttactatctgttatatttatgaactggaataatacaactgattctttatgctgtatttctttaatttttggtaacatctcttgtctttccatttagtaagatgtga

SEQ ID NO: 591033 - DNA, 464 bp, Homo sapiens
ccggctaactttttatttttagtagcgacagggtttctccatgttggtcaggctggtcttgaactcccaacctcaggtgatccgcccgcctcggcctcccaaagtgctgggattataggcgtgagccactgcgcctaggctgagaaagctattttttttttttaagaaaactgggaaagtacatattatgaagagagtatttcttaacattttatttgtgaagcttatctatgtctgaatcmaacagcccacttgactcatttgtggtattgcctggcccctcatggggcttttgagttcatagtcaccgctgtgatggacacagttaaaaagggattggaggggcctccaggaatgcttcttggaggagttgctgtcttgacctggtattagaaaggaggcaggctggccgggtgcagtggctcatggctgtaatcctagcactttgggaggtcgaggtgggt

SEQ ID NO: 591034 - DNA, 582 bp, Homo sapiens
ccttaagccattcctgacttcagtaccagactgagaccaggcgctgctactgcccaaatgacccctggtcccatctacaaggagcacttttgaggcctcagaacagagccccggggagaaatctgcgatgatcagggtaacctgggtgccgcatcttgctgttcagctgcagcggaaccggccggaccagagctaatgcgcgcccagaatgaagagggagaccgagagtggcccaaatgtcagcgccccgggcctggagatgacagcccgacagcagccatttcacagctggggaaactgagtcctgggaaagtttaaggttgcagccttaagttgttactcattctagacgtttcccctgagggtttggtctttggggaacacgctactgtggaaatggagagaccgcaggccttttcctaggcatttstttttactattctgaaacgcagtctcctgacgtgaaaaatgaagaaaagaacaaatactggccgggcgcggtggctcatgcctgtaataccagcactttgggaggccgaggcgggtggatcacttgaggttaagagttcgataccagcctgg

SEQ ID NO: 591035 - DNA, 569 bp, Homo sapiens
ttctgtatagccagattctcacaccacgggctggatagagtctgtctgcatctctgccaatgagtccttcgttccagtgtctgtctcccctgctgacctatgggttcttggggtgcaggaagcagagtgcagctatgactggggccctggcgccagcccagagcctccttgcacaggggtgcggatcagctctgcagcaggggacagcctttctcctagaaccacactggctgctcccaggacacacaygccctgagccctggggtggccctagctgcaggctggtcacatttgccattccacattccatgctcgccagctcctcatgggtgtgcaaggcgctccagacctggcctgccctccccagacccgctcagccactgctgtccctccaggtgcccagagttgccctcaggtccgcactcacccctatgtactgcccaacacaggctctcccctcaccttcaaaatatacctccatgttagaccatccggaatgctgctcattttcttagatgcagtaacggtatttgtaaatctgtaagagaatgcctttttttttttttttt

SEQ ID NO: 591036 - DNA, 569 bp, Homo sapiens
ttctgtatagccagattctcacaccacgggctggatagagtctgtctgcatctctgccaatgagtccttcgttccagtgtctgtctcccctgctgacctatgggttcttggggtgcaggaagcagagtgcagctatgactggggccctggcgccagcccagagcctccttgcacaggggtgcggatcagctctgcagcaggggacagcctttctcctagaaccacactggctgctcccaggacacacacgccctgagccctggggtggccctagctgcaggctggtcacatttgccattccacattccatgctcgccagctcctcatgggtgtgcaaggcgctccagacctggcctgccctccccagacccgctcagccactgctgtccctccaggtgcccagagtygccctcaggtccgcactcacccctatgtactgcccaacacaggctctcccctcaccttcaaaatatacctccatgttagaccatccggaatgctgctcattttcttagatgcagtaacggtatttgtaaatctgtaagagaatgcctttttttttttttttt

SEQ ID NO: 591037 - DNA, 633 bp, Homo sapiens
taggcaaaaacttcatgactaagaacccaaacacaaatgcaacaaaaacaaaaaataaataaataggacctaagtaaactaaaaascttctgcacagcaaaagaaatgatcagcagagtaaacagacaacacacagagtgggagaaaatattcacaaactatgcatttgacaaagggctaatctctagaatctacaaggaactcaaacaaatcagcaagataaagaaacaaacaatctcccgaaaaatagacaattctcaaaagaagatatacaaatggccaagaaacgtatgaaaaaaggttcaacatcactaaaaatcagggaaatgcaaatcaaaaccacagtgccataccaccttactcctgcaagaatggccataatcaataaatcaaaaaataatagatgctggcgtggaattgctgaaaaggaaacacttttacactgctggtgggaatgtaaactagtacaactactatggaaaacagtgtggagattccttaaagaactaaaagtagatctactgtttgatccaccaatcccactactaggtatctacccagaggaaaaagtcgttatatgaaaaagacacttgcacacgcatgtttatagcagcacaatttgcaatcgcaaaa

SEQ ID NO: 591038 - DNA, 633 bp, Homo sapiens
taggcaaaaacttcatgactaagaacccaaacacaaatgcaacaaaaacaaaaaataaataaataggacctaagtaaactaaaaagcttctgcacagcaaaagaaatgatcagcagagtaaacagacaacacacagagtgggagaaaatattcacaaactatgcatttgacaaagggctaatctctagaatctacaaggaactcaaacaaatcagcaagataaagaaacaaacaatctcccgaaaaatagacaattctcaaaagaagatatacaaatggccaagaaacgtatgaaaaaaggttcaacatcactaaaaatcagggaaatgcaaatcaaaaccacagtgccataccaccttactcctgcaagaatggccataatcaataaatcaaaaaataatagatgytggcgtggaattgctgaaaaggaaacacttttacactgctggtgggaatgtaaactagtacaactactatggaaaacagtgtggagattccttaaagaactaaaagtagatctactgtttgatccaccaatcccactactaggtatctacccagaggaaaaagtcgttatatgaaaaagacacttgcacacgcatgtttatagcagcacaatttgcaatcgcaaaa

SEQ ID NO: 591039 - DNA, 633 bp, Homo sapiens
taggcaaaaacttcatgactaagaacccaaacacaaatgcaacaaaaacaaaaaataaataaataggacctaagtaaactaaaaagcttctgcacagcaaaagaaatgatcagcagagtaaacagacaacacacagagtgggagaaaatattcacaaactatgcatttgacaaagggctaatctctagaatctacaaggaactcaaacaaatcagcaagataaagaaacaaacaatctcccgaaaaatagacaattctcaaaagaagatatacaaatggccaagaaacgtatgaaaaaaggttcaacatcactaaaaatcagggaaatgcaaatcaaaaccacagtgccataccaccttactcctgcaagaatggccataatcaataaatcaaaaaataatagatgctggcgtggaattgctgaaaaggraacacttttacactgctggtgggaatgtaaactagtacaactactatggaaaacagtgtggagattccttaaagaactaaaagtagatctactgtttgatccaccaatcccactactaggtatctacccagaggaaaaagtcgttatatgaaaaagacacttgcacacgcatgtttatagcagcacaatttgcaatcgcaaaa

SEQ ID NO: 591040 - DNA, 567 bp, Homo sapiens
agcgtagggacatggatgaagctagaaaccatcattctgagcaaactgtcacaaggacagaaaaccaaataccgcatgttctcactcataggtgggaattgaacaatgagaacacttggacacagggtggggaacatcacacaccgggcctgtcctggggtggggagacgggggagggattgcattaggagatgtacctaatgtaaatgacaagttaaggggtgcagcacaccaacatggcacatgtayacatatgtaacaaacctgcacattgtgcacatgtaccctagaacttaaagtataataaaaaaggaagaaaaataataataatattatcacatttcacagagtttacagtctggcggaggagaaaaacattaaactaataattatataaccacttatttatttacacctgaggtctattcgttatctttgactatgccacataattccaatctgaactcacttgtatgcattacttagcttggcgatgcttgatgttctcctttctatttccttatgtcctatgcttcatgtttttttcaaggcccagcttaagttcag

SEQ ID NO: 591041 - DNA, 567 bp, Homo sapiens
agcgtagggacatggatgaagctagaaaccatcattctgagcaaactgtcacaaggacagaaaaccaaataccgcatgttctcactcataggtgggaattgaacaatgagaacacttggacacagggtggggaacatcacacaccgggcctgtcctggggtggggagacgggggagggattgcattaggagatgtacctaatgtaaatgacaagttaaggggtgcagcacaccaacatggcacatgtatacatatgtaacaaacctgcacattgtgcacatgtaccctagaacttaaagtataataaaaaaggaagaaaaataataataatattatcacatttcacagagtttacagtctggcrgaggagaaaaacattaaactaataattatataaccacttatttatttacacctgaggtctattcgttatctttgactatgccacataattccaatctgaactcacttgtatgcattacttagcttggcgatgcttgatgttctcctttctatttccttatgtcctatgcttcatgtttttttcaaggcccagcttaagttcag

SEQ ID NO: 591042 - DNA, 567 bp, Homo sapiens
agcgtagggacatggatgaagctagaaaccatcattctgagcaaactgtcacaaggacagaaaaccaaataccgcatgttctcactcataggtgggaattgaacaatgagaacacttggacacagggtggggaacatcacacaccgggcctgtcctggggtggggagacgggggagggattgcattaggagatgtacctaatgtaaatgacaagttaaggggtgcagcacaccaacatggcacatgtatacatatgtaacaaacctgcacattgtgcacatgtaccctagaacttaaagtataataaaaaaggaagaaaaataataataatattatcacatttcacagagtttacagtctggcggaggagaaaaacattaaactaataattatataaccacttatttatttacacctgaggtctattcgttatctttgactatgccayataattccaatctgaactcacttgtatgcattacttagcttggcgatgcttgatgttctcctttctatttccttatgtcctatgcttcatgtttttttcaaggcccagcttaagttcag

SEQ ID NO: 591043 - DNA, 618 bp, Homo sapiens
tttctcattttaaggacagaatttatcagtattctcatatctatgtaactggcagtatgagaactaaaggccatcaagacttatctaaactgtataacaagtaataagattttaggacacaatccctctatttctaatacaactccagaaatgttttattcataaatgcattcattcaacatttactgatcaactactatgtacaaggcattgtataagaggctgtggcaatcctctacttacctttgtactgtgtttcctacttccaaagaggttaaattmataccaaagtgatttgttaaaaatacaaaaaaggattccaaatgggccaataaaaggaaaagacacaccaactctaagaccagatttatgttactaaataccgacggaaactcctcagcatttaaaagaatacattaaggagagtaatgcaagtcatttggatgttttcaatatgagaaatttgagcctactgaataaattaattaaatatctttaatattgagttgcagctttttattgcatttatagaactttacctattagtaaaatatacaatctataatagcttgtctatatcaaaaatatagatatctgtcagaaaacatacaaagccac

SEQ ID NO: 591044 - DNA, 594 bp, Homo sapiens
tttgcagcaatgacaacaaaaacagaaataggccaggctcagtggctcatgtctgtaatcccagccctttgggaagttaaggtgggcagatcacttgagcccagaagtttgacaccagcctgtgcaacatggtgaaacttcatctctacagaaaaatacaaaaattagctggccttgtggcacatgcctgtagtcccggctactcaggaggctgaggcgggattattgcttgagcccaggaagcagaggttctagtgtgccatgatcatgccactgcactccagcctgggtgacagagcgagactcyatttcaaacaaaaaacaaacagaaacaaccagaaataatataaaggcaattaaattttgagcagtgttccagatcctttcaaattattccccatggcttatgtggagaagaatcttctaattttcttgagccttttaaatcataaggataagggcagagaggcaagaaaggaagtgtaatataaaatccatgagggcagtattcagtattgcatattcagatagtggcatctcataggctttcagccaatatttgtaaagcaaaaaaatgaagaaaaacatgttttc

SEQ ID NO: 591045 - DNA, 556 bp, Homo sapiens
taattattcattatttcaggtttttttttttactttttctgttttatttataagcgacaaaacttctacataacacataccagtgtgtacatatacacacattcacacacctgcatgtgagcatacatataccctttctctctctctctctctctctctcwcacacacacacacacacacacacacacacacacacatagaatatgcaggtagatatgttttgatatagtttgtctttctgtatgtttgattattatggtgctttttcccaagtcctagaaatagataatgggttttttccccttcctactgaaatttgactgtatttcaacattttctttcagaacaaaactctcctctctgctttcaaagttgttagctaccaaatctgatgaaaaagtccttgttagtagtgtgacggcaaagtattttagcacctatttctagatccagataatacataacagttccaaataatacatagtgtgttcatagtatcttcctgaaggcaataatttcatatccaccgtactttccaaaagagctatttcaatcg

SEQ ID NO: 591046 - DNA, 552 bp, Homo sapiens
ttaaacgtcctttctttcagaaaatgtcttgtgaacactgcaagatatgagacatgataaattactcaagtacaacatatgcccggtggatgagttcacaatccaattgaaaaaataaaaccaaaacaatgagagtattgatttatatacgcaagtattaaattattagactcrcattacaagaactctggatagctatcaataccttaactttgacatttccaactgcaaatgccattgcatgctatatagatctttttacccataatctacacttctgctattctctctgtgttctctcaagtatcttgcctttttgccaactattcttctaacaataacttgtcaactaaaacaatgcttaaatcctatgtcatctatttggatttttttctgatctctatggtattatcaatcaaatctcaaaaattcagaggttctccttcattactaggtattttatatattagtcttgcttcttcaaatagaggaaagctctttgaaggaaagaatcacgtctctagttttcgaaatgtaattaagaaagtttta

SEQ ID NO: 591047 - DNA, 579 bp, Homo sapiens
acaagaccacaagaccaaatgtctccaggccatgtcagagaccttcatggcagcccctcccatcacaggcctggaggcccaggaggaaaaagtggtttcgtaggctgggcccagggtccccgtgctgtgtgcagcctgtgcagcctagggcactagccctaggctcaggctgtggcttcagagagtacaagccccaggccttgttagcttccacgagatgttgagcctgcaggtgcacagaagtcaagaactgaggtttgggaacctccacctagatttcagaagatgtatggaaatgcctggatgcccaggcaaaagtttgctgcaggggcagggccctcatggagaacctctgctagggcagtgcagaaggcaaatgtagggtgggagcccccacacagagtccctactaggccactgcytagtggagctgtgagaggagggcctctgtcctccagaccccagaatggtagatccaccgacagcctgcactgtgagcctggaaaagccacagacactcaatgccagcccgtgaaagcagccaggaggaaggctgtaccctgcaaagccacaggggca

SEQ ID NO: 591048 - DNA, 579 bp, Homo sapiens
acaagaccacaagaccaaatgtctccaggccatgtcagagaccttcatggcagcccctcccatcacaggcctggaggcccaggaggaaaaagtggtttcgtaggctgggcccagggtccccgtgctgtgtgcagcctgtgcagcctagggcactagccctaggctcaggctgtggcttcagagagtacaagccccaggccttgttagcttccacgagatgttgagcctgcaggtgcacagaagtcaagaactgaggtttgggaacctccacctagatttcagaagatgtatggaaatgcctggatgcccaggcaaaagtttgctgcaggggcagggccctcatggagaacctctgctagggcagtgcagaaggcaaatgtagggtgggagcccccacacagagtccctactaggccactgcctagtggagctgtgagaggagggcctctgtcctccagaccccagaatggtagatccaccgacagcytgcactgtgagcctggaaaagccacagacactcaatgccagcccgtgaaagcagccaggaggaaggctgtaccctgcaaagccacaggggca

SEQ ID NO: 591049 - DNA, 521 bp, Homo sapiens
tctttattaagttctttaataaagatagtctcctcagttttctggctccaaaggaaaaaagaaaagaaaacctttattatgtaaagtatgggaagaaaagaaacaagaaataaaggcgacagagctgagtcttatccgggaactgtgaatrtggtatcagggcgccaggaaaagggtctgtgctggacagaagggccgggcgccaccggcccagaaaggcacaaagagggggtgaggccttacattgcgaagccgtgggacagctgcaggcccaacatctctcccacgccagttctgtcctctccccacctcctcctctgtctcctcagtctttgtctgtggtccggtaccttttgctccttgtcagtcttttcattcgctgaatcaaacacaatccgggccccactctgcataaaggaccctgtgcagaagacaagtctctttcacccgctgggaaagttccccatttggcagaagaggcagccgtggagatgggagacaagggtgtgtgggagtgaggg

SEQ ID NO: 591050 - DNA, 416 bp, Homo sapiens
ctctgctcctccacctcttgtggagggcctgacatcagkcaggctcgcctgcagttatccggaggcctaaccgtctccctgtgatgctgtgcttcagtggtcacgctcctagtccgccttcatgtttcatcctgtacacctggctctgccttctagatagcagtagtaaattagtaaaaatactaatagtccctgatatgcggaaataatggcataagctgtctttctctctgtctcctctccctctctgcctcggctgccaggcagggaagggccccctgtccagtggacacgtgacccacgtgaccttacctatcattgcaggtgactcacattctttaccctgccccttctgccttgtatccaataaataacagcgcagccagacattcggggcactaccgttctccgcgcat

SEQ ID NO: 591051 - DNA, 423 bp, Homo sapiens
agtaaaaatactaatagtccctgatatgcggaaataatggcataagctgtctttctctctgtctcctctccctctctgcctcggctgccaggcagggaagggccccctgtccagtggacacgtgacccacgtgaccttacctatcattgsaggtgactcacattctttaccctgccccttctgccttgtatccaataaataacagcgcagccagacattcggggcactaccgttctccgcgcattggtggtagtggccccccgggcccagctgccctttctcttatctctttgtcttgtgtctttatttctacactctctcgtcgccgcacacagggagagacccaccgaccctgtggggctggtccctgcagggttataggcatgagccaccatgcccggcctgcttttttctttttcaaaa

SEQ ID NO: 591052 - DNA, 423 bp, Homo sapiens
agtaaaaatactaatagtccctgatatgcggaaataatggcataagctgtctttctctctgtctcctctccctctctgcctcggctgccaggcagggaagggccccctgtccagtggacacgtgacccacgtgaccttacctatcattgcaggtgactcacattctttaccctgccccttctgccttgtatccaataaataacagcgcagccagacattcggggcactacygttctccgcgcattggtggtagtggccccccgggcccagctgccctttctcttatctctttgtcttgtgtctttatttctacactctctcgtcgccgcacacagggagagacccaccgaccctgtggggctggtccctgcagggttataggcatgagccaccatgcccggcctgcttttttctttttcaaaa

SEQ ID NO: 591053 - DNA, 441 bp, Homo sapiens
agtaaaaatactaatagtccctgatatgcggaaataatggcataagctgtctttctctctgtctcctctccctctctgcctcggctgccaggcagggaagggccccctgtccagtggacacgtgacccacgtgaccttacctatcattgcaggtgactcacattctttaccctgccccttctgccttgtatccaataaataacagcgcagccagacattcggggcactaccgttctccgcgcattggtggtagtggycccccgggcccagctgccctttctcttatctctttgtcttgtgtctttatttctacactctctcgtcgccgcacacagggagagacccaccgaccctgtggggctggtccctgcagggttataggcatgagccaccatgcccggcctgcttttttctttttcaaaaggactctttctagattat

SEQ ID NO: 591054 - DNA, 527 bp, Homo sapiens
agaattcatatctaagttacccaaacagtggcaagaacagtaataatgattattttagttcatctttacactgcacttgctatgggcagttctagctgctttccacatattaaactcatttaagtcttacaacaactctgggtagtatgaccccctttctcagtgacaagcaaattaacgcttggtaacatccagtcatgcagctgaggacagagctcaaacccaaacctgggcagtccggcggtctgtgccccaaacagcggctctgtgactcctcagtgcgatgagaaacagggcgtgccaagctctcgaattttaacaaaggagatcaaaaaccctaaactaaatgtatttcaaaagctacaatttttattagtatacaaaaagggcaatcttgctttcaagacaagaatgtgattcttgcatctcacctgccttttgattttctaagtttccatgctctyttttctgtggttacttctcacatattgaagacaaagcatgagaagtggagctctaagcaaatt

SEQ ID NO: 591055 - DNA, 530 bp, Homo sapiens
ctgagcagcccctcctctcccctggtgctgatcagaggtccttgggcakcatcagtcaaagcaagagcgcactcactttggagtcgctcacgaccaggacgcagagaagcaggcgcgccagcagggctctcatggtggcgaggtcggggcgctagacggcggctctgcaaaggaaggagaagtcagggcaagaggcggaggaacgggaaggcaggccaggcgggcgactgcagcgcaggggagatgcccgcggtgaccaggctccccagctgtctctctcctctatgggctccggactccgggcagcctggatcggcacccgcgggggacgcccgggacggggcgccttgactccgtgcagccgccggggagcccagggagcccgggcagcccagggcgggggaggcagacgctcgggagctggggccgccgcgcatccggcccggggatctcaggaccgcggcactcaccggtggctgcggcaggagggcgcgagccggcgctgcggggacaggtggaccctggcccgg

SEQ ID NO: 591056 - DNA, 530 bp, Homo sapiens
ctgagcagcccctcctctcccctggtgctgatcagaggtccttgggcagcatcagtcaaagcaagagcgcactcactttggagtcgctcacgaccaggacgcagagaagcaggcgcgccagcagggctctcatggtggcgaggtcggggcgctagacggcggctctgcaaaggaaggagaagtcagggcaagaggcggaggaacgggaaggcaggccaggcgggcgactgcagcgcaggggagatgcccgcggtgaccaggctccccagctgtctctctcctctmtgggctccggactccgggcagcctggatcggcacccgcgggggacgcccgggacggggcgccttgactccgtgcagccgccggggagcccagggagcccgggcagcccagggcgggggaggcagacgctcgggagctggggccgccgcgcatccggcccggggatctcaggaccgcggcactcaccggtggctgcggcaggagggcgcgagccggcgctgcggggacaggtggaccctggcccgg

SEQ ID NO: 591057 - DNA, 531 bp, Homo sapiens
gtattattgtcattttattctaaacctataaaaagactcatgtatagttgtaagagtagaacattatggctatgaaaatacatataaataacagaggaagtcatcagatacaggatctaattcatattaaaaagtgatctgaggctgggcgcggtggctcacgcctgtaatcccagcactttaggaggccgaggcgggaggatcatgaggtcaggagatsgagaccatcctggctaacacggtgaaactctgtctccactaaaaatacaaaaattagccgggcgtggtggtgggtgcctgtaatcccagctactcgggaggctgaggcaggagacccacttgcacccaggaggcggaggttgcagtgagccgagattgtgccattgcactccagcctgggtgacagagtgagactccatctcaaaaaaaaaaaaagtgttctcagagatatgaggataagaattttgatttaacaccaataggaagattatgccatacatctttaaagattctttaaacaagaggtcaaga

SEQ ID NO: 591058 - DNA, 398 bp, Homo sapiens
aaacatggttttagaaactaaacccaacatttccagcaaccatagaaacagttaaaataaaatttgccatgaaagcccttatatcatgcttgatacagggaggtaggaagatgtaagaaccaggacacatgagacakgacattttatctacaactcctgtttgctttactgagggtgtagtttcaaaattcagtcaccttcttcagcttcagattcagattcttcttcagcatttttgagccactctccaaactttttcatttgctcaaggaaaacactcttcccctttgcaacatgtgtacctttataccacttcaaaatgggctctttgctcaggactacagctttataaaaagcaccactattttccggaaggctttcatgaaatgaatgttgtc

SEQ ID NO: 591059 - DNA, 398 bp, Homo sapiens
aaacatggttttagaaactaaacccaacatttccagcaaccatagaaacagttaaaataaaatttgccatgaaagcccttatatcatgcttgatacagggaggtaggaagatgtaagaaccaggacacatgagacaggacattttatctacaactcctgtttgctttactgagggtgtagtttcaaaattcagtcaccttcttcagcttcagattcagattcttcttcagcatttttgagccactctmcaaactttttcatttgctcaaggaaaacactcttcccctttgcaacatgtgtacctttataccacttcaaaatgggctctttgctcaggactacagctttataaaaagcaccactattttccggaaggctttcatgaaatgaatgttgtc

SEQ ID NO: 591060 - DNA, 398 bp, Homo sapiens
aaacatggttttagaaactaaacccaacatttccagcaaccatagaaacagttaaaataaaatttgccatgaaagcccttatatcatgcttgatacagggaggtaggaagatgtaagaaccaggacacatgagacaggacattttatctacaactcctgtttgctttactgagggtgtagtttcaaaattcagtcaccttcttcagcttcagattcagattcttcttcagcatttttgagccactctccaaactttttcatttgctcaaggaaaacactcttcccctttgcaacatgtgtacctttataccacttcaaaatgggctcyttgctcaggactacagctttataaaaagcaccactattttccggaaggctttcatgaaatgaatgttgtc

SEQ ID NO: 591061 - DNA, 398 bp, Homo sapiens
aaacatggttttagaaactaaacccaacatttccagcaaccatagaaacagttaaaataaaatttgccatgaaagcccttatatcatgcttgatacagggaggtaggaagatgtaagaaccaggacacatgagacaggacattttatctacaactcctgtttgctttactgagggtgtagtttcaaaattcagtcaccttcttcagcttcagattcagattcttcttcagcatttttgagccactctccaaactttttcatttgctcaaggaaaacactcttcccctttgcaacatgtgtacctttataccacttcaaaatgggctcttygctcaggactacagctttataaaaagcaccactattttccggaaggctttcatgaaatgaatgttgtc

SEQ ID NO: 591062 - DNA, 608 bp, Homo sapiens
atgtgaaataagctaggaacagaaatataaasttcatatgttctcacctatttgtgggagctaaacattaaaacaatgaactcatggagatagtagaagaattgatactggaggctgggaaggactgtggggtcggggggaggaagtggggatgcctaatgggtacaaaaacgtagagagagtaagaaccagtatttcatagcacaaaagggtgactatagtcgataatttaattgtacagtttaaagtaactaaaagagtataattggattgtttgtaacacaaaagataaatgcttaaggtgatggatactccatttactctggtgtgattattatgcattgcatgcttgtctcaaaatacctcatgtactacataaacatatacacctattatgtacccacaaaaaggaaagagaaaaagaaatattacctgttgggtactatactcactacctgggtggcaggattattcataccccaaacctcagcatcacacaatattaacaagcctgcacatgtactcataaaataatttttgaaaaatctgggttctgtgcaaattcaacctttcaacactagttatgattcttctaatcataagaggtc

SEQ ID NO: 591063 - DNA, 608 bp, Homo sapiens
atgtgaaataagctaggaacagaaatataaacttcatatgttctcacctatttgtgggagctaaacattaaaacaatgaactcatggagatagtagaagaattgatactggaggctgggaaggactgtggggtcggggggaggaagtggggatgcctaatgggtacaaaaacgtagagagagtaagaaccagtatttcatagcacaaaagggtgactatagtcgataatttaattgtacagtttaaagtaactaaaagagtataattggattgtttgtaacacaaaagataaatgcttaaggtgatggatactccatttactctggtgtgattattatgcattgcatgcttgtctcaaaatacctcatgtactacataaacatatacacctattatgtacccacaaaaaggaaagagaaaaagaaatattacctgttgggtactatrctcactacctgggtggcaggattattcataccccaaacctcagcatcacacaatattaacaagcctgcacatgtactcataaaataatttttgaaaaatctgggttctgtgcaaattcaacctttcaacactagttatgattcttctaatcataagaggtc

SEQ ID NO: 591064 - DNA, 559 bp, Homo sapiens
cttgagccaagggtttgggcaagatgctctttgggatcccttttatttacatgaaacatgcccaaacttaaggggaaagaaagcaccaggtctgaaaataacaaaatagagacagttacttggagaaagactcagggcacctttctatactttggaggttttgcctgtaatttccatcctatctcaagtcttcatcactagtctccatcccaatgctccccakgcatgaggttacaagactggcatcctttaagactcactcaacctgtcatcttttctaagaagtgttcatttgattttaagcctaccttagatgccattcttcaattttccctctataccttgtgcatgtgtcaatctttaggccttccacatcataatttgctttaaagcatctgtgttctaccattacccaccagactgtgagttccttaagggcagggatcttagtcatctttgtccatctaatactgaagcagtgcctctatttgacatataaaactccaataattgtaagttgaaatcaattcaacttatcagaaactatgttttttttttc

SEQ ID NO: 591065 - DNA, 594 bp, Homo sapiens
agctaacatcacttatttattcacattaaatgaattcaatcatgttagtcttgacaagaatctgagtttgaagcaggtgagggggaaagtttggatgaggcttgtttttgtattttctcttttgaactccaacttgcaggatgctagaggctagctttttgttgacagaattgtcaccatccttaagcaaaaaaggctgccatgtctattcccctcccaactatctggatatttgctggaattccaattaatattttatgctatgacacaggatatacatttgctcaaggaactagcaactacactcaaagctggcaagccaataaatctctcaaaaatcatgcctcgtgtaaacgttcaggaagttccaccaaaatgggtacgactattctttccagaattcctctcgcccccagccacagagaaagctttgaagaagaatggtttgaaagattttytgtgtgtttaacatcttaagtccaaaacatttctctgctcaaacaacaaaaacatttatctttttcacttttaccactataggtttagtatactagaaaacacttgtctctactaaaaaatacaaaaattagccgg

SEQ ID NO: 591066 - DNA, 369 bp, Homo sapiens
cttttcagcagatagtggtgcaataaccagayatctacaaataaaaaaaattgatctggaatgatatggcagtgccatggagcctcagttggtctcatatagctagtctcttgctgtccctgccggcagaccactctgtctcctacagggcatgcatgtgcaggatcaggtgatatgcgtgatcagtggctgcagcctagaaagatggcagagcaagagcaaagaaaaaaattccctttgattccagaatatctcctgaaaaagatgaagacttttcaagccctcaaagccatccaggcaaagtaggcacttctggtaaagaatgagcagaggaaaggaagaaggctcaggtttaagcgactggaattc

SEQ ID NO: 591067 - DNA, 555 bp, Homo sapiens
aaaaaaaaacatacatgtggccaacaaacatgaaaaaaaaatcaacatcactaattattagagaaatgcaaatcaaaatcacaatgagatagcatctcacaccagtcagaatgtctattattaaaaagtcaaaaaacaattgatactggtgaggttgtggagaaaamggaatgcttttacactgttggtgggagtgtaaagtagttcaaccattgtggaagacaatgtggcaattcctcaaagacctagaggcagaaataccatttgacccagcaatcccattactgggtatatacccaaaggaatataaattattctattataaagatacatgcatacatatgttcattgcagcactattcacaataccaaagacttaaatgttcatcaatgggcgtcaatgtgctttatccaatgacagacttaataaaaaaaatgtgatacatatactccacagaatactatgcagccataaaaaggaacgagatcatgacctttgcagggacatggatggagttggaagccatcaccctcagtaaactaatgcaaaaacag

SEQ ID NO: 591068 - DNA, 565 bp, Homo sapiens
atgagatcacatggacacttgggagggaattacacacactggggcctgtcagtcrggggggcagggagagggagagcatgaggaagaatagctaatggatactgggcttaatccccaggtcatggaatgatctgtgcagcaaaccatcacggcacatgtttacctatgtaacaaacctgcatatcctgcacatatacctctgaacttaaaagttggggggggtaaagaaaataaatgcaatatttatagaaaatatttaagaaaaaaattttaatccacaaattaggaggaaatacacagaaaccaggtatctgataaaggacttgtgtccagaatacatgaagaactcctataattcaataataagacaaacaattgaattttaaaatggacaaaaatttgaatagacatttaagcatggaagattagcatggctaataaactcagaagatatttaacatcattagtcctcagaaaaatccaattaaaaccacagtgacataccacagcacacccactagaatgactacaatcaaaaagccagacaatacaagtgttggtaaga

SEQ ID NO: 591069 - DNA, 565 bp, Homo sapiens
atgagatcacatggacacttgggagggaattacacacactggggcctgtcagtcaggggggcagggagagggagagcatgaggaagaatagctaatggatactgggcttaatccccaggtcatggaatgatctgtgcagcaaaccatcacggcacatgtttacctatgtaacaaacctgcatatcctgcacatataccyctgaacttaaaagttggggggggtaaagaaaataaatgcaatatttatagaaaatatttaagaaaaaaattttaatccacaaattaggaggaaatacacagaaaccaggtatctgataaaggacttgtgtccagaatacatgaagaactcctataattcaataataagacaaacaattgaattttaaaatggacaaaaatttgaatagacatttaagcatggaagattagcatggctaataaactcagaagatatttaacatcattagtcctcagaaaaatccaattaaaaccacagtgacataccacagcacacccactagaatgactacaatcaaaaagccagacaatacaagtgttggtaaga

SEQ ID NO: 591070 - DNA, 633 bp, Homo sapiens
atctgggtatggtggcacatgtctgtagtcatagctactcaggtggctgaggcaggaggattacttgagcccaggagtttgaggctgcagtgaactacaattatgcagctgygcttcagcttgggcaacagagccaggccctgtctctaaaaaataaaataaataagtattcaagtaaaaaatgcacaagtttaatcttatcatgaggaaatatcagagaactccaaaataaatattctataaaataactatgtgtatttttcaaaaatattaatcacatgcaaattacaaagggctaggaaactgttccagataaaaggtaactagagacatgacacttgaaaataatacatgatgtcaatatgcatcttgtaggcaaaaaaagattaggtatagatagagagataaatagagatagagatattttaaagatattattggtacaattgaaaaaattggaaaatggactggattatgtccagtatggcataaatgtccaatttttctgaatttgaaaactatactaaagtaatgtatgagaatattcttgttcttacaaagtataaactaaaatattatagaggaaaggggcctaatgtatacaccttactcaaatggttcagggaatagata

SEQ ID NO: 591071 - DNA, 590 bp, Homo sapiens
tcaaccttggatcgtgggttggatggggagttaaggagaaactacaactttagctacactgtatagatgttttttaatgtattcagatattattacttgtatgtataaaaataaacaaacttttaaagccacttacttctgcactatagaagataactgagccaccctcattacagccattaccaagggcastgtctggtccaagccctcagcctgagcctcagggtctcagatgaagcagcaaagaatcagagttcccaccatcagatgcccccttcagaaagaagaaacaaaattatgactagacaattataactcaaccctcaaccagattcctctggagaacacatgggaaacacctgaggcatataagataaaggaagcaaacatccagcttggccaagatctgcctgagcatgaaggggttcaatattgcagggaaaagggtaagtgagagagttcagctgtccagcaagcctgtggactgctacaatctgaaccacaggagagctcttctacccgcacaaatctgacactggcatagacagtgagttacaggccccatgagggcactgcagcagacaagcgac

SEQ ID NO: 591072 - DNA, 554 bp, Homo sapiens
atatttatatctgataaaacagacttcaagtcaagagcagtaaaaagaaaaaaaaagatgatgaaggtcattatatagttacaaagggatcaatccagcaagaagatataacaattctaaatatctatgcacccaacactggagcacccagaattataaagcaaatattactgaatctaaacagaaagctagactgcaatacaataatagtggacttcaacaccccattctcagcattacacagatcatctagacagaaaatcaacaaagaaacattggatttaaactggactttaagacaaatggacctaaaagacatttacacaacattctatccaacaattgcagaatatacattcttttcattagcaaatgaaacattctccaagatagattatatgttaagccacaaaacaaatctaaaaaattttttaaatcaaaatcatatcaagtatcttctcagactacaatggaacaaaaccacaaattaataccaagaggaactytgaaaatcatacaaatatatgaaaattaaacggtgtgctcctgaatga

SEQ ID NO: 591073 - DNA, 583 bp, Homo sapiens
tgtctagtacaataaaaataatgtcaccctcaagggcaaattttgggtaagtttgcctgcagcccgttataaaagattggagtttcctaagcctgaggtccttcagctttgacaacaactcagtgcatatgcatccacatgagccagctctgtgtcactcctgtgggacttgagggtgttgggaagaagcaaggggaattgacatgacaaacaacttcatgctgcytgatgaaccatgagtagtgaaatcctttgtctccaacccagaggtctcatgtcttctgccaacatctatgaaactgtggcagactaacttgttagtttgcaagtaaggtaaaatttcagatcttaacagttcctaacaaacaggccttgagacaacctgctaggtaactggtcagcgaaaccacaggaagagcagccagatgggatcatcctctcctttgacccttacttgctaagaccaggtaatgatatatagcccaagtggggtcagtaagggagaccacagaatgagggtagtacatggagtgcctgaacacaccctgaagaacagggtgctcccacagccaaaagacaaact

SEQ ID NO: 591074 - DNA, 282 bp, Homo sapiens
ataaagatatgagaagttactttttcctctggataaaacaaatcagctaacacagatggtcaccctacttaccaggtaaagtgaggattcatatgtgtgacaaatggtcctgtcaagtcctcttacttgaggactagttattgtctatattgaaaacatatgtaatgagttgtctctgcttggctatatataagggcraggtttctttctgtttttgtaatctcttactgattacctgtgatgtgaatcacattctggtttaatgcttatttaatgataaaa

SEQ ID NO: 591075 - DNA, 593 bp, Homo sapiens
taaatttattctccctggtttaacctcttttaatagacaatgacgacaatacaattgtccataaaatattaccacaaatttttaaaatattttcccaaaccgcttttttctacaattctattttgctcctagaaaatcggggtggggggagaattattcattaatgagagccaasgtgtcttggtagaaggttgatcgccattactgtccgactgtaaagtataagcctaggaatatatataaaaaccacagcaaagggttacagttatcatctcatcaattttcttatccttttatagttttttcaagtaaaagtgcacttaattccaaactttaaaaatgtataagcaaatgccctcatcagtaaagaacttaaaagttaattcttccatttaagcatggactcatttcaggcaattttttttggtaagattgttcctaaattttgagtgataataggaaaatgttctgacaaaagaaaatgttaaattatatttagtgtaaatataagtaatacaaacaaggtagcctattgaaaattatgacatatcctattttaatgtgaccaattccttttaccacagaaaaatgga

SEQ ID NO: 591076 - DNA, 552 bp, Homo sapiens
tgatagccaaaagctgttttcacagtgatgaaaaggaaagatgtggtggtcaggaaagtatccaaaacattttttctataataaaatgattcaaggatcttaacatagaagaattggtttatatattgtcttctggtctttcccttgcctgctaattggcaactaactatatcagctgaacaacagtggcaaaactcacaaagataccctggcaacaaaggacttggcagctatgtaatgtactatgcaatgactacctgtctatgagtgtacagcattctgaaaactcctttctaattcacattcttcctcctattctgtgtcctattttgcgtcttctagacaaattcttatttatcaaacttwtatgtgcataagaatcacctggagttctcattaaaatacaaattcccatgcaacagatctggggtgggtcctgagatgctgcatttctaaggagctccctggtgatgcccatgctgctatccactgcccacatcttgaggtcaagcttctgatttctaaatctaagctctaggtgagtattgtcaa

SEQ ID NO: 591077 - DNA, 561 bp, Homo sapiens
aaaatactacgtagccactaagaaaattaggctaattttcttatcacatcaatgcattctgatgtgataggagcattaagatatattaagtaaaatagtaggacatgaattaattcccatatttttagatgaactcatttgtaaaaaaaaaaaagtaaacgatacaatatatgcaacagatatactcactgaaaacaaaatacattcacacacatgtatatacgtatacttacacaaagataagacatttgtggagaaaatttttagtcattaaaatgggtgctagaaaatgggctgggagttagcctagagctaagaagagagaatttccatcacataattattagttctgtttgttatcatttatattattttataacaaaacaacaaattcagtataattagtacaaatatataagcataatattagaaagttctcattaataaaatttcagctaaccagcatttgctaaatatattttaaatatacataagggtttgagcaattctgattatatatatgtatatatatatatatatatayatatatatatgtaatag

SEQ ID NO: 591078 - DNA, 633 bp, Homo sapiens
gggcatggtggcatatgcctgtaatccctgtattaattttataataaggaaatattctgaaactgtattttctgaattattcattttatctataattttcctaggttagataattttacatgagtccaaaaaacaaatattcctataaactaggaaaaatatatgtccactgtagttttttttactattttatcccttcacttatttatttttttagaagttttttaaagctagtatgagttttgcagactctaggaaaaggataaatctatttctccatatcaattgttaacttagaattaggcctttctattaatctcttaaattctatattcatctccccaggacttaacttgaagataactctttaccatctacctacttctcacaaatagtattataaaatactttcagccctgtgaaaagccaggtatgtttgtataagccagaagataatatacaccccaattttttaacctggaaagagactcttaggtgttaaaatgagaaaatagctttaagacacttaattttttcttcatgtttcttgtttcttctattttctttagactttttctattttccttcatctttcttcctgtgcaccamcccccatctaaacatacccccacc

SEQ ID NO: 591079 - DNA, 605 bp, Homo sapiens
gtgctacacacttttaaacaaccaatcctcacaagaactcagtatcacgagaacagcaccaagaggatgacgctaaaccattcatgataactccgtcccatgattctaccaggtcccacctccaacacttcagactacaatttggcatgagatttggtggggatacagatacaaatcatatcatcccacccttgcccctccaaatatcatgtcctcacactgcaaaatacaatcatcccttctcaacagtccccaaaagtcttgactcattccaacatttactcaaaagtccaaagtccaaactctcatctgagataaggaaagtcacttaaawgggtgtaaaataaaaaaaaaaaaaatagttacctccaatatacaatggggatataggcattcagtaaataatccattccaaaagagagaaattggcaaaaagaaaaggcctacaggccccacacaagttcaaaacccagcaggacagtcattaaatattaaatagaaagctccaaaataatctttgtctccatgtcccacatccagggcacacttgtgcaaggggtgtgtttccaaagccttggacagctctgcctctgtggctttccagg

SEQ ID NO: 591080 - DNA, 407 bp, Homo sapiens
gttacagcagtggaaactggaactaggataattcaaggaggtgttcataaattaaaagtgatgtcttaataaagaagatgaaaaagttgggcatccagagtaagtctctgtttcctgactcaagcaatggttgaagagtratgtcatttacagagacacagaatggaagaggaagtctggatgtgaaggagtccatgtgtgtgtggcgggggcaaggggtgggggaagggcatattttgttcaattatagacttgttaaacttgaggtgtccatgagagagtcaactgaagatatcaaacaggctctgaaatctctggatctgctctttagatttgaggccttaattgtaaatatttatttaggagtttttcgtcttgaggaagtccaacacgaaatagacttaaga

SEQ ID NO: 591081 - DNA, 649 bp, Homo sapiens
actgttgggcatgaatctttgatataaaatgcttcacttgttagaattttatttcactatgtttgcttcctcaccctaaatgtgaatggaacaggccattaagaataaaatattcaagcaataaayaattttcctggcctgcatgttctttctggctcagttaaggctgcattctaggggaatgctgccaagcagcaatggaatgaggcagtcatttgggatgtctcagtcttggaggttcaacgagacaggtggctaatttgggtcaatcagtggactgaaggggacagaacttggtctggcagcaagcaagctgttgaggcatctctgaccgctgggagaactgggccagacctcagctgctgggtagcctttcagccttctctggtcttgtgaaaactgatagggataaggttggcatccagtcatagggaatagcactggacaggttcatggttagacatggaggactgttatggggatgtgtttattgaaaatgagatttaagtgcagaaatataattattagaccagttttaagatgatcagaacaagacttagcaattgttttggactagcaatgattctcctgaactactagactagaaatcctgagagtctcccagagaaaagccaagactgatgctgga

SEQ ID NO: 591082 - DNA, 573 bp, Homo sapiens
ttctagtttttatctgaagatatttcctttttcaccataggcctctaggtgctcccagatatcacttcacagtttctatgaaaagagtgtttccaaactgctgaatgagaagaaaggtttaactctgaaagctgaatgcacacatcacaaagcagtttctgagataacttccttcacgkttttttgctggttattccgtttttccccattagccccattaagctctcaaatatcccttcacagattctacaacaacattgtttccaaaacgctgaatccaaagaaaggcttaattctgggagacgaatgcaaacatcaaaaagcaatttctcagaaggtttctttctagtttttatcttaagatatttcctttttcatgttaggcctcaatacactcccacatatcccttctcggatattgccaaagcaatgtttccagactgctgaatgaaaagaaaggtttaaccctgtgagatgaatgcacaagtcagaaagcagtttctcaaagagcttccttctagttcttatcctaagaaatttccttttcccccattggccttattgaactccaaa

SEQ ID NO: 591083 - DNA, 573 bp, Homo sapiens
ttctagtttttatctgaagatatttcctttttcaccataggcctctaggtgctcccagatatcacttcacagtttctatgaaaagagtgtttccaaactgctgaatgagaagaaaggtttaactctgaaagctgaatgcacacatcacaaagcagtttctgagataacttccttcacgtttttttgctggttattccgtttttccccattrgccccattaagctctcaaatatcccttcacagattctacaacaacattgtttccaaaacgctgaatccaaagaaaggcttaattctgggagacgaatgcaaacatcaaaaagcaatttctcagaaggtttctttctagtttttatcttaagatatttcctttttcatgttaggcctcaatacactcccacatatcccttctcggatattgccaaagcaatgtttccagactgctgaatgaaaagaaaggtttaaccctgtgagatgaatgcacaagtcagaaagcagtttctcaaagagcttccttctagttcttatcctaagaaatttccttttcccccattggccttattgaactccaaa

SEQ ID NO: 591084 - DNA, 588 bp, Homo sapiens
tatttttgtccattctgcaaatggacatttggaaactcattaaggccaatgatgaaactgcaaatatcctaggataaaaactagaaaagagctatctgagaaccggctttctgaggtgtgctttcacctaggagagttaaaactttcctttaatacagcattctggaaacactgttttggcagaatctgtgaagggatattttggagggcattgaggcttatggtggaaaaggaaatatcttcagaaaaaaactagaaagaaactttctgagamgctgctttgtgatgtgtgcattcagcttatagagttaaaccttcctttggattcatcagtttgataacactgttcttgtagaatctgggaagaaatatttgggagcttaattaagcaaaatgctttgagaaagtgaatatcccacgataaaaaccagagagaagcttaatgagaaacttgcttgggatgtgtgcattcatctcagacagtaagactttccttggttgcagcagtttggaaacattgttttaaccattctggaactggacatttgtgggcttattgaggccaacggtaaacaaagcaaatatccc

SEQ ID NO: 591085 - DNA, 487 bp, Homo sapiens
accggctttctgaggtgtgctttcacctaggagagttaaaactttcctttaatacagcattctggaaacactgttttggcagaatctgtgaagggatattttggagggcattgaggcttatggtggaaaaggaaatatcttcagaaaaaaactagaaagaaactttctgagacgctgctttgtgatgtgtgcattcagcttatagagttaaaccttcctttggattcatcagtttgataacactgttcttgtagaatctgggaagaaatatttgggagcttaattaagcaaaatgctttgagaaagtgaatatcccacgataaaaaccagagagaagcttaatgagaaacttgcttgggatgtgtgcattcatctcagacagtaagactttccttggttgcagcagtttggaaacattgttttaaccattctggaactggacatttgtgggctyattgaggccaacggtaaacaaagcaaatatccc

SEQ ID NO: 591086 - DNA, 548 bp, Homo sapiens
atatgtgtattcatctcacagagttaaacatttcttgcattcaacagtttggaaacaytgttgttgtagaatctgcaaaggtatatttgggacctcattaaggcccatggtgaaaaagccaatatcccaggataaaaagtataaggaagccatctgagaagccactttttgttatgtgggcattcacctcacagagttaaaccatttatttcattcagcagtccagaaacactgttttggcagaatgcttgatgggatatttgggagcgcattgaggactgtggtgaaaaagtaaatatctgttgaatcagcagtttggaaaaactgtctttgtctattctgtgaatggacatttgggagtgcattgaggcaaatggtgaaaaagcaaatatgccaggataaaaactagaaagaagctacctgagaaacaactttttgatatgcacattcaccacccagagtaaaaactttcttttcatacagcagtctggaagcactgtttttgtagaatatgcaaaataatatttcggagttcatagaagtctctg

SEQ ID NO: 591087 - DNA, 548 bp, Homo sapiens
atatgtgtattcatctcacagagttaaacatttcttgcattcaacagtttggaaacattgttgttgtagaatctgcaaaggtatatttgggacctcattaaggcccatggtgaaaaagccaatatcccaggataaaaagtataaggaagccatctgagaagccactttttgytatgtgggcattcacctcacagagttaaaccatttatttcattcagcagtccagaaacactgttttggcagaatgcttgatgggatatttgggagcgcattgaggactgtggtgaaaaagtaaatatctgttgaatcagcagtttggaaaaactgtctttgtctattctgtgaatggacatttgggagtgcattgaggcaaatggtgaaaaagcaaatatgccaggataaaaactagaaagaagctacctgagaaacaactttttgatatgcacattcaccacccagagtaaaaactttcttttcatacagcagtctggaagcactgtttttgtagaatatgcaaaataatatttcggagttcatagaagtctctg

SEQ ID NO: 591088 - DNA, 548 bp, Homo sapiens
atatgtgtattcatctcacagagttaaacatttcttgcattcaacagtttggaaacattgttgttgtagaatctgcaaaggtatatttgggacctcattaaggcccatggtgaaaaagccaatatcccaggataaaaagtataaggaagccatctgagaagccactttttgttatgtgggcattcacctcacagagttaaaccatttatttcattcagcagtccagaaacactgttttggcagaatgcttgatgggatatttgggagcgcattgaggactgtggtgaaaaagtaaatatctgttgaatcagcagtttggaaaaactgtctttgtctattctgtgaatggacatttgggagtgcattgaggcaaatggtgaaaaagcaaatatgccaggataaaaactagaaagaagctacctgagaaacaactttttgatatgcacattcaccacccagagtaaaaactttsttttcatacagcagtctggaagcactgtttttgtagaatatgcaaaataatatttcggagttcatagaagtctctg

SEQ ID NO: 591089 - DNA, 518 bp, Homo sapiens
tttctcacaaggctttcttatagtttttatcctggaatatttgatttttcaccattggcctcaatagctcccaaatgatcatttgcagaatggacaaaagaaatgtttccctactactgaatcaaaagaaagatttcactctgagagctgaatgcacacattacattgcagtttcttagaaagcttctttctagttttcatctgaagacattttcttattcactgtaggcytcaatgcaagcccaaacatccctttgcagattctagaaaagcagtgtttccaaactgctgaatgaaaagtaaggtttaactctgtgagatgaatgcacacatcacaaagcagtttcccagagagattccttctagtttttttcctgggaaaatttattttttgctgttggcctcttttttttatgttttattcttttttttattatacttttagttttagggtacatgtgcacattgtgcaggttagttacatatgtatacatgtgccatgctggtgcactgcatcc

SEQ ID NO: 591090 - DNA, 354 bp, Homo sapiens
agcttccttctagttttaaaactgggatatttgcttttccaccattggtttcagtgagctcccaaacgtgcattcacagaatggacacaaacagggtttccaaacttctgaatccaaagaaaggtttaactgtctgagatgaatgcacacatcatgaattggtttctyatgtaacttccttctagtttttatcctgggatattcgcttttaccccatcagcctcaatgaggtcccaaatgtccattcacagaatcgacagaaacagggtttccaaactgctgaatctaaagaaaggtttaactttgtcagatgaatgaacatatcacaaagcagtttctcagaaagcttctttc

SEQ ID NO: 591091 - DNA, 526 bp, Homo sapiens
tcaagagttgaaacatttttttgattgagcagtttggaaaacatcttttttaagatctataaagggatatttgtgagcactttgatgcttatggttaaaaagctgatatcttcacataataactagattgcagtttgtgagtaacttctttgtgatgtttgtattattatcacacagttgaactattctaattattgagaagcttggaaactgcctttttgcagtgtctgcaaatgcatattgttgagtgctttgaggcctatgttgaaaaaggaaacatcttcacatgaaaaaaagaaataagctttctgagaaactgcttagttatgtgtgcattcatctcacagaggtaaacttttctattcactgagcacgttggaaactctgtttctctagaatctgcaaagagatacttgtgagtgcattgaggcctagtgtcaaaaaggaaataycttcacataaaaataagacagaagcattctgagaaacttctttatgatgtgtgcattcaactcacatatttgaa

SEQ ID NO: 591092 - DNA, 573 bp, Homo sapiens
caaatagctcccaaacgtccaatcacagaatggacaraaacaatgtttccaaactgctgaatgaaaagaacagtttaactctgctaggtgaatgcacacatcacaaagtggtttctcagatagcttccttctagttttaatcctgggatattcattttttcacctttggcctcaatgggctcccaaacctccacttacataatggacaaaaaaagtgttaccaaactgcagaatccgaacaaaggtttaagtctgtgaaatgaatgcacacaacccaaactattttctcattaagattgtttccagtttttatttgaaaatatttctgttttcaccatgggcctcaatgcattacaaaatatcctttcacagattctaagaaatcattgtttccaaactgctgaatgaaaagaaagatttaactgtgtgagataaatgcacacatcacaaatcagtttctcagaaaacttgcttctagtttttatcctggtgtattcactttttgccattgccctcagtgagttccccagtgctgaatccaaagaaagttttaactctgtgaagtgaatgaat

SEQ ID NO: 591093 - DNA, 502 bp, Homo sapiens
catataactactttctagtttttatcctargatattcacttttgcatcactggcctcgatgaactcaaaaatttccattcgcagaaaggataaaaacagtgtttccaaactgctgaattaaaagaaaggtttaactatgtgagatgaaagaatgcatcacaaagcactttctcagaaagcttctttctagtttttatctgaagatatttcctttttcgccataggcctcaatgagctgccaaatatccctttgcagattccacaaaaaaagtgtttccataccggcgaatgaaaagaaaggtttaactctgctaaatgaatgtccccatcacaatgcagtttctcagatagcttccttctagtttttatcctgggatattcgctttttcaccatttgcctcaatgagatcccaaatgtccattccaagaatggacaaaaacagtgttcccaaactgctgaatccaaagaagggtttaactctctgagatgaatgcacacata

SEQ ID NO: 591094 - DNA, 502 bp, Homo sapiens
catataactactttctagtttttatcctaggatattcacttttgcatcactggcctcgatgaactcaaaaatttccattcgcagaaaggataaaaacagtgtttccaaactgctgaattaaaagaaaggtttaactatgtgagatgaaagaatgcatcacaaagcactttctcaraaagcttctttctagtttttatctgaagatatttcctttttcgccataggcctcaatgagctgccaaatatccctttgcagattccacaaaaaaagtgtttccataccggcgaatgaaaagaaaggtttaactctgctaaatgaatgtccccatcacaatgcagtttctcagatagcttccttctagtttttatcctgggatattcgctttttcaccatttgcctcaatgagatcccaaatgtccattccaagaatggacaaaaacagtgttcccaaactgctgaatccaaagaagggtttaactctctgagatgaatgcacacata

SEQ ID NO: 591095 - DNA, 502 bp, Homo sapiens
catataactactttctagtttttatcctaggatattcacttttgcatcactggcctcgatgaactcaaaaatttccattcgcagaaaggataaaaacagtgtttccaaactgctgaattaaaagaaaggtttaactatgtgagatgaaagaatgcatcacaaagcactttctcagaaagcttctttctagtttttatctgaagatatttcctttttcgccataggcctcaatgagctgccaaatatccctttgcagattccacaaaaaaagtgtttccataccggcgaatgaaaagaaaggtttaactctgctaaatgaatgtccccatcacaatgcagtttctcagatagcttccttctagtttttatcctgggatattcgctttttcrccatttgcctcaatgagatcccaaatgtccattccaagaatggacaaaaacagtgttcccaaactgctgaatccaaagaagggtttaactctctgagatgaatgcacacata

SEQ ID NO: 591096 - DNA, 575 bp, Homo sapiens
  misc_feature 264, 318: n = A,T,C or G
cttttcacaatagcatcaatacactactaaatattcctttgtgaatctgccaaaacagtgttctcagactgctgaatgtaaagaaaggtatatctctgcatagtgaatggacacatcacaaagtactttcttgaagagcttacttctggtttttattctgagatattctttttttggccattgacctcaatgagctcccaaatgtccatttgcagaatggagaaaatcagtgtttgcaaactgctgaatgcacagaaaaattantctttgtgggatgaatacacayatcacaaagctgttttaaagaaagcttcttcntggtttttatctgaagatattcccttttttcaccagagccctcaatgcactcccaaatataactttgctgattctacaaaagcaatgttccaaactgctgaatgaaaacaaaggtttaactctctgagatgaatgtacacatcacaagtttctcagaaagcttcgttctagtttttatctgaagttatttcctttttcacaataggcctcaatgcgctatgaaatatctctttgcagattctgcgaaaagagtgttt

SEQ ID NO: 591097 - DNA, 638 bp, Homo sapiens
tccaaactgctgaatgaaaagaaaggtttaactctgtgagaggaatgcacacatcacaaagtggtttctcaaatagcttccttctagtttttatcctgggatagttggtttttccccttttgcttaatttagctcccaaatttcccttcacagattctacaatgacaatgtttccaaaccgctgaatccaaagaaaggtttaactctgtgaggtgaatgcacacatctcaaagctgtttctcagaaacttcctttaatttttatctgaagactttttacsacagaccccaaatatcccttcgtgaattcttccaaaacagtgtttacagattgcagaatgaaaagacagttttaactctttgaggtgaatgcacacatcacaaagtagtagctcagatagctttcttcccatttttatcctgggatattggcttccttgtcattggtctcaaggagctcccaaatatccgtttgcagattctacaacaacggggttttcaaactgctgaatctaaagaaaggtttcattctgtgagatgaatgcgcacatcacaaagcagtttctgtgaaagcttctttgtggtttctatcagaagatatttcctttttcactgtaggcctcaaatgcactccagata

SEQ ID NO: 591098 - DNA, 638 bp, Homo sapiens
tccaaactgctgaatgaaaagaaaggtttaactctgtgagaggaatgcacacatcacaaagtggtttctcaaatagcttccttctagtttttatcctgggatagttggtttttccccttttgcttaatttagctcccaaatttcccttcacagattctacaatgacaatgtttccaaaccgctgaatccaaagaaaggtttaactctgtgaggtgaatgcacacatctcaaagctgtttctcagaaacttcctttaatttttatctgaagactttttaccacagaccccaaatatcccttcgtgaattcttccaaaacagtgtttacagattgcagaakgaaaagacagttttaactctttgaggtgaatgcacacatcacaaagtagtagctcagatagctttcttcccatttttatcctgggatattggcttccttgtcattggtctcaaggagctcccaaatatccgtttgcagattctacaacaacggggttttcaaactgctgaatctaaagaaaggtttcattctgtgagatgaatgcgcacatcacaaagcagtttctgtgaaagcttctttgtggtttctatcagaagatatttcctttttcactgtaggcctcaaatgcactccagata

SEQ ID NO: 591099 - DNA, 637 bp, Homo sapiens
tcccaaactgctgaattaaaagaaaggtttacctctgcgagatgaatgcacacatcacaaagtggtttctcaggtactttccttctagtttttgtcctgggatgctcactttctcaccattggcctcaatgaacttgaaattatccctttgccgattctacaaaaacagtgtttccaaactgctgaagaaaaaatgttttatctcagtgagatgaatgtagatatcacaggtggtttctcagaaaccttccttctagtttttaacctgagatattggctttttcccatggcctcgatgagctatcaaatatcccttcacagatgctacaaaaacttttttctccaaattgctgaatccaaagaaatatttcaatttttgaaatgaatgcacacatcacaaagcagtttctcagaaagtttctttctartttagatctgaaaatatttttttttcaccatagaccttgatgcactcccaaatataccttcatagatactaccaaaacagtgtttccaaactgctaaatgaaaagaaaggtttatctctgcgagatgaatgcatgcatcacaaagaggtttctaagatagtttccttctaatttttgtcctgggatgttttatttttctccattggcct

SEQ ID NO: 591100 - DNA, 642 bp, Homo sapiens
atctctctgagtcatattgaaagaaaagaactgttatagaaataaatgtaataaaatatgtgacagtacctactgcagtacctatgcaaagatattagctatttgttttccctctaacatccagttgattgcctgtgtacagtaggtggttaagtaaaggtattatatttaaacatgtatacataaatatacgtaagaaaaaactatacccacatgcagtatgaatataacttcrtttcaatttctctgtttagaatttaaagaatatttctactgaatttcatgttttctctttaaactgaattcatcctggtatataccaatctatataattttcttttctaccaaaagaggtatttgaccaagtgaagtactagactgacaaggttctgtctcttaaaaacaaacaaaaattacacatttctttacctgctgtgtttattcgttcatttatgttattcattcaacaaatatgtaaaactctgtgctggaatccatgctagggaaccagaaacagacactattcctacttctgcctccatttggcttacagtctagtaggaagaaatactttagccaaggttcacgcaaacaaacctgaaactgcagctgccacagtgctatgaaggacaagtgcagtct

SEQ ID NO: 591101 - DNA, 642 bp, Homo sapiens
atctctctgagtcatattgaaagaaaagaactgttatagaaataaatgtaataaaatatgtgacagtacctactgcagtacctatgcaaagatattagctatttgttttccctctaacatccagttgattgcctgtgtacagtaggtggttaagtaaaggtattatatttaaacatgtatacataaatatacgtaagaaaaaactatacccacatgcagtatgaatataacttcgtttcaatttctctgtttagaatttaaagaatatttctactgaatttcatgttttctctttaaactgaattcatcctggtatataccaatctatataattttcttttctaccaaaagaggtatttgaccaagtgaagtactagactgacaaggttctgtctcttaaaaacaaacaaaaattacacatttctttacctgctgtgtttattcrttcatttatgttattcattcaacaaatatgtaaaactctgtgctggaatccatgctagggaaccagaaacagacactattcctacttctgcctccatttggcttacagtctagtaggaagaaatactttagccaaggttcacgcaaacaaacctgaaactgcagctgccacagtgctatgaaggacaagtgcagtct

SEQ ID NO: 591102 - DNA, 642 bp, Homo sapiens
atctctctgagtcatattgaaagaaaagaactgttatagaaataaatgtaataaaatatgtgacagtacctactgcagtacctatgcaaagatattagctatttgttttccctctaacatccagttgattgcctgtgtacagtaggtggttaagtaaaggtattatatttaaacatgtatacataaatatacgtaagaaaaaactatacccacatgcagtatgaatataacttcgtttcaatttctctgtttagaatttaaagaatatttctactgaatttcatgttttctctttaaactgaattcatcctggtatataccaatctatataattttcttttctaccaaaagaggtatttgaccaagtgaagtactagactgacaaggttctgtctcttaaaaacaaacaaaaattacacatttctttacctgctgtgtttattcgttcatttatgttattcattcaacaaatatgtaaaactctgtgctggaatccatgctagggaaccagaaacagacactattcctacttctgcctycatttggcttacagtctagtaggaagaaatactttagccaaggttcacgcaaacaaacctgaaactgcagctgccacagtgctatgaaggacaagtgcagtct

SEQ ID NO: 591103 - DNA, 586 bp, Homo sapiens
atgcctggctaatttttctatttttagtagaggcagggtatcaccatgttggctaggctggtctcaaactcctgttctcaggtgaccygcctgccttggcctcccaaaatgctgggattacaagcgtgagccatcgcacccaacctactccatgatttttttgattatttattttgaaattattcagcatcttatctcattattccattattacagtaattatctaccacctgttgaacagtacagtgccaggtactttacaaacaactttgcaactatcttgcaaggtaagaactcctgtgcctgtttcttgcagggaagctgagttgcataaagtgaagccacaaagtcacagagacaggaagtggcagagtcaggatttaagtttacttctgcctgattccaaagctgtactctcttctctacatcacaccacttaactattaagtggtgtgataaagaggtatgcttaagcctcttaaagtatctgtcttaccaaattgctaataaactttgcaaaagtcgaagctagaatctatccccctccaccccttctctttctccctctttctgtgctatgtatata

SEQ ID NO: 591104 - DNA, 582 bp, Homo sapiens
ggcataagaaaagtgatcaaaactaccaaaacaggttaagcctcacttgctttaagcctcttgctgattcaatctatcaatccaacatcttaattattattggaccatatggaaggtagttattcaataataygacaacataataaaaagctttaaaataaaaaaaatagtaaatctgctaatccaatctcacagagcaaaacatttaaatgtcatttgagatattattctcagttaagtatcctattcctgtgcttatggcatgacaatccgattcatgcaattattgtggagaaagagtagtaaaaagaagcaatcatccactggctcagagaccactatcatagctaagacaccctatggattaaaagagtccttaaagcataagagcacattcagagttttatgtacagtataaatgcttagctgtttttcagtgtcaggtgcctacagatttgtggtgtgtggctcattggctgacgtgttaaatccccaaaggttacatcaagcaggcccaagacttgtttaagaaaaattgagaccatgccctcagtctcttaagggagtgatattactaagcag

SEQ ID NO: 591105 - DNA, 526 bp, Homo sapiens
atttataaatacatattgttctttagaaaagttattattatagttatagcaactaacatgtctcataattgtatgtaggcaaatatacctccttcccacattagttagaataatctttggatacagtaacagaaaatccaacaatgttttaaaattgttttaaaatatgttttaaaatataaaagggtttatcatttacctttgaaaataaaaagtcaggaagtagtgtcacctaatgttggattgctgacttaatgatgcctaatatctctccaattatttttggcttatcacctcatagtccccagatggctgctatcctgtaggtattagatctgtgctcaaggcaagaagaagagtggggggagcactagctacaatcatcctcttttaataagaaaacagaagcatctttaccaccgccaccaccactatcacttccagcaagtttctgctcacatatcagtagctgctaggaattttccaatgcttttgtatagccakgcaagaaagaagagtgttagca

SEQ ID NO: 591106 - DNA, 574 bp, Homo sapiens
actcaagtccccactgaattccatataccatgctctaatgagtctgttagagaaacactgggaagataataggatatactacctttattcttaccagtaaatcacctccccaggtaactgttcttacaataaaactaccagctgggtggcaagtctctagaccaagayaaggttgtattttagccctcttgtgcattcagtacatatcttaaaaatcataagaaagatgaaaaataaaataaactcctgctgaataaaggataatagaaagaaaaataagaaaataatttgagaaaattctttgtaacacacctctggcattgcagttaatgctataaaaggcctttgtttctttaagaaaatgaatttatcacaccagttactgataatccaatctctgcccaactggataactgcccaaccaactttcttcatttgataattatttgtaaaatatcccctttcaaaaatgtatagaaatgtctatgtcaggacttcccaaaatggttccctttgttgcaatattttccttactgccgccataacctcatagcctctaagtccttttgccaag

SEQ ID NO: 591107 - DNA, 574 bp, Homo sapiens
actcaagtccccactgaattccatataccatgctctaatgagtctgttagagaaacactgggaagataataggatatactacctttattcttaccagtaaatcacctccccaggtaactgttcttacaataaaactaccagctgggtggcaagtctctagaccaagataaggttgtattttagccctcttgtgcattcagtacatatcttaaaaatcataagaaagatgaaaaataaaataaactcctgctgaataaaggataatagaaagaaaaataagaaaataatttgagaaaattctttgtaacacacctctggcattgcagttaatgctataaaaggcctttgtttctttaagaaaatgaatttatcacaccagttactgataatccaatctctgcccaactggataactgmccaaccaactttcttcatttgataattatttgtaaaatatcccctttcaaaaatgtatagaaatgtctatgtcaggacttcccaaaatggttccctttgttgcaatattttccttactgccgccataacctcatagcctctaagtccttttgccaag

SEQ ID NO: 591108 - DNA, 567 bp, Homo sapiens
tatttaaaaaatcatccgctatatggcatggtcagactgcagtgggatgggacagggataaaatcagggagagtagctaagaagctttgcaataatccaggcaagagacaaatttgtggcttttactagggaggtagtggtagatgtagtgaaaattagtgaaagtccatatatatttgaagattgagccaacaggatttgctgatgaggagctggagaagatgaaataagttgaaaattatctcacaggcyttttgtccttgggccaaaactggaggaatagagttttcagtttctgagatgggaatggcttgagctgatttgcagggctaatttgaagttcagctttagagcattttattttgagaaatgtactggaaaagcaagtagggaggttgaataagcaatcaggcatgttagtcagaagttgagagtgaaatttagcaacagggtgtctaattgtgtcactaggaggagacctcctagtgatctggtgtggacatagaagatttcttcagaaacgggggtcatctcacatagttggtaagaaatatttcataattcata

SEQ ID NO: 591109 - DNA, 527 bp, Homo sapiens
gggctaatttgaagttcagctttagagcattttattttgagaaatgtactggaaaagcaagtagggaggttgaataagcaatcaggcatgttagtcagaagttgagagtgaaatttagcaayagggtgtctaattgtgtcactaggaggagacctcctagtgatctggtgtggacatagaagatttcttcagaaacgggggtcatctcacatagttggtaagaaatatttcataattcatatagcacctaacaaaatatagtttatcacagaattcagtcatatgtagaaatggcattgaggtaattaacagcttttctgtttattttgtgtcaatttctaccaaaatcctaccaaatcataagctgctttacttatttcatgagtcatattaaggttattcaagtatgtgattaatgtgtatgattttctatgccattattgtttttagattatatagatctaataggcagatagctcatatgctatggttggaatatgtttcccaaagatcatgtgttggaaact

SEQ ID NO: 591110 - DNA, 591 bp, Homo sapiens
ttactcttttggaaaacgttcaaggatgcttttatttataaaccaatagatgagaactataatgcatttatagtaagtctggacacttttacagggggcttccyatttgaaataaccaagaagtagaattcaacaatgatatttttccttctaaactttttaaagtgaaaaaatccaatatattcttgaagtcagaaatagtggcatccagggttaaacttcagcattcatgatgctaattagctagccatgactgtatgtataatgaagatattaagctttctctaagaacactgcaacttgaaattcaaataactaacgttatggaataattgtgaaatatgatcaactgatttaaacactacgaaaatgtagcacaattccctttcaagaggaagaacaagtatattctatagacaaatgccaaaatcagaattagcacatagtcaagaaagaaggtgactaagagtacactggtaaccattttgaataaatcactttaaaactagtcacagtgtgaatgagcataattatatggctctcaactctgctcatgtttttctctttcacttgcaaatcccctcaactgtc

SEQ ID NO: 591111 - DNA, 481 bp, Homo sapiens
gaactatgcagtttgggctttatttatgcataattaaaaccaattagctgtggcaccaaatcaaaaaatcttgtttcccttgaagcaagtctttgtagatactaatactgtaatttatgtgtatatatagtaggcgtttcatttgcaagaagtttagaaaatgatcagagcattttcaatattgaaaaatgaagaaattcacaataaattatatatatttatayataattgtgccattggcgagagctatagagaaaaagtgaaacaaataaacaaaaaaaaaaaaaaaaaagaaagtgtcctacttggaaatgtagcccctgaagaagatgcatcctcaattccatctttcacttctctagagcatagaagggtctagaactaaatataatcctttcggagtgacctctggttacattgggtctcaaagtcccaaaagctatgccccaattctcacactttattgtgtgagacaggaggc

SEQ ID NO: 591112 - DNA, 597 bp, Homo sapiens
taaatactgcatggtgctccacaaagagtgccatgactttcttgtgccttacaactgaatatatccttccttctaggcctaaatagctataactctgttatttaagtaggctaatggactctataaaacagaattcatattttgtttctttcatatttctagattacataacaagtttagggggtgtggttagccagatgatggataattgggccacagctttgtttgtttttgtttatttacactaataatgatattttattaaaggctgcaaattttatggtgtatccaacaggctgtgttctgatatttaagaacctgactgacagtaacatggactacagatcatttcttaaataatgctggtaaataactgaatgaagagtggtttttataaaacctaactcctgcctaaaaggttcctttttttccctttctgggccagtgagaatcttccaggccacacccatagtacaaggacttcaccagtcayggccttcctcatctgtttctctagcctcctcttgctagcgtccatgctctcatttcatcatccatgggacttcttgtatgcctttccctcttcctgaaccttcc

SEQ ID NO: 591113 - DNA, 597 bp, Homo sapiens
taaatactgcatggtgctccacaaagagtgccatgactttcttgtgccttacaactgaatatatccttccttctaggcctaaatagctataactctgttatttaagtaggctaatggactctataaaacagaattcatattttgtttctttcatatttctagattacataacaagtttagggggtgtggttagccagatgatggataattgggccacagctttgtttgtttttgtttatttacactaataatgatattttattaaaggctgcaaattttatggtgtatccaacaggctgtgttctgatatttaagaacctgactgacagtaacatggactacagatcatttcttaaataatgctggtaaataactgaatgaagagtggtttttataaaacctaactcctgcctaaaaggttcctttttttccctttctgggccagtgagaatcttccaggccacacccatagtacaaggacttcaccagtcacggccttcctcatctgtttctctagcctcctcttgmtagcgtccatgctctcatttcatcatccatgggacttcttgtatgcctttccctcttcctgaaccttcc

SEQ ID NO: 591114 - DNA, 534 bp, Homo sapiens
atttcggtctttaccccaagcaatcaaaagactaccccatccctctaacagaaaagagtttattttctggcaaattcaaacctgaaaagctacactgaagtatactaggcatagcagtgagacttgggactgacaacctaagactaaaatgagaatgtacatgttgaacttggggcacccagcaccctttccctgccttgcccccagaacactggtagcaggtgtacatcttccatgtaggagcggttggcagtcttctctgggtgtgtggggagtggagtctaaatacatgtacctgaagcaagctctctgtctaatcttgctaacacaaaatccaccaccaaaaccttgcccactggcagggtgccttcttttttttttttttttttgagacagagtctcactctgtcccccaggctggagtgcagtggcacgatctcggctcactgcaaactctgcctcccaggttgacgccattctcctgcctcagcctccccagtagctgggaytacaggcacctgctaccacggccgg

SEQ ID NO: 591115 - DNA, 594 bp, Homo sapiens
ttgcatcctccactagagcttagaatgttgcctacgcatcatcataattgctcaacatctagctttttggaggcttttattttgtgcaacttttgtgaccattttacaaaaataagtaattgtctcctcatctattttgtggatacacaatgaatgttgacctaatgacaactggttgaataccttattgcaaaattgagacttaatatttgaaacacgtattttatttgactctacaaaatataaaatgtgttatgtacayatctaccaagaactcacactgaatggtaattgtagggtattgggtaggagccacgaggtattataaattttctggcactcccatggcagaactgtttaaatgatgaaatttcatttatagcaaaattatcctaactcaaacactagtgaaaaggaaaaataaaaaaagaaaaagaatagctgatagacagaaaactaacatgactgatatggtttggctgtgtcctctcccatactcatcttaaattgtagctcccataattcccagatattgtgggaggaacctgatgagagataattgaatcatagaggtggtttcctccatactgctct

SEQ ID NO: 591116 - DNA, 604 bp, Homo sapiens
acaaacactggcagagcagagctgcactgtcctgggctctgtgtgttgacataaagagtcaaacaaggccaggcacagttggtcacgcctgtaatcccagcactttgggagtccgaggcaggtggatcacttgaggttgagttcgagaccagcatggccaacatggtgaaaccccatctctactaaaaatacaaaaattagccaggcataggggtgggtgcctgtaatcccagctactcaggaggctgaggcaggagaatcgcctgaacccagaaggcagaggttgcagtgagccartatcaaaccattgcactccagcttgggcaacagaatgagactccgtctcaaaaaaaaaaaaaaaaatcagacaaagtgcctaccttcaaaaaacttactgtgagcatagaggagacaaaatggcacacaaaatgcacttgacactatgaagcattagtgctaaaagctaaataaaagttagagatgatgagctcataggagttttaaaatgctagaagaaacagaaaaacttttctggagaaaatgaaacaccatgggccttaaataagagacaaaatgtaaattcacaggttgcaaactcaaatgc

SEQ ID NO: 591117 - DNA, 540 bp, Homo sapiens
atggtgaaacctcatctgtattaaaatacaaaaattagcccagtgtggtggtgcacacctgtaatcccagctactcaggaggctgagacatgagaatcacttgaaccygggaggcggaggttgcagtgagccaagatcatgccactgcactgcagcctgggtaatagagtgagactttgtctcaatacattaaattaaattaataaataaaataaaagaacaatcagaaggctggtgcaggaggtaagtagtagaggagacaaactggggtcaggttggagattatttggggcatgaataaaagcatttatattgattctggaggcagattagagaacaagtacatacagaggtgtgagaggctaagtgtatcatcttgaataaagtcaaacttctctttgtgttggcattcatcctgtctgccaagtataatagctgagtgtaacccaaggcattttagaaatgttagaagtgtcaggaaccatgtaccacacatagacctcaaagcaatgttgctatattagtcttttttctttaact

SEQ ID NO: 591118 - DNA, 540 bp, Homo sapiens
atggtgaaacctcatctgtattaaaatacaaaaattagcccagtgtggtggtgcacacctgtaatcccagctactcaggaggctgagacatgagaatcacttgaacccgggaggyggaggttgcagtgagccaagatcatgccactgcactgcagcctgggtaatagagtgagactttgtctcaatacattaaattaaattaataaataaaataaaagaacaatcagaaggctggtgcaggaggtaagtagtagaggagacaaactggggtcaggttggagattatttggggcatgaataaaagcatttatattgattctggaggcagattagagaacaagtacatacagaggtgtgagaggctaagtgtatcatcttgaataaagtcaaacttctctttgtgttggcattcatcctgtctgccaagtataatagctgagtgtaacccaaggcattttagaaatgttagaagtgtcaggaaccatgtaccacacatagacctcaaagcaatgttgctatattagtcttttttctttaact

SEQ ID NO: 591119 - DNA, 540 bp, Homo sapiens
atggtgaaacctcatctgtattaaaatacaaaaattagcccagtgtggtggtgcacacctgtaatcccagctactcaggaggctgagacatgagaatcacttgaacccgggaggcggaggttgcagtgagccaagatcatgccactgcactgcagcctgggtaatagagtgagactttgtctcaatacattaaattaaattaataaataaaataaaagaacaatcagaaggctggtgcaggaggtaagtagtagaggagacaaactggggtcaggttggagattatytggggcatgaataaaagcatttatattgattctggaggcagattagagaacaagtacatacagaggtgtgagaggctaagtgtatcatcttgaataaagtcaaacttctctttgtgttggcattcatcctgtctgccaagtataatagctgagtgtaacccaaggcattttagaaatgttagaagtgtcaggaaccatgtaccacacatagacctcaaagcaatgttgctatattagtcttttttctttaact

SEQ ID NO: 591120 - DNA, 302 bp, Homo sapiens
agttggttttacagggtcaatacattaacaagatagcaagcaatgcctactcattaaggctcaatttactcccacttcccttgggaagaatcccctctgctcccaaaactcttaccagtggttttcaaaccttactaagcttgagaatcatttgctgggtctggcttattgaaacgcatcctagatttgcacragacagccactggcctatccatcacctttgtgttaattagaaaaagaggaactctttgggcagatgcagcccccacatgtaggaaatatgaaggctaacaagcaaaaag

SEQ ID NO: 591121 - DNA, 585 bp, Homo sapiens
taaaataagaccaaggcctccaaatacccacaccttcctggccttgaccctccaggtctcactctctgagctccaggcagtcaaaacaggtcccaaacacatcctgagcttcttcctgggcccaggctatgccccatgcctgggatgwtcaccttccctttcccccagaggcctggctcagtctatacacgctgccccttccaatcaaatggggtgccacctctccctcactcagtgcccagggtaccttggcatcagcttccagacagtgtctgtcctccagggacttccaaagtaacaagagggctgaggccaggaggaagtaggacacagatatcctctcctactcaggtttgaatcccctgcagtgcctggctctgtgcctggcactcagtagactgttatcccaaaactgctttttgctttgaaatgagctcactgctctgtgggaggcatttctagcacacactgatgtgattgtttagccctcatgaagaccctagaacaatgtcattagatgggctcttggagaacgagttcaattctcccattttacagctagggagactgagacccaaaccagat

SEQ ID NO: 591122 - DNA, 568 bp, Homo sapiens
aattctcccattttacagctrgggagactgagacccaaaccagatgccaggtctcctgccccacaggaccaaagctgtcgccagcccatgctcctctacctcggaggcactcccttcatatcacagaggagcacataaggcctccaggggttaattttggcaatttcctccattaatcacatctctgccaatccactaccaggtaattgaggagtcaagagccactgcagagaaatggagtttcaatttaaaagtccacctacaagtgccatttgggaaacaagaggaaaggaaagtatgtgtgtaccggtgtggaactgtgagcctgtgggtgtttatgaacacgtgtgagtgtgtatgtgtgtgtcagcgagtgagtgtgggggtgccccatgacctctcagaacagcctggtctcctgtttccaggcccactccaggccatgcccacctgcccccgattctccatggctccccccatctgatgggggtcctcaacagaccacagcccttcagcagcccccagctcctcgagggaaactccaccctctcaatgaaacccaaggtct

SEQ ID NO: 591123 - DNA, 568 bp, Homo sapiens
aattctcccattttacagctagggagactgagacccraaccagatgccaggtctcctgccccacaggaccaaagctgtcgccagcccatgctcctctacctcggaggcactcccttcatatcacagaggagcacataaggcctccaggggttaattttggcaatttcctccattaatcacatctctgccaatccactaccaggtaattgaggagtcaagagccactgcagagaaatggagtttcaatttaaaagtccacctacaagtgccatttgggaaacaagaggaaaggaaagtatgtgtgtaccggtgtggaactgtgagcctgtgggtgtttatgaacacgtgtgagtgtgtatgtgtgtgtcagcgagtgagtgtgggggtgccccatgacctctcagaacagcctggtctcctgtttccaggcccactccaggccatgcccacctgcccccgattctccatggctccccccatctgatgggggtcctcaacagaccacagcccttcagcagcccccagctcctcgagggaaactccaccctctcaatgaaacccaaggtct

SEQ ID NO: 591124 - DNA, 568 bp, Homo sapiens
aattctcccattttacagctagggagactgagacccaaaccagatgccaggtctcctgccccacaggaccaaagctgtcgccagcccatgctcctctacctcggaggcactcccttcatatcacagaggagcacataaggcctccaggggttaattttggcaatttcctccattaatcacatctctgccaatccacyaccaggtaattgaggagtcaagagccactgcagagaaatggagtttcaatttaaaagtccacctacaagtgccatttgggaaacaagaggaaaggaaagtatgtgtgtaccggtgtggaactgtgagcctgtgggtgtttatgaacacgtgtgagtgtgtatgtgtgtgtcagcgagtgagtgtgggggtgccccatgacctctcagaacagcctggtctcctgtttccaggcccactccaggccatgcccacctgcccccgattctccatggctccccccatctgatgggggtcctcaacagaccacagcccttcagcagcccccagctcctcgagggaaactccaccctctcaatgaaacccaaggtct

SEQ ID NO: 591125 - DNA, 587 bp, Homo sapiens
acacattaaaaagataacacactatgatcaagtgagatttagcccagggatgcaaatccacatatgcaaatcaataaatgtgatacattacattaacaaaatgaaggcaaaaaccatattatatgtcagtaagtgcaaaaaaatttgataaaatttagcatcccttcatgataactcaacaaactaagcacagaaggaacatacctcaacataaaaaaggccacacatgacaaaccctaacctaacatactaaatggggaaaagctgaaagcttttcctctaagaactggaacaagacaaagatgcccacttttaccactcttattcaatacagtactggaagycctaaccaaagcaatcaggccagaaaaagaagtgaaaggcattcaagttagaaaagagaaagtcatattttctctctttgcggataatatgatcttatatctaaaaaatactaaatactccaccaaaaaaaactcttagactagataaacaaatttagtaaagttgtgggatacaaaatcaacattcaaaagtcaaaaaaaattagtttttttctacacactagtaaactagctgaaaaaaag

SEQ ID NO: 591126 - DNA, 587 bp, Homo sapiens
acacattaaaaagataacacactatgatcaagtgagatttagcccagggatgcaaatccacatatgcaaatcaataaatgtgatacattacattaacaaaatgaaggcaaaaaccatattatatgtcagtaagtgcaaaaaaatttgataaaatttagcatcccttcatgataactcaacaaactaagcacagaaggaacatacctcaacataaaaaaggccacacatgacaaaccctaacctaacatactaaatggggaaaagctgaaagcttttcctctaagaactggaacaagacaaagatgcccacttttaccactcttattcaatacagtactggaagccctaaccaaagcaatcaggccagaaaaagaagtgaaaggcattcaagttagaaaagagaaagtcatattttctctctttgcggataatatgatcttatatctaaaaaatactaaatactccaccaaaaaaaactcttagactagatraacaaatttagtaaagttgtgggatacaaaatcaacattcaaaagtcaaaaaaaattagtttttttctacacactagtaaactagctgaaaaaaag

SEQ ID NO: 591127 - DNA, 566 bp, Homo sapiens
aacaaatttagtaaagttgtgggatacaaaatcaacattcaaaagtcaaaaaaaattagtttttttctacacactagtaaactagctgaaaaaargaaatcaggaaaacaatcccacttacaataactacaaaaaaggataaaatccctaggaataaatttaactcaggaggtgaaagcctctacaatgaaagctacaaaatactgataaaagaaattgaagagaaaacaaacaaatggaaagatatcccatgctcatggatcagaagaattaatattgttaaaatggccacacaactcaaagcaatcttcagactcaatgcaattcctatcaaaatgtcaatgacattctttacagaagttttcataaaacaccaaaattcctatggaaccacaaaagaccccaaatagccaaagcaacaccgagcaaaaagaacaaagctggaggcattatacttcctgacatcaaaatatattattaggctatggtaatcaaaccagaatgatattggtataaaaatagatatatagagcaatggaacagaatggagaattcagaaataaatc

SEQ ID NO: 591128 - DNA, 598 bp, Homo sapiens
accagaaatacagagtgatgttacatcttcaaggtttgctcagggaaataaaaactctctgggtctttgaagcaggaaggttatttaatacaagaaatagatgctgtggtagactgtaaaattgtccctgatgattctcttccctgtatccatgtgatataaatttgaattyggcctgttcttgtaaaatgcattagtgagtccaaccaagaccagaagaaccactcagctgtgcctagcacaaattctgatccacagcattgtgaactaaatatataattgttgctttaagcaactaggttttgggtgatttggtatacagcaaatgttatacagcacttaacagaaattttggaatagctggaaaaaggaaggtcattggatatttatataataaaggttctctataaattttcagaaagtaaaaaagttgcaggatctgcagcagctcctgcaaggatcacagatgcccccaacactgttgcttcaggaaaattttgaggttgttttaaaatctgccatctgccaaagcccaccactctactcaccacagctgaaggtgagtaactccagggctggcaggagccacctcccatat

SEQ ID NO: 591129 - DNA, 598 bp, Homo sapiens
accagaaatacagagtgatgttacatcttcaaggtttgctcagggaaataaaaactctctgggtctttgaagcaggaaggttatttaatacaagaaatagatgctgtggtagactgtaaaattgtccctgatgattctcttccctgtatccatgtgatataaatttgaattcggcctgttcttgtaaaatgcattagtgagtccaaccaagaccagaagaaccactcagctgtgcctagcacaaattctgatccacagcattgtgaactaaatatataattgttgctttaagcaactaggttttgggtgatttggtatacagcaaatgttatacarcacttaacagaaattttggaatagctggaaaaaggaaggtcattggatatttatataataaaggttctctataaattttcagaaagtaaaaaagttgcaggatctgcagcagctcctgcaaggatcacagatgcccccaacactgttgcttcaggaaaattttgaggttgttttaaaatctgccatctgccaaagcccaccactctactcaccacagctgaaggtgagtaactccagggctggcaggagccacctcccatat

SEQ ID NO: 591130 - DNA, 577 bp, Homo sapiens
aaatgagctttcttgctgcaagacttatcagagcctttaatatgccagcgtgcatattaagagaaaaaagataagtagcatttcccgaactcattggatcacagagcgttttattttctcaggcatctgctaggagtagcaaaccatggaacacactttggcaaatgttgactcctgggtcccatgcctcaggaggcccagcagcccttgtcttgtgtgagataaaccagattctttccagtgaatttccttccctgctgaagttaactcaagtcagtttccattacttacaacaatagaaccttgactgagtcatgccctcacttctcagaaaggccaaacctctggagcgcgctgggattacactcaggatagaaggcgagggaagtgtctagggaggcaccagcctgtcagatatggtcatggcaggcttcatctgagacccaccacagaggggtcatccccagaaaagcaygctaaagtgctcatagctcttttttgtttttaattttccttcctggtaagaaatttgccatttttacataagaactgtgacttgtgttttcagattcctgta

SEQ ID NO: 591131 - DNA, 521 bp, Homo sapiens
gtggagtgacaccatgtgcatttcaaaggcagcaatgaaactggatttaagttcgaggagcctgcagcctgggaacctggctaggggacacaagtgtgcagaccagaggtgacaccaaaccaaaccagagcagaggcaccctgggtgagaggagagcgcagactccagagatattggggaggtcaaattgacaggactgaatgtgtggaagatgcaaagagaggagcaggagtaattctcagcatcctgtcctgggttggtgaaagtacaaaccaaccaaggtgggagcagcggaaggaagaaccagctaaagttaaaaagcactggtattgactgagcaccggatctgtgttgggcaccacacagattgctttgtgtaaatttcctcaattaatcctcactgggcaatcctcaaagcaggtactattayggttctcagtttgcagaggaggacactgaaggcacagagggcaattacttgtccagggtcacacagggagggagaaggagagctgggatct

SEQ ID NO: 591132 - DNA, 583 bp, Homo sapiens
tggccagctaattggagccaagcgatagcttttggagaaaccccttagccctgttagggcttagaacaaggggcaattctgcaaggacatttggtgagagggttaagaacttgctgatgtaagcattgtttcctggccatgtccaaatgcttcccaggtagagggcaatgggtatagtgaccatgcagcctaggtgcttggatacatttctaatccccaatacctcttctcaccatccctactggtatytataagttcagatcaagttatatgccacaattctaggaaagaaaatacagtttttatgtatggaggacagaaatatgtacatcggaaataggatccctgttaaatcagaaagaagcccctgccttctgcaggttgcaggtgccagaccttgaaattcattggctggaagaagacagagaaggagcatcatgcaatttgaagctggcaagtctcagagttggtgaaaatcaatactgggagtggccaacaaaacaaacacagttttagtggttgatgccttgtgaactgagcagatctgccgtggatatccaggtcagagagaagtcagagggga

SEQ ID NO: 591133 - DNA, 566 bp, Homo sapiens
ctcaaggacacttgctggaaagagtcaggcatctcagaggcatgttcagggagaggagacactgttagcagacagccctgtcctttgtgtctgggataaggagaaagaagggagaagagggaagctaggcctggaagatagtggtgcgtagcgaaatgaaccaagaagtggaggcaaactggcttggtctaaatttaggtttcatcactttgtacttgtgtgatcttggccaaattcggtcccatytctgaacgtcaggtttctcatctattaaaatggaatagtggtatcgtaaaagatgctatcggtgctttgtccatatctcttggcaatcaccgttcctgtgtacccaacctggagacttctgacacaagcacctgtggatatttgtctaagggctttcaggttgttttgagtatgtgtgtacatggcacaggccaggcattgtggggggagttaatccattctcccaactgggagcaaccttcaacccatgactggcaggagttggaggatacatcccccagctccttcatccctcagtggggtgactgaggtgtgctgtg

SEQ ID NO: 591134 - DNA, 608 bp, Homo sapiens
gtccctggctctcatgggcctattgaatctctaggctcggcacatcacagtcctcccagtgcttgccttctctccactaccacaacaactggctaccaaggaagaataagagcagcgcttcttgccttggctgcccactagagtttcctggtgcrcttcaaaaaatcccgatacccagccacacccttgaccaatcaagtcagtatctcaaatgtgggacccaggtctcagtaaatatttttaaagctccctagtgatttcattgtgaagctacagggagaactgctactttagagtggtgattctctacagggggtgattttgtcacctaggggacacatggcaatgtctggagacattgttgattgttacaactggggaagtactaccggcatctggctggtagaggcctgggggatgttgctaaacactctaaagtacataggactgcccctaccacagagaaccatccagccccaaatgtcagtagtggtgggattgagaagccctgccttggatgaagtgggggagttgaccttgctcaccgttcagccttgcaggctgaccatctccctcttacatcttcccagccccctttgaagggagcc

SEQ ID NO: 591135 - DNA, 608 bp, Homo sapiens
gtccctggctctcatgggcctattgaatctctaggctcggcacatcacagtcctcccagtgcttgccttctctccactaccacaacaactggctaccaaggaagaataagagcagcgcttcttgccttggctgcccactagagtttcctggtgcgcttcaaaaaatcccgatacccagccacacccttgaccaatcaagtcagtatctcaaatgtgggacccaggtctcagtaaatatttttaaagctccctagtgatttcattgtgaagctacagggagaactgctactttagagtggtgattctctacagggggtgattttgtcacctaggggacacatggcaatgtctggagacattgttgattgttacaactggggaagtactaccggcatctggctggtagaggcctgggggatgttgctaaacmctctaaagtacataggactgcccctaccacagagaaccatccagccccaaatgtcagtagtggtgggattgagaagccctgccttggatgaagtgggggagttgaccttgctcaccgttcagccttgcaggctgaccatctccctcttacatcttcccagccccctttgaagggagcc

SEQ ID NO: 591136 - DNA, 401 bp, Homo sapiens
tggctcatataataatcctgtgaggaacagagagtaggtgtcatatccgtccattctacagatgcataaactgaggctcagggactttgagtatatgtcaagttagaagtggaattcaggacttccaactttcctaatggtggtctttctcctgcaggggactgagggggacacaccccttcctcatctaagccttttacatctcagatctggtgaatttttctgactccttcaaggcagggcatgcctacacatatggtgtttaccccctgagtttargtgacattatggctagatgacataagacagtggctttttcttttttgagacagggtcttgctgtgttgcccaggctggagtgcagtggcatgatcataactcaccgcaggcttgaacttctg

SEQ ID NO: 591137 - DNA, 577 bp, Homo sapiens
ggctctgctctaagcgatcctggagaccgctttgcaaatcccagtcctagagaggccatgtgaatttccagaggctgcagtcagtcccacacaggaaacagctggaatyccaggaccccagccaggacccgtataggacttaaggccagggctaggtgaacaggctttattagcaatggtaagctcagctgctgagacaaaaatcagccaaatcagtagctagaaaaataatgtccaggttgcaggctgtcccggcccttacagtcttccaggggccctctttctgatttctctcccatcttctcatagggcattgtcctcatctctcttgtgcacactgtggggagggaaaaaggacccaggacgttcttaagtgccagattggaagcagcagacatcactatcaccggcattccagacctcagtcatgtacacaggaggccagaaatgctgtccagctagacagccaaggcccaactacctctgacccccgattccccacccttctcctcacttactacgttctggccactgttccatccaagggcccacactcttcctacctcaggcctttttg

SEQ ID NO: 591138 - DNA, 577 bp, Homo sapiens
ggctctgctctaagcgatcctggagaccgctttgcaaatcccagtcctagagaggccatgtgaatttccagaggctgcagtcagtcccacacaggaaacagctggaatcccaggaccccagccaggacccgtataggacttaaggccagggctaggtgaacaggctttattagcaatggtaagctcagctgctgagacaaaaatcagccaaatcagtagctagaaaaataatgtccaggttgcaggctgtcccggccctyacagtcttccaggggccctctttctgatttctctcccatcttctcatagggcattgtcctcatctctcttgtgcacactgtggggagggaaaaaggacccaggacgttcttaagtgccagattggaagcagcagacatcactatcaccggcattccagacctcagtcatgtacacaggaggccagaaatgctgtccagctagacagccaaggcccaactacctctgacccccgattccccacccttctcctcacttactacgttctggccactgttccatccaagggcccacactcttcctacctcaggcctttttg

SEQ ID NO: 591139 - DNA, 577 bp, Homo sapiens
ggctctgctctaagcgatcctggagaccgctttgcaaatcccagtcctagagaggccatgtgaatttccagaggctgcagtcagtcccacacaggaaacagctggaatcccaggaccccagccaggacccgtataggacttaaggccagggctaggtgaacaggctttattagcaatggtaagctcagctgctgagacaaaaatcagccaaatcagtagctagaaaaataatgtccaggttgcaggctgtcccggcccttacagtcttccaggggccctctttctgatttctctcccatcttctcatagggcattgtcctcatctctcttgtgcacactgtggggagggaaaaaggacccaggacgttcttaagtgccagattggaagcagcagacatcactmtcaccggcattccagacctcagtcatgtacacaggaggccagaaatgctgtccagctagacagccaaggcccaactacctctgacccccgattccccacccttctcctcacttactacgttctggccactgttccatccaagggcccacactcttcctacctcaggcctttttg

SEQ ID NO: 591140 - DNA, 577 bp, Homo sapiens
ggctctgctctaagcgatcctggagaccgctttgcaaatcccagtcctagagaggccatgtgaatttccagaggctgcagtcagtcccacacaggaaacagctggaatcccaggaccccagccaggacccgtataggacttaaggccagggctaggtgaacaggctttattagcaatggtaagctcagctgctgagacaaaaatcagccaaatcagtagctagaaaaataatgtccaggttgcaggctgtcccggcccttacagtcttccaggggccctctttctgatttctctcccatcttctcatagggcattgtcctcatctctcttgtgcacactgtggggagggaaaaaggacccaggacgttcttaagtgccagattggaagcagcagacatcactatcaccggcattccagacctcagtcatgtacacaggaggccagaaatgctgtccagctagacagccaaggcccaactacctctgacccccgattccccacccttctcctcacttactacrttctggccactgttccatccaagggcccacactcttcctacctcaggcctttttg

SEQ ID NO: 591141 - DNA, 565 bp, Homo sapiens
ccaggtgattctcatgtacagcaaaatcaaaaaatagttctctgaggctggaatctgggcatcttcaggtctacatggcccatcggtgaatctctgtggaatacaactgcaccctccactccataagcctactccttggactacaacatggagagagggagttggggaggtgtgaccatgggaatagatgcagaaytggcaaagaggcaagacagactgacccccagggagcatgcagcagccacacgagacagtgcatcatggagcattaggaggaggggaagagagtggaccataagcatcagaggatagaactcctggtcaggagaagggaggtgaagcgccggtccttccaccactagttgggcaactggggcaggctctctctcttgacctcagttaacacaactctaaaatggggcaatagtgatacttcacagcctttctccattaaacaaaacaatgtgtgaagagtgagatcaatgaaactcctaactgccttttattgagcacccactatgtgccaggcctgggccaagcactgtatgatttcatcttcacatca

SEQ ID NO: 591142 - DNA, 565 bp, Homo sapiens
ccaggtgattctcatgtacagcaaaatcaaaaaatagttctctgaggctggaatctgggcatcttcaggtctacatggcccatcggtgaatctctgtggaatacaactgcaccctccactccataagcctactccttggactacaacatggagagagggagttggggaggtgtgaccatgggaatagatgcagaactggcaaagargcaagacagactgacccccagggagcatgcagcagccacacgagacagtgcatcatggagcattaggaggaggggaagagagtggaccataagcatcagaggatagaactcctggtcaggagaagggaggtgaagcgccggtccttccaccactagttgggcaactggggcaggctctctctcttgacctcagttaacacaactctaaaatggggcaatagtgatacttcacagcctttctccattaaacaaaacaatgtgtgaagagtgagatcaatgaaactcctaactgccttttattgagcacccactatgtgccaggcctgggccaagcactgtatgatttcatcttcacatca

SEQ ID NO: 591143 - DNA, 565 bp, Homo sapiens
ccaggtgattctcatgtacagcaaaatcaaaaaatagttctctgaggctggaatctgggcatcttcaggtctacatggcccatcggtgaatctctgtggaatacaactgcaccctccactccataagcctactccttggactacaacatggagagagggagttggggaggtgtgaccatgggaatagatgcagaactggcaaagaggcaagacagactgacccccagggagcatgcagcagccacacgagacagtgcatcatggagcattaggaggaggggaagagagtggaccataagcatcagaggatrgaactcctggtcaggagaagggaggtgaagcgccggtccttccaccactagttgggcaactggggcaggctctctctcttgacctcagttaacacaactctaaaatggggcaatagtgatacttcacagcctttctccattaaacaaaacaatgtgtgaagagtgagatcaatgaaactcctaactgccttttattgagcacccactatgtgccaggcctgggccaagcactgtatgatttcatcttcacatca

SEQ ID NO: 591144 - DNA, 565 bp, Homo sapiens
ccaggtgattctcatgtacagcaaaatcaaaaaatagttctctgaggctggaatctgggcatcttcaggtctacatggcccatcggtgaatctctgtggaatacaactgcaccctccactccataagcctactccttggactacaacatggagagagggagttggggaggtgtgaccatgggaatagatgcagaactggcaaagaggcaagacagactgacccccagggagcatgcagcagccacacgagacagtgcatcatggagcattaggaggaggggaagagagtggaccataagcatcagaggatagaactcctggtcaggagaagggaggtgaagcgccggtccttccaccactagytgggcaactggggcaggctctctctcttgacctcagttaacacaactctaaaatggggcaatagtgatacttcacagcctttctccattaaacaaaacaatgtgtgaagagtgagatcaatgaaactcctaactgccttttattgagcacccactatgtgccaggcctgggccaagcactgtatgatttcatcttcacatca

SEQ ID NO: 591145 - DNA, 452 bp, Homo sapiens
taagtctctgttcatgtgcacaaaagaaataacctgcatttctttgtagacatcctagaattcagttgtggacgaatttatacaatctttctcctttgagtttaaattggcagggcctatctgcccaattgaggcaaacagcaaatatatgtggagtaccactttgtgataagacatatgcaatgccctggggwctcagaggagaatcaaacagagtccctgctgccctggagcttacagcccaggtcagcattcagtgagcctacatgaaagataactaacgaaatgagaataagacatgtatgtcataagtctgaagtaagtgggacagatagaaagttttattgccattcacaggagagggacagcttggcggcctggagcaatcatggaaggcttcctggtggcagactctaggactgggatttgatagagggcttggatatggcagt

SEQ ID NO: 591146 - DNA, 587 bp, Homo sapiens
  misc_feature 560, 561, 562, 563, 564, 565, 566, 567, 568, 569, 570, 571,572, 573, 574, 575, 576, 577, 578, 579, 580, 581, 582, 583,584, 585, 586, 587: n = A,T,C or G
ccctggggagggctcacataggggaccagctccagagagggttagaaaaggaggacaacagattctagagtggacagtaagtgcaagtctggcaagagtaaattttacccttttgggcaataaggagccacagagagtttttgagcgggrttgtggcatgagtagatctcggtttatgaagtcactgtacaagcagttagggagagaagagaatagcaggagatggtatccaaggcagggagacctgttagaaggtggggaacaagtccagaggaggtgatgagacctggattcagggagtggcaggaggtgagggaaatgggttggatgtcatggctggagagggcccaaaggaggagcccctggggctcacgaagaggggagactgctgcctgatacctggggtcctgggaagagttaatgggctgcctgtggacgagctaattggtcctccagtggggctgactcattccagcatccaagccagtcattactaatgctggggagggagagagagagagagaaaataaaacaaaagccgagcagtgggaattccgcgnnnnnnnnnnnnnnnnnnnnnnnnnnnn

SEQ ID NO: 591147 - DNA, 587 bp, Homo sapiens
  misc_feature 560, 561, 562, 563, 564, 565, 566, 567, 568, 569, 570, 571,572, 573, 574, 575, 576, 577, 578, 579, 580, 581, 582, 583,584, 585, 586, 587: n = A,T,C or G
ccctggggagggctcacataggggaccagctccagagagggttagaaaaggaggacaacagattctagagtggacagtaagtgcaagtctggcaagagtaaattttacccttttgggcaataaggagccacagagagtttttgagcggggttgtggcatgagtagatctcggtttatgaagtcactgtacaagcagttagggagagaagagaatagcaggagatggtatccaaggcagggagacctgttagaaggtggggaacaagtccagaggaggtgatgagacctggattcagggagtggcaggaggtgagggaaatgggttggatgtcatggctggagagggcccaaaggaggagcccctggggctcacgaagaggggagactgctgcctgatacctggggtcctgggaagagttaatgggctgcctgtggacgagctaattggtcctccagtggggctgactcatyccagcatccaagccagtcattactaatgctggggagggagagagagagagagaaaataaaacaaaagccgagcagtgggaattccgcgnnnnnnnnnnnnnnnnnnnnnnnnnnnn

SEQ ID NO: 591148 - DNA, 570 bp, Homo sapiens
gagacaactgctggggatgggaaaggaggaaaactaggtctagcctcagaagaatcagccagtcccagctctgtctcagcctggacacacccacaggtagagactgatgcaaatcagcaaatattgaacaaataaaatgagtccataaaagcctgggatgacccacaccaaaagatggcctgtgtttgtgtattagtccattttcactgtgtttgtgtataagtccgttttcatgytgctgataaagacatacccaagactggccaatttacaaaaggaagaggtttaatggactcacagttccacgtggctggggaggcctcacaatcatggcagaaggtgaaaggcacacctcacatggcagcagacaagagaagagtgagagccaagcgaaagggttttccccttataaaaccatcagatcttgtgagacttactcaccaccatgagaacagtgtgcgggaatactcccgtactgggaggaacccagtatctcccactggctccctctcacaacatgagggaattatggaagctgcaattcgagatgagatttgggtggggacacag

SEQ ID NO: 591149 - DNA, 570 bp, Homo sapiens
gagacaactgctggggatgggaaaggaggaaaactaggtctagcctcagaagaatcagccagtcccagctctgtctcagcctggacacacccacaggtagagactgatgcaaatcagcaaatattgaacaaataaaatgagtccataaaagcctgggatgacccacaccaaaagatggcctgtgtttgtgtattagtccattttcactgtgtttgtgtataagtccgttttcatgctgctgataaagacatacccaagactggccaatttacaaaaggaagaggtttaatggactcacagttccacgtggctggggaggcctcacaatcatggcagaaggtgaaaggcacayctcacatggcagcagacaagagaagagtgagagccaagcgaaagggttttccccttataaaaccatcagatcttgtgagacttactcaccaccatgagaacagtgtgcgggaatactcccgtactgggaggaacccagtatctcccactggctccctctcacaacatgagggaattatggaagctgcaattcgagatgagatttgggtggggacacag

SEQ ID NO: 591150 - DNA, 605 bp, Homo sapiens
agtaatactgctgtggtgttgggtgtatatatatttataattgttacagcttcttgctgaattgatcactttatcatcatataatcatctttaagtcaaaaatgataaaaagagacaaagatcattagtctgttttatctaactactcttgcacacttttgatttccatttgtgtggaatatatttttttcatctcttcactttcagtttgtgtgtatctttacaagtgaagtgaatttcttgtagcaaatacatagttggttcatgtttcttttttcccctttagccagtctgtatctttgaagtagggaatttaatctatttacatttaaggttattattgacaggtgaggatgtattcaagtcattttgttaattgttttatcattattttgtatatcctttgttartttcttcctctcattgtttttttgcagtttggtggttttctgtagtggtaatatttgactcatttctctttctctttttgtcacttttatatctggtctacaaatgagttttatacttttgtgtgtttttatggtggtaggtactgttcttttccttccagatgtagggcttccttgagcatttcttataggcct

SEQ ID NO: 591151 - DNA, 405 bp, Homo sapiens
gtcatgaagatgaatgagacaagcctccccgctcgttaagggaagtcaatataaaacagtacgtgtaaaagaagggagaagtaacgttgggtctctccagtggggaagaaacttcagaaaaaagagcaagctttctttcactgcatttgttcaagaccaggtctacaccacgtaagcaatctactacatacrtgagctgtagattctaaagcaacaccgtccactggaacattctgcagtgatggaaatatcccatgcctgtactgtctgacacatgtgtggctactgagtacctgaaatgcatctagtgcaactaaagaactgagtgtttaaattttttaagtttttattcatttaaatttaaatagccacatgtgtctcatggctactgcatcagacagggca

SEQ ID NO: 591152 - DNA, 586 bp, Homo sapiens
aatctatctagcatagttattgtaaggattaagtaagttattatatgcagagctcttggttcacagttagtgccatttaagcctttctgtcattcttactgttaccattttcctggcatgtcagtctgatgatgcagacgaggcaggaactttcgtctctgcctctcgtggactgcccratcagctccacggaactcagccatgcctgcagtgctgcaggcctcgctttggactgctggaggctgagaagtcaatggatgttgcttgggcattttggggggtttccttatgcaggaggaagatgacaatcattgtggaagcagaaggttgtcatggaaatgcacctgttccaagtcattgcaccctgggctctgggctggctctgcacgggcctgccatgcactgacttcagcttcatctgagtcagtggaaggctggacaaaggtagacatctttcctcactgccagcctgccattgcggctttctgtctctggtgtgaacaggcaatcgagctttcctggtctcctgagctactgtgaacgtggcagaagatagtggactctgaataacattggaaacaactac

SEQ ID NO: 591153 - DNA, 588 bp, Homo sapiens
atgtgcatgaaagttaacaagaggtaatgataatcaaaggtgtctaagaatggaatgggccacagagataatgggttccctatcattggaggtatttaagtagaaagcaaagggctgcatggcagagatgttgacagaagactcaaacatcaggtgaaggctggactagctaatttctgagtttccttccagccctgaaaatctcagatactattttgccttgtattagaatagattcaagacattgcctttgggggraaaatagtaatcaaaatgtaaataccatgggaataatagatttggcctaattatcagcgattactcagagtttgtcattatttccgtacaatatatcccaaagttccggaaaacaaatcaaagaaagtaccacggttgatgccattaatagaagcaaaacacttcaagacgagaatttaatttactgggtgagttcttgaggcacgtttttgttgatgaatatttataaaagtgggttaggctggacctggtaatgattgtgaaatatcttaatgctgtccccctcattaatttacttttaatgaatgacttggtaaagcgtaaccattt

SEQ ID NO: 591154 - DNA, 560 bp, Homo sapiens
ggctgcctccaggagcaggagctttgcttgttccttcggttcctcccttaaccaagcccaaggcatattaataatcgtcatcatcacaccctacatttgcatagaagcttttctttttttttccaaaaacgttccatatctatgacctcatttgagcctcaccgttcacttgcaaggtagtcagggagagtgtggttttaaggaaagaaaattaagaaatacagatatttcactgactcatggatgggggctacatttcaggtctcaaggctgtgacagtcaattctgaaatacgaactgttttccctgttttcctactggaccaagtcagctcagaggccacaggctcttttgcaatatgakgtacccagaatgagaaattcagagaagaaaagatactagcaaaatccagcctcatagaaagagccataataataaaggcaaggcattggttcgtttgtctgagggtttcatttttctgaagagaaaagtatgcaaatttcaccctgactggcgttatgttttcaggtgattcctgagtctcagtcatgcatgggtcc

SEQ ID NO: 591155 - DNA, 493 bp, Homo sapiens
tgaattcaataaaagtattaacacagtgtgataactggttgaaactaataaattttaacagcaataagtgcaaagtttcataataaaatttccaaaattgcctgtacaagacacaatgactctgcaacaagtcaagtgaagaatactcagggattttaattgaacataagctgattatgactaagatgtggctgtaaatgtatttaactagttatatccttcaaagcaaatgtagccataattccactggatttatgctggtcagaccacacagggaccatcagttcctgttctggacgtcacttggagaatcatgctgagaaactgaaartccttctgaaaaagcagccagggtggtacaggattggaaactactagaaaatacattggaagaaactaaggaagagtagccacaaacaaaaatgtcttagggcggatgtgaggaagcatagctcttttaaagagaaaacagcattagggccacttaatggag

SEQ ID NO: 591156 - DNA, 574 bp, Homo sapiens
catcatgactgttgacataaacagttcacagatgggtaaaagtaaaaagcatagggcgtatgtattcagggcaacctgaatctatgtctcccaggctgcagtcctcaatcttggcccaaattaattctctacttatatttttctttcaaaaaaagcatgatccatctctgccatttatgaattaggtaaacatggggaaaaggctaattctttttaacgcttagttttttccttctattacattagaatgatgactaccttttagggtttttgtaaggataaagtgagataawgtgggagaaccttgaaaactctagctttcattattattgctactcattaataaatataatatttgaagagatacttactgaagtactccattcattgctcttttatctagcaagtaacatgctgacttatgtgggtagaatcccccagcacagtgcaaaatgtttctcctgttagaaagaaatgttaatggaatttaattccagtcaaaaagtctcaacttaatcgcattagactttcagaatctcaattagataatcttagaactggagtatattcttag

SEQ ID NO: 591157 - DNA, 574 bp, Homo sapiens
catcatgactgttgacataaacagttcacagatgggtaaaagtaaaaagcatagggcgtatgtattcagggcaacctgaatctatgtctcccaggctgcagtcctcaatcttggcccaaattaattctctacttatatttttctttcaaaaaaagcatgatccatctctgccatttatgaattaggtaaacatggggaaaaggctaattctttttaacgcttagttttttccttctattacattagaatgatgactaccttttagggtttttgtaaggataaagtgagataatgtgggagaaccttgaaaactctagctttcattattattgctactcattaataaatataatatttgaagagatacttactgaagtactccattcattgctcttttatctagcaagtaacatgctgacttatgtgggtagaatcccccagcacagtgcaaaatgtttctcctgttagaaagaaatgttaatggaatttaattccagtcaaaaagtctcaacttaatcgcattaractttcagaatctcaattagataatcttagaactggagtatattcttag

SEQ ID NO: 591158 - DNA, 441 bp, Homo sapiens
gaattcttcacttcaaactcactccagaatctttgagcataggatctaaaagtttgcagtttacacacttctcagctgagttttatgcacacttgaagttggaaagttctgatctattgggagatacattaacaatacaattaatgacagaaaaaaagggattggtgccaactggtgaagggtgatgggacagagggatcattgtcaaggagattcagactatgcagaagaataggctgcttggattttgcacaaacaacctatgaaattgggggctttatgtgaaaatcaaaacctaactgcatccacttttcaatggcaaatgtacctgagttgggcatttagaatgaaatttatcagtgacaccaatcattggatttagagtccaccataatctggtatgatttcatcmtaatttcatgaaattttcaaagatcctat

SEQ ID NO: 591159 - DNA, 397 bp, Homo sapiens
ctttttaggttttatggcttgctttaggagaaaagggttccagtttttatgacccaccttggagaagagaaattctagtttctatgacttgcttcagaggtgaaagagaggctgtaaacaggagggcaggagaaggtcagagagaccttgcttctgaggcccttccagtgtcctaaagtttgaagtactcagcatgctgaagtgctatacttcgggtcttcttgttctgagctccaacaacttcaacatatctgtgtgggggacacaattcaacctttactgacactttgttcaaagctaccttcgttttgcttaaagctgtttttgyccagaagaccagcagcagccacaccatcaagacccattttttcctacctcttcatttacagacctataa

SEQ ID NO: 591160 - DNA, 524 bp, Homo sapiens
tttggagctttaaaatttgatgactgccctcttggggtttggacctgcatggggcctgtcgcccctttgttttagccaatttctcctatttggaatgaaagcatttacccaatgcctgtacccccattgtgttttggaagtaactaatttgtttttgattttacaggctcataggccaaaggaacttacttatctcagatgatactttggactgtggacttttcagttaacgctgaaatgaattaagactgggggattrttgagaagggttaattgtattttgcaatgtgagaatgacatgagatttgggagaagctggggtggaatgatatggtttggatttgtgctcctgcccaaatctcaaattggaggagtggcctggtgggaggtgattggattataggggaggatttccccttgctgttttcatgatagtaagtaagttctcatgatatctgatggtttgaaagtgtgtgacagttccccctttactctctttctcctgctaccctgtgaaggagctc

SEQ ID NO: 591161 - DNA, 651 bp, Homo sapiens
ggactagctctgggccatgtgcctagtatgggtatggacaattctctaaaggaaaattgaggtcctgttaccagaagaaggagagatggacttgggactgttgaaaaccaactaaacaacttacccactgggctttttggatactccattttaattattaactagaagcagaagttgcacagttgaagatagccctttatttatctctttacacattgactcataatcatctatgatttctcctcaggaaaatatcaaagactatgatacactagggcacctgagtgtcatgccattttgaagcttagacagaataccaatagaaatgacaagttcttcctgtgagtttgctgacacagggttctttaacacccatgctaaattaagcagctaaatcaagagctacctcccatagctccaaggtaaagcaaggatgcgtcagccaattttctgacagaaattgatagcttttgtgtgcgtgtgtgtgtgtgtgtgtaagtgccttcatatttccgaccccttycatgtttctttccattttgctgaccacaaggaaccatcattatttacattagcaattcccaattgtttttaaaaagtgagaattcctttctaagaattcataaatgtctcatgatagtagtaaaatct

SEQ ID NO: 591162 - DNA, 591 bp, Homo sapiens
tagcaaatctggcatgtcttcaccttgtgctagaggctgcgtcataaaacagacaagataggatttgccaaagcccactctctgctgatcttcttcctttctcccttcctggaaaaaggggcataattctgattgaagtaactctggtcaaatatttcatttgccttatcccatgccttggggtccagaggtcacatcctgtaaacaaaagtgggactttcccacctagaaaatctgtaycttttctgtcaatcatctgaagagagaaaaatggggtgggccatagcctggaggaggaaatgacatcatagggctgtgagcaggtgagtctgaatactgggaacttctgctgaaaggcatcgtcagggagaggaggtaggcttagctctgggacatggtggcaggtcaactgcaaggaaagaatcctgtggaggggcatttccaagggctctagagggagtaacatctatatccagttccaagctttcttttccacattgtagttctcttctcaggtgacaaacaaccagagccaaattttataatatttaagtgttccttggaaattcccatgaaacacttagaaaaagg

SEQ ID NO: 591163 - DNA, 545 bp, Homo sapiens
aaagtgaccttatctaatcaacataatttccaacattgaatcaacatatatatctataggggctatatttatatagcatatcagttaagaatatgagctttgtgcaaataaacacagctttaagtttcagctccagaatgttgtagctggagatccaaaagcaaattatttaattygctaacatctgcttcctcaagtgtagaataagaagaatagtagtacgtacctcataagattgatgtgagatgattcacataaagtgagagaatcaatgtaaagcagttagcatagtgtctggaacgtaggaagtaccccataacttttagctagtagtggcagtggtagtggtggcagtggtggtgctagtgctgttggtgatggtcatggtggtaatcgtagcaatattatctgaaattgtcttatttttccattacccttacttttctaacacagctcccatagttcttcggctttttttcctactgaatgccctatagagtaatttttaagttctttagaaattcaaaacactttagtaattatca

SEQ ID NO: 591164 - DNA, 669 bp, Homo sapiens
ctgttctcacactgctgtaaagagactacctgagactgggtaattcataaaggaaagaggtttaattgactcacagttctgcatggctwggggaggcctcaagaaacttacaatcatggcagcagggaaaagggaagcaaggacctttttcacatggaagcaggagagagaagccaatgaaggaggaacttgccaaacacttataaaaccatcagatctcatgagaactcactcactgtcatgagaatagcatgggggaaactattctcccatgatccaatcaccttccaccaggttcctccctcaacacctgggattacaagtcaagatgagatttggatggggacacaaagccaaaccatatcaaacattaattgaatatttaccatgtgtcagaagtaaactgtggcaaagtgaaattaagtaacttacaatcagtcacacagctagtaaggttgaacagggtttaaccctggctggaaagcgcgccaaacaggaagatctggctacagagctttcacattaaccacatgctccagtctacaccctccacaaaccaaatgacctgcatcaagtgccaccttatgtttctatcaagcattttcttctactttaagagagttcactaccatctagttaaggattaaaatcttatttatcaagcctgca

SEQ ID NO: 591165 - DNA, 626 bp, Homo sapiens
gctctttgaaatagggatggaaaatatgtagcattgcgccctcttcctrcccaactcgtccatgatagatgttttctttgatcacagtgttttttttccactgacctagatgaagtctcagaattttctccacacagcactccaggcagccatgaccaaccagccaaccaaacaccagtggcgtatgataagaagcctgcctttcatcctgatatatgctggatggtcagctttttgaagggcaagaaacacatcttctgcatttttgtatcaaaggtagtaccggctcccatcttggacataaacagcaatctaggctcattttctattccagaaacttaacacagaaccaagtcagtgtggtctactaccgccggaagcttagattcactcaacaaacacttatgaagccatctttgatgaaacaatggtgtgattatagcattgatcacaaagaaattatgtgtgggccactccaaaaggccaaagagatggctccagaaattagattaaatgcaagctgctattttaaacaaatagcaattaatgtcaccaattaatagcaacgaatgtcaccagttctttgaagaatggcctcccagaagcactactgtcatcttctcgaa

SEQ ID NO: 591166 - DNA, 564 bp, Homo sapiens
accctttctctaaatgcaatcacattcagagatgcagggaattgaaatttggtatgttaatttggaaggaggggggcaaattcagtccataacaaaaagaatcataaattatttttccttccaacatgatctcttcacctcttctccttccagttgattcaacaccctgctgccagatgaatctgctcagattatatcattcctctactctaaattatccayaatccccattgcatgaaaaacaatgttctaaatccttagcctgatcaaacaggctcttaactctgcagcccaagttcaccattcagcctcacattcatcttcgccctaggtgacctacccctcctgctgaactggtcctcctcaggaaactcctgtttcttcttattctgggttgcaaagcaatccagttttggctgggcctactcctcaactcatcatcaggtggtggggggagggttgactactcattttctttctctcttttttgactttattcaggaatgattggcaaataaaaattgtatatatttaaggtaaacaactggttgttttgatatatgc

SEQ ID NO: 591167 - DNA, 564 bp, Homo sapiens
accctttctctaaatgcaatcacattcagagatgcagggaattgaaatttggtatgttaatttggaaggaggggggcaaattcagtccataacaaaaagaatcataaattatttttccttccaacatgatctcttcacctcttctccttccagttgattcaacaccctgctgccagatgaatctgctcagattatatcattcctctactctaaattatccacaatccccrttgcatgaaaaacaatgttctaaatccttagcctgatcaaacaggctcttaactctgcagcccaagttcaccattcagcctcacattcatcttcgccctaggtgacctacccctcctgctgaactggtcctcctcaggaaactcctgtttcttcttattctgggttgcaaagcaatccagttttggctgggcctactcctcaactcatcatcaggtggtggggggagggttgactactcattttctttctctcttttttgactttattcaggaatgattggcaaataaaaattgtatatatttaaggtaaacaactggttgttttgatatatgc

SEQ ID NO: 591168 - DNA, 532 bp, Homo sapiens
tgacctacccctcctgctgaactggtcctcctcaggaaactcctgtttcttcttattctgggttgcaaagcaatccagttttggctgggcctactcctcaactcatcatcaggtggtggggggagggttgactactcattttctttctctcttttttgactttattcaggaatgattggcaaataaaaattgtatatatttaaggtaaacaactggttgttttgatatatgcatacatggtaaaataatcactattaagagctaactgaaatactcattaccgcatattgattgattgtggtaagawatgcttaagatctatcctcttagcaaattgcagtacagtacattattgttaactatagtcacattgctgtaccttagggctccagaactcattcatggtcttgtgtaactgaaacttctaccctttgatcaacatctcccatgtccctctccctttgccacatttctttcttttaccaagaccctcttccctgaagagattttgaatttcccaaaaatgtgactg

SEQ ID NO: 591169 - DNA, 532 bp, Homo sapiens
tgacctacccctcctgctgaactggtcctcctcaggaaactcctgtttcttcttattctgggttgcaaagcaatccagttttggctgggcctactcctcaactcatcatcaggtggtggggggagggttgactactcattttctttctctcttttttgactttattcaggaatgattggcaaataaaaattgtatatatttaaggtaaacaactggttgttttgatatatgcatacatggtaaaataatcactattaagagctaactgaaatactcattaccgcatattgattgattgtggtaagaaatgcttaagatctatcctcttagcaaattgcagtacagtacattattgttaactatagtcacattgctgtaycttagggctccagaactcattcatggtcttgtgtaactgaaacttctaccctttgatcaacatctcccatgtccctctccctttgccacatttctttcttttaccaagaccctcttccctgaagagattttgaatttcccaaaaatgtgactg

SEQ ID NO: 591170 - DNA, 626 bp, Homo sapiens
gctctttgaaatagggatggaaaatatgtagcattgcgccctcttcctgcccaactcgtccatgatagatgttttctttgatcacagtgttttttttccactgacctagatgaagtctcagaattttctccacacagcactccaggcagccatgaccaaccagccaaccaaacaccagtggcgtatgataagaagcctgcctttcatcctgatatatgctggatggtcagctttttgaagggcargaaacacatcttctgcatttttgtatcaaaggtagtaccggctcccatcttggacataaacagcaatctaggctcattttctattccagaaacttaacacagaaccaagtcagtgtggtctactaccgccggaagcttagattcactcaacaaacacttatgaagccatctttgatgaaacaatggtgtgattatagcattgatcacaaagaaattatgtgtgggccactccaaaaggccaaagagatggctccagaaattagattaaatgcaagctgctattttaaacaaatagcaattaatgtcaccaattaatagcaacgaatgtcaccagttctttgaagaatggcctcccagaagcactactgtcatcttctcgaa

SEQ ID NO: 591171 - DNA, 545 bp, Homo sapiens
atcagacaggtgtgcgttaccaggaatacagctaaatgggmtctgtctttgcaacagcattattagtaaaatccttttaacaaatgtctgtgaggcaagcacttccttaattaattgatgtaggaagcaaatgatgtggcagtataccaaggagtttagggtttggagtcaatcatccacatttgaatcctgcttctgctgattactagctgttgtgaccttgggcaagtcactccccttctctgaactttgccttcatatctagaaaaatactagctcctaaggaactcatgaggaatatggcacaattcattcatccctttaacaggcacttccaagtacctggctcatcatcagtgctgaattaaatgcttgttaaatccacatctaaacctaatctgattgtcaagggtcttcctcaaatattacaggaggatattaggaattataactgaaaaagctttcacatactttgtaaatgtctttccttattctattacctctttttagtcaaattgctttattgtcctaggaatgtttcctca

SEQ ID NO: 591172 - DNA, 609 bp, Homo sapiens
aatcagaatgaatgtttaaagagcaaatattccactgtatctgccagagtgcctgatactgtaataggaaaaaaacaacagaataattgtttgttgacwtatgaagcaagactttctaacgttgttttcttttcaccaaaaccaaaagggtctaaagattcctttaacctctggcttgtggtcctgcagtggtggctaaactatatcatcaagaaacaccttgcaggcatgcacttcccagctccacctcctccagttccagtgttttcatgctggattcctgcagtggaagaaagacactaggaagaaacagctaaagcgacaaaaacatggggaatgaaaacaccgtattctaaagtctgctatcagatagtcaaagacaaaacagccattattgtctacaattagaatatgggctctgataggattaagaaacccattcagtgtgctctgtgtggaccagcaggagtcagggacgacaaagaatgctggagatgtgtgacttacagagtgaggctggaaggtgggaaaaaggaggaggatgaagaaaggaggccaataacatggcagaacccgcaggaccagaatatgccactccaaaatatgaag

SEQ ID NO: 591173 - DNA, 577 bp, Homo sapiens
aacagctaaagcgacaaaaacatggggaatgaaaacaccgtattctaaagtctgctatcagatagtsaaagacaaaacagccattattgtctacaattagaatatgggctctgataggattaagaaacccattcagtgtgctctgtgtggaccagcaggagtcagggacgacaaagaatgctggagatgtgtgacttacagagtgaggctggaaggtgggaaaaaggaggaggatgaagaaaggaggccaataacatggcagaacccgcaggaccagaatatgccactccaaaatatgaaggattgctgagctgacagcaattaagaagaagcagatacagaaaagctttctgccttccatttgcgtaaaagcaggacaaagatttacaatcccaaaaggtatcctgtgcacccctcctctaccagggagaacaaaggttaaccattgaaaactactttggacacatcatctggacgtgataccagaggaatctatattaacaagctttactaactaaccttcacctgccttccctcacgatgctgtccttagagattcaaagtcctttttctttgt

SEQ ID NO: 591174 - DNA, 577 bp, Homo sapiens
aacagctaaagcgacaaaaacatggggaatgaaaacaccgtattctaaagtctgctatcagatagtcaaagacaaaacagccattattgtctacaattagaataygggctctgataggattaagaaacccattcagtgtgctctgtgtggaccagcaggagtcagggacgacaaagaatgctggagatgtgtgacttacagagtgaggctggaaggtgggaaaaaggaggaggatgaagaaaggaggccaataacatggcagaacccgcaggaccagaatatgccactccaaaatatgaaggattgctgagctgacagcaattaagaagaagcagatacagaaaagctttctgccttccatttgcgtaaaagcaggacaaagatttacaatcccaaaaggtatcctgtgcacccctcctctaccagggagaacaaaggttaaccattgaaaactactttggacacatcatctggacgtgataccagaggaatctatattaacaagctttactaactaaccttcacctgccttccctcacgatgctgtccttagagattcaaagtcctttttctttgt

SEQ ID NO: 591175 - DNA, 577 bp, Homo sapiens
aacagctaaagcgacaaaaacatggggaatgaaaacaccgtattctaaagtctgctatcagatagtcaaagacaaaacagccattattgtctacaattagaatatgggctctgataggattaagaaacccattcagtgtgctctgtgtggaccagcaggagtcagggacgacaaagaatgctggagatgtgtgacttacagagtgaggctggaaggtgggaaaaaggaggaggatgaagaaaggaggccaataacatggcagaacccgcaggaccagaatatgccactccaaaatatgaaggattgctgagctgacagcaattaagaagaagcagatacagaaaagctttctgccttccatttgygtaaaagcaggacaaagatttacaatcccaaaaggtatcctgtgcacccctcctctaccagggagaacaaaggttaaccattgaaaactactttggacacatcatctggacgtgataccagaggaatctatattaacaagctttactaactaaccttcacctgccttccctcacgatgctgtccttagagattcaaagtcctttttctttgt

SEQ ID NO: 591176 - DNA, 577 bp, Homo sapiens
aacagctaaagcgacaaaaacatggggaatgaaaacaccgtattctaaagtctgctatcagatagtcaaagacaaaacagccattattgtctacaattagaatatgggctctgataggattaagaaacccattcagtgtgctctgtgtggaccagcaggagtcagggacgacaaagaatgctggagatgtgtgacttacagagtgaggctggaaggtgggaaaaaggaggaggatgaagaaaggaggccaataacatggcagaacccgcaggaccagaatatgccactccaaaatatgaaggattgctgagctgacagcaattaagaagaagcagatacagaaaagctttctgccttccatttgcgtaaaagcaggacaaagatttacaatcccaaaaggtatcctgtgcacccctcctctaccagggagaacaaaggttaaccattgaaaactactttggacacatcatctggacgtgataccagaggaatctatattaacaagcyttactaactaaccttcacctgccttccctcacgatgctgtccttagagattcaaagtcctttttctttgt

SEQ ID NO: 591177 - DNA, 547 bp, Homo sapiens
gatggggtttatttataaatcacttaaaccattctatcacaagaccagaggatttgagaacatttgacaacatatatttgtatgtatgcatacatatatatgtacatgcatgcatgtataatgcacatagttaagaatatatgtgtgtatatgttgacacttaaaataacttgataactgcatgtgcttagatgatataatgtatataaaatgcttagctcagttcctggcatacagygttcttcagtaagtattacttacgcaggagcattaaaaaaaaagaaccctaacacctggtcctagatttcctttcaggaacaggcagtgcttttatttagaacaatgcacaaaggtgaaagatgcaatcctgagagcaggaactgttgtttggaatcgcttttcctcccgactccctctccaggacataggccaatgtcttgaaacattttttgattgttgaaactgggggtaggaggactggtgcctagtaggttgaggccaaggatgctgctaaacatcctagaatgcacaggacagcctccacaac

SEQ ID NO: 591178 - DNA, 547 bp, Homo sapiens
gatggggtttatttataaatcacttaaaccattctatcacaagaccagaggatttgagaacatttgacaacatatatttgtatgtatgcatacatatatatgtacatgcatgcatgtataatgcacatagttaagaatatatgtgtgtatatgttgacacttaaaataacttgataactgcatgtgcttagatgatataatgtatataaaatgcttagctcagttcctggcatacagtgttcttcagtaagtattacttacgcaggagcattaaaaaaaaagaaccctaacacctggtcctagatttcctttcaggaacaggcagtgcttttatttagaacaatgcacaaaggtgaaagatgcaatcctgagagcaggaactgttgtttggaatcgcttttcctcccgactccctctccaggacataggccaatgtcttsaaacattttttgattgttgaaactgggggtaggaggactggtgcctagtaggttgaggccaaggatgctgctaaacatcctagaatgcacaggacagcctccacaac

SEQ ID NO: 591179 - DNA, 615 bp, Homo sapiens
tgtagcattgcgccctcttcctgcccaactcgtccatgatagatgttttctttgatcacagtgttttttttccactgacctagatgaagtctcagaattttctccacacagcactccaggcagccatgaccaaccagccaaccaaacaccagtggcgtatgataagaagcctgcctttcatcctgatatatgctggatggtcagctttttgaagggcaagaaacacatcttctgcatttttgtatcaaaggtagtaccggctcccatcttggacataaacagcaatctaggctcattttctattccagaaacttaacacagaaccaagtcagtgtggtctactaccgccggaagcttagattcactcaacaaacacttatgaagccatctttgatgaaacaatggtgtgattatagcattgatcacaaagaaattatgtgtgggccactccaaaaggccaaagagatggctccagaaattagattaaatgcaagctgctattttaaacaaatagcaattaatgtcaccaattaatagcaaygaatgtcaccagttctttgaagaatggcctcccagaagcactactgtcatcttctcgaacatcctggcattctg

SEQ ID NO: 591180 - DNA, 547 bp, Homo sapiens
gatggggtttatttataaatcacttaaaccattctatcacaagaccagaggatttgagaacatttgacaacatatatttgtatgtatgcatacatatatatgtacatgcatgcatgtataatgcacatagttaagaatatatgtgtgtatatgttgacacttaaaataacttgataactgcatgtgcttagatgatataatgtatataaaatgcttagctcagttcctggcatacagtgttcttcagtaagtattacttacgcaggagcattaaaaaaaaagaaccctaacacctggtcctagatttcctttcaggaacaggcagtgcttttatttagaacaatgcacaaaggtgaaagatgcaatcctgagagcaggaactgttgtttggaatcgcttttcctcccgactccctctccaggacataggccaatgtcttgaaacattttttgattgttgaaactgggggtaggaggactggtgyctagtaggttgaggccaaggatgctgctaaacatcctagaatgcacaggacagcctccacaac

SEQ ID NO: 591181 - DNA, 573 bp, Homo sapiens
ccgcttgcccacagcatatgaatgagtccagggaaggccaaccagataggcagcactggcttcaaagtggggccagagcccaccgtaagtccctctaggaatgtcacacattataataggatcaagtatgatgaaaatacagatgtgaagtactttaaactgagatgttctacttaataggcaaagagataaagcaattatttcctctgtcacaatgctataaattygaatatggtctgtggaaggaaaaggtgatatgtattgttgcaggtcaaaaaaaaattgaaaaagaaaagtaaaaaagcaggattcagaaagctcaatttgaaaataacagaacctctcccaggaatgacaaacactaacttgcgagcaacaagaagggttagcaccaaagatcagttggctgacaattaagggagcacaataaaaccttgaaatgctctgccctgagagttgttaccaatgtgtaatggaatttagcaataaaaaataaataaaacaataagagctttctattttctgctagtatgaaatttctgacagctcatctaaccccttggtgtccagatc

SEQ ID NO: 591182 - DNA, 573 bp, Homo sapiens
ccgcttgcccacagcatatgaatgagtccagggaaggccaaccagataggcagcactggcttcaaagtggggccagagcccaccgtaagtccctctaggaatgtcacacattataataggatcaagtatgatgaaaatacagatgtgaagtactttaaactgagatgttctacttaataggcaaagagataaagcaattatttcctctgtcacaatgctataaattcgaatatgstctgtggaaggaaaaggtgatatgtattgttgcaggtcaaaaaaaaattgaaaaagaaaagtaaaaaagcaggattcagaaagctcaatttgaaaataacagaacctctcccaggaatgacaaacactaacttgcgagcaacaagaagggttagcaccaaagatcagttggctgacaattaagggagcacaataaaaccttgaaatgctctgccctgagagttgttaccaatgtgtaatggaatttagcaataaaaaataaataaaacaataagagctttctattttctgctagtatgaaatttctgacagctcatctaaccccttggtgtccagatc

SEQ ID NO: 591183 - DNA, 573 bp, Homo sapiens
ccgcttgcccacagcatatgaatgagtccagggaaggccaaccagataggcagcactggcttcaaagtggggccagagcccaccgtaagtccctctaggaatgtcacacattataataggatcaagtatgatgaaaatacagatgtgaagtactttaaactgagatgttctacttaataggcaaagagataaagcaattatttcctctgtcacaatgctataaattcgaatatggtctgtggaaggaaaaggtgatatgtattgttgcaggtcaaaaaaaaattgaaaaagaaaagtaaaaaagcaggattcagaaagctcaatttgaaaataacagaacctctcccaggaatgacaaacactaacttgcgagcaacaagaaggsttagcaccaaagatcagttggctgacaattaagggagcacaataaaaccttgaaatgctctgccctgagagttgttaccaatgtgtaatggaatttagcaataaaaaataaataaaacaataagagctttctattttctgctagtatgaaatttctgacagctcatctaaccccttggtgtccagatc

SEQ ID NO: 591184 - DNA, 587 bp, Homo sapiens
tgatgaaaatacagatgtgaagtactttaaactgagatgttctacttaataggcaaagagataaagcaattatttcctctgtcacaatgctataaattcgaatatggtctgtggaaggaaaaggtgatatgtattgttgcaggtcaaaaaaaaattgaaaaagaaaagtaaaaaagcaggattcagaaagctcaatttgaaaataacagaacctctcccaggaatgacaaacactaacttgcgagcaacaagaagggttagcaccaaagatcagttggctgacaattaagggagcacaataaaaccttgaaatgctctgccctgagagttgttaccaatgtgtaatggaatttagcaataaaaaataaataaaacaataagagctttctattttctgctagtatgaaatttctgacagctcatctaaccccttggtgtccagatctcagaagccacttaatgaaacaatggttgtccaagaccagaaaaactctgcaataatagtttccctgcaaaccatgagtcaaaataaataagayatagcctgacactcagcctctcctccaaaggttttaaaaaaccaaagt

SEQ ID NO: 591185 - DNA, 591 bp, Homo sapiens
caacttactgcaaccttggcctcccgggctcaagtgatcctcctgtctcagcatcccgagtaggtgggactacaggcgcctgctaccatgcctggctaattttttgtagaacaaggttttaccggttgcccaggctggtctcgaactcctgagctcaagcaatccacccgccttggtttcccaaagtgctgggattagaggcatgaccatatgtcacttttaagattagcttggagaagatgatggcttccgtcgtggttgctctctttctcaatagatctgtctcccagctcactagccctgtggaaagttatgttgtgmaaagcactgtggaaaggcccatgtggtgaggaaccaaatcttcctgggaatagtaacatgagagagctagaagaaggcctcccagcccaagtcaattttccatatgcagcagccccagccaacagcttgacagcaacttcatgagtgatcctgagccagaaccacctagctaaacctcctgaatttctaatcctcagaaactttgggagaccaaaagtttttgttgttttaagcttctatgttttggggtaatgtgttatgcaacaacag

SEQ ID NO: 591186 - DNA, 562 bp, Homo sapiens
tgtaccacattttctttatctattcatctgtcgatgaacacttaagttgcttccaaatcttggttattgtgaaaagagctgcaacaaacatgggagtgtagatactcctttgatatactgattctctttcttttggggatattcccagcagtgggattgctggatcatatggaaattctatttttagtttcttgagaaatccttcatgattctctatagtagttgtagtaatttacattcccaggaacagygtatgaggcttcctttttctccacatccagcgtttgttattgtctgtcttttggatataagccattttaacttgagtgagattatgtgtcatggcaatttgaatttacatttctctgatgatcaatgatattgcacaacttttcataagtctgtttgccatttatatgtcttcttttaagaaatgtctattcaaatcctttgcccattttaaaaattgaattttttctgtagagttatttgagctcctcatatattccagttattattcccttgtcagatggatagtttgtaaatattttctcccattctg

SEQ ID NO: 591187 - DNA, 669 bp, Homo sapiens
taacagtggtgaaagtgatcatccttgtcatgttcagatcttagaggaaaggctttcagtttttctctattcaatatgatactagctgtgggtttgttgtatatggcttttatcatttggaggtgtgttcctttgaaayccagctcttttaggatttttatcatgaagggatgttgaatattatcaaatgctttttcagcatcaattgaaagtaatcatatttttttgtctatcagtctgttgatatgctgtgtcacattgattgatttgcatatgttgacctatccttgcatcccagggataaatcccacttggtcatgatgaatgatctttttaatgtattgttgaatttggattgctaatattttgttgagaatttttgcatcagtatttattagtgatattgtcctattgttttctgtttttgatgtgtcttttattttattttattttattggcttttattttagtgggagacattttattatggctttgatgttgttacttgttgttagtctgttcaggttttggagttcttcatggttcaatcttgataattaataatgaggttattaattaataatggggttgcatgtgtctaggaatttgtccagctcatctaagttttccaatttatgggcatatacttgctaatagtagccacttatg

SEQ ID NO: 591188 - DNA, 571 bp, Homo sapiens
tttgtttttgcaagctttgttgaagaccagatggttgtaggtgtgtggtcttatttctgggatctttattctattccattgtctatgtgtctgttacgagtactatactgtttttgttatggtagccctgtagtatagtttgaagttgggtaacatgatgcctccagctttgttgttttgattaagattgccttggctatttgagctattttttggttccatatgaattttaaagtagttttttctacttctgtgaagaatgtggttgataatgtgatagaagtagcattgtatctgtaaattgctttgggcagtatagccattttaatgatattgattcttcctatccatgagcatggaatgtttttccatttgtttgtgtcatctctgacttcttgagcagtgttttataattctccttgtagagatctttcatttccccagtaagctgtagtcctaggtgctttattcttttttttttttattttwatttttattttttttattgatcattcttgggtgtttctcgcagagggggatttggcagggtcataggacaatagtggaggga

SEQ ID NO: 591189 - DNA, 585 bp, Homo sapiens
tggtcctgtaattgtgttgttagctagttattatgctggcttgtayggttgctttatagtgtaactggtgtgtgtacttaagtgtgtttttttagtggctggtaatggtcttgcctttccatatttagcactcctttcaatgtctcttgtaaggcaggtctggtggtaacaaactccctcagcatttgcttctttgaaaaaaaaaatttctcctttgctgaggaagcttagtttggctggatataaaatccttggttgaatttttttttctttaagaatattgaatataggcccctaatctcttctggcttgtatggtttatactgagagggctgtttttagctcagtggggttccctttgtaggtgacctgccttttctctctagctgcctttaacattctttccttcattttgaccttggaaaatatgatgattacgtgtcttggggaggatcttcttgtgttgaatctttcagagactgtgtatttcctgaagttgaatgtttgtctgtcttgaaaggctgggaaaatttttatggataatatcctgaaatatgtttcccaagttgtttgctttctttccat

SEQ ID NO: 591190 - DNA, 585 bp, Homo sapiens
tggtcctgtaattgtgttgttagctagttattatgctggcttgtatggttgctttatagtgtaactggtgtgtgtacttaagtgtgtttttttagtggctggtaatggtcttgcctttccatatttagcactcctttcaatgtctcttgtaaggcaggtctggtggtaacaaactccctcagcatttgcttctttgaaaaaaaaaatttctcctttgctgaggaagcttagtttggctggatataaaatccttggttgaatttttttttctttaagaatattgaatataggcccctaatctcttctggcttgtayggtttatactgagagggctgtttttagctcagtggggttccctttgtaggtgacctgccttttctctctagctgcctttaacattctttccttcattttgaccttggaaaatatgatgattacgtgtcttggggaggatcttcttgtgttgaatctttcagagactgtgtatttcctgaagttgaatgtttgtctgtcttgaaaggctgggaaaatttttatggataatatcctgaaatatgtttcccaagttgtttgctttctttccat

SEQ ID NO: 591191 - DNA, 585 bp, Homo sapiens
tggtcctgtaattgtgttgttagctagttattatgctggcttgtatggttgctttatagtgtaactggtgtgtgtacttaagtgtgtttttttagtggctggtaatggtcttgcctttccatatttagcactcctttcaatgtctcttgtaaggcaggtctggtggtaacaaactccctcagcatttgcttctttgaaaaaaaaaatttctcctttgctgaggaagcttagtttggctggatataaaatccttggttgaatttttttttctttaagaatattgaatataggcccctaatctcttctggcttgtatggtttatactgagagggctgtttttagctcagtggggttccctttgtaggtgacctgccttttctctctagctgcctttaacattctttccttcattttgaccttggaaaatatgatgattacgtgtcttggggaggatcttcttgtgttgaatctttcagagactgtgtatttcctgaagttgaatgttygtctgtcttgaaaggctgggaaaatttttatggataatatcctgaaatatgtttcccaagttgtttgctttctttccat

SEQ ID NO: 591192 - DNA, 531 bp, Homo sapiens
ctttcacggtatcccataggtttggtatgttgtgtttcattaagtttcaaaatttttttcaatgtctttcttaatttcttcattgggccagtggtcatgcaggtgcatgttgtataatttccatgtatttgtattgtttccaaaattcctcctgttattaatttttagttttattccattgtggtcagaaaagatgcttgatagtattttagttttttggaatgttttaagacttgttttgtgacctaatatatggtctattcttgacaataatccatgtgcttaggaaaagaatgtgtattctgcagccctttgatgaaatrttctatatatatctattagatccatttgttccacagtgcagattaagtctgatgtttctttgttggttttgtctggaaaatttgtctaatgctaaaagtggggtgttgaagtctccagcgattattgtattggagtctatctctctttttgctttatgtatctgggtgctccagtgttggctgcatatgtatttaaaattgttaaatc

SEQ ID NO: 591193 - DNA, 589 bp, Homo sapiens
tttcgtcttaaaatctattttttgtgatataagtatagctactcctgctcttttttggtttccattggcatggaatatcattttccatccctttagtttcggtttttcagtttacgtatatctttataggtgaagtatttcttgtaggcaacagatcaacagacatttttttaaatgtagtaaatttatatgtcttttttttttttcgagacagagtttcacttcatcactcaggctggagtgcagtttcacagtctcagctcattgcaacctctactttccaggttcaagcaattctcctgcytcagcctcttgagtagctgggattacgggcatgcactaccatgcttggctaacgtctgtatttttagtagacacagggtttcaccatgttggccaggtaggtcttgaactcctgacctcaagtgatctgcccgcctcggcctcccaaagtgctgggattacaggcatgagccatggtacctggctgatagttgttaaattggtgttcttatttgggcaggggatgattagtggagccatcttgctctgccccttttctattctcacttttagatcttcttttgtg

SEQ ID NO: 591194 - DNA, 612 bp, Homo sapiens
actacatgatgtttgttaagtaccagaaaaaaatttgtctttaatttgatattctgttgggacagccagaggacagtcgaggataaaaaggaagatttttattaatagtcattctacctgcagaaaaccctccctagatgatgatttcctgtatatgtgagtttgtttcataattactcaggacaacaatgcccttgacagccaaccaaattaaaatgcatacccagagctataatttttttagctctaattaaccaattctgtttccttaaatgtaaatgacctctcttcctaytttgagatttactatttaaggtttactcagtacacattttaaagtagattaaaaaacaaatctatttaaatctgtttcaaagataaatgcctgctacaagtcttgtcttcagatactactcaatagattcatgtgtgcctgaggcattatgtggtgttggggagtaggcagagttttaatttctactatatatcctcttctctctctcaactgtttgagtcaatggtggtgagtgcatttgcagacagcaactctccccttccccaggactggacacagagaaggcaaatgttcctttcatagatcccctttcccta

SEQ ID NO: 591195 - DNA, 612 bp, Homo sapiens
actacatgatgtttgttaagtaccagaaaaaaatttgtctttaatttgatattctgttgggacagccagaggacagtcgaggataaaaaggaagatttttattaatagtcattctacctgcagaaaaccctccctagatgatgatttcctgtatatgtgagtttgtttcataattactcaggacaacaatgcccttgacagccaaccaaattaaaatgcatacccagagctataatttttttagctctaattaaccaattctgtttccttaaatgtaaatgacctctcttcctattttgagatttactatttaaggtttactcagtacacattttaaagtagattaaaaaacaaatctatttaaatctgtttcaaagataaatgcctgctayaagtcttgtcttcagatactactcaatagattcatgtgtgcctgaggcattatgtggtgttggggagtaggcagagttttaatttctactatatatcctcttctctctctcaactgtttgagtcaatggtggtgagtgcatttgcagacagcaactctccccttccccaggactggacacagagaaggcaaatgttcctttcatagatcccctttcccta

SEQ ID NO: 591196 - DNA, 633 bp, Homo sapiens
gatattctgttgggacagccagaggacagtcgaggataaaaaggaagatttttattaatagtcattctacctgcagaaaaccctccctagatgatgatttcctgtatatgtgagtttgtttcataattactcaggacaacaatgcccttgacagccaaccaaattaaaatgcatacccagagctataatttttttagctctaattaaccaattctgtttccttaaatgtaaatgacctctcttcctattttgagatttactatttaaggtttactcagtacacattttaaagtagattaaaaaacaaatctatttaaatctgtttcaaagataaatgcctgctacaagtcttgtcttcagatactactcaatagattcatgtgtgcctgaggcattatgtggtgttggggagtaggcagagttttaatttctactatatatcctcttctctctctcaactgtttgagtcaatggtggtgagtgcatttgcagacagcaactctccccttccccaggactggacacagagaaggcaaatgttcctttcayagatcccctttccctaaagagcacaaagccccatgttttcaaaaaagaaacagctgaaaactaaaataacagaacatagctagc

SEQ ID NO: 591197 - DNA, 621 bp, Homo sapiens
attgagcaaaaataagaaagctggagacatcacactacttgatgtccaaatatactttgaagctatagtaatcaaartagtatggcatataaacaatatagaccaatttcatatagaccagtagaggagaatggagagcccagaaataaatacacacatttattgccaattgatcttcaacaaaggtgtcaggaatacacaatggggaaaggatagtctttttccataacagtgttgggataactaaatatcataatgcaaaagaatgaaattggactcttatctcaaaccatatccaagaatcaacttaaaatggattaaagacttaggcatactgtagaaaaaagctttttgacattggtctgtgcagtacatttttggatatgaccacaaaagcacaggcagcaaaatcaaaaatagacaaatgccattgcatcaaactaaaaagcatctgcacagcaaaagaagcaataaacaaaatgaaaaggctacctatagaataggagaacatatttgtaagccatatatctgatcagggttaatatccaaaatatataaggaacacaaaaaactcaataggcatttcccaaaagaagatatgtaaattaccaataagtgtgt

SEQ ID NO: 591198 - DNA, 454 bp, Homo sapiens
atcataatgcaaaagaatgaaattggactcttatctcaaaccatatccaagaatcaacttaaaatggattaaagacttaggcatactgtagaaaaaagctttttgacattggtctgtgcagtacatttttggatatgaccacaaaagcacaggcagcaaaatcaaaaatagacaartgccattgcatcaaactaaaaagcatctgcacagcaaaagaagcaataaacaaaatgaaaaggctacctatagaataggagaacatatttgtaagccatatatctgatcagggttaatatccaaaatatataaggaacacaaaaaactcaataggcatttcccaaaagaagatatgtaaattaccaataagtgtgtgaaaaagtgctcaatatcactaattatcagggaaatgcaaattaaaaccgcgatgagttatcatctcatacctgtaaggatg

SEQ ID NO: 591199 - DNA, 621 bp, Homo sapiens
attgagcaaaaataagaaagctggagacatcacactacttgatgtccaaatatactttgaagctatagtaatcaaaatagtatggcatataaacaatatagaccaatttcatatagaccagtagaggagaatggagagcccagaaataaatacacacatttattgccaattgatcttcaacaaaggtgtcaggaatacacaatggggaaaggatagtctttttccataacagtgttgggataactaaatatcataatgcaaaagaatgaaattggactcttatctcaaaccatatccaagaatcaacttaaaatggattaaagacttaggcatactgtagaaaaaagctttttgacattggtctgtgcagtacatttttggatatgaccacaaaagcacaggcagcaaaatcaaaaatagacaaatgccattgcatcaaactaaaaagcatctgcacagcaaaagaagcaataaacaaaatgaaaaggctacctatrgaataggagaacatatttgtaagccatatatctgatcagggttaatatccaaaatatataaggaacacaaaaaactcaataggcatttcccaaaagaagatatgtaaattaccaataagtgtgt

SEQ ID NO: 591200 - DNA, 502 bp, Homo sapiens
aggaaaagaaatttatttggcttacagttctataggctgtagaagcagcatggtgccagcatctgcatctgggaaggaactcaggctgcttccactcatggcagaaggtgaaggggagcagacatcatgtggtgagagagaaagcaagagagagagagagagagaaagagagagagaagggaggtgccaggctcttttaaacaatcagctsttgtggatctaatggaatgagaactcattaattactgtgggaatggcaccaagctattcaggagggatcggtctgcatgacccaaacaccttccaccaggccccacttccaacattgtggatcaaatttcaacatgagatttggagggaacgaatatccaaactatagcagaaccccagaggcttggaggatcacagggcagtccggacagggcactcagggagaaagaatcatttacacagtaaactcccagtgtcaggatggcttggaccccttgtggtttgtttgcct

SEQ ID NO: 591201 - DNA, 548 bp, Homo sapiens
agaataaggaattgtaagagaaaatagagatgaccaactttagtttgggtggccaaggaaggctcctggagaagataacaaatgaactaacatctgaaggatatgaaggagctggccacatgaaaagtgggagcatgagcttcccagacagagcaactagtacttaccagctggatatgaaatggaactcctcagaggtgaagcacttaacaattgtgggcttttctgcactgatttcttattggctctctttcttcatctgtgtgaaggggacaaatggcaccttcctcccaggtaggaagccctgttctctaagagaggctggtgaagaacrgctgcaagctgatagaaatgactgccttcttccagcttcatgatccagacaaactctgtttcttatctgaaggcaagtgaacatcgcatctgagaagggactatactgtcaggaaagctcgtttgcaggtaaggaaaagtgaccgcacatgagtcctataaccatccaagactatgacttctcttgacacctttctctgttagaaggaaattgt

SEQ ID NO: 591202 - DNA, 573 bp, Homo sapiens
gatgggttattttgatggagaaggaactctcagagggactgggaagtaatattgctcctctggctaaaatcattcatttacggaatgcttatgtaaaggaaagacaaagagacttactagacraaaacctcacattctctttggcagttttctcctttgcttcctccctttatcttgtcctgagttcttggaaataaaaaaaaaatcacctctgaaattataatttgcttcccagaatttaagcctttaaacattttcccatcttcacaataggaaagagaacttgtccccttctatgttcattctgtcttggttatctgccattatcaacagaactcagagaagactagattggaagtcaggttttgtgtgaatcagagcctatcaccagcctcaactcagtcttaatattttatgggtcttggtggatacttactcccatttcccttcgagacataatcaatatctccttcctctgtgcttccattgaacttagtctataattaataaagtgaatatttactaaatcttaaccatatgccactagtgtaatagtcattggatatatcatga

SEQ ID NO: 591203 - DNA, 435 bp, Homo sapiens
gtctctctctctctctctctctgtctctctcatagtctagtggtggatactatagaacatttctttctttttctctttcagcttatattctagtgaaggagacagataaagcaagatgaacaattattataaatgatgacatgttccatagcagaggaagtacagcggagtttttgtagcacacaacagagacaaataacctaatctggggagtcataaaaggaagtgatgtttaaattgaagctcaaaaaaataaaaaggtggtgttagaataaggaagaggatgcacatgtcaggcacagagaatagcttgagggaaaggatcagcagcagatgtataagtgaagtgattgtgtacacaarttagagatctcatatgttaatctgtggtagagtggaccctaatgctgcaagaaagaacatgaggagctatgt

SEQ ID NO: 591204 - DNA, 579 bp, Homo sapiens
atgttagcctaaaatcaattgctcttctcatactgaggtgtcatcctaagctgcgaggcattttagtaaatttgtgatctctattctttgcaattctgattaactttcccacaggatatacaccatttgttgctggttctgtgggaaaaatgttaactattattttccatcttaaaagtcaattccagtttcattctgtcagatatttccagaagccatttatttgtatattcagccattcttttttatcttaatggcaagagaaatgctaaaatggaaagaaggatcctaataatagatacctttgaatacttacacaaacacaatgatggggttttacattatattgtctttactctttgcaagtctgaaagcaaggctagcttcataggtgtgcaaactgtgcatttgaacagggtctctggcttacaaaggctgcatgcttggtttagtgctcagctgctgacatcatgagttatttttgaacaaggggcctcaagtttttcattttgtactggggcccacaaattatrtagtcagtcccatctctaagataggtattactattcttaatttata

SEQ ID NO: 591205 - DNA, 578 bp, Homo sapiens
agttgattatatcaaggcctgcaatgatatcagaggtagtctgcataaggctactctgctagcacaggcaatggcaggactgagagtggataaaggaaatactccatttcctggagcttgttttaactgtgggaarcatggtcatactaaaaaagaatgtagaaaaaatcagcaagtcaagctgccagataggggaaaaaagaaaactgctgagcctgaaatatgtccaaaatataaaaaaggaaaacactgggctaatcagtgtcactctaagtttgataaagatgggaacccgatttcgggaaacgctatgaggggcccgtcccgggccccattccaaaccagggcatttccagctcaggccattccctcatgcctatacaatgtctgtcccccaccaaagccggtagtgccacagtagatttatgctgcacaaaagctgtgagccttctgcctggggaacccccacaaaaggtcccaacaggagtctgtggacccttgccagcagggatgataggattagttctagacaggtctagtttaaatgtaaaaggggtacaaatacatacaggagtcat

SEQ ID NO: 591206 - DNA, 589 bp, Homo sapiens
cgggccccattccaaaccagggcatttccagctcaggccattccctcatgcctatacaatgtctgtcccccaccaaagccggtagtgccacagyagatttatgctgcacaaaagctgtgagccttctgcctggggaacccccacaaaaggtcccaacaggagtctgtggacccttgccagcagggatgataggattagttctagacaggtctagtttaaatgtaaaaggggtacaaatacatacaggagtcattgattcagattacaatggggaaattgaaattgttatatctacttttgttccctggaaagcagagccacaagagtgcatagcacagctcctgattgtgccgtatgtggaaatggggaaaagtgaaattaaatgaacatgaggatttggaagcacagataaataaggcaaagcagcttattgggtgaatcaaattactgataaacgtcctacctgtgaaataactattcagggaaagaaatttaaaggtttggtagatacaggagcagacatttcaatcatttctctacagcactggccgtccgcttggccaattcaacccactcaatttaacatact

SEQ ID NO: 591207 - DNA, 589 bp, Homo sapiens
cgggccccattccaaaccagggcatttccagctcaggccattccctcatgcctatacaatgtctgtcccccaccaaagccggtagtgccacagtagatttatgctgcacaaaagctgtgagccttctgcctggggaacccccacaaaaggtcccaacaggagtctgtggacccttgccagcagggatgataggattagttctagrcaggtctagtttaaatgtaaaaggggtacaaatacatacaggagtcattgattcagattacaatggggaaattgaaattgttatatctacttttgttccctggaaagcagagccacaagagtgcatagcacagctcctgattgtgccgtatgtggaaatggggaaaagtgaaattaaatgaacatgaggatttggaagcacagataaataaggcaaagcagcttattgggtgaatcaaattactgataaacgtcctacctgtgaaataactattcagggaaagaaatttaaaggtttggtagatacaggagcagacatttcaatcatttctctacagcactggccgtccgcttggccaattcaacccactcaatttaacatact

SEQ ID NO: 591208 - DNA, 589 bp, Homo sapiens
cgggccccattccaaaccagggcatttccagctcaggccattccctcatgcctatacaatgtctgtcccccaccaaagccggtagtgccacagtagatttatgctgcacaaaagctgtgagccttctgcctggggaacccccacaaaaggtcccaacaggagtctgtggacccttgccagcagggatgataggattagttctagacaggtctagtttaaatgtaaaaggggtacaaatacatacaggagtcattgattcagattacaatggggaaattgaaattgttatatctacttttgttccctggaaagcagagccacragagtgcatagcacagctcctgattgtgccgtatgtggaaatggggaaaagtgaaattaaatgaacatgaggatttggaagcacagataaataaggcaaagcagcttattgggtgaatcaaattactgataaacgtcctacctgtgaaataactattcagggaaagaaatttaaaggtttggtagatacaggagcagacatttcaatcatttctctacagcactggccgtccgcttggccaattcaacccactcaatttaacatact

SEQ ID NO: 591209 - DNA, 592 bp, Homo sapiens
cagccacatatagtgctcaggtacaaacatttttaaaaaactctctctttctctattctttctagacccaaaatggccacactccaattgtttccaattagacctgttttaagcccatgttacacggaaacaagggagtgagttccctcaccttaatatctgcttggtgacgacgttgtgcctgatgggcagttgggcaccaagggggtctggtcgtcatctgagagtgacacatctatagtatctgaaaatgtagagacacttgcctctgtatttggtgtgctgctggaaaagaaaaaaaatacatatcacatggttgcacagattttcttttacatgtagttggctgataatggtgaaattttagtagagtctggatcayctaaaaaatgtattcagaaagttcatccattcactgtggacttctagcaggagagcttaattctgtagaaatttcaagcaaaatgacttattggtgaagcaaaattactatctcatttgttcttattttaatggaattaagattagatttgcactctacttaaagttaagtagttttgctggtgtatgtcttcaagtttaagaaaaatat

SEQ ID NO: 591210 - DNA, 566 bp, Homo sapiens
caggggtgggggagcaaaaaacttagatattacaatggtttgtggcttcccaaagctayagtgcataaacatatatgcaatatcatggggaggacaatttaaaaaaatacctaaaagaggtctttaggggacaataatggaaaaaaaaggttgagacacattgttctatatctaagcaagttgacttatcttaggaagatgtgaactagaatgaaatgatgttatgaaacttgtgatcagagacacagcgagactggtgaaaacacaattgggattggaacccaggcacctcctaactctgtggaaatggacaagtagcttaatctctctgcatctcagtttcctaatagtgaccttttgcagtcaatccttcccccaactactggcctcaggcaactattgatctgccttctgtcactggtttcctaggatttcatgtaaatagaatgatacaatatgtgttccttgtcttgtgtctgacttcttttgttcatcatatttttgagattcattaatgttgttgtaatgtatcagtatttcattcatttttattgctaatttgtgtt

SEQ ID NO: 591211 - DNA, 566 bp, Homo sapiens
caggggtgggggagcaaaaaacttagatattacaatggtttgtggcttcccaaagctacagtgcataaacatatatgcaatatcatggggaggacaatttaaaaaaatacctaaaagaggtctttaggggacaataatggaaaaaaaaggttgagacacattgttctatatctaagcaagttgacttatcttaggaagatgtgaactagaatgaaatgatgttatgaaacttgtgatcagagacacagcgagactggtgaaaacacaattgggattggaacccaggcacctcctaactctgtggaaatggacaagtagcttaatctctctgcatctcagtttcctaatagtgaccttttgcagtcaatccttcccccaactactggcctcaggcaactattgatctgccttctgtcactggtttcctaggatttcatgtaaatagaatgatacaatatgtgttccttgtcttgtgtctgacttcttttgytcatcatatttttgagattcattaatgttgttgtaatgtatcagtatttcattcatttttattgctaatttgtgtt

SEQ ID NO: 591212 - DNA, 615 bp, Homo sapiens
gagggggagagtgtggcagatgcctttggtgcccatgccacctccccactgcccatttctagtttcagctggagctgtggcagatggttctggtgaactgaggctcactttgtgtatctttctgatgtctctcttagggtattctctggctttgtagaagccctcttgacttatatgcacctgcagcccagaaatccaggagagccaatgctcttgggagcaaccttcaatcagtaggtattgggagccagtggctaaatactccagatactagtcctgcaggtgggcagcattggagccatcctgtatgctttgtgggggccctggttgaaccatgccctgtttcttccaatggtacttggataacacatctttatattttcttttcctcttttcttgtctcactttatcattcattcactccagattcctgcatcacttctcgtataagtcatctgcacccaagtgcttgccccaggctctgcttttgggggaacttactctaagacaactagctttgcccactcttcaacagaacacggtctgctcgagtgcttccygctggccttggctgcaggaagacactgtggtgtctggcagaaacagcagggggcc

SEQ ID NO: 591213 - DNA, 580 bp, Homo sapiens
agctccccctccaccctcagcaccagggagactgtggctatgccrcctctagaaaagtacccgtgagaatctctaacagataacaatctccaagaaattaagaaggaaaagacccttaaaataattaagcatttcggaacagtggactcaaagaaagggattgtattttgatgttttgaaatgcaagttgtctcaatggcacgctttcccctcttggacggcgtgcagactgtcaatccccggcgtcacgccctctggaaggctgcagagccgagaagggaggagaagcccctttcggggaaatctcctcggccacatttgtcttgcactgtggcagtgcatcctctagatggcgataaatctccaaagaacgccaagcctttcctcctggctataggtcccttggacaaattgctttcttagtagagaaaaatgagaggcatttcttcagaattgactggaagctgctgagaaagctcttccttgcctcttagtttttgaaaggcgtttgaaacagtggcaagggtctagcgattggaatattgaaatctaatcaaggaaggagctgctgcatttctca

SEQ ID NO: 591214 - DNA, 262 bp, Homo sapiens
atctctaacagataacaatctccaagaaattaagaaggaaaagacccttaaaataattaagcatttcggaacagtggactcaaagaaagggattgtattttgatgttttgaaatgcaagttgtctcaatggcacgctttcccctcttggacggcgtgcagactgtcaatcccyggcgtcacgccctctggaaggctgcagagccgagaagggaggagaagcccctttcggggaaatctcctcggccacatttgtcttgcact

SEQ ID NO: 591215 - DNA, 518 bp, Homo sapiens
aagcctttcctcctggctataggtcccttggacaaattgctttcttagtagagaaaaatgagaggcatttcttcagaattgactggaagctgctgagaaagctcttccttgcctcttagtttttgaaaggcstttgaaacagtggcaagggtctagcgattggaatattgaaatctaatcaaggaaggagctgctgcatttctcagtatcctggagctggggcctggcagtaatgatggtgggtggtaaagagctccctagacagacttccctgctttgcagaaacagcctctcccccaggctgtaacacctgtgggttcttacctttctcaacaggggcatgtctgttcattttccatagggtagctaatgctaatatgaaacaattttttttgttgttgttttgcatttatccaccaggtgccactatgtgccaagagctttagaaatctcattcaatcctctcaagtaggttctagtatttttcccttatttaaacaaaggaaatacttggccaa

SEQ ID NO: 591216 - DNA, 535 bp, Homo sapiens
aaagaacgccaagcctttcctcctggctataggtcccttggacaaattgctttcttagtagagaaaaatgagaggcatttcttcagaattgactggaagctgctgagaaagctcttccttgcctcttagtttttgaaaggcgtttgaaacagtggcaagggtctagcgattggaatattgaaatctaatcaaggaaggagctgctgcatttctcagtatcctggagctggggcctggcagtaatgatggtgggtggtaaagagctccctagacagacttccctgctttgcagaaacagcctctcccccaggctgtaacacctgtgggttcttacctttctcaacaggggcatgtctgttcattttccatagggtagctaatgctaatatgaaacaattttttttgttgttgttttgcatttatccaccaggtgccactatgtgccaagagctttagaaatctcattcaatcctctcaagtaggttctagtatttttcccttatttaaayaaaggaaatacttggccaaagtcact

SEQ ID NO: 591217 - DNA, 563 bp, Homo sapiens
aaggcaccctggagagggtaaaagagttcagaagagaactgaggtgtgtgtgagccaaggatgggatgactgttcttcccagagctgccagcggccagccccacctgtgatttgggactggactattaaccaataaatggcctcagatttttagtttgatagtcagtgactttcttggaaaccagtcagccaaatgacctgttcaaagcagtcagcaagtgcacatttgatctggaaatgggattggcagtcattggcgtattgtgtctctgggtgggggcagctttggtttctgactgtcagagaaagattccacctgacacatgaaccagcagggcttggggtaggcttggtgcagatgtctctatggtgaacttcttacagggagtcaccaggaggaatgttcaggttcttttttggaaatgcagttagtggcattgaagtcacttttcttgccctttscccagtttgcctttagcatgactaaaaacatttaaagatgaccatttgttgattatgtgcttgctatgtgtctggccctataatgagccatttatgtgcac

SEQ ID NO: 591218 - DNA, 599 bp, Homo sapiens
tgggaagtagtgatcattcattcatccattccacaratacttgttgtgccggccacttggcagcttgctggggctacgatgatggatcagaaaagctccttgagaaactcatgatagcagggaaacagatgaataaatagctgattataatctaggccacgatgactggaaaaggctgagcagtttgtgcaaagtttggcctagggggagataatggaggcaagtggggctaaaacccagtctccatcccctcttccagggcagacatgagaactacagggacttttgtcacagagggggagcctctttgcaaatcctgccaaggcatcgtatatatcagtggctgccccgagtgtgattaattttttttctatttaaaaatttacatacaataaaattcatttttttaagtgtatagttctgtgagttttggtaaatgcatagagtcatataactatcacacatcatgatatagaatagttccattgttcctctaaaaaaatttcctctacctctttgtggttaagcctgccctcttccccagtgcctggaaaccaccaatctgttctccagttctatagttgtcttttccagaatgt

SEQ ID NO: 591219 - DNA, 549 bp, Homo sapiens
gcttagtacccaggtgatgaaataatatgtacaacaaacccccatgacacatatttacctacgtaacaaaccttcacatgtacccccaaatctaaaataaaaatttttwaaaaaagacagaatggtgactgccagtagtgcagggaagcatggtgcagagggcagaatgaagagatgttggtcaaagtgtacaaactttcatttataagatgaagttctgggaatctaatgtacaacactgtgactacagtcaatatgactgtattgtatacttgcaatttgctgagagtagatcttaagtgttatcaccaccaaaaaaatggtaactgtgaggtgatgaatgtagtaattagtttgaacatggtaatcattttattatataaatgtatatcaaatcatcgtattgtatatcttaaatacacattattttatttgtcagttataccttaagaaagccagtgggaaaaaataagaaaaataaacgaatagaatgtttctggttgcactaaagcatcaggcattactcagaacaaatatttgtatctttta

SEQ ID NO: 591220 - DNA, 423 bp, Homo sapiens
ttgttggttattggttctactataagccctcaagaggatttactttcgtgactagcaggcagttaggatgaggaggtwtaccttactttagtctggaattgatctaaatctgagccaaactttattctttttgagggtttggtggctcctgttacctaaattcctggagtattgcccttcagaaatcccaaatgaaagcctgagtgtttattaggaaccctcctctttggtaggtcctgaaaaaattcggatttttctctgcagcccctgagactgctgaaagctctgctcagctcctatacctgctagccatgactttctgcttagtggctcacatgctgcctgggcatcagcagatgtgtcaggggagtgtaacatcaggctcacttctcaacacttctttctctctgggatcttagaccc

SEQ ID NO: 591221 - DNA, 581 bp, Homo sapiens
ctgagttgaagtccattccatctggctggttctatacttccagtgcaagtgaagggagctgtttattctataccatcaatatccccatatctaggtattgagggccataacctctgcctgggtgtttgtctaggggggcagtttattagtcgatggggtcgtgggaaaggtagagctctgtgtctgggatttacatttggaagtgaaagaagggtcatacagattcagaagggggagggaaacagaagcatgcagaagtctggagtaataagtcagaaaccctastaataattataataaatattaaacaagggatacaacttttacctgtcaaattggaaaaaatttcaaaaatattgggtacaaaatttcacaaagaagactgtagagatctctaaactgttaaacactgttgtggggaggaaaattgtgctttcacaagtaaatcctaaaaaaggaatcaaacacaaagaaaaaagaaaatgtaaaaatatgatcccacttaaaaatgaaaaaaggggaatggtggaataaatttgtagtgattaaaaatgatgtttttgcctgtaatcctggcactt

SEQ ID NO: 591222 - DNA, 647 bp, Homo sapiens
actgcctagtcaataaatgatgctgggataactggccagctatatgcagaagaaggaaacttggacccctacctttcaccatataaaagttaatatggattaaagatttaaatataagacctcaaactgtaagaatcctagaagaaaacctgggaaacaccattatcagcattggccttgggaaagaatttatgactaagtcttcaaaagcaattgtaacaaaacaaaaaattgataattgggacctaattaaaaggcttctgcacagtaaaacaaactatcatcagagtaaacaggcaacctctgcaatgggagaaaatatttgctaactatgtagccaataaagacctaatatgcagattctataaggaacttaaacatttcaacaggcaaaaaccaaataaccccactaaaagtggrcaaaggaaatgaatagacatttctcaaaagaaaacacacaagtggccaacaaacatatgaaaaaacctcatctcacatcactcagaatggctattattaaggagtcaaaaaataacagatgatggtgaggttgtggagaaaaaggagcacttacacactgttggtaagattttaaccattgtggaagacagtgtggcaattcctcaaagatctgaagatggaaacac

SEQ ID NO: 591223 - DNA, 603 bp, Homo sapiens
tgcagggacagaaaaccaaatagcacatgttctaatttataagtaggagataaactctgggtacacatggacgtgaagatggcagtaatagacattggggaacacaacggggagaaagggaggaggaacaaggtgtattagtccattttcatgctactgacaaagacatacctgagactgggtaattcataaaaaaaaaaaagaggtgtagtggactcactttccatgtggctggggaggccctcacaatcatggtggaaggcaaaaggcatgtcttacatggcagcagacgggagaatgaaaaccaaccaaaaggggtttccccttataaaaccatcagatctcatgagacttrctcactaccacgagaacagtatgggggaaaccgccccgatgattcaattatctcccaccaggtccctcccacaacacttgggaatcatgggagctacaattcaagatgagatttgggtggggacatagccaaaccatatcacaagggttgaaaaagtattgagtactatggtcactatttggatgatgggatcatttgtgtctcaaacctcagcatcatgcaacatacccatataacaaacctgcaca

SEQ ID NO: 591224 - DNA, 567 bp, Homo sapiens
aggaggaacaaggtgtattagtccattttcatgctactgacaaagacatacctgagactgggtaattcataaaaaaaaaaaagaggtgtagtggactcactttccatgtggctggggaggccctcacaatcatggtggaaggcaaaaggcatgtcttacatggcagcagacgggagaatgaaaaccaaccaaaaggggtttccccttataaaaccatcagatctcatgagacttactcactaccacgagaacagtatgggggaaaccgccccgatgattcarttatctcccaccaggtccctcccacaacacttgggaatcatgggagctacaattcaagatgagatttgggtggggacatagccaaaccatatcacaagggttgaaaaagtattgagtactatggtcactatttggatgatgggatcatttgtgtctcaaacctcagcatcatgcaacatacccatataacaaacctgcacatatatcccgagtctaaaataaaagttgaaagtattttaaaaatccatttaaagggcagaggttgattaattggatgaaaaaagc

SEQ ID NO: 591225 - DNA, 567 bp, Homo sapiens
aggaggaacaaggtgtattagtccattttcatgctactgacaaagacatacctgagactgggtaattcataaaaaaaaaaaagaggtgtagtggactcactttccatgtggctggggaggccctcacaatcatggtggaaggcaaaaggcatgtcttacatggcagcagacgggagaatgaaaaccaaccaaaaggggtttccccttataaaaccatcagatctcatgagacttactcactaccacgagaacagtatgggggaaaccgccccgatgattcaattatctcccaccaggtccctcccacaacacktgggaatcatgggagctacaattcaagatgagatttgggtggggacatagccaaaccatatcacaagggttgaaaaagtattgagtactatggtcactatttggatgatgggatcatttgtgtctcaaacctcagcatcatgcaacatacccatataacaaacctgcacatatatcccgagtctaaaataaaagttgaaagtattttaaaaatccatttaaagggcagaggttgattaattggatgaaaaaagc

SEQ ID NO: 591226 - DNA, 567 bp, Homo sapiens
aggaggaacaaggtgtattagtccattttcatgctactgacaaagacatacctgagactgggtaattcataaaaaaaaaaaagaggtgtagtggactcactttccatgtggctggggaggccctcacaatcatggtggaaggcaaaaggcatgtcttacatggcagcagacgggagaatgaaaaccaaccaaaaggggtttccccttataaaaccatcagatctcatgagacttactcactaccacgagaacagtatgggggaaaccgccccgatgattcaattatctcccaccaggtccctcccacaacacttgggaatcatgggagctacaattcaagatgagatttgggtrgggacatagccaaaccatatcacaagggttgaaaaagtattgagtactatggtcactatttggatgatgggatcatttgtgtctcaaacctcagcatcatgcaacatacccatataacaaacctgcacatatatcccgagtctaaaataaaagttgaaagtattttaaaaatccatttaaagggcagaggttgattaattggatgaaaaaagc

SEQ ID NO: 591227 - DNA, 555 bp, Homo sapiens
gaattccctctgaatgagggacaggcatgaaagcccaggttgaaaaargctcccagttggttctgtctgcctgggtacgtattttggttttcaaaggaattattttcctggcttgagttctttcagaaatccattaatttataaatcaatagaaatatatccagcacctgctttgtgctaagtgccctggggaatatatctgcctgcaaggaacttaatgtatagttgcagggggcaaagcaaacaaatgcagaacaacagcagtaccaaagagatgctattcatatttaaaaaatacatagtaaaaattctaaagtactgaaggtagaaagtaagttcctctcccacccctacccttcttgccctggttctctttccctctaatcagtttcttagtgctctctgagagattctttctatataaaggcatatacgtacatatagcacctttccttttgccaaaataccaaacgagacatactataatactctcctgtgctttgctttttaaaattcataaaatatctcagatattgtgctgtatcagtacatatt

SEQ ID NO: 591228 - DNA, 563 bp, Homo sapiens
ttatttaatagcccctttatcaatggtcttttaggttgtttctaggcttttgctacctgaacaatgctgcaataaattctcctgacaaagagctataattaagggctaaattgtgtggctcagactgtaagtgattctgatttcacagtatgggtgctaatggcattttgggtgagacagttttggttgtgcagaactgtcttgcccactgcatgatttttaggttccctgccaaagttccagcatgctctcattgtgacaaccaaaaaagccagtcccggtccccccagctcccatctccaagtgttctctagggggatgatattaccaagattgggaattgctgcaagcatagtgagttagagttggaagccgtctggggaaaagggcagtctgagcrtgctatgatttcagtgtttgtgtccccttcaaaattcatgttgaaacacaaccccagtgcaacaatattaagaggtgaggcctttaggtggtgattaggtcacgagggcttcaccctcaaggataggattagcacttctaaaaggacatgaggaaatgaattc

SEQ ID NO: 591229 - DNA, 563 bp, Homo sapiens
tcagggcagtggttcttaagttgaggygactttgctgtctaggggacatttggcaatgtatagagatagttatgttttttaccctggggtgggagatgtgagctacagacttctagtgggcagaggccacagacgctgctaaacctcctacagtgcacagcacagttcccttaacaaagaatgatccagccccaagtgttgataatgctgaggatgagaaacctagagttagggagatcactacattttttttttctcagactccttcttctcttggctttgttctcttctccaccccacatgggtttctttgttgcttcttgtacactttaagaaatggctggcccagctcttccctctaccctccaccaaacgtgacctttaagctcccacatccaaattcaactcactatatatagtctctttgttccaattccacattttcgggagagagacattgattatcccaggtgctccttccgcttcaatccagtgtgtcagagggcgggttccatgggctcttgtctgcttaaaaaagactgcaggaaagatagtctgggaag

SEQ ID NO: 591230 - DNA, 613 bp, Homo sapiens
tggctgattttaattatggattggatgcaggatatgaatgatgagagttgaggatgacttgggttttgccctgcataatgcctgttgagggataaataaacaaatgtttagtcagggcagtggttcttaagttgaggcgactttgctgtctaggggacatttggcaatgtatagagatagttatgttttttaccctggggtgggagatgtgagctacagacttctagtgggcagaggccacagacgctgctaaacctcctacagtgcacagcacagttcccttaacaaagaatgatccagcccyaagtgttgataatgctgaggatgagaaacctagagttagggagatcactacattttttttttctcagactccttcttctcttggctttgttctcttctccaccccacatgggtttctttgttgcttcttgtacactttaagaaatggctggcccagctcttccctctaccctccaccaaacgtgacctttaagctcccacatccaaattcaactcactatatatagtctctttgttccaattccacattttcgggagagagacattgattatcccaggtgctccttccgcttcaatccagtgtgtcaga

SEQ ID NO: 591231 - DNA, 403 bp, Homo sapiens
gaattcaacctacagatttgactcctgggggttctgcttagcccacagaattgttcaggtgtctgttcattcatcctagtccttttaaattataggaaaaggaaaccgtatgygaggaaagatggctaaagatctcctgggcagtattcagaatctgagttcctactgagctggacataaggagaaagctgcttgctgtgtttttcctttccacttctaattgaatttgaatccagcatatctttggaggaagtcatttaaagcaacaaacgctcataactagtgactggcatgaaaaataatagtgggacaagagagcgagcatggaatgcaatgtgcatgtattgtgacatatggctctccttttgcgtttccactgactgtattatccaggcaggaagtt

SEQ ID NO: 591232 - DNA, 617 bp, Homo sapiens
ggcgatgtgtatctgcaggtttggagagaatccaaccatagtggtgctcacataccaaataaaatgaaattccaaggcgcagaagccccatccttgtattgtatagcagcaccgagggacattttcagcacataggacacaagggatgactaacatggatttcactctctccttcaagtacttacaagtgatattcactctgcagttaatcaagtgctacttgacagattgtgccatcttttctgatgtaygcttattttcattgtctccaaagactgtgagctctgagaggtcatgtcttccacatctatgcagttctcacagtgcctcccacacactgaaacccaatgaagaactgattttggacatttggatcaactggatattttcattggaatatcccatctttagttcaaattcagtatgagttaccttactcccctctttgttcaaaaacagtttaagtgagcttacatgtcatgtaacaagataacacaaattagagatgggtggggaaaaataagaaaaacaagaatagggccatagagtggattccccagaggtacacatgctgcaggaggaccacagatttggctttacaggactaactaagatta

SEQ ID NO: 591233 - DNA, 610 bp, Homo sapiens
ctctgatttctaggtggttgagcctgggatggataaaggaggtttgtcaacctcaaaatgaaatttgttattctttctggggtgcaaaccgaggatatgaaagcttttcaaagtgtacraactctgagtaaattccaagccgggttagtgcaaatgactttgaaactcatcatattctaccagctccctcagaaagtgaactgtcagctatgaattgttgtatggcatcctgagctggactggattcacaggatgagtctgcgggagaagtgtttggagttctttctctgagctgctctttaggagaaagcttggctcagtaaaacctaagcttagaccaagagagattgttcctacctcccatgtactgagacccgctttacatggctactacaagttaggcattttgctcatattttcatacatgctctcatttaatcttcactattatcttgtaaggtagatgttatattgaaacccaaagactaatttatctgagatctccccttgtctaaatcctagagtcaggattgtaggattaccagaatctgtgctctttccactctcattgtctttctagagctaatgctttttagaagtgttggaaagg

SEQ ID NO: 591234 - DNA, 546 bp, Homo sapiens
gtacttatgctgctgctgttacactgtagaatagagaatgcaaaggttcttatctcaggcttctgaggttctaggagccatcttatggaaatgtaattctgggagccatcttatgttatttaagcaacatacagacttataacttgtattatgtattatatgccacatattttgtcagtcatttcatttatactgtgttcttacaatctcatctccccgtgtatttctgcacatcaacatataagcctggacacatagtagatgctyagtaaggactcattgagttgaattgaggggtgtacttaataaataatattttggaataatgtagacatttgtgagctggaaattgcaaatgaaaatattatcatgaaaataccactaataatattaagcataagattatatagggtttttgccttttctcaacttttccataaacacattagtcctcataagcccagtgaggtggacaacatgctaccatcagccccattttacagatgaggaaatgtgtgtgtcagtgaggttcaatcttgagcttag

SEQ ID NO: 591235 - DNA, 528 bp, Homo sapiens
gtctttggacacctccatcaaataaatggttattcatactgtttggagtcaggaaacctgggatctgtcattaactacttaggaayctgtgtggagtttctcttcttaacctgtaatgtgaaggagtttacaaactcaaatttttacagggtcaggtacgtgcgaactgcaggtggatgcagagatagaggagtggggacaactgtgagtaactgcagatcgctgccctacctgaagggggcagctgctggtcagctcagaggtgcctggtgtgcaggaaatgaaggcccccacatggacaacactaacaagtttttcaagaaaagccctaaatttggctttttatatgaatttctcaattttaagtattgataactaattcaaatgaaaagcaaacatacacattacaagggccaaattaaaaaatatgtgggccaaatcaggcccaaattaccagattgcaccctctatatgagattattttcaagggccctttcagctctaagaggcaatgaaaaagacccagta

SEQ ID NO: 591236 - DNA, 528 bp, Homo sapiens
gtctttggacacctccatcaaataaatggttattcatactgtttggagtcaggaaacctgggatctgtcattaactacttaggaatctgtgtggagtttctcttcttaacctgtaatgtgaaggagtttacaaactcaaatttttacagggtcaggtacgtgcgaactgcaggtggatgcagagatagaggagtggggacaactgtgagyaactgcagatcgctgccctacctgaagggggcagctgctggtcagctcagaggtgcctggtgtgcaggaaatgaaggcccccacatggacaacactaacaagtttttcaagaaaagccctaaatttggctttttatatgaatttctcaattttaagtattgataactaattcaaatgaaaagcaaacatacacattacaagggccaaattaaaaaatatgtgggccaaatcaggcccaaattaccagattgcaccctctatatgagattattttcaagggccctttcagctctaagaggcaatgaaaaagacccagta

SEQ ID NO: 591237 - DNA, 557 bp, Homo sapiens
cccaaattaccagattgcaccctctatatgagattattttcaagggccctttcagctctaagaggcaatgaaaaagacccagtagcttcctgctgaaaggcaagaaattatttatctccactcatggtcaaaactcatcatctctttttccatcagagaatattccttggtaccagggggtgatgccaccccaagcctcccaagttctcacttgygcagaggagctggaattaccatgctacactgcagtgagtgacagatgtagatgcagggggagagaaaagcagaccttggtttaattatgtaaatctatggctacgctttaataaagcagtgcaataaaactgtcttaactgccaagtttgggaaataggatgagcgaggttttcattcccggtactatatttgggaagaaaaaaaataagaagaaaaatgcagaagcgctgattcatctctgaaacccttcagaagcatgtcagagattcctgtgcttcttgcccctgccaaacgacatttgcagtgacaactggtgccgaaaccctagcagcccacacaga

SEQ ID NO: 591238 - DNA, 557 bp, Homo sapiens
cccaaattaccagattgcaccctctatatgagattattttcaagggccctttcagctctaagaggcaatgaaaaagacccagtagcttcctgctgaaaggcaagaaattatttatctccactcatggtcaaaactcatcatctctttttccatcagagaatattccttggtaccagggggtgatgccaccccaagcctcccaagttctcacttgtgcagaggagctggaattaccatgctacactgcagtgagtgacagatgtagatgcagggggagagaaaagcagaccttggtttaattatgtaaatctatggctacgctttaataaagcagtgcaataaaactgtcttaactgccaagtttgggaaataggatgagcgaggttttcattcccrgtactatatttgggaagaaaaaaaataagaagaaaaatgcagaagcgctgattcatctctgaaacccttcagaagcatgtcagagattcctgtgcttcttgcccctgccaaacgacatttgcagtgacaactggtgccgaaaccctagcagcccacacaga

SEQ ID NO: 591239 - DNA, 503 bp, Homo sapiens
tgaatgtggtggcaggtatttctttccccatcaggtggtgggggctggagtgctgttctccgtgttttaactatccaaatacgtgcttgtttgttttgatttcagtatttttwaaaaaactccattttcatattataggactaggattttcatggccaggactctattggtcatgagcagcagatgcccaccctaaagagctaagccacaagtgcccataggagtggaattcccagagcagatgctttgtactttatggacatccagttctattaccaggttagagcttttgccaataaagaaaactgaaagggcaaccactctctcatttcttcaacaaataaacaaacaacttgcatggaaaaagagacagggagcatgagagagagagagagagagagagaaactgtaaattaaaacagtgttctgggccacatgaatcaatgaaaggtttaggaaccttatttgcattctaaattaaacaaactattaagaatttacat

SEQ ID NO: 591240 - DNA, 610 bp, Homo sapiens
gccaccgtgcccagcctaaagtttttacaggtgataataatattgtggttctgtttttaaaaagtctttatcttttagagatacgtgctaaaatatttatggataaagtaatgtaatgtctggaattaaagtaatctgtggatggaagagtgcrgtggtgaggtagagccaggttgtacttgttggaaataattgattgtcagaatttcaggaattttgtgagctggtggtaaagagtcattattaaaaattaaattctatgaacttacacttaaaaaaattttaagaagctaataaatactcaaaacttactgcttgctagttattttactacaattactatgatctgtgctcctgaaattattgcattgattatatctatgtggtgaaaatactatataactgtgcttctgcacatctctttccaatcctccgttggcaacatcatgctggtaacttgaagtcagccacagaaatctacaaatcagggatttctccagggagagctgatggttttgcatttaccaccgcactgctggaggagtaggaggggttcgaataaaacaaaatagcttatgagttgataattgtcttgaagcagagtgaaagg

SEQ ID NO: 591241 - DNA, 610 bp, Homo sapiens
gccaccgtgcccagcctaaagtttttacaggtgataataatattgtggttctgtttttaaaaagtctttatcttttagagatacgtgctaaaatatttatggataaagtaatgtaatgtctggaattaaagtaatctgtggatggaagagtgcagtggtgaggtagagccagsttgtacttgttggaaataattgattgtcagaatttcaggaattttgtgagctggtggtaaagagtcattattaaaaattaaattctatgaacttacacttaaaaaaattttaagaagctaataaatactcaaaacttactgcttgctagttattttactacaattactatgatctgtgctcctgaaattattgcattgattatatctatgtggtgaaaatactatataactgtgcttctgcacatctctttccaatcctccgttggcaacatcatgctggtaacttgaagtcagccacagaaatctacaaatcagggatttctccagggagagctgatggttttgcatttaccaccgcactgctggaggagtaggaggggttcgaataaaacaaaatagcttatgagttgataattgtcttgaagcagagtgaaagg

SEQ ID NO: 591242 - DNA, 540 bp, Homo sapiens
cctacccttggtttggtccaggaacacttccttctcctttcctttttgtcactatgcagttggcccaccaggaactgtccttgccagtgagatctgacattccccagcttccatgccagtaactgggtaagtggataaatcacaccagccacaatctgcatccagctgccctgaatttgttgagggtaggaggagtaggaagctccatttgggcttctggtctaagttatatccttcaacagagttaagtcaactgcatcaagactatatggaggaagggcagttattggacagctaataaagcttcatttcaaacccgtatgtctcagattgtctgttcttagctggcaaccattcaaatacaggagtagcaaagagtgtttggcacccttaacttccagctgaagtatactgataggtgagattagttcttttgcaagttctcccytctataaacatgtaagcaaaggtcttctggcataatgctttgaaatgaaagaagaggctttataaggtagagatttcagcttatgtggaatt

SEQ ID NO: 591243 - DNA, 491 bp, Homo sapiens
aatgctttgaaatgaaagaagaggctttataaggtagagatttcagcttatgtggaattttttcataaataacatctgtagatataggatgcctaaaatatttacaagaggctagagatatgggatgcagtttcacacagtaggaaagtagcaagttcaggaatagaacacatggtgtctgcctctttgtctagagtttcaatggcctgccttgcagcccactgggactaggaattttagccctgccactgatgagggtgatgtgtgcctcagggtcctttaattattggttgtaagaaggcattcattctcttctgctcacatgttaatgtagagagatggaaaatctgattgttcatcccacaaatcctttggtttgtcacacccacacctgggaccacatgcaatgaattaaattagaataactgttgatttaatggctgctttggaattttyttaaaaaaacctaccaaagctttctttagccagct

SEQ ID NO: 591244 - DNA, 432 bp, Homo sapiens
aattcccgtaggcttcaagttttttggctccrgttccaaaagttgacctggcttctgtatgtctttctttcattctgtaaacaactccaaactcttttcaatatactctttttgtattaagcttgcagctcactgaaatttgatttttattccttttaatcagaagattcctggcaaatatatacaattttactcactctctagccatataaccttacctaagtcactttacctctgggagcccaagattcctgagctataaattgagcaacaactgaggccaagggggaaagcatgtgaggtaaacatacgtgaaagggctttggaattgtaatatgctacaagatgggagggactacaggatgatgatgaaaatgaggacgatgatgataattcagatagagcaagacaaaatgcaaaatccattccaat

SEQ ID NO: 591245 - DNA, 597 bp, Homo sapiens
aagtcactttacctctgggagcccaagattcctgagctataaattgagcaacaactgaggccaagggggaaagcatgtgaggtaaacatacgtgaaagggctttggaattgtaatatgctacaagatgggagggactacaggatgatgatgaaaatgaggacgatgatgataattcagatagagcaagacaaaatgcaaaatccattccaattgttttgcagctcttctgtctttcttccaagcatgggcagattttaatgtagaaaggaagaaaaaaagacagaaaagaaaatacaaatttaggtcagaatcaataggcataggaggattgattgtgccctctgaacaagaggctcaggactctgtcctaccctcttccaacaggaagaattggatatggataattgtgcagaaaacatgtatgatctgtagccatgaaaagtagtccctatccaaaatcaataaattaaaagataaaacckgagacatcttgttttcttcttcacaacctgtttaatcagctacctattaaacacagtccttggcatatcaacaaatagagggaaaaaattccagttactctcagaaacaaaaga

SEQ ID NO: 591246 - DNA, 647 bp, Homo sapiens
cagggaattttggagtttacaaaattaatggaagggctaaaggaacatgttctaagatgggcctccaggaatgactgccaaaacaatagaaaactggcccacctctgaggctgccgctggagacataaatgcaaaattatacccatgtgtagctggagcccaagaattagagagcagaatcaagatgacactgctgccatgatggcctctcaatacttgggaagctggagattagacactggaatgctgatgccaaacaactcacattcccccatccttgcttatgaataaaaacagaaaaaggaagcaggaaaagggcttctacctccctcccaccttgtatatcttaaaacaaaaacatctaattggaacaatctattttatatccagagtcctgtttataaaaaggtgttggaaatgtaatttktagctttttaacctcttcatagaggatagtaaaatgtaaattgagtaaggcaatcaaaagaattcactacatgacttctacaatgttcccaaaatatcttcacttcccttgtgctaaaatatgtggaaatctattaaagaggattcctttggatgaagccttaacccttccatgagccacagaaataattcctggaattagtacaactttaagccattag

SEQ ID NO: 591247 - DNA, 562 bp, Homo sapiens
atgtgtagctggagcccaagaattagagagcagaatcaagatgacactgctgccatgatggcctctcaatacttgggaagctggagattagacactggaatgctgatgccaaacaactcacattcccccatccttgcttatgaataaaaacagaaaaaggaagcaggaaaagggcttctacctccctcccaccttgtatatcttaaaacaaaaacatctaattggaacaatctattttatatccagagtcctgtttataaaaaggtgttggaaatgtaatttgtagctttttaacctcttcatagaggatagtaaaatgtaaattsagtaaggcaatcaaaagaattcactacatgacttctacaatgttcccaaaatatcttcacttcccttgtgctaaaatatgtggaaatctattaaagaggattcctttggatgaagccttaacccttccatgagccacagaaataattcctggaattagtacaactttaagccattagcacctttgtgtagattagtgtatttaaccacttaccagagaccaggaggtaccaaagca

SEQ ID NO: 591248 - DNA, 647 bp, Homo sapiens
cagggaattttggagtttacaaaattaatggaagggctaaaggaacatgttctaagatgggcctccaggaatgactgccaaaacaatagaaaactggcccacctctgaggctgccgctggagacataaatgcaaaattatacccatgtgtagctggagcccaagaattagagagcagaatcaagatgacactgctgccatgatggcctctcaatacttgggaagctggagattagacactggaatgctgatgccaaacaactcacattcccccatccttgcttatgaataaaaacagaaaaaggaagcaggaaaagggcttctacctccctcccaccttgtatatcttaaaacaaaaacatctaattggaacaatctattttatatccagagtcctgtttataaaaaggtgttggaaatgtaatttgtagctttttaacctcttcatagaggatagtaaaatgtaaattgagtaaggcaatcaaaagaattcactacatgacttctacaatgttcccaaaatatctycacttcccttgtgctaaaatatgtggaaatctattaaagaggattcctttggatgaagccttaacccttccatgagccacagaaataattcctggaattagtacaactttaagccattag

SEQ ID NO: 591249 - DNA, 562 bp, Homo sapiens
atgtgtagctggagcccaagaattagagagcagaatcaagatgacactgctgccatgatggcctctcaatacttgggaagctggagattagacactggaatgctgatgccaaacaactcacattcccccatccttgcttatgaataaaaacagaaaaaggaagcaggaaaagggcttctacctccctcccaccttgtatatcttaaaacaaaaacatctaattggaacaatctattttatatccagagtcctgtttataaaaaggtgttggaaatgtaatttgtagctttttaacctcttcatagaggatagtaaaatgtaaattgagtaaggcaatcaaaagaattcactacatgacttctacaatgttcccaaaatatcttcacttcccttgtgctaaaatatgtggaaatctattaaagaggattcctttggatgaagccttaacccttccatgagccayagaaataattcctggaattagtacaactttaagccattagcacctttgtgtagattagtgtatttaaccacttaccagagaccaggaggtaccaaagca

SEQ ID NO: 591250 - DNA, 610 bp, Homo sapiens
atggtgcctggtgtatcatcttggcctagaggcacagaatcaatatgagcaccttggatctgggaatgatcattgcacacagcaggaaaggagaagatggaggtcctgggccattgccaagtaagactactcagctcttctctcacttccaataaaagaagggaggagcctactttggcaactggccaggattcctgcctgggaattagtcttgcctgatgggtagcgcatcccaggcctgttcatctacctgccagatattaagttgtttaccrggctggaggaaagccccatggcaagccatgataattatccaggctgactgctctctgcctgggctcctctcagaggcttgtcctagtcccagggaactataaactagttaacaactcaactctaattaataaattccttaatgaagatataaatgcccacatttttatcctttacgatgtactttgggctttttttcccgttaaacagctttactaatgtctctgcttccttctttttcaattcccactttcacatttgtttctggtctctaaataacagccactgactgtcttagctctttaaatccatctcattcaatgccccactgctatct

SEQ ID NO: 591251 - DNA, 601 bp, Homo sapiens
ctagctgcggtccttagactaaaggcatggagtgtcacaaaggtcatacataaatatctgaaactcctttttatttgtcaaaccttaaaagttgattttaacttaaaacatataagtatatatctattcaccacactttcttatattacgtaaaatttcaaacctatacaaaaataaagagaatatcatgacctccatttacccatctcccagtttactaagamtcatgtgatcaagtttattttacctttatccacccagtttttcccaccactttggattaacatgaagcagatctcaaaaattttattatttcattacatcttaataagaattcttataagatccatagctgtacaggtgcccaacacaaattttctccaaaaagaatgactaaaacaacaactaaataaactcacttcaagtagaatgtcttagggagaacactgaaattcagcaaggaagtgatataagccttctgaaacacagaaacctggggttgcagcatagagaggaaagcaaagcacccagccaaaaattggtcagaggcgaggactccccattgcagtgaaaaggtaagtgggatatccccaacagtccc

SEQ ID NO: 591252 - DNA, 601 bp, Homo sapiens
ctagctgcggtccttagactaaaggcatggagtgtcacaaaggtcatacataaatatctgaaactcctttttatttgtcaaaccttaaaagttgattttaacttaaaacatataagtatatatctattcaccacactttcttatattacgtaaaatttcaaacctatacaaaaataaagagaatatcatgacctccatttacccatctcccagtttactaagaatcatgtgatcaagtttattttacctttatccacccagtttttcccaccactttggattaacatgaagcagatctcaaaaattttattatttcattacatcttaataagaattcttataagatccatagctgtacaggtgcccaacacaaattttctccaaaaagaatgactaaaacaacaactaaataaactcacttcaagtagaatgtcttagggagaacactgaaattcagcaaggaagtgatataagccttctgaaacacagaaacctggggttgcagcatagagaggaaagcaaagcacccagccaaaaattggtcagaggcgaggactccccaytgcagtgaaaaggtaagtgggatatccccaacagtccc

SEQ ID NO: 591253 - DNA, 622 bp, Homo sapiens
actaaaaatacaaaaaattatccaggtgtggtggcgggcgcctgtagtcccagctactcgggaggctgaggcaggagaatgacgtgaacccaggaggcagagcttgcagtgagcagagatcrcaccactgcactccagcctgggcaacagagcgagactccgtctcaataaataaataaataaatacaataacactacaatcaaataaataaataataaaaataaaaaatgcttctagctttgatgacttgattcaccatccccattagtaagtgatgctcacaacctctcttcctctaaagctgggttttgtggggttaggattaggaaaggcttgcaatgactgtgtagtatcctggtgccctaacaggtctaggtggtgaaagagcactcatggtttctaaaggcagtcactggaagcaaagaaacctctggcacgtaaagatccttctgctgatcttagtaagaaaggaagctttctaagtggattttgtatctcgaaacccaccttgaaatctttaaaggacactgataaggccctgacaaaatggttaaccatgtccatcaacctatatcataacattatccctttgagtcctaatttttttaaatctcctcaaag

SEQ ID NO: 591254 - DNA, 599 bp, Homo sapiens
cttctctgacagcttttccctgaaattgagtcaagcactcagctacgcaaaatgcacagaatgtatccattgatttagctctcaccattttaaaaaggcatggcataaatttcaaaaacataacagggtttttttaatgaatacaagaaatttgaatgagggaaaaataaattgaggaaaagtagaataaactcagggtaaagagtaagacrtaaaatgcctgacacagaatcttgctagaaatgaaccacaaaatctggctctcagctttctagctaccaaaactaagagacagactcaatcacttaagtaatccacagtggccctatgtttgcttgcttgtttgtttttaagaacacctgttcctaatgctgtcatctgagaaatttattcctctggtcttcactgatcattcgcatccaaaatgtgaatgatcagtgaagcagcttagaggaacaatctggtttgaacatctgcaaaacaccctatttgtccccattgacagaggtaccgtttagggtcatttaacccccaaaatgagtaaaaagcaaaatttggggaagaacacccaaagagtggtgaccaaggaacatcagaca

SEQ ID NO: 591255 - DNA, 379 bp, Homo sapiens
acctccctacagaaaggaaaatgcaggacagggctgtgtcatacaagcatctcagcagcaaatacactcagggtgctgcctgtaattccacttcatggctctcactcaatataatatagggacatttgtatacatgcaaatataatgcaataaaggtagtgcatgcatggaatccgacgccctcctgctcagtctgcagcaggaggtcatttgtgaagctcccyggagccctgacccagggcttcactccctgaataaaagcagcctgaatggtaaatgtgcttgccttgagccagtgcccactgcagtttccctgctggatggcagttcttattggacctggtacagttcttatttcacaaatcagagcttaaacctt

SEQ ID NO: 591256 - DNA, 596 bp, Homo sapiens
atttcatctctctttcgcagtacccccactcagtctttttttcttcctgtttttccattttctgccaccttgctattgatataccttaggctcttcttctcaccatcctctttaactggacttaaaaccacagactgtcggcaccagaagactctaaaagaatgtatacacttttagataaataacatgccccagatcacagctactcagcagcagaccacaggcagcattcagccctcctgactcccagggtctcacatcctagtctctctctctttcagagttttaattcttgaaggtgatagctctcacatttcccagagaataacccaaagtacaccgtctgtctcacyaattctagaataaaaataattaatacagctctaacttaaaagtttgatatgatggtgtattcatttcagttaagctgtctcaaatcttacttttttttttttttttttttgcaactctgagctatggagtatcttttctctcccacttaatgtcattggtggactgaagccagtacatactggctcatgagagccaattcttagcatctctttccaattctgcattcagtgatatcacattgg

SEQ ID NO: 591257 - DNA, 622 bp, Homo sapiens
gcttgcctcatagaatgaataaataagtaatatctccatttctgattttggaaagtttgccaaacagttgctgccagttcttctctaaatgtatcctagaagtcactagtaaacccatctggtattagaattttcttgattgggaggttttttactacaatttcaatttctttacatgttattggtctgttgacatgtattttttatttcttcttgagtgagcttaggcaatttttgtgtttccagaaaattcrtcaatttcatctcaattatctagtttatggcctaatttggtcatattctcataatcatttttacttctaaaaggtcagtagtaataaccccaattttatttcttatttcaattatttattatccgttttcttctttgttagtatagcttaatttgccaattttgtcgatttttttaatagaaacagcttttggttttattatttctttatctataattccagtcctctattttatttatttccatgttaattattattatttcttctcttctacttgtgtttagtttgctcttcttttctggctcatgaaagtcggaagttatgttattgatttgagatcttttgtacattttttaatgtaggtgctt

SEQ ID NO: 591258 - DNA, 494 bp, Homo sapiens
gaattccattaaaagctttgattttacatacattttaggcaatagtggaatttatcagatattttattcaactctttgaaattaagatatatcacaaaaatttgaaattgtgtcatccataaaaactaatcatatctcttcctttgtaaaagtatttcaatggctgtcactggtctggtggtaaaggtgaaacttactatcatgtcttagaaggatgtaccatgttcttcccttatataattgagtctctgctgccatatccagcctcaactcacactgctcctaaatcttactcctatgtttagcctttttattgttttcaatttcktaaatacaggcttttatgtcacttatggacatttggatattgtaatgatattatagtctattttagaagttttttttcaaatatggcaattatgttactatattagagtcttgaaaataatagagttggccaggcgcggtggctcatgcctgtaatccctgcactt

SEQ ID NO: 591259 - DNA, 511 bp, Homo sapiens
atagagttggccaggcgcggtggctcaygcctgtaatccctgcactttggaaggtccaggcgggcggatcacgaggtcaggaattcaagaccagcctggtcaacatggtgaaagcccatctctactaaaactacaaaaattagctggacatggtggtgcatacctgtaaatccagctactcaggaggctgaggcagaagaattacttgaaccgggatctgggaggcggaggttgcagtgaatcagatcgcactgctgcactccagcctgggctacagagcaagactccatctcaaaataataataattattagaattatagagttacattatactattcaagaaaatggagtagaatcaaagagcattttactgtcatatccctagccatatgcctgttttcgagaaaacatttttatatttttctagcctttcacattattataaaacgtgtacaaaagaaaaaaactgcatataaatgtctttccattgatctactgatattaataaat

SEQ ID NO: 591260 - DNA, 620 bp, Homo sapiens
ttaatcctactttaggtttttttctaactgttagtcattaatttacagtacaaataaaaattagtcatttatgaggttcaaagcaatgaayaaagcagtgaaagtgccagtgcttgtgagtttgttaatgtttatacttgacacttcatttatttttttctgggcattcatttaaagtcattttaattattacctgtttagaataagatgcaaaaatatcttcacatagcctatagaataaaggaagaagtagaaaaataaaccatatcatattatgttttgtattacagtacactatagtatggtgtactataatatattataccatactgtaatagaatagaatatattagattagaatacaatcaaatatagtatactgtggtatattatattacactatattacattataccacagtacctcagggtatactatattacattctattctaatatatatatataacatagtatagtatactatattatactatattagattatattttatcataaaataatacattatattattaataatatactatatatagcatatattacaccattctatataataaaatactatattatgtatatagtatactatataacact

SEQ ID NO: 591261 - DNA, 620 bp, Homo sapiens
ttaatcctactttaggtttttttctaactgttagtcattaatttacagtacaaataaaaattagtcatttatgaggttcaaagcaatgaatwaagcagtgaaagtgccagtgcttgtgagtttgttaatgtttatacttgacacttcatttatttttttctgggcattcatttaaagtcattttaattattacctgtttagaataagatgcaaaaatatcttcacatagcctatagaataaaggaagaagtagaaaaataaaccatatcatattatgttttgtattacagtacactatagtatggtgtactataatatattataccatactgtaatagaatagaatatattagattagaatacaatcaaatatagtatactgtggtatattatattacactatattacattataccacagtacctcagggtatactatattacattctattctaatatatatatataacatagtatagtatactatattatactatattagattatattttatcataaaataatacattatattattaataatatactatatatagcatatattacaccattctatataataaaatactatattatgtatatagtatactatataacact

SEQ ID NO: 591262 - DNA, 593 bp, Homo sapiens
tagcgtgtgaatgcgtatttatcacttaatgaaactctctcacctatttctatgaaaatcaatcttggaagggaggttaaggaaaatagaactataaagagaaggttttggagatgtttagccaaatactcttatctgatgaactggctgggctacagaaaacttgattccatgtacagaaaataaagctttagtctaaaaaaaaaactttaatatttcttgatgactgtctatagacatagcatttatgtctagatatacattatgaaaattctcttgtcatcagaattaataattgtgttccattatgggctgaattgtgtcaccgcaacatttatatagggaagtccttactccatagtacctcagaatgtgactgtatttggaaatagggtctttcaagagataattaagttaaattgtggttctacgcaagagcactaatccaatatgaygggtgtccttttagtgggagattaagacacaagacaacacacaaactgaggggaaaccatatgtgaacacaggaaagaagacagccatcttcaaggcaaaaaagagtcctcaggagaaactgtatcagcagacacctt

SEQ ID NO: 591263 - DNA, 621 bp, Homo sapiens
ttttctaatgtttcatatgtaaaatgagtaatctaaacttggagtctctacgtcctcagcttgcatacattctgttcttcacctgttaaaatatagacaaattctttaatgaagttcgtctctatcagttcacaaattgtctcttacttggtcagtacattaacaacttttaggcctcctacatcactattttattgcattggctgttgtaaaatatgttctcaaatttttcttttgctctaaaccccctgaatgtactgtgtaattccttggctgattttaaattgacatttaaaattacatttaaaaatgtatattttagatatttgccaagtatataatttcaaaaatgataaaaaatattctttaaggataaaaatatttatttttatataaatgaatggaatctaaaagctatagtgatttaatacctgycatcaaaaattcatcgtatattaatgttctctttttcactactcataaatcgcatgctgttttattttcattttgttttcacatattcttttgacttctctgatagaattgatcattatataatctatttaattgtttgaaaacattgtatctatcaacctgtttagcattctgttatagaattct

SEQ ID NO: 591264 - DNA, 560 bp, Homo sapiens
cacatgaacacatggagggaaacaacacatgctgaggcctgttgagggtgatagggggtggcaggagtgaaagcatcaggaagaatagctaatggatgctgggcttaataactagatgatgagttgatctgtgcatcaaactatcatggtacacatttacctwtgtaacaaacctgcacatctgcacatgtactccagaacttaaaataaaggttgaaaaaataaaaggtcagtgatcagtatcagacaaaacaaagctacaaaacactataaaacttaaggacttcttaggtcttttttgaacatgcactgtataattggcatgtatgaggcttttcaaatctctcctaattcatgggtgttttttattaccctaattttccagggaaaatctctgttcttattgtgtttccaggccttggatgttcgtttatatatcttaaatgtcttttgcctcaagcttaggtttcttaggagtccaataatatatttaagcaattcctaccacttttaccgtctattgctgtgcaatagacaaaacagatgaaagtaccttacat

SEQ ID NO: 591265 - DNA, 473 bp, Homo sapiens
tcacaaattgcaaatagataacttcctttatcgccactttgtttttatattctaccttcacatttaatgagtctacatttattacttagcactttgtatataccaaaaattcttgatctctttcctgaaattttacatttattttatggttaaaaaatactagaactcagagcatctcagaaatgttyagtctcagcaagctagtgaatgttggaacagattcacaggcgtcactgattccagagccaaaatgctaatcagtttaaacatatattttggataaaattgatctgcctccataacaaaggcactgggcttacagttaacctgaaaatcagttgtggatgtaaaggcattgttgccaattcagtttggttgagatgagctttaatattcagtcctattattctgagtgtcaattagagccaagagcgagcctacaatgttattgatgttatcgcttctcctccagc

SEQ ID NO: 591266 - DNA, 632 bp, Homo sapiens
ggagcctatttaaagacaactttatatcacaaaccttatgttcaagccttaatgtacaacaaaatggaccaaatgaggcaaacagaatcaggtttccaaatataatcataattctaggttagctctcaaaatgagattgcagttcatatattctacaaagtatgttttsacattaaatgtaacatactgatgattatttttctgatttagacttcctttggtttctacctttatgtagatggctctaactacgaaaaagtagctatgcacctgccaggctgtatctccctcccagtggtgaaatcatgccctatcctccccattgccttttccttcagattcttatttgcatatgaatgttttgcaatgattttttttctctttcttctaaaactaagcagagatatttcctctacctagtgttattcattgtgaggagaggcattttttttttcttgcaggtgggagaatatagataagggtaataaagttcccatagttttatttttttatttttttctgggcatgaactagtggtatttattttcttttaaatcgcagagtatgattgctgtagcacttcttctcagttctattttcttttttaaaaaacaactgtaaattcaattgta

SEQ ID NO: 591267 - DNA, 632 bp, Homo sapiens
ggagcctatttaaagacaactttatatcacaaaccttatgttcaagccttaatgtacaacaaaatggaccaaatgaggcaaacagaatcaggtttccaaatataatcataattctaggttagctctcaaaatgagattgcagttcatatattctacaaagtatgttttcacattaaatgtaacatactgaygattatttttctgatttagacttcctttggtttctacctttatgtagatggctctaactacgaaaaagtagctatgcacctgccaggctgtatctccctcccagtggtgaaatcatgccctatcctccccattgccttttccttcagattcttatttgcatatgaatgttttgcaatgattttttttctctttcttctaaaactaagcagagatatttcctctacctagtgttattcattgtgaggagaggcattttttttttcttgcaggtgggagaatatagataagggtaataaagttcccatagttttatttttttatttttttctgggcatgaactagtggtatttattttcttttaaatcgcagagtatgattgctgtagcacttcttctcagttctattttcttttttaaaaaacaactgtaaattcaattgta

SEQ ID NO: 591268 - DNA, 632 bp, Homo sapiens
ggagcctatttaaagacaactttatatcacaaaccttatgttcaagccttaatgtacaacaaaatggaccaaatgaggcaaacagaatcaggtttccaaatataatcataattctaggttagctctcaaaatgagattgcagttcatatattctacaaagtatgttttcacattaaatgtaacatactgatgatyatttttctgatttagacttcctttggtttctacctttatgtagatggctctaactacgaaaaagtagctatgcacctgccaggctgtatctccctcccagtggtgaaatcatgccctatcctccccattgccttttccttcagattcttatttgcatatgaatgttttgcaatgattttttttctctttcttctaaaactaagcagagatatttcctctacctagtgttattcattgtgaggagaggcattttttttttcttgcaggtgggagaatatagataagggtaataaagttcccatagttttatttttttatttttttctgggcatgaactagtggtatttattttcttttaaatcgcagagtatgattgctgtagcacttcttctcagttctattttcttttttaaaaaacaactgtaaattcaattgta

SEQ ID NO: 591269 - DNA, 632 bp, Homo sapiens
ggagcctatttaaagacaactttatatcacaaaccttatgttcaagccttaatgtacaacaaaatggaccaaatgaggcaaacagaatcaggtttccaaatataatcataattctaggttagctctcaaaatgagattgcagttcatatattctacaaagtatgttttcacattaaatgtaacatactgatgattatttttctratttagacttcctttggtttctacctttatgtagatggctctaactacgaaaaagtagctatgcacctgccaggctgtatctccctcccagtggtgaaatcatgccctatcctccccattgccttttccttcagattcttatttgcatatgaatgttttgcaatgattttttttctctttcttctaaaactaagcagagatatttcctctacctagtgttattcattgtgaggagaggcattttttttttcttgcaggtgggagaatatagataagggtaataaagttcccatagttttatttttttatttttttctgggcatgaactagtggtatttattttcttttaaatcgcagagtatgattgctgtagcacttcttctcagttctattttcttttttaaaaaacaactgtaaattcaattgta

SEQ ID NO: 591270 - DNA, 583 bp, Homo sapiens
gcatgctggatctcattgacactagcatcaaaatacctgatattattacccatgacatatattaactactggtttctatgactgcttcccatcagtactccccacctcagtgatccttagtgatccatttactcatcaaatcaaaactaatttccccaaagcaaggctatgatgaatttgaaaagttgattatttcccagcagttaactttaaatgtcatggagcctatttaaagacaactttatatcacaaaccttatgttcaagccttaatgtacaacaaaatggaccaaatgaggcaaacagaatcaggtttccaaatataatcataattctaggttagctctcaaaatgagattgcagttcatatattctacaaagtatgttttcacattaaatgtaacatactgatgattatttttctgatttagacttcctttggtttctacctttatgtagatggctctaactacgaaaaagtagctatgcacctgccaggctgtatctcyctcccagtggtgaaatcatgccctatcctccccattgccttttccttcagattcttatttgcatatgaatgtttt

SEQ ID NO: 591271 - DNA, 616 bp, Homo sapiens
gcaattaattatcttctttgaatacccaaagcaatttatgttgcttaacctataataaagttaagtccattattattcctgttttataattgaggagactagaatctggattatttaagcaaccaaaatcacacagtcagtcaatgacagagtccgtgattaaaattctgtctatccccagatttgtgctcttcagataatgacatttctgcacagttattaawctgagtaaatagaatccatagtgaattattagctgatttcagaagattccgtgcaaataaaagtctttctgtcatttcatgttctgccagtctacattaatacaaatcaaagcaacaaggcagtttatttaaaaatattaaaagtaatagaagattgaatggaaggatgaatggatggattaagagataggtaatagataaattgatgagagaggaaaacacacagagagaaataaaataaaattaacaacactaataaaagtatgatttgatatataacagaaaacattctttagtttgttggtgtgttttgagtgtgtgtgtgtgtgtgtgtgtgtgtgtaggtattctgtcataaaaacacaattatttaaaacataaagtctcaatct

SEQ ID NO: 591272 - DNA, 572 bp, Homo sapiens
tttcatatgtttgttgaccacataaatgtcttcttttgaaaagcgcctgttcatatcctttgcaaactttttgatgggaatgtttgtttcttataaatttgtttaagttctttgtagattctggatattagccctttgtcagatagatagattgcaaaaattctctcccattckgtagattgcctgttcactctgatgatagtttcttttgctgtgcagaagcgctttagtttaattagatcccatttgtcatgacattcctaaccagcaacaggtccaatatcggagcctttatgtctttgtccacaaagtgagtatattctgatgcacagggcagcagtgtttaaggatatattctcttcatggagtaacatccaactcaaactttaatggtaactatttaaatctttccaagctctaaaagcaatttcttctgcttaattgctttttggggactgtaatacatgtgggcattcttatcctaaatattatcctttttgcatttattttcaacatttcttttatggccatttgagtgacttttctctggttatttatgcaatataggtgac

SEQ ID NO: 591273 - DNA, 636 bp, Homo sapiens
tgtttaactgttaagtagtttacttcaattattaaaataactgatcagagtaactgattatacttcctaggcacactaggccagatgtcaagaatcaagaattttattttcagagctggcactcattagctctgggtttggagaattcatttattctcttcattctttctgaatagtttagcattgttttctagatgtgattgagtttaaatgcactatttggaggcttataggctctgttcttttagggaaaataattttgaaaaagagaataaaatctctaggtcagaagggatctatggctgtctcacagcaaragtgaaacactgagatgcctacatggtatataaaaattaaaatgaaggcaagctgactgtgaaaaacaacagctaaattatggcaataaatgacaaatgtcagtaatatctctactggggacactatggaatggtggggactgaggataattagagaagacaacctgcctaaacatggcagcatctactaagacgtatgactctgttgatgaagaatatgagtagatgtcctgatgtttcaacacataccaaaaattaagatgttcatgtgacatgttcttttttatgtattttgctaagttgattattttaaagtaat

SEQ ID NO: 591274 - DNA, 565 bp, Homo sapiens
atcatccacatataaagatactaagatatttttatgataaataaatttgtcaccagcatgtattatgtattttctatatagttaacattttaataggcttttgagtttataggaaaatatggaaggaataaatatctttttttcaatgacattcttagttaaaaaaaataaaaccagagaaaatgaattaaaatataccactcattataaataaatgtatatcaactaatcgtaagagggcctgagttaaaacagttctgagtaggatactgataaattgggaaggctttcttgaagaaaaaatgttttaaataatctaataacaacagtacaggttagagcagacaaaaagaaaattaagataaagtcaagggaatttaaaaaggtagaaagataatgataagacaatattgtttggagctctgagggttacataggttagtaggagccctgcaacaatttgaacaaatacagttaatgaaatgaatrtaatacagctgctcacaatggctgtacagagaactgtgtgtgagctacacaaaagacactacaggttaacagcagg

SEQ ID NO: 591275 - DNA, 678 bp, Homo sapiens
tttggctaggacgtgagaatctattataattagcattttcattaatattaatatctcactcatatcatccacaatattcagtgtaagatggatcacagacctaaatatgaatgctaaagcttctagaagaatactttaaggaacatcataataatcttgggtgagataaacaattaatttttaattttaatacattctggagtacagaatgtattaaacataaaaataaaaattgtattaatgtttttactatrttaaacttatattcatttatttaaaaacctcattacatatataaggaactccttcaacaacagaaaaaataacttaaaagggggcaaagtgactgaataaatttcttcaaagacatacaaatagccaaaaggtatatgaaaagatgttcaacattgctaatgatcagagaaatacaaatgaaagccacaatatgatatcatttcacacccattaggcgagccattataaaacaaaacaagacataacaagtgttggcagtgatgaacccttgtacactcttgctgtaaattgggatgtaaattggttcagccactgtgaataacagtatggaggttcctcaaaaaaactaaaattagaactactatatgatccagcaatcttactcttgggcatatgtccacaagaatggaaattagaatgtgg

SEQ ID NO: 591276 - DNA, 471 bp, Homo sapiens
gaggataggttgagcccaggagttcaaggctgcagtgagctatgattgtgccattccactccagcctgtgtgacagagcaagaccccatctcttaagaaaaaaacaattgggaactgaatatagcaattttgaagaggttctgaaacaaagaaaatctcatacatttgtggtgggagagtaaattgtatagctacatcttaaagaagtttggctatttcttataaagttaaactgcacacatgcccaatgacatcgtaattcaatttataggtatattccaaaaataaatsagggagggtgtgtattcacagaatagacagatataaaattattcatagcagtttatttttctttgtaggcaaaaactggatgtaacatctataaagaggagaagagataaacaaattatgatattgacttacagagtaataatacatagcaataaaaaataaaatattgacacataaaac

SEQ ID NO: 591277 - DNA, 499 bp, Homo sapiens
acaaatatatcacatcaaacccaaaagccattgctagcccaatggttcctgtcaatattaagtatgagataaaacgcctttatcttccagaaagttgtttataacatgccaaatatgtgaacacccaacagtcaaagacattatctctgcgatgcaattttgaaagttggtaaaatattttttttatcaatttcatcctacaagcaaagaatttaaaccattcttttgaagtggattttagaagattggaataggaagttttagaagtcagtcccttcacaaaaactgccattaaagtggaaaaaataagaattaacatttttggaactctggatcctaatcagataaataacaaccattggtggagtgcttgatgctattggtctttagtaagaaagtggctgcatgcacatgccagataccatcactcattcttattcacaagagtcmaaaagtgaaaacaaacctgtatgtgtggataaacaaaatgtggcatgta

SEQ ID NO: 591278 - DNA, 655 bp, Homo sapiens
tgcctgctttgtttatttcctttctttcatatggtttctactttcttgtctcttgcataaatcatcattttttgttgttgaaatttagatattttccgtaatatattgtagcaacactctatactcttttcacccttccccacagcttgttactgttgttcacttgtgtatttgtttagtgactgacagaactattttaatgatggtacaaccttgggtgtgtacactgtcaccttgagataacagtggtttgwcagggttctctttgtctctttcctaattacatagagctattaagctccattaattacatgctgattgctctattgttttcaacaatgatctggcacataaataacttcacagattgatccatttttattctggctcctgtaactagagagtgtttgcaattttcctttataattaagtgatttctctggaagtatattttgtttcttccttttggtttttagggtatttgttacagattttgcttcatgattaccatgatgctcacagaaaacatagtaatatgaagttttttaagtgcttaacaacctaactttcatagaaaaaaaaaaaaaactctgttttcacttggccctcaattttgacgtcacaatttactccttttaatattgcatagcgttta

SEQ ID NO: 591279 - DNA, 655 bp, Homo sapiens
tgcctgctttgtttatttcctttctttcatatggtttctactttcttgtctcttgcataaatcatcattttttgttgttgaaatttagatattttccgtaatatattgtagcaacactctatactcttttcacccttccccacagcttgttactgttgttcacttgtgtatttgtttagtgactgacagaactattttaatgatggtacaaccttgggtgtgtacactgtcaccttgagataacagtggtttgacagggttctctttgtctctttcctaattacatagagctattaagctccattaattacatgctgattgctctattgttttcaacaatgatctggcacataaataacttcacagattgatccatttttattctggctcctgtaactagagagtgtttgcaattttcctttataattaagtgatttctctggaagtatattttgtttcttccttttggtttttagggtatttgttacagattttgcttcatgattaccatgatgctcacagaaaacatagtaatatsaagttttttaagtgcttaacaacctaactttcatagaaaaaaaaaaaaaactctgttttcacttggccctcaattttgacgtcacaatttactccttttaatattgcatagcgttta

SEQ ID NO: 591280 - DNA, 528 bp, Homo sapiens
ttatgtctgtttcactagggagcatgtctgtctgcagaactcctcccattgccattcttgaagtgacaatcagaactcttatttttaatcagataggttatattctattctttaatagaaaacagaagaccagtgatttcatcccataataattttgctaaaattcactaaatgagaaatgaaattactaattttattagytttttttcttttgttaaaaaaattctcaattcagtctaaggaatagtgtctatttaaatatttcagataaaatatttatgcattctatttgtaaaattgataatgcctatttgttagcagatttgatctaatcttcctagttaccttggctcctaaagaaggagtatttgctcaaaaaatatattatgatcaattgagaagtgttgattagaaagacaacaatttcaaatatgttgaccacaaaatgcaaatttaaagaagtgttttaattgtgtgaaaaaattaaaactgataacaatatactagaaaaattacttattcagataa

SEQ ID NO: 591281 - DNA, 528 bp, Homo sapiens
ttatgtctgtttcactagggagcatgtctgtctgcagaactcctcccattgccattcttgaagtgacaatcagaactcttatttttaatcagataggttatattctattctttaatagaaaacagaagaccagtgatttcatcccataataattttgctaaaattcactaaatgagaaatgaaattactaattttattagttttttttcttttgttaaaaaaattctcaattcagtctaaggaatagtgtctatttaaatatttcagataaaatatttatgcattctatttgtaaaattgataatgcctatttgttagcagatttgatctaatcttcctagttaccttggctcctaaagaaggagtatttgctcaaaaaatatattatgatcaattgagaagtgttgattagaawgacaacaatttcaaatatgttgaccacaaaatgcaaatttaaagaagtgttttaattgtgtgaaaaaattaaaactgataacaatatactagaaaaattacttattcagataa

SEQ ID NO: 591282 - DNA, 621 bp, Homo sapiens
cctagttaccttggctcctaaagaaggagtatttgctcaaaaaatatattatgatcaattgagaagtgttgattagaaagacaacaatttcaaatatgttgaccacaaaatgcaaatttaaagaagtgttttaattgtgtgaaaaaattaaaactgataacaatatactagaaaaattacttaytcagataaacatcaacagttcacttttgagagacaatatgggactatatacaaagaatgactattggctttttgatgtttagatattcaaaatgacaatattatattttttgtaaagtatagatatattatttaaatatttatatttataaaaataatttttgaatattatttaattattctaacaatataataaatctgtattaaaattatataagtattttaaagcaatagttattttaattatttttagggcactactactttatatttgagttgactttgcttgggtaaaaagttactttatctccctaatgaaaggcatccatgttaagacataaatcaaaaatttagacttaaaaaaaattaagcaatagcaactactacaaatgtgatttatcttaaccagtggtatccagaaattcaaacaaattacag

SEQ ID NO: 591283 - DNA, 621 bp, Homo sapiens
cctagttaccttggctcctaaagaaggagtatttgctcaaaaaatatattatgatcaattgagaagtgttgattagaaagacaacaatttcaaatatgttgaccacaaaatgcaaatttaaagaagtgttttaattgtgtgaaaaaattaaaactgataacaatatactagaaaaattacttattcagataaacatcaacagttcacttttgagagacaatatgggactatatacaaagaatgactattggctttttgatgtttagatattcaaaatgacaatattatattttttgtaaagtatagatatattatttaaatatttatatttataaaaataatttttgaatattatttaattattctaacaatataataaatctgtattaaaattatataagtattttaaagcaatagttattttaattatttttagggcactactactttatatttgagttgactttgcttgggtaaaaagttactttatctccctaatgaaaggcatccatgttaagacataartcaaaaatttagacttaaaaaaaattaagcaatagcaactactacaaatgtgatttatcttaaccagtggtatccagaaattcaaacaaattacag

SEQ ID NO: 591284 - DNA, 608 bp, Homo sapiens
tcctttgcccactctacctgattcccagttccactccccagaatactgcatttagttctttaagtgtatattcttgtttatgcttctgtaattttttgggttttttttttggttgttatttgaatgttacatactatgcagtggacaaattatttcgatgtagatttagttaagtgacatatattttccttgacttcccttcctttcctcctaaaatattatttttagttcctcccattgataagtaatattcctgaaacatttattttattctaataattataaaataagtgtctttatcattttcattaataattattttagctctcatgcaatacttcttccccaaatctaacatagttatattttctaattttgtatataattgarctgtcaaaattgaaaatcaataactttttatattattgtgatcagagttttattgtaatgtgaaatgatacctgataatatatactactcttgtttaattttgttgatccttaaatttgaacatacatttctctttttgtgctattttcctttgacatatccttaaatttaacaaatctgtgtcacacgatattctctgcacagatccttctctccac

SEQ ID NO: 591285 - DNA, 473 bp, Homo sapiens
ttcttccccaaatctaacatagttatattttctaattttgtatataattgagctgtcaaaattgaaaatcaataactttttatattattgtgatcagagttttattgtaatgtgaaatgatacctgataatatatactactcttgtttaattttgttgatccttaaatttgaacatacatttctctttttgtgctattttcctttgacatatccttaaatttaacaaatctgtgtcacacgatattctctgcacagatccttctctccaccacctctcacgttcatttctggtctagatttgttactttctgaggctttccacaggtttatccattcatgattcatcattttttccacaactctcttcagtygtattcattgtaccttatgtcttctttctaaatgtaatcctttgtgtttcttgaattcatcaccaagtaatttgcttagagtttgtggataaaacatttct

SEQ ID NO: 591286 - DNA, 491 bp, Homo sapiens
ttttttggcatatagttgtttcaaagtctttcaaattcatttcatgaggccagcatcaccctamtatcagaaccagacaaggatacagtaaagaaagaaaagtacaggccaattcccttgatcaacgtaatggtaaaaattcttaacagaatactagcaaatgaaaatcaaaagaacattaaagtcattattcaccataatgaattggggtttattccagggatgcaaggatgattcacatgtgcaaatcaataaatatgatacatcacatcaacagagtcaagaaccagcaatacataatcgtttcaataaatgcacaaaaatcatttgataaaattcaacaccctctcatgattgaaaactctcaaccaattaagtatagtaaagatctatctctatgtaatacaggccctacgtggcaaacctacagctaatatcctgaaagggtaaaagttgaaagcttttctttgaagttcaggaacaagaaacga

SEQ ID NO: 591287 - DNA, 489 bp, Homo sapiens
ttttggcatatagttgtttcaaagtctttcaaattcatttcatgaggccagcatcaccctactatcagaaccagacaaggatacagtaaagaaagaaaagtacaggccaattcccttgatcaacgtaatrgtaaaaattcttaacagaatactagcaaatgaaaatcaaaagaacattaaagtcattattcaccataatgaattggggtttattccagggatgcaaggatgattcacatgtgcaaatcaataaatatgatacatcacatcaacagagtcaagaaccagcaatacataatcgtttcaataaatgcacaaaaatcatttgataaaattcaacaccctctcatgattgaaaactctcaaccaattaagtatagtaaagatctatctctatgtaatacaggccctacgtggcaaacctacagctaatatcctgaaagggtaaaagttgaaagcttttctttgaagttcaggaacaagaaacga

SEQ ID NO: 591288 - DNA, 489 bp, Homo sapiens
ttttggcatatagttgtttcaaagtctttcaaattcatttcatgaggccagcatcaccctactatcagaaccagacaaggatacagtaaagaaagaaaagtacaggccaattcccttgatcaacgtaatggtaaaaattcttaacagaatactagcaaatgaaaatcaaaagaacattaaagtcattattcaccataatgaattgggrtttattccagggatgcaaggatgattcacatgtgcaaatcaataaatatgatacatcacatcaacagagtcaagaaccagcaatacataatcgtttcaataaatgcacaaaaatcatttgataaaattcaacaccctctcatgattgaaaactctcaaccaattaagtatagtaaagatctatctctatgtaatacaggccctacgtggcaaacctacagctaatatcctgaaagggtaaaagttgaaagcttttctttgaagttcaggaacaagaaacga

SEQ ID NO: 591289 - DNA, 489 bp, Homo sapiens
ttttggcatatagttgtttcaaagtctttcaaattcatttcatgaggccagcatcaccctactatcagaaccagacaaggatacagtaaagaaagaaaagtacaggccaattcccttgatcaacgtaatggtaaaaattcttaacagaatactagcaaatgaaaatcaaaagaacattaaagtcattattcaccataatgaattggggtttattccagggatgcaaggatgattcacatrtgcaaatcaataaatatgatacatcacatcaacagagtcaagaaccagcaatacataatcgtttcaataaatgcacaaaaatcatttgataaaattcaacaccctctcatgattgaaaactctcaaccaattaagtatagtaaagatctatctctatgtaatacaggccctacgtggcaaacctacagctaatatcctgaaagggtaaaagttgaaagcttttctttgaagttcaggaacaagaaacga

SEQ ID NO: 591290 - DNA, 489 bp, Homo sapiens
ttttggcatatagttgtttcaaagtctttcaaattcatttcatgaggccagcatcaccctactatcagaaccagacaaggatacagtaaagaaagaaaagtacaggccaattcccttgatcaacgtaatggtaaaaattcttaacagaatactagcaaatgaaaatcaaaagaacattaaagtcattattcaccataatgaattggggtttattccagggatgcaaggatgattcacatgtgcaaatcaataaatatgatacatcacatcaacagagtcaagaaccagcaatacataatcgtttcaataaatgcacaaaaatcatttgataaaattcaacaccctctcatgattgaaaactctcaaccaattaagtatagtaaagatctatctctatgtaatacaggccctacgtggcaaacctacagctaatatccwgaaagggtaaaagttgaaagcttttctttgaagttcaggaacaagaaacga

SEQ ID NO: 591291 - DNA, 511 bp, Homo sapiens
aaattttgtagcaatttcttttggcagcactaggaaactagttaatgcctctattatttagttgaacaaagaacactattaagtatttttaagacaatgtatatcaatgttgattatggtaagcatacagtttataatcatataagtttctatgtaaaatttcacgttattatattgattttgtyttgttttaatcatacaagacttgcttggatgtggtaccattgaataccatccccattccctcctgtcccacagctttttgaaatttatggggctttgttccagactgaatatttcttttccctcaaatttcatatgttaaagccttaccccacactgtgacagtattgggaagtgaggtctttgagaattaattaggtttagacaaagtcatgagtgtagggccctcatcagtggaattagtgtccttatgagaacaggaagagagtctatagagtgctctctctctctctctctctctctctctctgtctatctgctatgtgagg

SEQ ID NO: 591292 - DNA, 511 bp, Homo sapiens
aaattttgtagcaatttcttttggcagcactaggaaactagttaatgcctctattatttagttgaacaaagaacactattaagtatttttaagacaatgtatatcaatgttgattatggtaagcatacagtttataatcatataagtttctatgtaaaatttcacgttattatattgattttgttttgttttaatyatacaagacttgcttggatgtggtaccattgaataccatccccattccctcctgtcccacagctttttgaaatttatggggctttgttccagactgaatatttcttttccctcaaatttcatatgttaaagccttaccccacactgtgacagtattgggaagtgaggtctttgagaattaattaggtttagacaaagtcatgagtgtagggccctcatcagtggaattagtgtccttatgagaacaggaagagagtctatagagtgctctctctctctctctctctctctctctctgtctatctgctatgtgagg

SEQ ID NO: 591293 - DNA, 570 bp, Homo sapiens
attggtatctcagtttaaacttggtaaaataaaattttaattagttctttttacacaataattttatctttcatacacagcttttatgtgatattgcattatggtcataaattatatgatactttcatctttatttctcacctttaacatctaaagcctcgattttaataaaagtaattgtttacatagccttctttatgactatcaaccttggatttatcctgattatacatcctycctgttttccaagaaaaaaattccaaatgttgttttttggtctgtgtatgttattatatctattatctgagttttgaaaattattctgctacagcaatcctttgttttagggttctagcagcagcttcaatatttatattaaatgcttattattttgacagctcaaatgtcattaaaatgacagattactagtttgagttcagaaaccattgacataaaaggagtaatgcgtattttgcaaaatttactgtgcaaaatagaaggacatatattttaagttgtcaatgttaattgtatctttttctggatgagcaataaataagtgctgttctg

SEQ ID NO: 591294 - DNA, 570 bp, Homo sapiens
attggtatctcagtttaaacttggtaaaataaaattttaattagttctttttacacaataattttatctttcatacacagcttttatgtgatattgcattatggtcataaattatatgatactttcatctttatttctcacctttaacatctaaagcctcgattttaataaaagtaattgtttacatagccttctttatgactatcaaccttggatttatcctgattatacatcctccctgttttccaagaaaaaaattccaaatgttgttttttggtctgtgtatgttattatatctattatctgagttttgaaaattattctgctacagcaatcctttgttttagggttctagcagcagcttcaatatttatattaaatgcttattattttgacagctcaaatgtcattaaaatgacagattactagtttgagttcagaaaccattgrcataaaaggagtaatgcgtattttgcaaaatttactgtgcaaaatagaaggacatatattttaagttgtcaatgttaattgtatctttttctggatgagcaataaataagtgctgttctg

SEQ ID NO: 591295 - DNA, 570 bp, Homo sapiens
attggtatctcagtttaaacttggtaaaataaaattttaattagttctttttacacaataattttatctttcatacacagcttttatgtgatattgcattatggtcataaattatatgatactttcatctttatttctcacctttaacatctaaagcctcgattttaataaaagtaattgtttacatagccttctttatgactatcaaccttggatttatcctgattatacatcctccctgttttccaagaaaaaaattccaaatgttgttttttggtctgtgtatgttattatatctattatctgagttttgaaaattattctgctacagcaatcctttgttttagggttctagcagcagcttcaatatttatattaaatgcttattattttgacagctcaaatgtcattaaaatgacagattactagtttgagttcagaaaccattgacataaaaggagtaatgcgtattttgcaaaatttactgtgcaaaatagaaggacatatattttaagttgtcawtgttaattgtatctttttctggatgagcaataaataagtgctgttctg

SEQ ID NO: 591296 - DNA, 562 bp, Homo sapiens
taaacattttctctgaatcatactaaggtttccttgaaagtactgtccaatactcattaaatttctctacatttctttgatgtaacatgtactgaatgtgttttcacctttatttctacaattcaattatatcaagtgaattttagaatgtagacaaaagtgattgtgttttgtcattttaatatgttgtctgaagtagctgaatacctgtgagatgttaacatttagtgtatattgggttctgtagccagagaagacttaaatctgattacagcaggattgatgggtcaggtaagaggctaaaaggtaaaaagtaaartactgaactaattgcagagagaagcagacttctaaatttcgtgtgatattttaaaagaataaaatgttgatttaaaaaagttaatgacaaggccaggcgccgtggctcatgcctgtaatcctagcactttgggaggccgaggtaggcagatcacgaggtcaggagattgagaccatcctggcgaacacggtgaaaccctgtctctactaaaaatacaaaaaattagccaggcatggtggcagg

SEQ ID NO: 591297 - DNA, 556 bp, Homo sapiens
gtaaaaagtaaagtactgaactaattgcagagagaagcagacttctaaatttcgtgtgatattttaaaagaataaaatgttgatttaaaaaagttaatgacaaggccaggcgccgtggctcatgcctgtaatcctagcactttgggaggccgaggtaggcagatcacgaggtcaggagattgagaccatcctggcgaacacggtgaaaccctgtctctactaaaaatacaaaaaattagccaggcrtggtggcaggcagctgtagtcccagctgctcaggaggccaaggcaggagaatggtgtgaacctgggaggcaaggcttgcagtgagctgagatcgtaccactgccctccagcctgggtgacagagcgagactccgtctcaaaaaaaaaaaaaaaagttaaccacaatgccacatagtaagaatatataaagaataataccatcttacaaatatcaatgtttcagttggttaatgctttcgttgattcatcaatcttgtattgaatattcaaggccttatatagggagctacatcataagtaatacaggcag

SEQ ID NO: 591298 - DNA, 540 bp, Homo sapiens
aatcaacaaagaaactggaattatactagattctagacaaaatgtacctaacagacatttaccattcattctactcaaaaactttagaatatacacttttctcatctgtgcatggaacattctcccaaatagatactatgtttggccataaggcaagtttcaataaatttwaaaaatatgaaattgtattaagtatctctttggaccatagtgatataaagttagaaatcaataccaagaaaaactctcaaaactccacaaatgtggctgagcatggtgactcatgcctataatcacagttctttgggaggctgagctgagaggatcacttgtggccaggagttttagactagcaagaccccatcattttgtacttttttgtacaagaaaatttaaaaacagttagctgggcatggtggcacatgactgtagtcccaactacttgcgaagctgaggccagaggatcacttgagcacagaagattgaggctgcagtgagctaagatcatgccactgcattacagcctggatgacagcgtga

SEQ ID NO: 591299 - DNA, 540 bp, Homo sapiens
aatcaacaaagaaactggaattatactagattctagacaaaatgtacctaacagacatttaccattcattctactcaaaaactttagaatatacacttttctcatctgtgcatggaacattctcccaaatagatactatgtttggccataaggcaagtttcaataaattttaaaaatatgaaattgtattaagtatctctttggaccatagtgatataaagttagaaatcaataccaagaaaaactctcaaaactccacaaatgtggctgagyatggtgactcatgcctataatcacagttctttgggaggctgagctgagaggatcacttgtggccaggagttttagactagcaagaccccatcattttgtacttttttgtacaagaaaatttaaaaacagttagctgggcatggtggcacatgactgtagtcccaactacttgcgaagctgaggccagaggatcacttgagcacagaagattgaggctgcagtgagctaagatcatgccactgcattacagcctggatgacagcgtga

SEQ ID NO: 591300 - DNA, 596 bp, Homo sapiens
agattctttgatagcaaggcagaaaatatatagcactaattatatgattgcttgagtttttaaacacaactgcatgtcctgctcatcttgtgagaatagatgctcataaaagcaagttatccagctggtgagccaatggctaagtcttggatagttttctgaatgtcagtacatgatgatacatcttttcagttaaatttaatttgccttcacaataaaaattgaaaaccattgaaattttctgcatttgctcagtatgttgtttctgattaattttattgatggtttaacttggcattcaaatttctaatcaaatggattttcaaagtcctgttaattaaaataacagcctttacaatgtagcatggaaatatagatgcaaaaaaatacatttgagtgtcttattgttaayagaaggccacatatatattttaatatatctactgtaatcctcattaagattactctcagcaagctacagttcatcatatcaaatggtaatgtaatgcacagtgattactgtttctaattctacactgttctttatggccttatcatttctattttattgcagttgttaagcaggacaagaatat

SEQ ID NO: 591301 - DNA, 538 bp, Homo sapiens
tactctcagaagaagcaattgaatctactagaatgttttggatttggagagctttgataattcagatggtgcaataatatttaatatttggaataatcagagtttggagtgagaaactaccttcacatctcttcagtccagtctctttaccccagatgaaacatcgtttctcaggaagttcaccagaagctatcaaaaggttgtctccacacctggatttaaagcattggtaagtttgtatgcttttttctcacaattaatttttgtctttatcctatttctgyatcttcagtaaaatttagtgggctaataagaaaaaattcaagatttaaaatatgtatgcttattaacaatatttaattacttattttatccacacatttaaattcatagattgttctctaattcgttatctaagaggaagcatgtgggagagcaaaatgaagttgccttcatgtcttgctggcttttcccagcaaaatgtctaagttcaaaaggacctcaaaatgtgtgcagagtgataaaatgaaggggatat

SEQ ID NO: 591302 - DNA, 600 bp, Homo sapiens
tgtggtcttaaatgacaatattgcagctactttgggtgtagagtagtgtctgggaaggggcatgtcagaggcttttggttgtctcactaatattgcttattcatctgaatattgattttgtgttttttgtaaagaaaattgtaattaattaatayagtggtgtaataatctgcatatatttctgcttgccgtctatattttgatgaatatctatgtaaaatgtattctgtgtatttccaagtattgtttactctaagaattcaaatgtgttataatttcagaatatctttatatgtaaatcggtacagtaataaattagaatagaaacaccatagaattatagtagtttaatcaaaactccaaatgaaaaatagaaaaaagctatgtaagatggaaaactttactagaaactaacatcaatatttgtccaaaatgtaacttaatttattaaaaggataaatttatatatattgatttatatagatgtaaaatataatatatacacagtatataaatattatgcaaaataatatatacacacatgcaggtgaatttcactattcatagtagttatgttctataaattcaccaaaaacactg

SEQ ID NO: 591303 - DNA, 345 bp, Homo sapiens
tattcctatatgacttggtttaagatcaaagctgcccagatacataatctggcttggtcttatgcttgtgtataacacatggccgtacaagagccaatttcacaaaaagggggaggggttagataagtcaggaaaacaagggtggagggaaagagattgtgttggtgaggaaaaaaacccagaggttcactgcaaagtaatttaagcaccaaaaggatgtgatcgcttctgtatctgtttcagtgtcaatcttcatttatagacatagccctagaacmtaacttagtgctggacaaattatagaagctcactaaatacatataaatggctatttttgcatcctac

SEQ ID NO: 591304 - DNA, 345 bp, Homo sapiens
tattcctatatgacttggtttaagatcaaagctgcccagatacataatctggcttggtcttatgcttgtgtataacacatggccgtacaagagccaatttcacaaaaagggggaggggttagataagtcaggaaaacaagggtggagggaaagagattgtgttggtgaggaaaaaaacccagaggttcactgcaaagtaatttaagcaccaaaaggatgtgatcgcttctgtatctgtttcagtgtcaatcttcatttatagacatagccctagaacataacttagtgctggacaaattatagaagmtcactaaatacatataaatggctatttttgcatcctac

SEQ ID NO: 591305 - DNA, 584 bp, Homo sapiens
aggccaaagaaaacaggcaaaagcttatttttcagggttcttaaaaaaactcatgtggtctccatggtcaggcatgtgttattgctgaagctaaatgtatctggaaacacagatgttgaactgaatttatactctgctgtagcttcctgttttgtggtwgtcttgtgtcctttggttgatttgagcatccacttactcaaaaaaggcttgtcctggcacagaaataacatttcaatttaaaggaggaaatggactagatagtctcaatttcattcctttggacaagtcatgtttcttcaattactctctgtatcctggtctccttttttcatttaaactctatgaatatgagtaaaagaaaaaaaaaattgacaagataaaaaaatagtaacgtggaaaaagagaatgaatgaacaagaaagagtagaaaaagagatacaaaatgttttaaagaaagaaaaaacgcaagtcaataaaagaaacagattatccaaacacatgcaaaacacacgcacaaccagactactaccatgactactgtctccccaaattcccaattaacctatattagtgacagccataaa

SEQ ID NO: 591306 - DNA, 563 bp, Homo sapiens
cgtttttaaatccttctaatttttattttagactacacatcatctgtatactatattgacttttttattcccatcattaacatttctatttaaatgtatccttatccacccctagacattatgtcaaagcttctcctatcatttcctgtgcacatgagctcattacttaracttcccagaagtgctcatggaaatagtacacccttaattgctgcatgtttaaaattatttgtctgtgaactttattcctgtaattctgtttgactagatattaatctgtgtctccctgtattttctttagtatgtttgcttcattgtctgcagatatcaattgtctatatgtctgatgttaatctgctttttgctttttattttcttttaaatactacatttttgcctgaatgcctcctcttttttcttccttttttgtttaaattttgagtaattttactggattatatatcagtgacttctattcttgattagtttttctaattcaccactgtgcaatttcagtatttatgtttgtgttctttaaggaagttttctagaactgtatattt

SEQ ID NO: 591307 - DNA, 628 bp, Homo sapiens
tatttaaatgatttctatttaaagtccggatttatattcattttgacatttactttttggggacatttttatttcttttttatgatttggttttaaagtggtagtctttttcttccatattgttttatctagtcttactctggaaactgtataacattaataatactgctttcactgttcctcagaatgtattttctgtttatacagttcttatctttttcctctgacttcttttctgcattcttgaccattcctatacattagcttgtgataaaatcccacctagaccttttgcctaaattcacacctgattctccaggaacctatcagatagctgtagtagtttatctaattaaatattccccctcaaactaccatactgaaaattgaactcaataccttattcaacaggctgccctctttcttatgaactcatttttactcattcaagcgatttaagtcagaagcttgcaattcatttttatcactstcatatgtattcattcctataattatggtaattttaatacccacatatggaaatctttgaaagtcatcttcactcatttcctacattttgcaaaaaccataattcagtccctcataattgctttcttggattatcaca

SEQ ID NO: 591308 - DNA, 503 bp, Homo sapiens
atggcaaagaaattttcaaaagaaataaaaattattgaggtctcatcccagctctactaatctatgtcttagcaacctagtgtaattcctacaaattctgagcattgcctttaatgtatctgcatggttcccacatcatttcataaacttcaaatactcacactttataattgaaacaatatacaaactatattattaaataagctatggtatgatattctcaatctaccctataargatactatcttcctgtcagaaaagttgagactctccaatacatatttactagccagattttttttttttttttttttttttgagacggaatctctctctgtcgcccaggctggagtgcagtggcacaatctcggctcactgcaagctctccccagatcttaattgtggaatctccagacagtgtccagtcagaatccattattagttttgcctcatgttccctaaccaccttctctttaccttcaatcttaagccccaaaatgaaa

SEQ ID NO: 591309 - DNA, 640 bp, Homo sapiens
acagtcataactggccaaccaaggtttacttsgtaggagggtgacagtttaccctttaataccacctaattaaaatacacaaaatgttctacacaaataacagcaaattgtttatttctaagaacataattttccttttataggaagctctcaacattaatttggagccacattttaattttataatgtaatcattcagtaaatggtcattagatattgggttatttggaaaattgtaaaaaatcagacttctgaccatgtcctttaaaataattaacttagctggaaacagtaaagcaagacttaaaaatacaaatcataacatgaaaattcaaatgattgtatactaaaacaattgtatgcaaataattaagaacagtgactataataaaaaagtttaatagatttgacaaaacatttaaagaatataacttacatatatgaaaataagacatcaaaacttgaattgaagctgtcaaactgtgaaaaacagtagtaaacaataaaaatcacttactcattggaaacactgcaaaatgtcattaaatcatttcagaaatgaaggtacattaatgaaaaataatcatagtttttaactcagtctcacctcacctttaagaaacacacagtataaaacagc

SEQ ID NO: 591310 - DNA, 623 bp, Homo sapiens
ataatttcagtccaggaggttgagtctgyagtgagctatgatcattccatcgctgcagcctgggcgacagagcaagaccctgtcacatacacaaaagaaaataattcagaatgtgcacaaaaatgtataaagatgtttctgaaagttgcatttgtaatactgcaaaatcaatgccacattgagacagaggtaccaagattaagctggagtcaccactgacaattgaaatctggagtcagaatgctgtatctaagtgggacaacagtttctttcctgcagcccaccattaccatgcagcaaagttgctctattacttctgaattttccacatttttaaagaaaagcagaaaatccagtttctaagacaaaaatcaagttacaagtattgacagaaaaatcacttttaaataattgtaaacagtaacaacacactttaacagtaaatctaattcagcctgataccaggctgtaccaatagatacaatgaaactgcataatattggtaaaacaattgtatggtagaaaaatactggcataaaaatgttcatagcaaattcataaatggaaaaagtagtctgttttatttaaataaaaaggagctagatgaattgcagacaaccatg

SEQ ID NO: 591311 - DNA, 474 bp, Homo sapiens
aaaaataaaaataaaaaataaaaaatgccagtcatagtggctggcacctgaatctttgctgcttgggagactcatatgaacctaagctgatttgagcaggaatataatttcagtccaggaggttgagtctgtagtgagctatgatcattccatcgctgcagcctgggcgacagagcaagaccctgtcacatacacaaaagaaaataattcagaatgtgcacaraaatgtataaagatgtttctgaaagttgcatttgtaatactgcaaaatcaatgccacattgagacagaggtaccaagattaagctggagtcaccactgacaattgaaatctggagtcagaatgctgtatctaagtgggacaacagtttctttcctgcagcccaccattaccatgcagcaaagttgctctattacttctgaattttccacatttttaaagaaaagcagaaaatccagtttctaagacaaaaa

SEQ ID NO: 591312 - DNA, 624 bp, Homo sapiens
aatgctgtatctaagtgggacaacagtttctttcctgcagcccaccattaccatgcagcaaagttgctctattacttctgaattttccacatttttaaagaaaagcagaaaatccagtttctaagacaaaaatcaagttacaagtattgacagaaaaatcacttttaaataattgtaaacagtaacaacacactttaacagtaaatctaattcagcctgataccaggctgtaccaatagatacaatgaaactgcataatattggtaaaacaattgtatggtagaaaaatactggcataaaaatgttcatagcaaattcataaatggaaaaagtagtctgttttatttaaataaaaaggagctagatgaattgcagacaaccatgtattaatagttacatctttcaattttagaattaatatactttattttttgagttttcattattgtgatgtattatgctgaaattagcaaaaaaaaaaaaaagagtaactctctgagtgatacagaaatttgtaatgagaaataaggtgtgtccctaacmaacccacctatgtgtcagtttgaaggtagcaagaaaatttttatcacagtcagggagaatgggaacctgtgatatgtggca

SEQ ID NO: 591313 - DNA, 588 bp, Homo sapiens
agcatgtgagtgagattgattataacttgtgacagtctctgaatagaagacccagataagccatgcccagattcctgccccgcagagactttgagataataaaggctgttttttttttttttttttttggtcatgaagaatatgtttcttatcttttttttaaattttattattatactttattttgggataatttgttatgcaggaattgacgaataatataaatacttttgaaatgtaacttttttatcttaataagcatttaacaaataatttgaagatggataatcacagatacctcaatttttaccaacataaccaggacccttcttgtaactttgmctaataaatgatcttttgaacattaccattttgtaactgcattttagactatgatttagttgaatcacccaaagtgtgtaatgtcttttaatgtgcactgtcaattctgttctgccataatgacctcactttcagttcttaactatattcatctcagtcttgtggggtgactgtctcaagaagaatgactggtaataccaagaacttctgttgtttccataaataacagccagattacagccagaa

SEQ ID NO: 591314 - DNA, 598 bp, Homo sapiens
tcctcgtgatccacccgccttggtctcccaaagtgctaggattactggcatgagccaccaygcctggctcaaaatctctactttgaattgaattgtttagttatttaatatttactgtggccaagaaaatggttattgtcatcttatttgtttttcaatgtgttgtgcctctatttttgtgcctttttagtttgtttctttattcctaccttcgtttgggttaaatactttaagcatttaaatttatattctctgtagacttttttaaatatcaatttggcttaacttctaaaggttacaaaacaatatgatatgcatacttaactgaccccagtccttgttcaaaaatgtttaccactataagaaagtaaaaacctttcaatggtaaaattctaccctacttactcctgtatttttagttatcctctattttatatctccatgctttataaattcatgatgcattttgttaagttttctttaaatactccataaatgttaagaaattagcaaatttatagtaaaatgcccttttgtagtcacctatacgtttaccttttccctttccagcagtcttcattttcccctgtgttttggg

SEQ ID NO: 591315 - DNA, 598 bp, Homo sapiens
tcctcgtgatccacccgccttggtctcccaaagtgctaggattactggcatgagccaccatgcctggctcaaaatctctactttgaattgaattgtttagttatttaatatttactgtggccaagaaaatggttattgtcatcttatttgtttttcaatgtgttgtgcctctatttttgtgcctttttagtttgtttctttattyctaccttcgtttgggttaaatactttaagcatttaaatttatattctctgtagacttttttaaatatcaatttggcttaacttctaaaggttacaaaacaatatgatatgcatacttaactgaccccagtccttgttcaaaaatgtttaccactataagaaagtaaaaacctttcaatggtaaaattctaccctacttactcctgtatttttagttatcctctattttatatctccatgctttataaattcatgatgcattttgttaagttttctttaaatactccataaatgttaagaaattagcaaatttatagtaaaatgcccttttgtagtcacctatacgtttaccttttccctttccagcagtcttcattttcccctgtgttttggg

SEQ ID NO: 591316 - DNA, 627 bp, Homo sapiens
acttaactgaccccagtccttgttcaaaaatgtttaccactataagaaagtaaaaacctttcaatggtaaaattctaccctacttactcctgtatttttagttatcctctattttatatctccatgctttataaattcatgatgcattttgttaagttttctttaaatactccataaatgttaagaaattagcaaatttatagtaaaatgcccttttgtagtcacctayacgtttaccttttccctttccagcagtcttcattttcccctgtgttttgggtttcttttggtatcatttaccatcaatgcttttaatatttttttctagtgcaaatctgctgaacatataatttttctcattttgtctctttctggaaagattttatattcattgtaaaatgatatattttttaaaaatacagaattctatttgactatttttctaacagcactttaaagataacagggaaacggaattactaggggaaagatgggaaacatctgcattctgttgtttcagatgaaaagccaaatatctcatttcgatgtttctttttccatattctgtaggtgcttttaagttgtatacctcagtgtggttttctttatatcagttctatttgggaa

SEQ ID NO: 591317 - DNA, 352 bp, Homo sapiens
cacactaatgcaagatattaatcataaagaatatggagggtagaagaaagtgtwtggaaattctctgtgctttgttagttttttctataaatctaaaattgttctaaaaataaaatctattaatttaaaaaagaatgaactattgttaccactatcaacataggtgaaagtcagagtagttatgttgagtgcaaaagacagacaaaaaagaatagatttttgtgtgattacatttacataaaattctaccaagtgtaaaccattctgtagtatcagaaatagattagtagttgcatggagattgagtagggaagaggggaagaaacgattactaaagacacaaagtaacttt

SEQ ID NO: 591318 - DNA, 352 bp, Homo sapiens
cacactaatgcaagatattaatcataaagaatatggagggtagaagaaagtgtatggaaattctctgtgctttgttagttttttctataaayctaaaattgttctaaaaataaaatctattaatttaaaaaagaatgaactattgttaccactatcaacataggtgaaagtcagagtagttatgttgagtgcaaaagacagacaaaaaagaatagatttttgtgtgattacatttacataaaattctaccaagtgtaaaccattctgtagtatcagaaatagattagtagttgcatggagattgagtagggaagaggggaagaaacgattactaaagacacaaagtaacttt

SEQ ID NO: 591319 - DNA, 352 bp, Homo sapiens
cacactaatgcaagatattaatcataaagaatatggagggtagaagaaagtgtatggaaattctctgtgctttgttagttttttctataaatctaaaattgttctmaaaataaaatctattaatttaaaaaagaatgaactattgttaccactatcaacataggtgaaagtcagagtagttatgttgagtgcaaaagacagacaaaaaagaatagatttttgtgtgattacatttacataaaattctaccaagtgtaaaccattctgtagtatcagaaatagattagtagttgcatggagattgagtagggaagaggggaagaaacgattactaaagacacaaagtaacttt

SEQ ID NO: 591320 - DNA, 528 bp, Homo sapiens
tttaagcttgtttttcttgcttttccaaacctaatactttcatggaagaaactaaaggcaatattataaaatagatgaaagtgcaggataattaccttaagtgacattgggaagcctagagctcacctggtcccaatatttgataatccatgtcacccctggtttacttccacagttcccttaagagctgtctgaataccacaatcttagtatattatattttgtaaggaaacctgctcactcaagaacatcttctgtgagagccaatccatttagcatgttagaaagtttccttccatgtatgattcaagcccaccttgtccagtggattggacaatgaatgaacacttgatttaggtggaagttatccatttmttggttgaaaatcaataagcctctttcacttgagaattccaattgagatgaagaatataatagggacgcatactggatgagcaaagccatatggcctccataatgttataaagaataatatgactgagccacaggcaagcaatagagatacaa

SEQ ID NO: 591321 - DNA, 528 bp, Homo sapiens
tttaagcttgtttttcttgcttttccaaacctaatactttcatggaagaaactaaaggcaatattataaaatagatgaaagtgcaggataattaccttaagtgacattgggaagcctagagctcacctggtcccaatatttgataatccatgtcacccctggtttacttccacagttcccttaagagctgtctgaataccacaatcttagtatattatattttgtaaggaaacctgctcactcaagaacatcttctgtgagagccaatccatttagcatgttagaaagtttccttccatgtatgattcaagcccaccttgtccagtggattggacaatgaatgaacacttgatttaggtggaagttatccatttattggttgaaaatcaataagcctctttcacttgagaattccaattgagatgaagaatataatagggacgcatactggatgagcaaagccatatggcctccataatgttataaagaataatatgaytgagccacaggcaagcaatagagatacaa

SEQ ID NO: 591322 - DNA, 672 bp, Homo sapiens
tattcatattggaattaactgcaaatttcctaggtatgtaaatgaaagtgagtgaaattactatataaacctagagttatgaccatcaaaatacatgatatagcaatatgataatttaatgttgacttagggagtaataaatcagatattttaktcaacaaactgtgatttttaattatagcataagaattataaattaatatttagaagttaattgttttcttaataaataatgagttgacaaaaataatagttgaaaaataaaattatataggatgattatattgtgaaaatttacattaaaaattaaaataaacaaatcacctttggaaactacttttatttaaaatatcaggagtccagaaaattgcaacttttcttaatctacataatcatttttacatgaaattttaattccaaagccattgcaaagatttattttcttaataaccatagtattaagtatcaaacagcttctgtaaaagtataatagattataaacatatactagatgtattgttttctgcatttatgcatgaacaataagatttttaaaatttttgacttatctgtggaaatatgatagagacaattgtatggtttggtttaaggattattcatttctgcacttagatgaggtaattttctctttctagataaactctaattcca

SEQ ID NO: 591323 - DNA, 672 bp, Homo sapiens
tattcatattggaattaactgcaaatttcctaggtatgtaaatgaaagtgagtgaaattactatataaacctagagttatgaccatcaaaatacatgatatagcaatatgataatttaatgttgacttagggagtaataaatcagatattttagtcaacaaactgtgatttttaattatagcataagaattataaattaatatttagaagttaattgttttcttaataaataatgagttgacaaaaataatagttgaaaaataaaattatataggatgattatattgtgaaaatttacattaaaaattaaaataaacaaatcacctttggaaactacttttatttaaaatatcaggagtccagaaaattgcaacttttcttaatctacataatcatttttacatgaaattttaattccaaarccattgcaaagatttattttcttaataaccatagtattaagtatcaaacagcttctgtaaaagtataatagattataaacatatactagatgtattgttttctgcatttatgcatgaacaataagatttttaaaatttttgacttatctgtggaaatatgatagagacaattgtatggtttggtttaaggattattcatttctgcacttagatgaggtaattttctctttctagataaactctaattcca

SEQ ID NO: 591324 - DNA, 559 bp, Homo sapiens
ttctgcatttatgcatgaacaataagatttttaaaatttttgacttatctgtggaaatatgatagagacaattgtatggtttggtttaaggattattcatttctgcacttagatgaggtaattttctctttctagataaactctaattccacttttttcatacagtacacacatatacatgcatatatatgtttctgttaaacaacagtagtaagattttaacaaattatttaccygcctttctgaaaagtgtctgttaatgtcattatgagcctataagggaagaaagggactatattacaaagggacagaaatgatccaggagaggatgaatacaactggattctacaattactgggctattgggtattgggatatagattgggataaaagagtatacccctatcagagcactgtcagtttcactattgatatggtacaaacacatgataggatgattcgtagcatcaaggaaaaagtgatggcctcaggtgaggttgcaatgtcaaatttcccatggaagctgacagaagatgcacatgtcacaaagaaaataata

SEQ ID NO: 591325 - DNA, 559 bp, Homo sapiens
ttctgcatttatgcatgaacaataagatttttaaaatttttgacttatctgtggaaatatgatagagacaattgtatggtttggtttaaggattattcatttctgcacttagatgaggtaattttctctttctagataaactctaattccacttttttcatacagtacacacatatacatgcatatatatgtttctgttaaacaacagtagtaagattttaacaaattatttacctgcctttctgaaaagtgtctgttaatgtcattatgagcctataagggaagaaagggactatattacaaagggacagaaatgatccaggagaggatgaatacaactggattctacaattactgggctattgggtattgggatatagattgggataaaagagtatacccctatcagagcactgtcagtttcactattgatatggtacaaacacatgayaggatgattcgtagcatcaaggaaaaagtgatggcctcaggtgaggttgcaatgtcaaatttcccatggaagctgacagaagatgcacatgtcacaaagaaaataata

SEQ ID NO: 591326 - DNA, 559 bp, Homo sapiens
ttctgcatttatgcatgaacaataagatttttaaaatttttgacttatctgtggaaatatgatagagacaattgtatggtttggtttaaggattattcatttctgcacttagatgaggtaattttctctttctagataaactctaattccacttttttcatacagtacacacatatacatgcatatatatgtttctgttaaacaacagtagtaagattttaacaaattatttacctgcctttctgaaaagtgtctgttaatgtcattatgagcctataagggaagaaagggactatattacaaagggacagaaatgatccaggagaggatgaatacaactggattctacaattactgggctattgggtattgggatatagattgggataaaagagtatacccctatcagagcactgtcagtttcactattgatatggtacaaacacatgataggatgrttcgtagcatcaaggaaaaagtgatggcctcaggtgaggttgcaatgtcaaatttcccatggaagctgacagaagatgcacatgtcacaaagaaaataata

SEQ ID NO: 591327 - DNA, 557 bp, Homo sapiens
ttttcccatctctctaatttagtgggaatttarggtgggggcagcagtttgttctgtgacctcagtcctctaatggatctaaaatcagttgttgatagtctgtttgtacagcatttttcttgttgtagggatgggagtgatgacttccaagtttcttacatgctcgaataactgacttttttttaatgtatactcacccccacgatggtagaagaatgctataatttttggatacacaaaactaaaatactaggagagggaatttttcacaggaaagatagttgctactgaaaaaaaaagataaagtcttctctgctatctctgctagactctctaaactcttcctgtctctggagtccagacagacaaggcttttagttttgagcttgcactatgcttttatcttaaagactttgcctactatgtcctttctgctgagaaagcatcttatcccctccattacctagttaacatcaaatataaaatcatacctcttactaaaggccaagtaccacctctagaagaagtcttccctaagaacagcctacatacagtta

SEQ ID NO: 591328 - DNA, 557 bp, Homo sapiens
ttttcccatctctctaatttagtgggaatttagggtgggggcagcagtttgttctgtgacctcagtcctctaatggatctaaaatcagttgttgatagtctgtttgtacagyatttttcttgttgtagggatgggagtgatgacttccaagtttcttacatgctcgaataactgacttttttttaatgtatactcacccccacgatggtagaagaatgctataatttttggatacacaaaactaaaatactaggagagggaatttttcacaggaaagatagttgctactgaaaaaaaaagataaagtcttctctgctatctctgctagactctctaaactcttcctgtctctggagtccagacagacaaggcttttagttttgagcttgcactatgcttttatcttaaagactttgcctactatgtcctttctgctgagaaagcatcttatcccctccattacctagttaacatcaaatataaaatcatacctcttactaaaggccaagtaccacctctagaagaagtcttccctaagaacagcctacatacagtta

SEQ ID NO: 591329 - DNA, 557 bp, Homo sapiens
ttttcccatctctctaatttagtgggaatttagggtgggggcagcagtttgttctgtgacctcagtcctctaatggatctaaaatcagttgttgatagtctgtttgtacagcatttttcttgttgtarggatgggagtgatgacttccaagtttcttacatgctcgaataactgacttttttttaatgtatactcacccccacgatggtagaagaatgctataatttttggatacacaaaactaaaatactaggagagggaatttttcacaggaaagatagttgctactgaaaaaaaaagataaagtcttctctgctatctctgctagactctctaaactcttcctgtctctggagtccagacagacaaggcttttagttttgagcttgcactatgcttttatcttaaagactttgcctactatgtcctttctgctgagaaagcatcttatcccctccattacctagttaacatcaaatataaaatcatacctcttactaaaggccaagtaccacctctagaagaagtcttccctaagaacagcctacatacagtta

SEQ ID NO: 591330 - DNA, 557 bp, Homo sapiens
ttttcccatctctctaatttagtgggaatttagggtgggggcagcagtttgttctgtgacctcagtcctctaatggatctaaaatcagttgttgatagtctgtttgtacagcatttttcttgttgtagggatgggagtgatgacttccaagtttcttacatgctcgaataactgacttttttttaatgtatactcacccccacgatggtagaagaatgctataatttttggatacacaaaactaaaatactaggagagggaatttttcacaggaaagatagttgctactgaraaaaaaagataaagtcttctctgctatctctgctagactctctaaactcttcctgtctctggagtccagacagacaaggcttttagttttgagcttgcactatgcttttatcttaaagactttgcctactatgtcctttctgctgagaaagcatcttatcccctccattacctagttaacatcaaatataaaatcatacctcttactaaaggccaagtaccacctctagaagaagtcttccctaagaacagcctacatacagtta

SEQ ID NO: 591331 - DNA, 476 bp, Homo sapiens
acaaaactaaaatactaggagagggaatttttcacaggaaagatagttgctactgaaaaaaaaagataaagtcttctctgctrtctctgctagactctctaaactcttcctgtctctggagtccagacagacaaggcttttagttttgagcttgcactatgcttttatcttaaagactttgcctactatgtcctttctgctgagaaagcatcttatcccctccattacctagttaacatcaaatataaaatcatacctcttactaaaggccaagtaccacctctagaagaagtcttccctaagaacagcctacatacagttaattctgtgagcccttttcttatatccttcgaatacccttccttcacattactctttcttcacagcctttagccagacaatatattacaggaaaacagagagaacatgattttgcccttcactcttacctttgcctagcctagtgcctggcaaat

SEQ ID NO: 591332 - DNA, 476 bp, Homo sapiens
acaaaactaaaatactaggagagggaatttttcacaggaaagatagttgctactgaaaaaaaaagataaagtcttctctgctatctctgctagactctctaaactcttcctgtctctggagtccagacagacaaggcttttakttttgagcttgcactatgcttttatcttaaagactttgcctactatgtcctttctgctgagaaagcatcttatcccctccattacctagttaacatcaaatataaaatcatacctcttactaaaggccaagtaccacctctagaagaagtcttccctaagaacagcctacatacagttaattctgtgagcccttttcttatatccttcgaatacccttccttcacattactctttcttcacagcctttagccagacaatatattacaggaaaacagagagaacatgattttgcccttcactcttacctttgcctagcctagtgcctggcaaat

SEQ ID NO: 591333 - DNA, 557 bp, Homo sapiens
ttgcattatctacatactcgcagttaaatcttaacagttcaaatatacccatttgtaatagaatctaacagttttcctcttgaatttttttagacaccagaaatttttrgtcctaataaataatgtttagcttcctagtcacaaaccaaacagaaagcaaatttcatcagtttagaatggttaaaaccaacatagctgcaatatttttatttttgttttaaaattttgtttagtcaatcagtaaatcagagttgaccattatgtaatccacagaccttgaaataacagagataagtttctccgcagataaatatctatatatggttttaagatgagtagaaattctcctgaagatcataaagaaaaagtatgtcatataatatagtaaataaaaataataatagttattaattttttctacttattatgttccagaatctgtactaagtattttagaggattattttatttaattcacacaataatcccttgagaaatatataattattatctttaattcacagttattgaaaatgagacacaaagaggttaagaat

SEQ ID NO: 591334 - DNA, 557 bp, Homo sapiens
ttgcattatctacatactcgcagttaaatcttaacagttcaaatatacccatttgtaatagaatctaacagttttcctcttgaatttttttagacaccagaaatttttggtcctaataaataatgtttagcttcctagtcacwaaccaaacagaaagcaaatttcatcagtttagaatggttaaaaccaacatagctgcaatatttttatttttgttttaaaattttgtttagtcaatcagtaaatcagagttgaccattatgtaatccacagaccttgaaataacagagataagtttctccgcagataaatatctatatatggttttaagatgagtagaaattctcctgaagatcataaagaaaaagtatgtcatataatatagtaaataaaaataataatagttattaattttttctacttattatgttccagaatctgtactaagtattttagaggattattttatttaattcacacaataatcccttgagaaatatataattattatctttaattcacagttattgaaaatgagacacaaagaggttaagaat

SEQ ID NO: 591335 - DNA, 557 bp, Homo sapiens
ttgcattatctacatactcgcagttaaatcttaacagttcaaatatacccatttgtaatagaatctaacagttttcctcttgaatttttttagacaccagaaatttttggtcctaataaataatgtttagcttcctagtcacaaaccaaacagaaagcaaatttcatcagtttagaatggttaaaaccaacatagctgcaatatttttatttttgttttaaaattttgtttagtcaatcagtaaatcagagttgaccattatgtaatccacagaccttgaaataacagagataagtttmtccgcagataaatatctatatatggttttaagatgagtagaaattctcctgaagatcataaagaaaaagtatgtcatataatatagtaaataaaaataataatagttattaattttttctacttattatgttccagaatctgtactaagtattttagaggattattttatttaattcacacaataatcccttgagaaatatataattattatctttaattcacagttattgaaaatgagacacaaagaggttaagaat

SEQ ID NO: 591336 - DNA, 557 bp, Homo sapiens
ttgcattatctacatactcgcagttaaatcttaacagttcaaatatacccatttgtaatagaatctaacagttttcctcttgaatttttttagacaccagaaatttttggtcctaataaataatgtttagcttcctagtcacaaaccaaacagaaagcaaatttcatcagtttagaatggttaaaaccaacatagctgcaatatttttatttttgttttaaaattttgtttagtcaatcagtaaatcagagttgaccattatgtaatccacagaccttgaaataacagagataagtttctccrcagataaatatctatatatggttttaagatgagtagaaattctcctgaagatcataaagaaaaagtatgtcatataatatagtaaataaaaataataatagttattaattttttctacttattatgttccagaatctgtactaagtattttagaggattattttatttaattcacacaataatcccttgagaaatatataattattatctttaattcacagttattgaaaatgagacacaaagaggttaagaat

SEQ ID NO: 591337 - DNA, 547 bp, Homo sapiens
tgtttagacacaatcaaataagcaatgagaagatgagtgaaaagatttaatcccagaagaaaggcacatatatatttaatcctagaaacacacacacacacacacacacacacacacactcacacacacagcrtcattggaaataaggcttagaataaattaccagtgaaaatgaatgttgattttttattatatttttatgaaaaggctttatccctttcatatcctttgcatatatccatatatgcaaccttcaataatgtaatttttataatgatcatgatgttgtactcctcaatattttgacatttcactctcagtcttccttttatataaactccaagaaacttggtcaattctctccagactttattatcttctaaattgctgccttgatccgccaaggtctttttgaacttcagaaaaagatgcattttatcagccaccatccagtgggatcaatttgttggtgccaaaattgagatctctttttacgtccgtttgatttacgtggagtcacaaataccaaggcattcattcatcaggg

SEQ ID NO: 591338 - DNA, 539 bp, Homo sapiens
ttcttggcccaaagcactctgatgacctgtacaactctaccagccttgattgtagatatacccacattttgtttggtggttaaggtctataatgttgtatctgattttctggaatcacatcattcctactgaaatctgtgagcacttctcaattgtggcctcctttatggttcatatctggcccacagaagtgagcaaacrgagtactttcagtgatggaaaatctcccctcacccatatgtttcttaatgccttagtgaagggagtctcttctggatcttctcatggaatgtcactggggagcaagtgtgcagaaaacacatgagaatccattccattgttagacagttcaaactgtgggaatgtttatgattaattggctctgagacaagggcattaataaataatgtaatactgttggttgattgaacaaattcagtaaagttagcacaaaacaatagctacaaaaattacatgtattttcatctgacatggcttggtaatattagagaaagtataggttttagaaatgttacact

SEQ ID NO: 591339 - DNA, 539 bp, Homo sapiens
ttcttggcccaaagcactctgatgacctgtacaactctaccagccttgattgtagatatacccacattttgtttggtggttaaggtctataatgttgtatctgattttctggaatcacatcattcctactgaaatctgtgagcacttctcaattgtggcctcctttatggttcatatctggcccacagaagtgagcaaacagagtactttcagtgatggaaaatctcccctcacccatatgtttcttaatgccttagtgaagggagtctcttctggatcttctcatggaatgtcactggggagcaagtgtgcagaaaacacatgagaatccattccattgttagacagttcaamctgtgggaatgtttatgattaattggctctgagacaagggcattaataaataatgtaatactgttggttgattgaacaaattcagtaaagttagcacaaaacaatagctacaaaaattacatgtattttcatctgacatggcttggtaatattagagaaagtataggttttagaaatgttacact

SEQ ID NO: 591340 - DNA, 591 bp, Homo sapiens
actaaatgaatcagtggttagcccaaacccagggtatattaataaaattatgacataattatcagtttatttcaggactgtraagatggctatgcattataaaatctattttttcaatgcaccaaagtagttaactaaagtagaaaaatatatggctaatgtaatagataagcaaaagttcaatacttcgttttaataaaagctcattgaaaactaagaattaaagtaacatcctatcctgtaaacagtaataaaatttataataaaagttatctttaaaggcagggaatgagataaagattctcactatcaatatgaataatatgattacaggcaacaagttggtaagagcaataatttggaaacttggagatgcaaaatatccactttgggcaagaaaatagccattattatccttaaatatttcttgtgattggtttcttgaatataacagtaatcaaaatggggaaatccccattcaagaataaaagttgaaattaggtaggaactcaactgaaatttaagtcatccccatcaacaatggacacaagaaattctgtattaactagctcatagaagtttagtatatat

SEQ ID NO: 591341 - DNA, 591 bp, Homo sapiens
actaaatgaatcagtggttagcccaaacccagggtatattaataaaattatgacataattatcagtttatttcaggactgtgaagatggctatgcattataaaatctattttttcaatgcaccaaagtagttaactaaagtagaaaaatatatggctaatgtaatagataagcaaaagttcaatacttsgttttaataaaagctcattgaaaactaagaattaaagtaacatcctatcctgtaaacagtaataaaatttataataaaagttatctttaaaggcagggaatgagataaagattctcactatcaatatgaataatatgattacaggcaacaagttggtaagagcaataatttggaaacttggagatgcaaaatatccactttgggcaagaaaatagccattattatccttaaatatttcttgtgattggtttcttgaatataacagtaatcaaaatggggaaatccccattcaagaataaaagttgaaattaggtaggaactcaactgaaatttaagtcatccccatcaacaatggacacaagaaattctgtattaactagctcatagaagtttagtatatat

SEQ ID NO: 591342 - DNA, 591 bp, Homo sapiens
actaaatgaatcagtggttagcccaaacccagggtatattaataaaattatgacataattatcagtttatttcaggactgtgaagatggctatgcattataaaatctattttttcaatgcaccaaagtagttaactaaagtagaaaaatatatggctaatgtaatagataagcaaaagttcaatacttcgttttaataaaarctcattgaaaactaagaattaaagtaacatcctatcctgtaaacagtaataaaatttataataaaagttatctttaaaggcagggaatgagataaagattctcactatcaatatgaataatatgattacaggcaacaagttggtaagagcaataatttggaaacttggagatgcaaaatatccactttgggcaagaaaatagccattattatccttaaatatttcttgtgattggtttcttgaatataacagtaatcaaaatggggaaatccccattcaagaataaaagttgaaattaggtaggaactcaactgaaatttaagtcatccccatcaacaatggacacaagaaattctgtattaactagctcatagaagtttagtatatat

SEQ ID NO: 591343 - DNA, 591 bp, Homo sapiens
actaaatgaatcagtggttagcccaaacccagggtatattaataaaattatgacataattatcagtttatttcaggactgtgaagatggctatgcattataaaatctattttttcaatgcaccaaagtagttaactaaagtagaaaaatatatggctaatgtaatagataagcaaaagttcaatacttcgttttaataaaagctcattgaaaactaagaattaaagtaacatcctatcctgtaaacagtaataaaatttataataaaagttatctttaaaggcagggaatgagataaagattctcaytatcaatatgaataatatgattacaggcaacaagttggtaagagcaataatttggaaacttggagatgcaaaatatccactttgggcaagaaaatagccattattatccttaaatatttcttgtgattggtttcttgaatataacagtaatcaaaatggggaaatccccattcaagaataaaagttgaaattaggtaggaactcaactgaaatttaagtcatccccatcaacaatggacacaagaaattctgtattaactagctcatagaagtttagtatatat

SEQ ID NO: 591344 - DNA, 611 bp, Homo sapiens
caaaatatccactttgggcaagaaaatagccattattatccttaaatatttcttgtgattggtttcttgaatataacagtaatcaaaatggggaaatccccattcaagaataaaagttgaaattaggtaggaactcaactgaaatttaagtcatcccyatcaacaatggacacaagaaattctgtattaactagctcatagaagtttagtatatatacagtttttttcatttatttcatcaaattttccatattgatcttataaagaaaagacagttgggactgttagcattgtttgaaaccatgaaaactatacctcttggactaaaagtgaggcaggcatgggacaatgtcaaaaacatagaattaaatagctactctgtagtctgaaggccttggtcagaaaatggggaagtgaagtgctatggttgctcccctccaaaactcactttgaaacttaatccctaatgtggcagtattgagacatgaggcctttaagagggctccgccctcatgaaaggattagcccattcatagtttcgtgtatttaaataattaattaattggttatcatgggaatgaaactggtgtttttaccagaagagggagata

SEQ ID NO: 591345 - DNA, 611 bp, Homo sapiens
caaaatatccactttgggcaagaaaatagccattattatccttaaatatttcttgtgattggtttcttgaatataacagtaatcaaaatggggaaatccccattcaagaataaaagttgaaattaggtaggaactcaactgaaatttaagtcatccccatcaacaatggacacaagaaattctgtattaactagctcatagaagtttagtatatatacagtttttttcatttatttcatcaaattttccatattgatcttataaagaaaagacagttgggactgttagcattgtttgaaaccatgaaaactatacctcttggactaaaagtgaggcaggcatgggacaatgtcaaaaacatagaattaaatagctactctgtagtctgaaggccttggtcagaaaatggggaagtgaagtgctatggttgctcccctccaaaactcactttgaaacttaatccctaatgtgscagtattgagacatgaggcctttaagagggctccgccctcatgaaaggattagcccattcatagtttcgtgtatttaaataattaattaattggttatcatgggaatgaaactggtgtttttaccagaagagggagata

SEQ ID NO: 591346 - DNA, 214 bp, Homo sapiens
tgtaaaatttttctttcacatttctgatatcctttgcaaagatgtaggcagatgtgttaggtctgtgaattcaaacaagattttaggaacagccaacccttctgcaggagttttctttctagagtctccagtgatttgaggcagttcccaaggcattcatattgctcacaaactgtgtgtggstgttggggtagttattagtcagtgtctttcg

SEQ ID NO: 591347 - DNA, 567 bp, Homo sapiens
attccatttatctatatatctatccctatgccaattccataatgttttaattactatagctttttggtaaattttgaaatggcagcgtgtgaatccaccaactttgtctttktttctttaggatttccatgtaaaattctaggaatttgagaattggcatttctgtttcagtaaaatgactgttggaattttgctaaatattgtattgaaactttagatagctttggtagttctgctatttcagcacaattaatttgccttcaatccataaacattgtgttgctttcaatttgtttagaacgtctttaatttctttcagtaatactttgctcttttcagcgtacaagttttcacattcttcattaaatttattcttaggtattttgttcttttagatactatcataaatggaatttgtttcctaattttatttttggattatttatttctagcatatagagacacgaatgaatcttgtgttttgaccttgtaatttgctgaaattttattagatctagtagatgtctgatggatttttttttcagattttctatatatagaatcata

SEQ ID NO: 591348 - DNA, 567 bp, Homo sapiens
attccatttatctatatatctatccctatgccaattccataatgttttaattactatagctttttggtaaattttgaaatggcagcgtgtgaatccaccaactttgtctttttttctttaggatttccatgtaaaattctaggaatttgagaattggcatttctgtttcagtaaaatgactgttggaattttgctaaatattgtattgaaactttagatagctttggtagttctgctatttcagcacaattaatttgccttcaatccataaacattgtgttgctttcaatttgtttagaacgtctttaatttctttcagtaatactttgctcttttcagcgtacaagttttcacattcttcattaaatttattcttaggtattttgttcttttagatactatcataaatggaatttgtttcmtaattttatttttggattatttatttctagcatatagagacacgaatgaatcttgtgttttgaccttgtaatttgctgaaattttattagatctagtagatgtctgatggatttttttttcagattttctatatatagaatcata

SEQ ID NO: 591349 - DNA, 567 bp, Homo sapiens
attccatttatctatatatctatccctatgccaattccataatgttttaattactatagctttttggtaaattttgaaatggcagcgtgtgaatccaccaactttgtctttttttctttaggatttccatgtaaaattctaggaatttgagaattggcatttctgtttcagtaaaatgactgttggaattttgctaaatattgtattgaaactttagatagctttggtagttctgctatttcagcacaattaatttgccttcaatccataaacattgtgttgctttcaatttgtttagaacgtctttaatttctttcagtaatactttgctcttttcagcgtacaagttttcacattcttcattaaatttattcttaggtattttgttcttttagatactatcataaatggaatttgtttcctaattttatttttggattatttatttctagcatatagagacacgaatgaatcttgtgttttgaccttgtaatttgytgaaattttattagatctagtagatgtctgatggatttttttttcagattttctatatatagaatcata

SEQ ID NO: 591350 - DNA, 561 bp, Homo sapiens
caaccttggttgtgtgtgtccatgaatttattcattttctctaggttttccagcttgttggcatatagttgttcataatagtctctgatgatcttttgtatttctgtggtatcaattgtaatgtctccttttttgtttctgattttatttgggccttctgtcttcttttcttggttagtatagctagcagtttatcaattttgtttatctttttgaaaaaccaacttttcatgttgaccatttgtattgtttttaagtctctatttcatttatttctgccttgatctttattagttctttccttwtattaattttgggtttggtttgttcttgcttttccagttccttgaggtgtactattagattgtttatttgaaatctttctacttttttaaaaacatagacatttgttactataatactataaacttacctcttagtactacttttgctgtattccatattttggtatgttttgtcttgattttcacttgtttcaataatttttttatttcctccttaatttcttcattgacctaatggtcattcaggagcgggttt

SEQ ID NO: 591351 - DNA, 631 bp, Homo sapiens
actgaggctctgttctgcttcaccttgggctcctgcttagtgctatgctctggacatctttctttttttctggaatgtgaggacttgctttctttctcttgattatatattttaaaacttttccttttttttgtatatggttttgcaggtggaggggcgcttctgcatcacctcagcccatattgctgcaccttaatgtaagaaacagagactaagggatccattggcatatacacagcagaaatagggagagaaatcccagaaggaggtgggaggagcacacagcagaagaacaaggacagagctggtccctgggagccatggagaacagcttttagaaaggtcctttcgggggatgtgtggccagcytttcccagatgtggcatattgttcaccttgcagactcaagaggcttctttgaaatgaaaactcagaagcacaaaagcagggagataggctgaatttataaagggaacccaaggcactgcacactgtctctctcaatctccctccctccacctagctcgctctctcacgctctctctctctctctctctcattactctccaaggagaactgcttaggagtaatttggaaacttctagctgctcttgtgaacctgggagggact

SEQ ID NO: 591352 - DNA, 385 bp, Homo sapiens
agcacacaaacaaaattggccacaagaatggagtctcactgaggaacatattctcattgtataagctttgttctgttttgttgttttcacaatgatcaaatttctttttcagttgaaaaaaaatagtaatttcattttaaacatcctttggccaagttttccactatacacacaggtcatctttgactcattgcaaccattctcgggcatgcgcttttatccctgttttayggaagagcaaagtgaggcttagaaggctgaaggtgctagaacaaaaggaacaggatgtcagaaagacctgggataggagccagtaggtatgggtccacacacacacacacacacacacacacacacacacacacacacggcagcaggctggaga

SEQ ID NO: 591353 - DNA, 534 bp, Homo sapiens
tcatcatccaaccccagtctgcaattagggctgagtcacactggcctcagcacacctggctttagcttcaagttcctctgtggacgtggcctcccagcccctcaggaatctgtctgaattgctgctttggtttagcctgtgtatcctggtgctttgggcccccagaggacactggtagtggcctgtggatgatcaggccaccttcgttgatgtcagtgcacacactcctgcaccgtgtctgagcccatgtctgagctggagctgaggggtgcggcaggcagccctgctcccctgcgcgtgggctgtgccaccctggcagtccctggaaccctgtgggcctcatgccctcagtgtcgtggcagagggtcaggctaagcagcctggggctcacaggagggagtcatcctggttgggggcagggtgraggctcaagggcagtgtcttgaaggagagaggttgataaaatggagggtcggggtggaaaagcccctgccccaggccttagttgaccacatgagaatccggggaagtgtt

SEQ ID NO: 591354 - DNA, 603 bp, Homo sapiens
tggattacattgattgacttttgaatattaaatgtattttccattcctgggataaacaacatggtcataatgtgttacttattttatatattgatagatttggtttgctaaaattttgattaagacttttacatctatgtttatgagagacattgttctgtagtttttttcttakaatgtctttgtcaaattttgatatctgttgggaagtgttccatcatctcttgttttctggaagagattatgtggacatggcataattcttctttaaacatttggtagagttaaccagtgaagccacttgggcctggagttttctttgtggaagggttttaaataataaattcaattaaaaaataaatttagggctactcgtattatctgtcttctcttgagtgagtttttgcacctgttatgagcttgattgtatcccctaaattcacatgctgaagtcctcactcccagcatctcagaatgtggccatatttagagatatggcctataaagggataattcaattaaaatgaggtcattagcatgggcctgaatccaaaatgactggcattcttagaagaagagaagattaggacacagacatacaca

SEQ ID NO: 591355 - DNA, 603 bp, Homo sapiens
tggattacattgattgacttttgaatattaaatgtattttccattcctgggataaacaacatggtcataatgtgttacttattttatatattgatagatttggtttgctaaaattttgattaagacttttacatctatgtttatgagagacattgttctgtagtttttttcttataatgtctttgtcaaattttgatatctgttgggaagtgttccatcatctcttgttttctggaagagattatgtggacatggcataattcttctttaaacatttggtagagttaaccagtgaagccacttgggcctggagttttctttgtggaagggttttaaataataaattcaattaaaaaataaatttagggctactcgtattatctgtcttctcttgagtgagtttttgcacctgttatgagcttgattgtatcccctaaattcacatgctgaagtcctcactcccagcatctcagaatgtggccatatttagagatatggcctataaagggataattcaattaaaatgaggtcattagcatgggcctgaatcmaaaatgactggcattcttagaagaagagaagattaggacacagacatacaca

SEQ ID NO: 591356 - DNA, 613 bp, Homo sapiens
acgtattttttgctatttttctcattccctgcttctgtaacccttgttagataggtgttagaacatttcaaagtagacgtcaggtctcatagctgtttttttcaaatgaatcttttattttctgtgtctctgtgtcttgtcatgggtgaattctccaggactatcttccaattcaktcatgttttcctttattagtttctatatagaatttatcctatctagtgagttttaaaaaatgtcaatgactatacttttctaagattttgaaattgttcatatgtccttgatatctctcattgtagtatacattcttcatttctgcctatttaaaagtattttatttttcatggatgttgcttaaaaaatctcttggtgcagcttataataattgtgaagcatttgtcagattgttttataaacctaattttgtctggagtgagctcatgttccaacgaggttgaccttgttggccgtctttttcagtacttgcattctcccttatatttggaatgttgatttgctggcttatttagagtagggtgttttaggccttttgtgttgttttgtttctcatctctctcctgccttgtgcatcagtttttcgtttttgtgg

SEQ ID NO: 591357 - DNA, 613 bp, Homo sapiens
acgtattttttgctatttttctcattccctgcttctgtaacccttgttagataggtgttagaacatttcaaagtagacgtcaggtctcatagctgtttttttcaaatgaatcttttattttctgtgtctctgtgtcttgtcatgggtgaattctccaggactatcttccaattcattcatgttttcctttattagtttctatatagaatttatcctatctagtgagttttaaaaaatgtcaatgactatacttttctaagattttgaaattgttcatatgtccttgatatctctcattgtagtatacattcttcatttctgcctatttaaaagtattttatttttcatggatgttgyttaaaaaatctcttggtgcagcttataataattgtgaagcatttgtcagattgttttataaacctaattttgtctggagtgagctcatgttccaacgaggttgaccttgttggccgtctttttcagtacttgcattctcccttatatttggaatgttgatttgctggcttatttagagtagggtgttttaggccttttgtgttgttttgtttctcatctctctcctgccttgtgcatcagtttttcgtttttgtgg

SEQ ID NO: 591358 - DNA, 517 bp, Homo sapiens
tgaggcatgtctttacttctatgctactgattaatatgttgaggttcagacaggtcaagtaactttcctaaggtcacacagctgggattcacaccyggctggttgggtctagagttcgtatactgagcccctaagccatgctgcctctggactgaggtgcttcttcataaggctgtggtgggaactgagtgaggcagtgcaggcagagccccgacacagtgcttggtccttggtggtggctcagtgcctgccaggtcagtcaatgtgggtctgttggggctcactggcttttctccatagatggggggagggagagaatgatgtgagctgttttctctttaaatacccaaggaaatttccagcataacaagaaagaattctcaaaatttggaggctggggcggaactccattacacattatctgcctctgcgttctgtcacctctctcttcagctgaagtgtaagatgaaaacaccttgctgtcacctccttctcaggactgctgggcccagaagga

SEQ ID NO: 591359 - DNA, 635 bp, Homo sapiens
tcaagtcttggagctcgatcaccagctgctctgaatcttatttggtgttatttaggctgttgcctaagttctggtgaaacctgagaatttttgcctgaacctggttcactgtatatgggcactgtagctggttgtgcttgtcattgattatggtgatggagacttcctaaggtcagttttgggaaaattacaaaaatagcttgagtcccattccagtgatgggaagggatggagtgggaaagcttaacattggggtccatcctgtggatatgggctctgcccccagtcttggccacttctctcctatgtgagtgagcttggtcaggtccctcacctccactaagacccagtttccccacctgttaaatggagaaaacactgtagggtgtgtagggctcttgtgaggattagcagacaggagttacatctgagatggtccatgtgaggcaggtgaccaaggctagatcattgatgaatgccagcaaaggagctcaatttttgttttttattaatttttgttgtatgctaacaaagtagcatgtgctcattgtaaaaaaatcagaacaagcataggagtaaaggattgttttcctcytgttctcctacctactcgtcttgctctcaggtaaccctgg

SEQ ID NO: 591360 - DNA, 562 bp, Homo sapiens
cctcatgccctgctgggatgcaggtgggggtgggtggcaggctgccctcctgccaggctgggtcaaggtcacaacagtgcccagtggccaacccagactgtttagtgtttataaaacagtgttcctgcaccgggccattctggacacagccagactttgtccctatctggcccaaactgccccattcccctgtgggggtgggagtggcgctggcagagggagcagctctggctcagctgatgggaactgcatcgctaagagaaatctggcttacatattgactgcagtgatcagggcacagtcgctggaaccccacacagccctgtcactcaccagmttagccagcttagcctcttgcacctcagtttctctgtttataaagtggaactgatatgagtgcccaccccatgggatgttgggaggattaaatgagcacagtatctgtcctagaatcagtgctcctgacggtgcctattatgtttattcccatgacgatggtcttgatatctagtttcctttgccatagactggggatgataaagcgtcctgggttgtggattct

SEQ ID NO: 591361 - DNA, 478 bp, Homo sapiens
caggaagtccagctggcttcacctctcaacattggtggtcagcttaaattcttcaagacattaaaatctgcccttcttaggccctgggccctgcagtttccatcagacatgacttattatgctgggtcatgatttcccgtttatttatctgtttctgctgtgcagactgtgagacgcctgagggcagggatcatgtccctagcacagagtagaactcartaaggtaagaatctacttgctaggaaaaggagagtctcatgcatccactaatcctgactcaggtgacattcacattttgcattcagatctccttaatagtcactgacaatgtctggctgcaggcttagctcatccctttggagaaggatgctgttaggctgtgacccagaggctagtttattaggccctgcttttttcccttgggtctcttccatgatgactcatgcatcttgtaatttgatgtcagtgttcagacaca

SEQ ID NO: 591362 - DNA, 619 bp, Homo sapiens
acaatgtctggctgcaggcttagctcatccctttggagaaggatgctgttaggctgtgacccagaggctagtttattaggccctgcttttttcccttgggtctcttccatgatgactcatgcatcttgtaatttgatgtcagtgttcagacacagctaagctataataatctcagaaatggcaaagaaaacataattcatcaaaggaaaagccaccatgtatctgccaccatgcatagcagaagtgatcagaccttaatgactaaaagtagtttttttttttgaggcagagtcttgttcatgtagcaaacttacttcattccttccatagtcatttccattaaattccacacatttatcaagcacttaatatgggcaatcgaatgtacgttttgtttgaggggagccacgtcctatttaggagggagcagctgggggtgttgggctggggatcaggaggactggccrccaaccctgcctctgctattcccagtccagtcccctctccatgtaccacagctccattcaagtcgtatgaatgctcccaaagagctttgcacccaagagctgaacctgaaagctatttcttttttctagaggtttgtcggtgaaataattta

SEQ ID NO: 591363 - DNA, 562 bp, Homo sapiens
caatttgagatttccttagattgatttagttttcttattagcaattcattattgcatgttaataatagctagacttaccaactaaatacttataaaagtattttgttccaagtcagtgactccagtgaatcaattagagcagtcttggatgccgggatcttagaaatcgaacctgtgggtgtacccggaggaggtctcccagaccartgtggggtccagcccctcaagattgtcccattaggaggctgacggctgatgcttagccctgtcaagaccccttgacaagactctggcaagaactctggggacagaggagatactgtgtctttgggctcttctccattggaagctgcaggagagcacataaggacaggagctcctccccagctggaggtgagctatgttctcagagctgcccatccagaagttcctctagggtggtggagacaaggtcagtggatccagtacctttgggtgtggtttccacgtggtacgagtttcccttccctctgatccccatctccttccctagccagaatccctaggggctggttccccaggg

SEQ ID NO: 591364 - DNA, 565 bp, Homo sapiens
tctggcaggtcccaatttgagatttccttagattgatttagttttcttattagcaattcattattgcatgttaataatagctagacttaccaactaaatacttataaaagtattttgttccaagtcagtgactccagtgaatcaattagagcagtcttggatgccgggatcttagaaatcgaacctgtgggtgtacccggaggaggtctcccagaccagtgtggggtccagcccctcaagattgtcccattaggaggctgacggctgatgcttagccctgtcaagaccccttgacaagactctggcragaactctggggacagaggagatactgtgtctttgggctcttctccattggaagctgcaggagagcacataaggacaggagctcctccccagctggaggtgagctatgttctcagagctgcccatccagaagttcctctagggtggtggagacaaggtcagtggatccagtacctttgggtgtggtttccacgtggtacgagtttcccttccctctgatccccatctccttccctagccagaatccctaggggctggt

SEQ ID NO: 591365 - DNA, 555 bp, Homo sapiens
gctggtgggggtgagtgctaggggtctagctggaaatttggggcatactaagtctgagatgcctactcaacatggcagtggctacgagaggtcctgattaaagacataaatttggaagttcatcgcatataaatgtcatttaaagtcatagctactcctgactcaaatctcctgccttcatctttcttccaaactccagaacgtaatttccagccactggcttaatatttcttaatagttcattccaccccacaccctgccatttctccttcttaaatttcttcttccaaaattggactcttaaggtacatcccagatctcatcatcctttagctcaagaaccttcactggcttcctgttgccaaggatgagacaggctggactctcctgttgcacatcctcctccaaccagacccaatagcctgctgctccccagaagtgcccaggttgcctgcacctccycttcgcaatgagccttcctcaggaacaataagaactaacgcttgcagagccctgactgtgtgtacgcatggagttaattactttacatgcact

SEQ ID NO: 591366 - DNA, 605 bp, Homo sapiens
gatcctaacttaaggagggtggtgacttatcagggtttccccatccttggtggtgcyggactccagttcttgtaccctctacatctgcaaggactgaaaaaatgcaggtcattctctagaccgcctattcaagagcactagatagccctggggtaagagaagccccaatgctatgcttaattactcttgctctctctctaattttcattcagtaagctcttttatgcttttttaaaagatatatgccagattttaaaagatctcatcttcaagaagcctagttcaaattaactagcctgccatatggaagcagaagttttgttgagagtttgacttaagttgcattgaatctatagatcaatttgagtgaaccgacttctttctgaggccctcctatttgtgaacttggaatacctctcctttatttcgatcttctccaatgtctttcaatatgtttgtaatgatctgcatatttttcatgtcttttgttagatttatccctgggcactattgtaaacatctttttaattgtgattttattatttgttgctggtatgtaaaatgaaatggacttttatgtgctgattttataaaagccaccttga

SEQ ID NO: 591367 - DNA, 605 bp, Homo sapiens
gatcctaacttaaggagggtggtgacttatcagggtttccccatccttggtggtgccggactccagttcttgtaccctctacatctgcaaggactgaaaaaatgcaggtcattctctagaccgcctattcaagagcactagatagccctggggtaagagaagccccaatgctatgcttaattactcttgctctctctctaattttcattcagtaagctcttttatgcttttttaaaagatatatgccagattttaaaagatctcatcttcaagaagcctagttcaaattaactagcctgccatatggaagcagaagttttgttgagagtttgacttaagttgcattgaatctatagatcaatttgagtgaaccgacttctttctgaggccctcctatttgtgaacttggratacctctcctttatttcgatcttctccaatgtctttcaatatgtttgtaatgatctgcatatttttcatgtcttttgttagatttatccctgggcactattgtaaacatctttttaattgtgattttattatttgttgctggtatgtaaaatgaaatggacttttatgtgctgattttataaaagccaccttga

SEQ ID NO: 591368 - DNA, 593 bp, Homo sapiens
tttggtctcatgcttttatttcttctaattaaaaggtagatttgctgggcaaaatccaagaaatgcaaaacaaatttgtttttaagaggtgaaagcactttcacatggcagttaacaatgtaccacaagccatgtcttcagaggggggtatgttcgctgtggtgtggggatagaggatatacactaaaatgcacaaaagaccacaaacagaaatacaggatttttgttttgaagtgaattacctgtcaccagtccctaaagatgtgccttactcttgctggtttcaccttaacagacatcttcttacaattaggaaccagagagtccctcgacctcccggctgagttagatagggcaactgattctytaaagagattcccccagattctatcaatgagcattttttttaaattatactttaagttctagggtacatgtgcacaacgtgcagatttgttacatatgtatacacgtgccatgttggtgtgctgcacccattaactcatcatttacattaggtatttctcctaatgctatccctccctgctcccccaaccccacgataggccccagtgtgtgatgttccccttcct

SEQ ID NO: 591369 - DNA, 431 bp, Homo sapiens
cacaaattctggtgccaggcaccaagaaatggaaatcaaaataaatctgaggttatatgaaataaatatgcaatagcaaaaacaagttttttaaataactgcctttgccttttgttttaattcatctaacttaatttcaggggcagaaaaacaagtcaagtttacaatgactttcaggctgttagaccctaatactctaagttgtttttttccaggattttgcttttcattcaacaacaaattgtttagcaactaataactggtctgaattctttctgcctatctaaaaagtaaaaatatggaagttgatgactatgattragctttttaaagtaatgaaccagattaacaaatcactataccatcacgaactaatcatcatatacagaataatttcataatctgcccactcctttttgcttttacataac

SEQ ID NO: 591370 - DNA, 591 bp, Homo sapiens
acaaaaaataaataagcacaccatataaaaacaatcaggctctaaacagatgtataaatgcagggagtagacatctaaaatactttcaggaactatcagatgacttcaaaatatgatcatatcatcagattttgaaatattaaataatgaaatgaaattatcctaacctttaaaaaatattagcttttaatccaaactggtttataaaggcaataaaataatattttaaaaattattttaatagtacagagttacttaatccaaaagaattgcagaacgtttgtaagcaatttgaagctaacaataccggtgttgtaagttgggatgtgatgtcataagtgagaacttttcagtgttacttctcatggggggaggttctggtaagtttttgctatattttggtagcaagtcttctgrgaaatcaatgcatattcagttctcaatcaaaccaagccaagaataacaattactatcaagccaccacatgaagaaattaaccaaacaagcttaacagttctcttgtaatatggcaagtattaccaaagaagccttataaacagagaagcagtttgtctctatggaatggaaaaa

SEQ ID NO: 591371 - DNA, 665 bp, Homo sapiens
ccttcaatatccatccatccaggctgctgcaaaacagcaaagcctttaaaaaaaaactctgcaggttgtcattacaataaaaactaatataatagctctactgataactaatcactattgtttttcccatgggatttcattcttagtactaattaccaaaaactcgggagatgatctactcccactcaactgactaactgcccctctgagtccgaaccagcaggactattttaatatttgcctagttaatctgtagaacttggacacggattcactccagcagtactcaagaatgsaggacctaatcaatgtttccaaattccattagctctcacatgagctgatgcacacagtactgatctcatctgccctgagaagcctgggaaagtctaacacaggctatttctatcacacaacactcacttcctttcccttcttcctatctttttcaaaatgagagctaaaattcttctaatttgctcctcatttagctagaataaaaatattgcatgtgccctggaatccatcataaaagtaagttaaaactgtaaaaagccagatggcttaggaaaagggtgaggccgtgctttactatcctctgctttttaagaatctttgatgccatattctaaagcatacccacagtgcccagcttactaaaacta

SEQ ID NO: 591372 - DNA, 603 bp, Homo sapiens
cattttatatgtgagatttaaagacctaaaaaaatttcaataggtatgtagtggtatgtcatgttgtcttaatttgcgtttccctgatgatatattatgtggagcccttttcatgtgcttatttttatccmtaagtcttctttggtgatttctccattaaggtcttcagcccatttttaaatcaagttaattgttttcttattgttaagttttaagagttctttgaatattttggataacaagtctttatcagtatgtcttttgcaaatattttctcctagtgtgtatatgtcttttcattcttttattttttttttttttttggcggagtttcactcttgttgctcaggctggagtacaatggcaccatgttggctcaccacaacctccgcctcccgggttcaaatgattctcctgcctcagcctcctgagtagctgagattacaggcatgcgccaccacgcccggctaattttatatttttagtagagatggggtttctccatgttggtcaggctggtctcgaactcccgacctcaggtgattcacccacctcagcctcccaaagtgctgggattacaggagtgagtcaccgtgcctggcc

SEQ ID NO: 591373 - DNA, 603 bp, Homo sapiens
cattttatatgtgagatttaaagacctaaaaaaatttcaataggtatgtagtggtatgtcatgttgtcttaatttgcgtttccctgatgatatattatgtggagcccttttcatgtgcttatttttatccataagtcttctttggtgatttctccattaaggtcttcagcccatttttaaatcaagttaattgttttcttattgttaagttttaagagttctttgaatattttggataacaagtctttatcagtatgtcttttgcaaatattttctcctagtgtgtatatgtcttttcattcttttwttttttttttttttttggcggagtttcactcttgttgctcaggctggagtacaatggcaccatgttggctcaccacaacctccgcctcccgggttcaaatgattctcctgcctcagcctcctgagtagctgagattacaggcatgcgccaccacgcccggctaattttatatttttagtagagatggggtttctccatgttggtcaggctggtctcgaactcccgacctcaggtgattcacccacctcagcctcccaaagtgctgggattacaggagtgagtcaccgtgcctggcc

SEQ ID NO: 591374 - DNA, 603 bp, Homo sapiens
cattttatatgtgagatttaaagacctaaaaaaatttcaataggtatgtagtggtatgtcatgttgtcttaatttgcgtttccctgatgatatattatgtggagcccttttcatgtgcttatttttatccataagtcttctttggtgatttctccattaaggtcttcagcccatttttaaatcaagttaattgttttcttattgttaagttttaagagttctttgaatattttggataacaagtctttatcagtatgtcttttgcaaatattttctcctagtgtgtatatgtcttttcattcttttattttttttttttttttggcggagtttcactcttgttgctcaggctggagtacaatggcaccatgttggctcaccacaacctccgcctcccgggttcaaatgattctcctgcctcagcctcctgagtagctgagattacaggcatgygccaccacgcccggctaattttatatttttagtagagatggggtttctccatgttggtcaggctggtctcgaactcccgacctcaggtgattcacccacctcagcctcccaaagtgctgggattacaggagtgagtcaccgtgcctggcc

SEQ ID NO: 591375 - DNA, 623 bp, Homo sapiens
acctttaaattgttaatgtggtaagtaaaattaaataaaatctaaatgacagattgcttttaattctccttggttggaacaaatgttcaaagactatttagataggaagcagacaatagtttgttttcctttgctttgattgggtatatatttcaaaaatgacatgtgtaaattaaacacacacaccttctatttttgaggctttagaagttgttccccaagataagaaagaaacacttttgacctgtgagagaccatatctcctccagaactcattcaaataarttattttgtgatttattttaaaatttaggtataatttatacaatgtacaaatttgaagtgaatagtgaaccaacatctctatcatcccaaaaagttctcttgtgtccactttcagtcaggtgtgccatcccagaggcaaacacgtgtgcgagtgtgattctatcagtagattttgcctctttcagaacttcagatatgtagttatactgagtgtgcttatgctcctggtgtcttttgctccacttgctggtggtttatagattcatactcttactgcatgtatcatgctattgagtagtattctattgcatgaagttattcacctattgatagacatt

SEQ ID NO: 591376 - DNA, 554 bp, Homo sapiens
gaacttcacctcccttttgtagtagttatctatagctacataacaatctagcacaaacttagcagcttaatcaatcacaaaattatctcacagtttctgtgggtcgggagtctgggaatgacttagcaaggtacttagcaaggcgcacagtcaagcatcagctatggctgctgtcttacctgaggctggatgggaggaggatttgttcccaagcccgtgtgattggcaggattcagtttctcatgggctctctaactagagccttggtttcttgctgtcagctggaggttgtcctcatggggctctctcagtaggcagcccacaaaatggcagcctgcactttcaaaaccaagagagaaacttgtagcagagtagatgttacaatcttatgtaatgtacccacatacatcctgtcatttttgccttaytctattggctacaagcaagtcacagaacctgtcctgaaagggtgagggaattaggcaaggcctagataggaagagacagagatcaagggggccactttagagtctgacacatctgagactggccaa

SEQ ID NO: 591377 - DNA, 554 bp, Homo sapiens
gaacttcacctcccttttgtagtagttatctatagctacataacaatctagcacaaacttagcagcttaatcaatcacaaaattatctcacagtttctgtgggtcgggagtctgggaatgacttagcaaggtacttagcaaggcgcacagtcaagcatcagctatggctgctgtcttacctgaggctggatgggaggaggatttgttcccaagcccgtgtgattggcaggattcagtttctcatgggctctctaactagagccttggtttcttgctgtcagctggaggttgtcctcatggggctctctcagtaggcagcccacaaaatggcagcctgcactttcaaaaccaagagagaaacttgtagcagagtagatgttacaatcttatgtaatgtacccacatacatcctgtcatttttgccttactctattggctacaagcaagtcacagaacctgtcctgaaagggygagggaattaggcaaggcctagataggaagagacagagatcaagggggccactttagagtctgacacatctgagactggccaa

SEQ ID NO: 591378 - DNA, 530 bp, Homo sapiens
atgcatagactgtgatgatcaactcaaagtatttgagatatccatgacctccagtatttattatttccatgtgctgggaacatttcaagtcctctcacctagctacatcaaaatatacaatacattgttgttaactatagtcaccctactctgctatcaaacacaaaaacttattctaactggatgtttctgtttttcctattcttcaacctcgctggatataatcccatttattccctgaactgttcctgtccattccatactcttttcccaaaaggattcctctacagtcttcccaagaccatatggttttcatacaacatatctctatgtaccctggcactactgaaactgtgacagacattccctttgaagtagactgtgatgactagtttgtcagttacaaacatttaatttcatatctctgacctttacttggacayaatcaaaataaatgacaacagatttctcaattctcctgagaattttgctcctaaaagtaaatgctaaatattagcaatagataactt

SEQ ID NO: 591379 - DNA, 599 bp, Homo sapiens
tgggtgatgaaataatctgtataaccaacccccatgacacacatttacatatgtaacaaacctgcacatgctgcacatgtacccctgaacttaaaataaaaataaaaataaaamtaagcttcaaagacagtatggtatacgagagtaagaaatgatctatggtcaggaagggatgagtgcgatgagagtagaactcattaggggctgacatctttcctcacccatcattcccatcttcatttacccgcccttcaatgcctcactcaaactcatctcttctatgaagcccctcaggtttaccatgtacagttgatgcccattattcatggatttggtatgtgtgaattcacctagcagctaatatttatgtataaccccaaaatcagtactcactatgcttctgaggttattcacagaatgtgcacagtggcacattcccagctgaggtccaacaaggcaccactgccttcttgttttagctctcattgtaaaccaggatcctttttgtgatctacagaatggcatgttttttgcatgtttgtgctttcgtgggagattttgctgtttaaagggacccccaaatgcagtgcagatgggct

SEQ ID NO: 591380 - DNA, 397 bp, Homo sapiens
taaagtcacaaagactacagagaaaaggaatgagggtttattcaccaaaatcaaagataacagagtgagggaggcacatccagaaatttgaaagaggtagcttttatgaaaaataaaatatatcaatcttttccaagcatcttytagtttaataatctctaaactgtccctggcaaagatctctagcagtctttccctcttacctgggttttacttttccccactgctaccacacatttttgtgaaaaatcttagataaattattacagaaataatcaaaaagcagagggaaaagtagaaacagacaactacaaagaaataaaatgaaaaaaaaaaaaaagtaaaagtaggcctaaaaatgtcaatgtgctagtgttaacaggatggagcaaacaca

SEQ ID NO: 591381 - DNA, 397 bp, Homo sapiens
taaagtcacaaagactacagagaaaaggaatgagggtttattcaccaaaatcaaagataacagagtgagggaggcacatccagaaatttgaaagaggtagcttttatgaaaaataaaatatatcaatcttttccaagcatcttctagtttaataatctytaaactgtccctggcaaagatctctagcagtctttccctcttacctgggttttacttttccccactgctaccacacatttttgtgaaaaatcttagataaattattacagaaataatcaaaaagcagagggaaaagtagaaacagacaactacaaagaaataaaatgaaaaaaaaaaaaaagtaaaagtaggcctaaaaatgtcaatgtgctagtgttaacaggatggagcaaacaca

SEQ ID NO: 591382 - DNA, 387 bp, Homo sapiens
aagactacagagaaaaggaatgagggtttattcaccaaaatcaaagataacagagtgagggaggcacatccagaaatttgaaagaggtagcttttatgaaaaataaaatatatcaatcttttccaagcatcttctagtttaataatctctaaactgtccctggcaaagatctctagcartctttccctcttacctgggttttacttttccccactgctaccacacatttttgtgaaaaatcttagataaattattacagaaataatcaaaaagcagagggaaaagtagaaacagacaactacaaagaaataaaatgaaaaaaaaaaaaaagtaaaagtaggcctaaaaatgtcaatgtgctagtgttaacaggatggagcaaacaca

SEQ ID NO: 591383 - DNA, 397 bp, Homo sapiens
taaagtcacaaagactacagagaaaaggaatgagggtttattcaccaaaatcaaagataacagagtgagggaggcacatccagaaatttgaaagaggtagcttttatgaaaaataaaatatatcaatcttttccaagcatcttctagtttaataatctctaaactgtccctggcaaagatctctagcagtctttccctyttacctgggttttacttttccccactgctaccacacatttttgtgaaaaatcttagataaattattacagaaataatcaaaaagcagagggaaaagtagaaacagacaactacaaagaaataaaatgaaaaaaaaaaaaaagtaaaagtaggcctaaaaatgtcaatgtgctagtgttaacaggatggagcaaacaca

SEQ ID NO: 591384 - DNA, 562 bp, Homo sapiens
catgcaactaatttaactatacaagatccagcactcaacaatgtaaaattaaaaatttctaaccaccaatcaaaaattactaggcatatgaagaagcaaaaaataagccttccaaaaattcagtcaatgaacagacctagaaatgtcagagataatggaataaacagccaagaatgttaaaatagctattataaatatgatccttatgctcatagagaaaaggaaaaatataagtataatgtgaaaagaaatggaagatataaaaagaaatgcaacttctagaggtgaaaaatatgtctgaaatgaaaacaccatatagatggaattaccaggaaattagacactgcagaagaaaaaaatccatgatgttgaagtatattgcaattaaaactatccaaaatgaaactgagagggggaaaaaagcccctgaaatgtatgaagaaagcctcagtgacctgtgrgacaatatcacaatggcctaacataagtgtaattggaatcccagaagggtagcagacagaaaaaaataatagttgaataaaggtcaaaagttttccaaatt

SEQ ID NO: 591385 - DNA, 577 bp, Homo sapiens
ttatattgttacgtcttttttaggtctaataatatttgttttatgaatataggtgctcaggtgttgggcatatatagttttaggattttcataccattttgcttaattgatctctttatcattatacagttaccttctttgtctattatgactgtctttgatttaaagtctgttttatcttatataagcatgacaactcctagttgcttttcatttccatttgcaatggaatayctttttctgcctgttcactttgagtctatatgtgtctttacaggtgagtttcctataagcagcacttggttggattctgttttttatatattttgccaatctatatcttttaagtggagcatttaatccaattacattgaaggttaatattgatatgtggggtttgttcctgtcatattgttgtttgttgttttatacatatttgtttcttctttatttctctagttgtttttctttgtggatttttgtcatgttgtcatttggcttctcttcctcctttgtgaaattgttttataaaacctgtgggttttattctttcatatgtttttatgaaggaaaatat

SEQ ID NO: 591386 - DNA, 593 bp, Homo sapiens
aattacctcccactgggtccctcccacaacaggtgggaaatgtgggagctacaattcaagatgagattgcgttgggaacacagccaaaccatataagataataagaggcagatgagccagttaatcaactgagaaagcaaaggtcaaagagacatcctggctaaattaccagtcctctcactggtagtcagggacttaatacaaacccacgctgcacaatataaggtatgacatcagaagctgcatactgtggggtaaataaacttcacccaaatcctccattcaaatcagtaaacaaacaagtaaacaaccaaacaataacatgcttttgaagggataagtatccagagttgatacaatatattgtctaaagtatccagtttccagcacacaattatgaaatatgtgttatggacagaatgtttgtgcccttccaatatgatggtattasgaggtggggcctttgagaggtagttaggttatgaagatgaagcatgttcatttcctcttatcagaacactgtaagagctcatcctttttctctttgccctcagccatgtgagtatacgaagagaatgtgctcaccaactact

SEQ ID NO: 591387 - DNA, 281 bp, Homo sapiens
cggtcattttcacaatattgattctacccatccatgagcatgggatgtgtttctatttgtttatgtcatctatgattcatttcagcagtgttttgtagtttcycttggagggctctttcacatccttggttaggtttaatcctaagtattttttattttatttttggcagctgttgtaaaagggattgagtctttgatttgattttcagcttggtcactgttggtgtataggtgctatttatttgtctacatcgattttgtatcctggactttactgaatt

SEQ ID NO: 591388 - DNA, 281 bp, Homo sapiens
cggtcattttcacaatattgattctacccatccatgagcatgggatgtgtttctatttgtttatgtcatctatgattcatttcagcagtgttttgtagtttctcttggagggctctttcacatccttggttaggtttaatcctaagtattttttatkttatttttggcagctgttgtaaaagggattgagtctttgatttgattttcagcttggtcactgttggtgtataggtgctatttatttgtctacatcgattttgtatcctggactttactgaatt

SEQ ID NO: 591389 - DNA, 444 bp, Homo sapiens
aattggaacttttatacattgctggtagtaatataaaataaaatggyacatctattttggaaacagtttggtagttccccaaaatgttaaacatattactgtgtgatcttaagtatatatgaaaacaaatgaaaacttatgctcacacaaacaattgtatataaatgttcatggcagcattattcatgatagccaaaatgtgggatgaacccaaatgttgactgattcttagaaaaataaaatatgttatattcatataatggaatattttgcagccttaaagaggacagaaaattctgacatgtgctacaacatagatgaagcttgaagacattatgcaaagtgaaataagtcagtcaaaaaagtcaaataccacatgattctacttataggaggtacttagagcagtcaaaattgtagaaacataaagtagaatggtggttg

SEQ ID NO: 591390 - DNA, 444 bp, Homo sapiens
aattggaacttttatacattgctggtagtaatataaaataaaatggcrcatctattttggaaacagtttggtagttccccaaaatgttaaacatattactgtgtgatcttaagtatatatgaaaacaaatgaaaacttatgctcacacaaacaattgtatataaatgttcatggcagcattattcatgatagccaaaatgtgggatgaacccaaatgttgactgattcttagaaaaataaaatatgttatattcatataatggaatattttgcagccttaaagaggacagaaaattctgacatgtgctacaacatagatgaagcttgaagacattatgcaaagtgaaataagtcagtcaaaaaagtcaaataccacatgattctacttataggaggtacttagagcagtcaaaattgtagaaacataaagtagaatggtggttg

SEQ ID NO: 591391 - DNA, 444 bp, Homo sapiens
aattggaacttttatacattgctggtagtaatataaaataaaatggcacatctattttggaaacagtttggtagttccccaaaatgttaaacatattactgtgtgatcttaagtatatatgaaaacaaatgaaaacttatgctcacacaaacaattgtatataaatgttcatgrcagcattattcatgatagccaaaatgtgggatgaacccaaatgttgactgattcttagaaaaataaaatatgttatattcatataatggaatattttgcagccttaaagaggacagaaaattctgacatgtgctacaacatagatgaagcttgaagacattatgcaaagtgaaataagtcagtcaaaaaagtcaaataccacatgattctacttataggaggtacttagagcagtcaaaattgtagaaacataaagtagaatggtggttg

SEQ ID NO: 591392 - DNA, 444 bp, Homo sapiens
aattggaacttttatacattgctggtagtaatataaaataaaatggcacatctattttggaaacagtttggtagttccccaaaatgttaaacatattactgtgtgatcttaagtatatatgaaaacaaatgaaaacttatgctcacacaaacaattgtatataaatgttcatggcagcattattcatgatagccaaaatgtgggatgaacccaaatgttgactgattcttagaaaaataaaatatgttatattcayataatggaatattttgcagccttaaagaggacagaaaattctgacatgtgctacaacatagatgaagcttgaagacattatgcaaagtgaaataagtcagtcaaaaaagtcaaataccacatgattctacttataggaggtacttagagcagtcaaaattgtagaaacataaagtagaatggtggttg

SEQ ID NO: 591393 - DNA, 585 bp, Homo sapiens
cattttgaatatatgttggactttctcatactagaagcagggctcaactatccttgacacaatttccagttctacattacccacccccagctcctcaatgtggttcatctaaatatctgccttataaaatatctccttcatgrccagtcactacagaacagctagagtcagcttacttgacgacctgttgacctcacaccctgcatgaactgtgcagcagtcactgcatcacctcctggaacttgtacctccttgctttaaatccactaattaaaactctttgcaggaaacctgtttgaaaaatgctatggaccacactacattgttgacccatgagtttctttctttttcttcctgacttctgaatatatggcttcaaggcctgccttggaccgtccagggtctataagtattaaaactttaatactttcacattatatcattgaagccatgcccacaatccagcctctgagagggagaccacctgtggatccacgaaggtgaatctcttgctggtgctcctttgtccaggtgtctggtggctgctggagatggtagctgccagctaagtttagatgtttcgtt

SEQ ID NO: 591394 - DNA, 585 bp, Homo sapiens
cattttgaatatatgttggactttctcatactagaagcagggctcaactatccttgacacaatttccagttctacattacccacccccagctcctcaatgtggttcatctaaatatctgccttataaaatatctccttcatggccagtcactacagaacagctagagtcagcttacttgacgacctgttgacctcacaccctgcatgaactgtgcagcagtcactgcatcacctcctggaacttgtacctccttgctttaaatccactaattaaaactctttgcaggaaacctgtttgaaaaatgctatggaccacactacattgttgacccatgagttyctttctttttcttcctgacttctgaatatatggcttcaaggcctgccttggaccgtccagggtctataagtattaaaactttaatactttcacattatatcattgaagccatgcccacaatccagcctctgagagggagaccacctgtggatccacgaaggtgaatctcttgctggtgctcctttgtccaggtgtctggtggctgctggagatggtagctgccagctaagtttagatgtttcgtt

SEQ ID NO: 591395 - DNA, 585 bp, Homo sapiens
cattttgaatatatgttggactttctcatactagaagcagggctcaactatccttgacacaatttccagttctacattacccacccccagctcctcaatgtggttcatctaaatatctgccttataaaatatctccttcatggccagtcactacagaacagctagagtcagcttacttgacgacctgttgacctcacaccctgcatgaactgtgcagcagtcactgcatcacctcctggaacttgtacctccttgctttaaatccactaattaaaactctttgcaggaaacctgtttgaaaaatgctatggaccacactacattgttgacccatgagtttctttctttttcttcctgacttctgaatatrtggcttcaaggcctgccttggaccgtccagggtctataagtattaaaactttaatactttcacattatatcattgaagccatgcccacaatccagcctctgagagggagaccacctgtggatccacgaaggtgaatctcttgctggtgctcctttgtccaggtgtctggtggctgctggagatggtagctgccagctaagtttagatgtttcgtt

SEQ ID NO: 591396 - DNA, 585 bp, Homo sapiens
cattttgaatatatgttggactttctcatactagaagcagggctcaactatccttgacacaatttccagttctacattacccacccccagctcctcaatgtggttcatctaaatatctgccttataaaatatctccttcatggccagtcactacagaacagctagagtcagcttacttgacgacctgttgacctcacaccctgcatgaactgtgcagcagtcactgcatcacctcctggaacttgtacctccttgctttaaatccactaattaaaactctttgcaggaaacctgtttgaaaaatgctatggaccacactacattgttgacccatgagtttctttctttttcttcctgacttctgaatatatggcttcaaggcctgccttggacygtccagggtctataagtattaaaactttaatactttcacattatatcattgaagccatgcccacaatccagcctctgagagggagaccacctgtggatccacgaaggtgaatctcttgctggtgctcctttgtccaggtgtctggtggctgctggagatggtagctgccagctaagtttagatgtttcgtt

SEQ ID NO: 591397 - DNA, 540 bp, Homo sapiens
acagaatttggaattatgtaatacaactaagaaaatgctaaaactgtgtcattgagtacatgagcggctgctatgagtctcaagagatgagatacaaaatggaaaaaagttttaaattaatctggctacaaagattaaatataaaaatkatgactaaaagtagtcatcatgttattattcttgttattattcatgttattattcatgttattattcttaaccaagagaaaatatctatcctgttcctttttggaactgtttatctcatcttcaactcaatttccaactcacatctaccagaagatctgctgctaatacagcttgggtctccacagtacatcttggatgtggtcttcccgtacaatctatatacattttgtcagttcatgttctatgattacagtattttctgctttgtattgtaattgattacatgcttctccctctctttattctgagtccttgatgtcaagggccacatttaactgtttgaggggtagtgagggggactggatacactaagcacctaaaacaaagact

SEQ ID NO: 591398 - DNA, 585 bp, Homo sapiens
ttttaggagtaaaagtttctaaaataaccctcacataatttttatgctcttgctaacctttggagagcagcattcataagctctctttggaagggctattattcccaaatataactcatagtatctaagttattaatgtattctttactcactttaccttaagttacagaatttggaattatgtaatacaactaagaaaatgctaaaactgtgtcattgagtacatgagcggctgctatgagtctcaagagatgagatacaaaatggaaaaaagttttaaattaatctggctacaaagattaaatataaaaatgatgactaaaagtagtcatcatgttattattcttgttattattcatgttattattcatgttattattcttaaccaagagaaaatatctatcctgttcctttttggaactgtttatctcatcttcaactcaatttccaactcacatctaccagaagatctgctgctaatacagcttgggtctccacagtacatcttggatgtggtcttcccgtacaatctayatacattttgtcagttcatgttctatgattacagtattttctgctttgtat

SEQ ID NO: 591399 - DNA, 578 bp, Homo sapiens
tttagttttaatattaacaaaggatagcagatttaagccatatttaaaatgttcacagtacatatagacacttaccctgaacaattagttacacagagagtcacaagatgaaattcaaaagcagcatctttagattttgaggttgttactccaaacatagacatgagaaaaatctctgtaaatatctcatcaattcagaagattattgagttttagtaaagagataggaagaacatggaagtcataagagacactaaaattaaaaacacatttgtttctgatttcagattttgattctttaaagggaaaaaaacacaaaaagaaataaggrtaaaggaaaaaaaaacacaaaaagaaataaggataaaatctacatactcaatgcaaaggcaaggaatttttcagacagaaaataatctggctgatggaaataataaagctaaacaccatgctccccaccatcaatcataaggtttgagatgaaagatagataccccagaatacaaatagacacggagaggcttcacaattttgtaaaacctttaggggacagaaaaggagaaagatgtttcttcatc

SEQ ID NO: 591400 - DNA, 578 bp, Homo sapiens
tttagttttaatattaacaaaggatagcagatttaagccatatttaaaatgttcacagtacatatagacacttaccctgaacaattagttacacagagagtcacaagatgaaattcaaaagcagcatctttagattttgaggttgttactccaaacatagacatgagaaaaatctctgtaaatatctcatcaattcagaagattattgagttttagtaaagagataggaagaacatggaagtcataagagacactaaaattaaaaacacatttgtttctgatttcagattttgattctttaaagggaaaaaaacacaaaaagaaataagggtaaaggaaaaaaaaacacaaaaagaaataaggataaaatctacatactcaatgcaaaggcaaggaatttytcagacagaaaataatctggctgatggaaataataaagctaaacaccatgctccccaccatcaatcataaggtttgagatgaaagatagataccccagaatacaaatagacacggagaggcttcacaattttgtaaaacctttaggggacagaaaaggagaaagatgtttcttcatc

SEQ ID NO: 591401 - DNA, 578 bp, Homo sapiens
tttagttttaatattaacaaaggatagcagatttaagccatatttaaaatgttcacagtacatatagacacttaccctgaacaattagttacacagagagtcacaagatgaaattcaaaagcagcatctttagattttgaggttgttactccaaacatagacatgagaaaaatctctgtaaatatctcatcaattcagaagattattgagttttagtaaagagataggaagaacatggaagtcataagagacactaaaattaaaaacacatttgtttctgatttcagattttgattctttaaagggaaaaaaacacaaaaagaaataagggtaaaggaaaaaaaaacacaaaaagaaataaggataaaatctacatactcaatgcaaaggcaaggaatttttcagacagaaaataatctggctgatggaaataataaagctaaacaccatgctccccaccatcaatcataaggtttgagatgaaagatagataccccagaatacaaatagacamggagaggcttcacaattttgtaaaacctttaggggacagaaaaggagaaagatgtttcttcatc

SEQ ID NO: 591402 - DNA, 593 bp, Homo sapiens
gaatctgagaacagggtggtaaaagatgcatttatrgtacaaattaatccaaatgaccaagaagggcaaatgttttccacatgtacactgtgtgtcataacgtactctgtgactgtgcataaaataatagcacactttgccagaaaggtcattttatttatcaattcaaaacatatccatgcagatttgcagcatgccaatatattcaacattttacttaacattaagacattttattcactcctgttctcaggccctttgatgaagtgacatttcctgacattttctgacactttctcacagtggagtaaactgacattaagtcagatttcgctggattattacatcttatagattagaaaaattctggtcattcattcaacaatcgttgacgaggtgcctcaccgttctcattcttctcctggttaccagcattgcagtgggtttatgccacttccctaaacaaacaaggttagaagtctcattgacttctgggatggatatgaatgcctcatcctggctttaaagcacttctccaacatgtctgcaatgcatgtttcctacacaatgtttggtataaatttcaaacacca

SEQ ID NO: 591403 - DNA, 580 bp, Homo sapiens
taaatgttgtcgttccttatatgaaatatattttttgctcttttatagaacattgtgttttgtttctggttaaataccactttatgttgaccacccccaagtccttagtggataacaaatagccaatattatttttcatgtattttgaggattggctaggaggtttctctgctgagtttgcctatggtcatgtatgtgtctgcattcagctgggagctcagctcagcaggaaggctccagacggtcttattcatgtcgggcagcttgcaccagctgctggctggtgtgccctgtttctttttttttcaacctgttcttccattcacctattggctagactayctcattccattgataaaagaaatagagagagccagttttcatttaatagagagagccagttttcatttaaggactgaagaatgaatttcacttcttgatgcgaaggatgtaaggccacttttactgtattacacatttcatattttggttgtgcttttattcttacaggtcctgtaggtcaggaactctgttaccacagtatctcctacattgtctggcacagtgatgtgtatgtttt

SEQ ID NO: 591404 - DNA, 428 bp, Homo sapiens
gtgaaggatccagagagcatgccgaagaatataaaatggtagacaaaagaacctttatactcccttctctttggctttaaaatatatatatatttgcaattccttaagggctgtaaaagattgattgatttttacaaatcttaaggtattacaaagatttggcagggaacgtgggggattagatgtggtttttgttctctgcatattgttcawttgaaaaataaacacataaatgaaagaatggtttgatgaaaatacaaacaaacatgaggtgtttatgttactacaatttctataattttacaggtatattagtcaaaagctttaataaaattgagaaaaagtaaaaggcagaatttctgattatatcaaatgactttgactaaaacttcaattaataagctaaaagaataggtcaaataggtaca

SEQ ID NO: 591405 - DNA, 406 bp, Homo sapiens
actgcactccagcctgggtgacaaagtgagactctgtctcaaaaaaacaaaacaaaacaaaataaatccttttaggcttttttacagaaattaacaagctaattctaaaatgtatatgagaatgcaaagaacttagagtaaagcaaacaacttaataaaaacaaaacaaagttccttcttttatgttgataaaaataaaatttaaaaaaataagatgttcaacaccattcgcccttagggaaatgtargttaaatccacaatgcgataccattaccaccgactagaatggctacaatcaaaacaactgacaatatcaagttggccaggatgtgaagcaactagaacacttatacaatgctgatgagaatgtaaactggtataatcaccttggaaaacagtgcttac

SEQ ID NO: 591406 - DNA, 588 bp, Homo sapiens
tgaaactcttaaccacccattttcttggagattagcctaaactgaggcagaaagtcccattttaacatactgttatactataatttattttttaaaaaggacaagtggttttaaacttttgctacaacataagccattatcctcatttcacctatgtataagtagggggaattcaaaaaacttaaatatgtttccaatggaatagtaggctttcctatgaattaccacagattaaaaggagaagacaaagtttatttcaaaagtcttacagaaatttttctttagagtcacagaagccaggaaagtatgcctaccttatataaataaaagccctgtcacaacccattttcaaagaagatgtatagcaggatccagcaggggtttgcatctgtttcatgtgtgctggccttcctctgtagaagctctcagctgtgcaatcaaacacattttcactcaccaggggagattaaaatccatatggtttacttactacttgtccttggacagaatcctgatgagaacagtgtaagagaccaaacagctayagatttcagacaggctacttgaataagatctgactgattgttt

SEQ ID NO: 591407 - DNA, 620 bp, Homo sapiens
aaagtgaaaaaggatggtggttaggtcacaacccccctctttttttaactttgcactcaaaatagacatttgctctcagaaagcaatttctgaccactctgattcttgtgcaagtgttttgataaatctctgaagaagcsttaaaaggtggggatcaatattgaggtaatagagcctggcccataaacaattcctgcctttgagtcctgaaaagctaatgaaaagtcacagaaagaaagtttatactttactgacttttatgtaagaagaaacagtgtccatggtggagttgtgagatattaaacctactcttcttcatcaagatgtttgatttctaaatactcacttacaacatattggaggtaagccagcaaggatttttatggtatctggcaactgtaaagtttatatctcagaataggttggtttattcaacatttacataaaactcatgatagcaaattgtacatatttaggttaaaatgtcacctcagcataaaagaccacctgctttaatatagaaagcctaagtctttgtaaagaaaagcatattcctgtgtacccttctcagaagcatgtaagccaagatgtcataatggctctataaattgggcaccagc

SEQ ID NO: 591408 - DNA, 438 bp, Homo sapiens
gtaagcacagtgagagtaaccttgaaccaagcccgagttgtcatgttttccagtcttgcaccatgcacaggccttttgcggtctggactagcttagcactccttttgtgcatctgtacagtttgcttcytatttctcatctaatttattttttagattttaaattattttgtctcaattgttatgcttctaatttggtgtttctgtttctaaagtttttgggtttttaaagtatttttattgctgtatcatggttgtacataccttcagagtacatgtgatattttgatacatgtatacattatgcaatgatcaaatcagtataattgggatatcccttgtcataaacatttatcttttttttgcattgggaacattacacttcttctagttattttgaagtatacagtaaattattaactataattttcttactgta

SEQ ID NO: 591409 - DNA, 438 bp, Homo sapiens
gtaagcacagtgagagtaaccttgaaccaagcccgagttgtcatgttttccagtcttgcaccatgcacaggccttttgcggtctggactagcttagcactccttttgtgcatctgtacagtttgcttcttatttctcatctaatttattttttagattttaaattattttgtctcaattgytatgcttctaatttggtgtttctgtttctaaagtttttgggtttttaaagtatttttattgctgtatcatggttgtacataccttcagagtacatgtgatattttgatacatgtatacattatgcaatgatcaaatcagtataattgggatatcccttgtcataaacatttatcttttttttgcattgggaacattacacttcttctagttattttgaagtatacagtaaattattaactataattttcttactgta

SEQ ID NO: 591410 - DNA, 402 bp, Homo sapiens
agatcttagaacatatgcctgacatatagtaggctctcagtaaatatttgctaaatgaatagttgtattgaaatggcaataatcaccttatatgtgtgttttatccaggaacattcaactgttcagaactagccttagaaaagtaagaagataattaggcccacacaagtttggatttgtgtgtggaagaagacacatgcataggagtaaaggatgtttttaaaaggatgattttaatagttaattatggaatttaaactagtcatgatggcaagtgaagatgaacatagtgatgaataatgaaaacttatgaaagtcaagggacttgcggtcttgaggagtcaaagcattgatgtaagattgctaragatggaagctggagagcctggtggtgttgtttat

SEQ ID NO: 591411 - DNA, 450 bp, Homo sapiens
attctctcaggccagatcgtcatggaaacttttatgaagaggagcccaacactcaggtcttcaggcagcaaaagactccatgcagttgttccattgtaaaattataccaatttattcattgcaacaagtgaggcaatggcacgagtttcttttactgatgaacagaattaaaacataatgagaggaacacagtcagaatttaattcgtccaacctcacgccactcagctagcccacgtcctgcagtcttccaacagcccaaacaatgcatttgaaaaataggaatcaytggaccagaattataaaataattttgagttggaaaaaatgcattactctttaaaataatactcagacatcttagtaaaaataataatagtcttatattctaaaacagagtcagcaaactatagcacttgcaccaaatctggcttgcaactcaaagctaaaca

SEQ ID NO: 591412 - DNA, 443 bp, Homo sapiens
ccaccatcattcttcacagaactagaaaaaaaaatcytaaaattcatatgaaacaaaaagggagccctcatagccaaagcaagactaagtagaaaggacaaatatagaggcattaccctacccaacttcaaactatactataaggctatagtcaccaaaacagcatggtactagtataaaaataggcacatagaccaatgggacagaatagagaatccagaaataaacccaactgcttacagccaactgatcttagactagccaaacaaaaacataaagtggggaaagaacagcctattcaacaaatggtgctggggtaactggcaagccacatgtagaagaatgaaactggatcctcatctctcaacttatataaaaatcaactcaagatggatcaaagacttaaatgtaagacctgaaataataaaacttctaaaagataa

SEQ ID NO: 591413 - DNA, 587 bp, Homo sapiens
aaaattaaaaattaaaacataaattatcactgagaaaggtggagttttaaaaatgagtcatgctgatattaaacttaggctatgagatgtggacacaaaagtgtccccttccagcagagagatttcttccttctgttgtgctgtagtttttcacactagctttgccattctcataaaactcaggcactttaagtcccaactaagtgtgtagtgtggtacctgggtcttatttcagtgattaaatatccttttttaaaaagaagtgaagactccatataactgattgcagttgggtggttgttttaatatctatggggttatgtattttgctgataccaggacattccttttttagagcaacattatgtgcaggagtcacatatatgatgacggatttgaaacagacacttgtttaaccaggagaggttagacgctattaaaatatagtctgtatcaggtataatgcctgtttgtcrgtttgagagagtgaaataaaacaaaatgaattttggggggcagaaaatagtatgccttatgcatttgggtaagtggaggaaaatattggtttaaaattaagcaagctatgt

SEQ ID NO: 591414 - DNA, 568 bp, Homo sapiens
acagaatgaaggacaaaaaccatatgatcattcctatagatgcaaaagtacatgtgataaaattcagcagcctggccgggcacagtggctcacgcctgtaatcccagcattttgggaggctgaggtgggcggatcacraggtcaggagatcgagaccatcctgactaacacggtgaaaccccatctctactaaaaatacaaaacattagccggttgtggtggtgggcacctgtagtcgcagctactcgggaggccgaggcaggagaatggtgtgaacccaggaggcggagcttgcagtgagccgagatcgcgccactgcactccagcctggggcacagagcgagactccgtctcaaaaacaaacaaaaaaaatattcagcagcccatcatgataataactaacaacaaattaggcatagaacgaatataccttaacataataaaggccacatatgacagtcccaaaactgacatcatactgaatggggaaacactgaaaactttttctctaagaactggaacaagacaaaggtgcccattttcatcactcctactcaacatagtactg

SEQ ID NO: 591415 - DNA, 664 bp, Homo sapiens
agtgagttctcatgagatctgtttgtttaaaagtgtgcarcacctcccctttgctctctctcttgctcttgcttgggccatgtaagatgtgcctgcttcctcactttctaccaggattgtaagtttcctgaggtctccccggaagcagaaggtgctatgcttcctttatagcctacagaactgtgagccaattaaacctcttttctttataaattacctagtcacaggtatttctttatagcagtgtgagaacaaactaatataatattgaatgttaagtacatgcagacagtattttccagtatactttccacttgtaattcagtctgcccctaacctcccacctttcctttgttattgtcctagggaaaaacggaagaatgccacctgacagaggggaaggataaagacgggagataggtcttgtcaatcaaaagggagaagttgaaaaaacttcaaattttaggtggcaaaggggaaggagaaaatgggaggaaggaaagaagagagggagggagggagaagggcaagaactcaggactagtgtactgactccatgcattgtgatgaaaattcccatagggtaagtagaaacatccagaaaggttttaggagaccttggaattcccctgtcttctaaaatggagaatgaaagcctataagg

SEQ ID NO: 591416 - DNA, 578 bp, Homo sapiens
cagcttttccaggtgcacagtgcaagctgttggtggatctgggagacagtggccctcttctcacagctccattaggcagtatcccagtggggactccatgtggaggctccaaccccacatttcccttctgtactgccctaccagaggttctccatgagtgctccacccctgaagcaaacttctacctggacatccaggcatttccatacatcctctgaaatctaggcagaggttctcaaacctcaattcttgacttctatgcacccactggcacaacaccaygggtaagctgcaaggcttgggacttgtaccctctgaagcaacagcctgagttgtacattggccacttgtagccatggctgggatgcagggcaccaagttctgagactacacaaagcagcaaggccctgggcctgggcctggcccacaaaaccatttttcccttcctaggcctccaggcctgtgatgggaggggctgcaatgaagacctctgacatgccctagagacattttccccatcatcttggtgattaacatttgactcctcattatgcaaatttctgcagctggcttgaatt

SEQ ID NO: 591417 - DNA, 578 bp, Homo sapiens
cagcttttccaggtgcacagtgcaagctgttggtggatctgggagacagtggccctcttctcacagctccattaggcagtatcccagtggggactccatgtggaggctccaaccccacatttcccttctgtactgccctaccagaggttctccatgagtgctccacccctgaagcaaacttctacctggacatccaggcatttccatacatcctctgaaatctaggcagaggttctcaaacctcaattcttgacttctatgcacccactggcacaacaccatgggtaagctgcaaggcttgggacttgtaccctctgaagcaacagcctgagttgtacattggccacttgtagccatggctgggatgcagggcaccaagttctgagactacacaaagcagcaaggccctgggcctgggcctggcccacaaaaccatttttcccttcctaggcctccaggcctgtgatgggaggggctgcaaygaagacctctgacatgccctagagacattttccccatcatcttggtgattaacatttgactcctcattatgcaaatttctgcagctggcttgaatt

SEQ ID NO: 591418 - DNA, 602 bp, Homo sapiens
ggcctttgaatttctgcagtatcggttgtaatgtctcttgtttcatttttgatttttttatttgggtcttctatatctttttcttggttagtctggctaaaggtttgtaaattttgtttagcttttcagaaaaccaacttttgtttcattgatcttttgtattattttcatttcaaattcattcatttctgctctgatctttattatttcttttcttctattaattttgggtttggtttgctcttgcttttctagttctttaagatgcagtgttagattgtttatttgaagtttatcctctttttgatggraagagtttttctcttcctctttgataagggacttatggctataaacttcttagtactccttttgttgtgtcccataggtttggttatgtcatgtttccattatcatttgtgtctagaaatttttccattttcttcttaatttcttcattgactcactggttattcaggagcatattgtttaatttccatgtgtttgcagtacccaaagttcctcttgttattgatctctggttttattccattatggtcagagaaaatgcttgatattatttcaactttttgaatgtttta

SEQ ID NO: 591419 - DNA, 536 bp, Homo sapiens
ggagttcaagaccagcctggccaacatggtgaaacactgtctgtactaaaaatacaaaaattagctgggcatggtggtgggtgcctgtaatcccagccacttgggaagctgaggcaggagaatcgcttgaacccaggaggcagagtttgcagcgagctgagattgtgccactgcactccagcctgggcaacagagtgagagtccatcaaaaaaaaaaaaaaaaaaaaaamcaaaaaccaccaaaaaataactattgagtactaggcttagtacctcggtggcgaaataatctgtacaacaaacatctatgacacaagtttacctatttaacaaacctgcacatgtgcccctgaacctaaaataaaagttaaaattttaaatttaaattttaagataacctaaaaaacctaaaataaaagttaaataagggttctttttagatctaaagaaagagcccttagattggatttgccagatttgtctattttattggttatctcaaataaacaacccttggaataaaaaaaagacgtgcc

SEQ ID NO: 591420 - DNA, 655 bp, Homo sapiens
ttctcttttctgggttaatcttgctaatggtctatcaattttatttatcttttcaaagaacaagctttttgtttcatttatcttttgtattttttttcaatttcatttagttctgctctgatcttggttatttcctttcttctgctgggtttgggtttggtttattcttgtttctgtagttccttgaggtgtgaccttagattgtctatttttgctctttcagaccttttgatataagtggttagggccatgaactttcctcttaacaccgcctttgctgtgtcccagaggttttgatagcttgtgtcactgtgtcactattgttgttcagttcaaaaaattgtttaatttccaccttgattttgtttctgacccagtgatcattcagaagcaggttatttaatttccatgtatttgcrtggttttgaaggttccttttgggttgattcccggttttattccactgtagtctgagagagtgcttggtttattttcaattttcttaaatttattgaggctcattttgtggcctatcatatggtctatcttggaaaaagtttcatgtgcagttaaatagaatgtatattctgtggttgttggatggaatgttctgtatatctctgttaagtccctttgttccaggttatagtttaaa

SEQ ID NO: 591421 - DNA, 655 bp, Homo sapiens
ttctcttttctgggttaatcttgctaatggtctatcaattttatttatcttttcaaagaacaagctttttgtttcatttatcttttgtattttttttcaatttcatttagttctgctctgatcttggttatttcctttcttctgctgggtttgggtttggtttattcttgtttctgtagttccttgaggtgtgaccttagattgtctatttttgctctttcagaccttttgatataagtggttagggccatgaactttcctcttaacaccgcctttgctgtgtcccagaggttttgatagcttgtgtcactgtgtcactattgttgttcagttcaaaaaattgtttaatttccaccttgattttgtttctgacccagtgatcattcagaagcaggttatttaatttccatgtatttgcgtggttttgaaggttccttttgggttgattcccrgttttattccactgtagtctgagagagtgcttggtttattttcaattttcttaaatttattgaggctcattttgtggcctatcatatggtctatcttggaaaaagtttcatgtgcagttaaatagaatgtatattctgtggttgttggatggaatgttctgtatatctctgttaagtccctttgttccaggttatagtttaaa

SEQ ID NO: 591422 - DNA, 415 bp, Homo sapiens
gttaacaattggcctaatgtattatgccctgtagctacttctgttcagcgtgtttaatatggttgtaatcttacttagttctgttgtatttatgtattcccttccttcccaaagtgcttcccaatatgttttaaggtattagttctgtgcagtaatcctgtgaggatgaccaactytttttctctgtttaataaaaaataatggaaggccgggcacggtgtctcacgcctgtaatcccagcactttgggaggctgaggagggtggatcacctgaggtcaggagtacgagaccatcctgaccaacatggcaaaaccccgtctttactaaaaatacaaaattagctgggtgtggtggtgcatgcttgtaatcccagatacttggaaagctgaggcaggagactcgcttgaacccagg

SEQ ID NO: 591423 - DNA, 580 bp, Homo sapiens
attatttatagattttgtctactgcattgaaattttctagaatgctgcatatgtagagcttaatgtaatcacttcctaactataatctctggagccaacccagttacaataaaattaactctaattttgtgtcttttatttgtttctacttctaggttaaatgtggtttgagaaaagtgttttagaaaactttgaaaaatcactggcttgttagaatgcatgttctattaaaagatatgagtcctatctccaggttacttaaaatattagttttactccaaattgtattctagtttccctatctttaaaatatgttcatgaaacatttctcttctcttatgaagttaaatgttcttttaagtttgaaatttattagagaactctgatatatgatttttaaaaaataacactctgaattactttctaaaatggaaagcaaccctacaacaaaaagatattaccaatattcagttttacctctggcttcaacttatttttctctcaagatcttattattctcttctccagctacccaaggtgcgaaaargaaagaaggccgaagggaagaaggtggtgccca

SEQ ID NO: 591424 - DNA, 641 bp, Homo sapiens
tggaccaccaaacagctgctcaatggggtaagygggctggcaagtacagaccagagacaaagcaagagaaacagcagagactgttggcctgggctgagaagaaagcaaaggagacatccccactaagagatcacctgtccttttaatgggggttaacgctgtcaccaccttagtggagaaaaagaaggctcagctggtggtgactgcacaggacagagatcccattgagttggttgtcttcctgcctgccctgtgttgtaaactgggggttccttactgcattatctaatggaaggcaagcttgagacatctaggattaaataacaaacaaacaaacaacaactcttaaaaatactcttttaaaacttctaattattagttttttttatctcttcagtacattaaaatgtctggtggtaggaaaatactggactcatatatgactgtctccgtgatttgcagggcccagtgcaaaatgacgtggatgttgtacctcgttcaaagtgttaagcgtttcaagatggcaacagcagagcattaggccaagtatgaggtcattatgtacatgggtccttgtgtgaccacacaggtcacaggaacatgaagctagacctgagtgtatattcagataggtaaatctt

SEQ ID NO: 591425 - DNA, 499 bp, Homo sapiens
ctcttaaaaatactcttttaaaacttctaattattagttttttttatctcttcagtacattaaaatgtctggtggtaggaaaatactggactcatatatgactgtctmcgtgatttgcagggcccagtgcaaaatgacgtggatgttgtacctcgttcaaagtgttaagcgtttcaagatggcaacagcagagcattaggccaagtatgaggtcattatgtacatgggtccttgtgtgaccacacaggtcacaggaacatgaagctagacctgagtgtatattcagataggtaaatcttacagatttttaaaactcaataaaagaaaaactacatttcatgtgtgaacacaaaaattggaattaaattggcaatagcattgggatttgtgctcagagtcacagtttacatctgaccacaatttctatatgaattttttaagataaaacagtaagaattttagagaaggtttctgaaatttaaaaattataataacataa

SEQ ID NO: 591426 - DNA, 499 bp, Homo sapiens
ctctcatctacctctgcttggacaaaccagtgatgtgatttgcaaataggctgtaacttcaccgaaaacacatcacagtaaagaaaggtagtgactttcagagaatttgacctaacttagaatttgtaaaagagaaaagcattgtccttatgcctaaagtacatgactgtttctttttaagttacatgtatatttacctgaccaatttgttttactctgtattttaagttatcaggtgaaatggttttggaataaattaatgagttgtttsttctgaataaatgtgcatgttacaaatgcaaacacgtgtatgtattatacaactatgcagcttcaagagctgacttatttctatcagctttttattcacttaaaaaaatcaggctactgaagcatattagaatttaattacaccaattagtactgccacatcagacatatgatgtgccttcaattaagaagtacctaatgggtattagtacaatttagcttcataatt

SEQ ID NO: 591427 - DNA, 585 bp, Homo sapiens
aggttatcattttggagtttcacttgattgggctttgttttgttttgtttcttttcatagaaatatttgatatatgtggtcaccactcacaactcttgcttcagtgascatggatgacaggcagccccagctactgtttttctggttgtatgactatctttgcactcaggccatattttctctggttgttcctggccaatgactgagcatgctcggagtattgatgaaggccatttttaagatttgtgataaccttccaacagaagactttggactggagacttctattgtctgggccaaaatttcctaaactgtgtttcaggctgtgactctttcattctcatccttcttccttctccccctcctttgacagaagccaggcttgcatcactgaagactccctgcacttagatctgctttttcttcttaatctttaactaacgttcctctcataaccttttgagtgacttataattgcatagtatcagcttcttggaaaacctgacttgataaactatcctatttgaaatacagatatatacgcatttaacaatttttgacattattagcacactgagtattaaa

SEQ ID NO: 591428 - DNA, 585 bp, Homo sapiens
aggttatcattttggagtttcacttgattgggctttgttttgttttgtttcttttcatagaaatatttgatatatgtggtcaccactcacaactcttgcttcagtgaccatggatgacaggcagccccagctactgtttttctggttgtatgactatctttgcactcaggccatattttctctggytgttcctggccaatgactgagcatgctcggagtattgatgaaggccatttttaagatttgtgataaccttccaacagaagactttggactggagacttctattgtctgggccaaaatttcctaaactgtgtttcaggctgtgactctttcattctcatccttcttccttctccccctcctttgacagaagccaggcttgcatcactgaagactccctgcacttagatctgctttttcttcttaatctttaactaacgttcctctcataaccttttgagtgacttataattgcatagtatcagcttcttggaaaacctgacttgataaactatcctatttgaaatacagatatatacgcatttaacaatttttgacattattagcacactgagtattaaa

SEQ ID NO: 591429 - DNA, 583 bp, Homo sapiens
gatactgttcttatgcttaaattgggttgtgtgcttacatgtgttcattatgttaatatgtctcataggttaggtatcttaatcaaatatgcagttatataaatacaatacactgagataagataactagcaacacattgaaacaaaaaaaacaagaataggattgaatactgtcacgatctttacaaggcctggcctttcactatgtaaatagatatcttttagtmcaagaaatcacagaacttacacatttttgggaaaagaagaaaaaattcatagaataaattaattttatgtcctgtaagcaaaagtctactaaggtgaattcataatatcccataacagcaaaaaagaatgcattcagaagtcctaaatctataaacaataaaaatagttaagcacatagaatttacttaagttcaaaagcatcatgttcattagaattatataattcttgtagcatttagtacatcctggataattcttattcccattatttattgctaagcacattgaaatttcagattaataatattattattttttaactttcatttgtattgtaactgttggttttaactga

SEQ ID NO: 591430 - DNA, 588 bp, Homo sapiens
aattaattttatgtcctgtaagcaaaagtctactaaggtgaattcataatatcccataacagcaaaaaagaatgcattcagaagtcctaaatctataaacaataaaaatagttaagcacatagaatttacttaagttcaaaagcatcatgttcattagaattatataattcttgtagcatttagtacatcctggataattcttattcccattatttattgctaagcacattgaaatttcasattaataatattattattttttaactttcatttgtattgtaactgttggttttaactgatgaagatgcaaaacaaaaataaacattcaggtaaataactattttctagaaagatccaacctgtaagctagcaatatggtttgattctttcttttaaagttatgttattataagtatataagcaattcagataatagatcctgggttatgatgcatatcctatttgcataagcttaatatattttaaagataaccaagaaagataatgtataattaaaactataaataaacacattactcaacataattactccttaaatattcagtccatttaatataggtctttgc

SEQ ID NO: 591431 - DNA, 588 bp, Homo sapiens
aattaattttatgtcctgtaagcaaaagtctactaaggtgaattcataatatcccataacagcaaaaaagaatgcattcagaagtcctaaatctataaacaataaaaatagttaagcacatagaatttacttaagttcaaaagcatcatgttcattagaattatataattcttgtagcatttagtacatcctggataattcttattcccattatttattgctaagcacattgaaatttcagattaataatattattattttttaactttcatttgtattgtaactgttggttttaactgatgaagatgcaaaacaaaaataaacattcaggtaaataactattktctagaaagatccaacctgtaagctagcaatatggtttgattctttcttttaaagttatgttattataagtatataagcaattcagataatagatcctgggttatgatgcatatcctatttgcataagcttaatatattttaaagataaccaagaaagataatgtataattaaaactataaataaacacattactcaacataattactccttaaatattcagtccatttaatataggtctttgc

SEQ ID NO: 591432 - DNA, 230 bp, Homo sapiens
caatatggtttgattctttcttttaaagttatgttattataagtatataagcaattcagataatagatcctgggttatgatgcatatcctatttgcataagcttaatatattttaaagataaccaaraaagataatgtataattaaaactataaataaacacattactcaacataattactccttaaatattcagtccatttaatataggtctttgctgccgtaaatgaa

SEQ ID NO: 591433 - DNA, 270 bp, Homo sapiens
attttaaaactcacattgccttagaattttaccatcaatgaaagagagggtcactacaggtcctaagaagagaagtgatacgctcytttatgtaaaaaggatgactgtggatattgtgttggtaactgactgtaaggggacacttttaggaaaagtcccctctttagatattgactttatccaagaggaaaacagtagtaattcacacctcagtagacatggtgagaagtagcagattctagatattataaagtctttgagtttaagcaa

SEQ ID NO: 591434 - DNA, 650 bp, Homo sapiens
ggttttctttaaggagagatttcactctgcaaggagccaattggcagtgtttggagatgttttctgttgtcacaacttgtgaatggagttactactagcatcgaattggagaggccagggatgttgctaaacatcctgcaacatacaaggtaacctttccaacaccccatmccaaacatagaattatctggctcagtttgtccatagtaccagagaaaagaccctgctctattaatatgcaggatgagtagtgtgtaattttagatactggcgttaagtatatgtagtagtgggagtctgcatacatttactcttgattgttatttatctatctatttatttatttattgacacaggaaacaaggtcatcagctggcattgagattgaagaaaagtatgtgaggggtgtgaaatgaggaaagaatccataagttaatcttacataagaggaagaaggcaatggctaacaaaagaaaaatgggcttgtttggccgcattaaaggcacatttgcttttcaaggttgtggttttaaagagataacaatcagcacaatttggttatgtgtttttctcccactgcagtttgggtataaaagcaattccaaaattgatggagacatgcatgaaactaaggctatagttttgctaag

SEQ ID NO: 591435 - DNA, 650 bp, Homo sapiens
ggttttctttaaggagagatttcactctgcaaggagccaattggcagtgtttggagatgttttctgttgtcacaacttgtgaatggagttactactagcatcgaattggagaggccagggatgttgctaaacatcctgcaacatacaaggtaacctttccaacaccccataccaaacatagaattatctggctcagtttgtccatagtaccagagaaaagaccctgctctattaatatgcaggatgagtagtgtgtaattttagatactggcgttaagtatatgtagtagtgggagtctgcatacatttactcttgattgttatttatctatctatttatttatttattgacacagraaacaaggtcatcagctggcattgagattgaagaaaagtatgtgaggggtgtgaaatgaggaaagaatccataagttaatcttacataagaggaagaaggcaatggctaacaaaagaaaaatgggcttgtttggccgcattaaaggcacatttgcttttcaaggttgtggttttaaagagataacaatcagcacaatttggttatgtgtttttctcccactgcagtttgggtataaaagcaattccaaaattgatggagacatgcatgaaactaaggctatagttttgctaag

SEQ ID NO: 591436 - DNA, 600 bp, Homo sapiens
tcttagaaaataaactaaatagtttttkgtggccaaagaatcattcttcataaaatgtttctagcagaccatgcggagttgtctaaaattgcttatgaaaaataagccaggaatcaataaatgtagggtgatgattcccaagaaaatgtcacgttagctgtgttgctgcctaagtataaaaggagatggtttgtaactgagaatacacttgagtaagtaaagcaactgtacattttacttagaaaccaaatctagaaacttggatgagaccacattcaatgaagatgaaaggacccaggtctctccccacttaacccatacatgattattttatctttgaaattattcaaaaagcatgatactgagcaaaatcttcaatctgagtctgatttgacaattcaatgctttttgtgggttcagattggcactgagagcaggattgtcttttagacccacacaccaaaatagtgaatgttttctttttctacctgggctccttttcaaaaggaaataatggaaaaatatgagaatttgttctcaggatagttggctgtacatttttggtatgaggtagtggaatctttgaggcaggttaaggga

SEQ ID NO: 591437 - DNA, 600 bp, Homo sapiens
tcttagaaaataaactaaatagtttttggtggccaaagaatcattcttcataaaatgtttctagcagaccatgcggagttgtctaaaattgcttatgaaaaataagccaggaatcaataaatgtagggtgatgattcccaagaaaatgtcacgttagctgtgttgctgyctaagtataaaaggagatggtttgtaactgagaatacacttgagtaagtaaagcaactgtacattttacttagaaaccaaatctagaaacttggatgagaccacattcaatgaagatgaaaggacccaggtctctccccacttaacccatacatgattattttatctttgaaattattcaaaaagcatgatactgagcaaaatcttcaatctgagtctgatttgacaattcaatgctttttgtgggttcagattggcactgagagcaggattgtcttttagacccacacaccaaaatagtgaatgttttctttttctacctgggctccttttcaaaaggaaataatggaaaaatatgagaatttgttctcaggatagttggctgtacatttttggtatgaggtagtggaatctttgaggcaggttaaggga

SEQ ID NO: 591438 - DNA, 600 bp, Homo sapiens
tcttagaaaataaactaaatagtttttggtggccaaagaatcattcttcataaaatgtttctagcagaccatgcggagttgtctaaaattgcttatgaaaaataagccaggaatcaataaatgtagggtgatgattcccaagaaaatgtcacgttagctgtgttgctgcctaagtataaaaggagatggtttgtaactgagaatacacttgagtaagtaaagcaactgtacattttacttagaaaccaaatctagaaacttggatgagaccacattcaatgaagatgaaaggacccaggtctctccccacttaacccatacatgattattttatctttgaaattattcaaaaagcatgatactgagcaaaatcttcaatctgagtctgatttgacaattcaatgctttttgtgggttcagattggcactgagagcaggattgtcttttagacccacacaccaaaatagtgaatgttttctttttctacctgggctccttttcaaaakgaaataatggaaaaatatgagaatttgttctcaggatagttggctgtacatttttggtatgaggtagtggaatctttgaggcaggttaaggga

SEQ ID NO: 591439 - DNA, 544 bp, Homo sapiens
ggttagtttttaataggaggagatgatagtgggagaaaaagctgcragattacattttattcactggaaaaccttcttatccctccctggtttcttggagaaatttcttgtatcttttgaaatgactcaaaatattgattataggacaaactatttatgtaaccagagtccaaggacaggtgatgagtgaaaactatattttattaaagaacagaatattcactaacagaagactggtgaattaacattggcatggattcttcaaattaatgatggaggacatgttgcaattctattattatctgatgcaaaggactattcatggtcatgactaatcattaaatggctgtaaacttttgagaaaacacttccaaatactgtgacagcatatcggctgcagttgttaaggtgagatttgtcagtcctatactgagaagggtaactgctactactcctctccaaattgccaattggattctccttttcacatgataggaatgatacaagtgtaaaggttgacaggctttatattttccagagagaa

SEQ ID NO: 591440 - DNA, 458 bp, Homo sapiens
gttacctggggtggtattcaaagtttcttatcattggtaggatgcagagcagaatttacagtaggccttatggaaggtaggaaagagtctcatacatgctctaagtgaaatctggagtgcatgaagagaacatcagggaggaaaccaaggtaaagatgacgttacaggttgaaatgtgtggttggagagaatattacctgcttgtgctaccttyacataaatacaaaattgcaattgtcattcaatatgaatgggacattgtcgtctttgtgttttccacagaggatgaagactgagctcactcttcaccaaattttaattagccatgccaaatggaatcctttggaattgctcaagctctccacagtagtaaatattaagcaatgcagaattccaagggcacaataagagactactgttgtaattaagaaaatggtttagaaggaagttccccctcc

SEQ ID NO: 591441 - DNA, 407 bp, Homo sapiens
aggtaaagatgacgttacaggttgaaatgtgtggttggagagaatattacctgcttgtgctaccttcacataaatacaaaattgcaattgtcattcaatatgaatgggacattgtcgtctttgtgttttccacagaggatgaagactgagctcactcttcaccaaattttaatyagccatgccaaatggaatcctttggaattgctcaagctctccacagtagtaaatattaagcaatgcagaattccaagggcacaataagagactactgttgtaattaagaaaatggtttagaaggaagttccccctccccacattaacttcccttttgtagttctaactggtcaataagtaggtagcccctggacatttacagtagagtatcaaggtggttcatttgcatgctt

SEQ ID NO: 591442 - DNA, 458 bp, Homo sapiens
gttacctggggtggtattcaaagtttcttatcattggtaggatgcagagcagaatttacagtaggccttatggaaggtaggaaagagtctcatacatgctctaagtgaaatctggagtgcatgaagagaacatcagggaggaaaccaaggtaaagatgacgttacaggttgaaatgtgtggttggagagaatattacctgcttgtgctaccttcacataaatacaaaattgcaattgtcattcaatatgaatgggacattgtcgtctttgtgttttccacagaggatgaagactgagctcactcttcaccaaattttaattagcyatgccaaatggaatcctttggaattgctcaagctctccacagtagtaaatattaagcaatgcagaattccaagggcacaataagagactactgttgtaattaagaaaatggtttagaaggaagttccccctcc

SEQ ID NO: 591443 - DNA, 407 bp, Homo sapiens
aggtaaagatgacgttacaggttgaaatgtgtggttggagagaatattacctgcttgtgctaccttcacataaatacaaaattgcaattgtcattcaatatgaatgggacattgtcgtctttgtgttttccacagaggatgaagactgagctcactcttcaccaaattttaattagccatgccaaatggaatcctttggaattgctcaagctctccacagtagtaaatattaagcaatgcagaattccaagggcacaataagagactactgttgtaattaagaaaatggttyagaaggaagttccccctccccacattaacttcccttttgtagttctaactggtcaataagtaggtagcccctggacatttacagtagagtatcaaggtggttcatttgcatgctt

SEQ ID NO: 591444 - DNA, 574 bp, Homo sapiens
ttttttttttaatttcaagtaggaaaattttaagctttgcagaatagaaacaagtacatgtttactgtcttatcatggattaaaaaaaattcattatcacatttccataatctggtaaagaataacctaaaagatagagttcatctactactttcatggtatgatgwtaattttcttctcagagcaaaaattaggagaggatttaaggaccatagtcacccatattacaaatagaagctgggtgataaatccagctagaatttaaggcacagcccaaggtgcaaattaattcctggaaattagtacaaatcaacttaggatgttccttaaactgcaactaaatcctgtaaattagtgcagatcaacttaggacattccttaaactgtgagaagtaatttatctttcataggacccaccaataagcaataaactcagagactgtcaagactgttctaagaatcttgtctacccatactcacaaaataactggaaagagttcagaacgtgaatacagcattgtagtactttcctagggctgctggaacaaattaccacaaactgggtagcttaaaa

SEQ ID NO: 591445 - DNA, 592 bp, Homo sapiens
gtatcaaggtggttcatttgcatgcttcatctctacctgatatgatgaagaatgtacagaaaataaagtagacaagaggctctgatatgctatcaagattaactacataattcatagagctgagtataaaatgaaaatgcatggatacttactcaaaaattattaagaatttcgagatagctacaacagagcattaaaccaatctcaggggcctcctaagattttttttttttaatttcaagtaggaaaattttaagctttgcagaatagaaacaagtacatgtttactgtcttatcatggattaaaaaaaattcattatcacatttccataatctggtaaagaataacctaaaagatagagttcatctactactttcatggtatgatgttaattttcttctcagagcaaaaattaggagakgatttaaggaccatagtcacccatattacaaatagaagctgggtgataaatccagctagaatttaaggcacagcccaaggtgcaaattaattcctggaaattagtacaaatcaacttaggatgttccttaaactgcaactaaatcctgtaaattagtgcagatcaactta

SEQ ID NO: 591446 - DNA, 536 bp, Homo sapiens
ggagtgaaggagaatgcaataatatataactttatatctttcccacctctaatacttttatttggcctctaatggtggtgtcaaacccagttttaaatttacttgcaccagaggaagattatacaatacccaagacatgatatttgtgtcatttaatttgactgtgccttttctgaaaggtaatttgtggtggatcaaaagttccttcctatgtaaccaattagggctaaaggtgaaggtagctccattatcaacagaggagagacttctgaggtcctttgtctatcacttataacatttgtttgacaacaaaccccatgacacaagtttacytgtgtaacaaatctgcacatgtaaccatgaacttaaaataaaagttaaacaaacaaacaaataaaacccaaacatttgtttgggtgtgctagtaaggttcttgttattgattgtgtgggcaaacattatgcatgatgagttatacagcctgatattgggaggaagcgtttggaaatagggtaaaatcatagaagatgggaaag

SEQ ID NO: 591447 - DNA, 536 bp, Homo sapiens
ggagtgaaggagaatgcaataatatataactttatatctttcccacctctaatacttttatttggcctctaatggtggtgtcaaacccagttttaaatttacttgcaccagaggaagattatacaatacccaagacatgatatttgtgtcatttaatttgactgtgccttttctgaaaggtaatttgtggtggatcaaaagttccttcctatgtaaccaattagggctaaaggtgaaggtagctccattatcaacagaggagagacttctgaggtcctttgtctatcacttataacatttgtttgacaacaaaccccatgacacaagtttacctgtgtaacaaatctgcacatgtamccatgaacttaaaataaaagttaaacaaacaaacaaataaaacccaaacatttgtttgggtgtgctagtaaggttcttgttattgattgtgtgggcaaacattatgcatgatgagttatacagcctgatattgggaggaagcgtttggaaatagggtaaaatcatagaagatgggaaag

SEQ ID NO: 591448 - DNA, 536 bp, Homo sapiens
ggagtgaaggagaatgcaataatatataactttatatctttcccacctctaatacttttatttggcctctaatggtggtgtcaaacccagttttaaatttacttgcaccagaggaagattatacaatacccaagacatgatatttgtgtcatttaatttgactgtgccttttctgaaaggtaatttgtggtggatcaaaagttccttcctatgtaaccaattagggctaaaggtgaaggtagctccattatcaacagaggagagacttctgaggtcctttgtctatcacttataacatttgtttgacaacaaaccccatgacacaagtttacctgtgtaacaaatctgcacatgtaaccmtgaacttaaaataaaagttaaacaaacaaacaaataaaacccaaacatttgtttgggtgtgctagtaaggttcttgttattgattgtgtgggcaaacattatgcatgatgagttatacagcctgatattgggaggaagcgtttggaaatagggtaaaatcatagaagatgggaaag

SEQ ID NO: 591449 - DNA, 536 bp, Homo sapiens
ggagtgaaggagaatgcaataatatataactttatatctttcccacctctaatacttttatttggcctctaatggtggtgtcaaacccagttttaaatttacttgcaccagaggaagattatacaatacccaagacatgatatttgtgtcatttaatttgactgtgccttttctgaaaggtaatttgtggtggatcaaaagttccttcctatgtaaccaattagggctaaaggtgaaggtagctccattatcaacagaggagagacttctgaggtcctttgtctatcacttataacatttgtttgacaacaaaccccatgacacaagtttacctgtgtaacaaatctgcacatgtaaccatgaacttaaaataaaagttaarcaaacaaacaaataaaacccaaacatttgtttgggtgtgctagtaaggttcttgttattgattgtgtgggcaaacattatgcatgatgagttatacagcctgatattgggaggaagcgtttggaaatagggtaaaatcatagaagatgggaaag

SEQ ID NO: 591450 - DNA, 555 bp, Homo sapiens
ttgtttgggtgtgctagtaaggttcttgttattgattgtgtgggcaaacattatgcatgatgagttatacagcctgatattgggaggaagcgtttggaaatagggtaaaatcatagaagatgggaaaggtgtttataagtagattacattaccgtggagggaagccactacaatattttcacgcaaacagctcagagtgaggatatcatacttaactatcttttgctattgtcatccaaacaaatgggctttgttggygaaaatctcttggcctgcttactgcagaaaaggaaaattggactcctactgatttggatgttctacctgtataatctgaataaaacaaatgacaaagtgccccctgacaactcagcttgtgtgtagttgactacagttatcactcagtttctaggctttgtttaccattctagattatttttttccagagaaactaccaatgaattgtacagagcagaggatgctgtagaatagaatttctgcaccctatatggccataaatcaaaatgatacattgctaagacagctccctggtca

SEQ ID NO: 591451 - DNA, 559 bp, Homo sapiens
cccatgacacaagtttacctgtgtaacaaatctgcacatgtaaccatgaacttaaaataaaagttaaacaaacaaacaaataaaacccaaacatttgtttgggtgtgctagtaaggttcttgttattgattgtgtgggcaaacattatgcatgatgagttatacagcctgatattgggaggaagcgtttggaaatagggtaaaatcatagaagatgggaaaggtgtttataagtagattacattaccgtggagggaagccactacaatattttcacgcaaacagctcagagtgaggatatcatacttaactatcttttgctattgtcatccaaacaaatgggctttgttggcgaaaatctcttggcctgcttactgcagaaaaggaaaattggactcctactgatttggatgttctamctgtataatctgaataaaacaaatgacaaagtgccccctgacaactcagcttgtgtgtagttgactacagttatcactcagtttctaggctttgtttaccattctagattatttttttccagagaaactaccaatgaattg

SEQ ID NO: 591452 - DNA, 577 bp, Homo sapiens
catacttaactatcttttgctattgtcatccaaacaaatgggctttgttggcgaaaatctcttggcctgcttactgcagaaaaggaaaattggactcctactgatttggatgttctacctgtataatytgaataaaacaaatgacaaagtgccccctgacaactcagcttgtgtgtagttgactacagttatcactcagtttctaggctttgtttaccattctagattatttttttccagagaaactaccaatgaattgtacagagcagaggatgctgtagaatagaatttctgcaccctatatggccataaatcaaaatgatacattgctaagacagctccctggtcatgatagaaagcagatagtggctgcctgtctggtatgtcacagcttgatctggtctgttgctttgaacatatcagtgtgaatgtaaatggaattaatttaaataatataaaactagaacctagaaagcctcagagaatgtgattttatgtttgctttaatgctttaaaattataaataactccctcaagaggtacgtagaggacatttaagggaagcctatggcacagc

SEQ ID NO: 591453 - DNA, 577 bp, Homo sapiens
catacttaactatcttttgctattgtcatccaaacaaatgggctttgttggcgaaaatctcttggcctgcttactgcagaaaaggaaaattggactcctactgatttggatgttctacctgtataatctgaataaaacaratgacaaagtgccccctgacaactcagcttgtgtgtagttgactacagttatcactcagtttctaggctttgtttaccattctagattatttttttccagagaaactaccaatgaattgtacagagcagaggatgctgtagaatagaatttctgcaccctatatggccataaatcaaaatgatacattgctaagacagctccctggtcatgatagaaagcagatagtggctgcctgtctggtatgtcacagcttgatctggtctgttgctttgaacatatcagtgtgaatgtaaatggaattaatttaaataatataaaactagaacctagaaagcctcagagaatgtgattttatgtttgctttaatgctttaaaattataaataactccctcaagaggtacgtagaggacatttaagggaagcctatggcacagc

SEQ ID NO: 591454 - DNA, 577 bp, Homo sapiens
catacttaactatcttttgctattgtcatccaaacaaatgggctttgttggcgaaaatctcttggcctgcttactgcagaaaaggaaaattggactcctactgatttggatgttctacctgtataatctgaataaaacaaatgacaaagtgccccctgacaactcagcttgtgtgtagttgactacagttatcactcagtttctaggctttgtttaccattctagattatttttttccagagaaactaccaatgaattgtacagagcagaggatgctgtagaatagaatttctgcaccctatatggccataaatcaaaatgatacattgctaagacagctccctggtyatgatagaaagcagatagtggctgcctgtctggtatgtcacagcttgatctggtctgttgctttgaacatatcagtgtgaatgtaaatggaattaatttaaataatataaaactagaacctagaaagcctcagagaatgtgattttatgtttgctttaatgctttaaaattataaataactccctcaagaggtacgtagaggacatttaagggaagcctatggcacagc

SEQ ID NO: 591455 - DNA, 619 bp, Homo sapiens
tttgtttaccattctagattatttttttccagagaaactaccaatgaattgtacagagcagaggatgctgtagaatagaatttctgcaccctatatggccataaatcaaaatgatacattgctaagacagctccctggttatgatagaaagcagatagtggctgcctgtctggtatgtcacagcttgatctggtctgttgctttgaacatatcagtgtgaatgtaaatggaattaatttaaataatataaaactagaacctagaaagcctcagagaatgtgattttatgtttgctttaatgctttaaaattataaataactccctcaagaggtamgtagaggacatttaagggaagcctatggcacagccagataaaacggtatctggtgctaggatatacctaattgagaatttcatgaagcacattatttgtaggtgtagacaatgctttcaaactagacacatttaattagcacataatatgaactacatgagtggcaagttaagcagcactggaccctttgccaggcattttgaaagaattacaggatttggtcatgtgatattaaatctaatcgaagtagtgttctaggaggcccatcattatgataaaaatga

SEQ ID NO: 591456 - DNA, 643 bp, Homo sapiens
tggctgcctgtctggtatgtcacagcttgatctggtctgttgctttgaacatatcagtgtgaatgtaaatggaattaatttaaataatataaaactagaacctagaaagcctcagagaatgtgattttatgtttgctttaatgctttaaaattataaataactccctcaagaggtacgtagaggacatttaagggaagyctatggcacagccagataaaacggtatctggtgctaggatatacctaacagagaatttcatgaagcacattatttgtaggtgtagacaatgctttcaaactagacacatttaattagcacataatatgaactacatgagtggcaagttaagcagcactggcccctttgccaggcattttgaaagaattacaggatttggtcatgtgatattaaatctaattgaagtagtgttctaggaggcccatcattaagataaaaatgacttgctacttcaaatagggacactagaggaagctgtttttagaggactcagttgcagtaggaaatcagtttggtttaagacaatgcttgaaccgaagacactgaataaataatgacttccatgcttattaacaacactaggattaactttgtacgtttagtcaggaaggactattggatata

SEQ ID NO: 591457 - DNA, 611 bp, Homo sapiens
ccattctagattatttttttccagagaaactaccaatgaattgtacagagcagaggatgctgtagaatagaatttctgcaccctatatggccataaatcaaaatgatacattgctaagacagctccctggtcatgatagaaagcagatagtggctgcctgtctggtatgtcacagcttgatctggtctgttgctttgaacatatcagtgtgaatgtaaatggaattaatttaaataatataaaactagaacctagaaagcctcagagaatgtgattttatgtttgctttaatgctttaaaattataaataactccctcaagaggtacgtagaggacatttaagggaagcctatggcacagccagataaaacggtatctggtgctaggatatacctaayagagaatttcatgaagcacattatttgtaggtgtagacaatgctttcaaactagacacatttaattagcacataatatgaactacatgagtggcaagttaagcagcactggcccctttgccaggcattttgaaagaattacaggatttggtcatgtgatattaaatctaattgaagtagtgttctaggaggcccatcattaagataaaaatga

SEQ ID NO: 591458 - DNA, 611 bp, Homo sapiens
ccattctagattatttttttccagagaaactaccaatgaattgtacagagcagaggatgctgtagaatagaatttctgcaccctatatggccataaatcaaaatgatacattgctaagacagctccctggtcatgatagaaagcagatagtggctgcctgtctggtatgtcacagcttgatctggtctgttgctttgaacatatcagtgtgaatgtaaatggaattaatttaaataatataaaactagaacctagaaagcctcagagaatgtgattttatgtttgctttaatgctttaaaattataaataactccctcaagaggtacgtagaggacatttaagggaagcctatggcacagccagataaaacggtatctggtgctaggatatacctaacwgagaatttcatgaagcacattatttgtaggtgtagacaatgctttcaaactagacacatttaattagcacataatatgaactacatgagtggcaagttaagcagcactggcccctttgccaggcattttgaaagaattacaggatttggtcatgtgatattaaatctaattgaagtagtgttctaggaggcccatcattaagataaaaatga

SEQ ID NO: 591459 - DNA, 602 bp, Homo sapiens
atcccagcacttagggaggctgaggagtgtggatcacctgaggtcaggagttcaagacaagcctggtcaacatggcgaaaccccgtctctactaaaaatacaaaaattagccaggcatggtggcaggtgcttttaatcccagctactcaggaagctaaggcaggagaattgcttgaacctgggaggtgaaggttgcagtgagccaagattgtgccactgcactccaggcaggtgacaagagtgaaaccctgtcaaaaaaaaaaaaaagaaagaaaaagaaagaaagaaagagaaagagagagagagaaagaaaaggagaaagaaagaaagagaaagaaagaaagaaagaaagaaagaaagaaagaaagaargaaggaaggaaggaaggaaggaaggaaagaaagaaagaaagaaagaaagaaagaaagaaagaaagagaaagaaagaaagaaagagaaagaaagaatttgaagaagtaaaattatgggagaaacgtgtttagtctaagttatggcaaggtttcaccgaacactgtgacctttaatgttgctccctgacaaccctggtaatatggatgaaaaagaagtttatctcccgtgtgt

SEQ ID NO: 591460 - DNA, 441 bp, Homo sapiens
gtgaaaccctgtcaaaaaaaaaaaaaagaaagaaaaagaaagaaagaaagagaaagagagagagagaaagaaaaggagaaagaaagaaagagaaagaaagaaagaaagaaagaaagaaagaaagaaagaaagaaggaaggaaggaaggaaggaaggaaagaaagaaagaaagaaagaaagaaagaaagaaagaaagagaaagaaagaaagaaagagaaagaaagaatttgaagaagtaaaattatgggaraaacgtgtttagtctaagttatggcaaggtttcaccgaacactgtgacctttaatgttgctccctgacaaccctggtaatatggatgaaaaagaagtttatctcccgtgtgtggaattcatagaaagtggatgaataaagaacaatcctttgacatatgtaggccatggggtgtggatgggctctttgaca

SEQ ID NO: 591461 - DNA, 441 bp, Homo sapiens
gtgaaaccctgtcaaaaaaaaaaaaaagaaagaaaaagaaagaaagaaagagaaagagagagagagaaagaaaaggagaaagaaagaaagagaaagaaagaaagaaagaaagaaagaaagaaagaaagaaagaaggaaggaaggaaggaaggaaggaaagaaagaaagaaagaaagaaagaaagaaagaaagaaagagaaagaaagaaagaaagagaaagaaagaatttgaagaagtaaaattatgggagaaacgtgtttagtctaagttatggcaaggtttcacygaacactgtgacctttaatgttgctccctgacaaccctggtaatatggatgaaaaagaagtttatctcccgtgtgtggaattcatagaaagtggatgaataaagaacaatcctttgacatatgtaggccatggggtgtggatgggctctttgaca

SEQ ID NO: 591462 - DNA, 441 bp, Homo sapiens
gtgaaaccctgtcaaaaaaaaaaaaaagaaagaaaaagaaagaaagaaagagaaagagagagagagaaagaaaaggagaaagaaagaaagagaaagaaagaaagaaagaaagaaagaaagaaagaaagaaagaaggaaggaaggaaggaaggaaggaaagaaagaaagaaagaaagaaagaaagaaagaaagaaagagaaagaaagaaagaaagagaaagaaagaatttgaagaagtaaaattatgggagaaacgtgtttagtctaagttatggcaaggtttcaccgaacactgtgacctttaatgttgctccctgacaaccctgrtaatatggatgaaaaagaagtttatctcccgtgtgtggaattcatagaaagtggatgaataaagaacaatcctttgacatatgtaggccatggggtgtggatgggctctttgaca

SEQ ID NO: 591463 - DNA, 582 bp, Homo sapiens
ttaaatactcccataggccagtggaaaatgatgcaaataattgaggttgatggaggaaaaaggtaattgagtctgtgaatgaacatcaagasacttgtaaaggaagatgttaatgagtaacattgctttgtggagggaattcctactctctgttggatggttcaaatcaaggtcagagtattagttggcttaagtgaaacactgcagaaaatggtgtaagccaataatgataatacaccagcaatatttggcactaagatgttgaccaaggccagagcagattgggaaggaaagggtctttgattctttctgattactgagatgccctgccaggatccacagaaggaaggaagcccattttgcttatataaacatactaatgacagctcctgacaaacaatttgtttttttgctagcaggagagtgattatctatcacagaaacgcttttagcagaatgtacttggtcgtttagaattgcttatggttaacaaagtagaaggttgtggatttatggggctccctggaaaatgtcacatataccacatatgtaactatctgcataaaaatgaagatatttgat

SEQ ID NO: 591464 - DNA, 499 bp, Homo sapiens
gtctaatgtcacaatccaatcagtttttcctatctcaaggaatcatgtccatataatggaattaatcctgaaactctgaaaagttttaatattctggggtmagggtagatgagaagtagtctccatatgacttataaacatgtaaggagaaatagtaaaattgttgtaaaattaaaagaagaacagaaattcataaaataacctataacaatcaggttaaacaacaaaaacaaaaagcaaagcgtctatcagtaacatgattgaatagaagagccaagagagagagttgtcagtggtaaaggaataaatattatctcatttgatagagtgattgtattagtccattttaacactgctgataaagacatacccacgactggacaacttacaaaagaaaaaggtttattggacatacagttccacatggctggggaggactcacaatcatggcaaaaaggagcaagacacatcttatgtgggtggcagcaggcaaaaaaag

SEQ ID NO: 591465 - DNA, 499 bp, Homo sapiens
gtctaatgtcacaatccaatcagtttttcctatctcaaggaatcatgtccatataatggaattaatcctgaaactctgaaaagttttaatattctggggtaagggtagatgagaagkagtctccatatgacttataaacatgtaaggagaaatagtaaaattgttgtaaaattaaaagaagaacagaaattcataaaataacctataacaatcaggttaaacaacaaaaacaaaaagcaaagcgtctatcagtaacatgattgaatagaagagccaagagagagagttgtcagtggtaaaggaataaatattatctcatttgatagagtgattgtattagtccattttaacactgctgataaagacatacccacgactggacaacttacaaaagaaaaaggtttattggacatacagttccacatggctggggaggactcacaatcatggcaaaaaggagcaagacacatcttatgtgggtggcagcaggcaaaaaaag

SEQ ID NO: 591466 - DNA, 499 bp, Homo sapiens
gtctaatgtcacaatccaatcagtttttcctatctcaaggaatcatgtccatataatggaattaatcctgaaactctgaaaagttttaatattctggggtaagggtagatgagaagtagtctccatatgacttataaacatgtaaggagaaatagtaaaattgttgtaaaattaaaagaagaacagaaattcataaaataasctataacaatcaggttaaacaacaaaaacaaaaagcaaagcgtctatcagtaacatgattgaatagaagagccaagagagagagttgtcagtggtaaaggaataaatattatctcatttgatagagtgattgtattagtccattttaacactgctgataaagacatacccacgactggacaacttacaaaagaaaaaggtttattggacatacagttccacatggctggggaggactcacaatcatggcaaaaaggagcaagacacatcttatgtgggtggcagcaggcaaaaaaag

SEQ ID NO: 591467 - DNA, 667 bp, Homo sapiens
ggcttgcaggccatatgatttgtgttgtaaatatgcaactttgcctttgtagtgcttaagcagctgtaggcaatatgtaaaggaatgtctgtggctgagttcctataaaattttatttataaaaacccgtggcagcctggctttggcttattggctatagtttgcctacccctggcttaataaatctgcctctattcataagtaagattctgcttgtgttttgactttgccatgtgctcagggaaggtaagtaaaattaaaatgtctaggagaagaaartgtaaataacaacaaattcctgttggcaacgtatttatgaatatggaagaagagatgccctcttatcctgtgagatggaaagaaaaaaagccaagaacaaatacaaattaaagcaagcaagtctaaaataagagaattaacattattctgggaagtagaagacaaagtacttctgctaggaatgggaagaccaattatggactggagtatttgaaaactcggtggatatttggaatatctgttgtggacaaaaaagagacagaaaaaaggaacagatcaaaaagtcaagtaatttgaagtgattatagggaaaagtgatctggacacactgcgtcattcacaaaagcatctgaccaagagagtaaactctgccctgcggtcaacagtt

SEQ ID NO: 591468 - DNA, 667 bp, Homo sapiens
ggcttgcaggccatatgatttgtgttgtaaatatgcaactttgcctttgtagtgcttaagcagctgtaggcaatatgtaaaggaatgtctgtggctgagttcctataaaattttatttataaaaacccgtggcagcctggctttggcttattggctatagtttgcctacccctggcttaataaatctgcctctattcataagtaagattctgcttgtgttttgactttgccatgtgctcagggaaggtaagtaaaattaaaatgtctaggagaagaaagtgtaaataacaacaaattcctgttggcaacgtatttatgaatatggaagaagagatgccctcttaycctgtgagatggaaagaaaaaaagccaagaacaaatacaaattaaagcaagcaagtctaaaataagagaattaacattattctgggaagtagaagacaaagtacttctgctaggaatgggaagaccaattatggactggagtatttgaaaactcggtggatatttggaatatctgttgtggacaaaaaagagacagaaaaaaggaacagatcaaaaagtcaagtaatttgaagtgattatagggaaaagtgatctggacacactgcgtcattcacaaaagcatctgaccaagagagtaaactctgccctgcggtcaacagtt

SEQ ID NO: 591469 - DNA, 632 bp, Homo sapiens
atatgatttgtgttgtaaatatgcaactttgcctttgtagtgcttaagcagctgtaggcaatatgtaaaggaatgtctgtggctgagttcctataaaattttatttataaaaacccgtggcagcctggctttggcttattggctatagtttgcctacccctggcttaataaatctgcctctattcataagtaagattctgcttgtgttttgactttgccatgtgctcagggaaggtaagtaaaattaaaatgtctaggagaagaaagtgtaaataacaacaaattcctgttggcaacgtatttatgaatatggaagaagagatgccctcttatcctgtgagatggaaagaaaaaaagccaagaacaaatacaaattaaarcaagcaagtctaaaataagagaattaacattattctgggaagtagaagacaaagtacttctgctaggaatgggaagaccaattatggactggagtatttgaaaactcggtggatatttggaatatctgttgtggacaaaaaagagacagaaaaaaggaacagatcaaaaagtcaagtaatttgaagtgattatagggaaaagtgatctggacacactgcgtcattcacaaaagcatctgaccaagagagtaa

SEQ ID NO: 591470 - DNA, 560 bp, Homo sapiens
taaataacaacaaattcctgttggcaacgtatttatgaatatggaagaagagatgccctcttatcctgtgagatggaaagaaaaaaagccaagaacaaatacaaattaaagcaagcaagtctaaaataagagaattaacattattctgggaagtagaagacaaagtacttctgctaggaatgggaagaccaattatggactggagtatttgaaaactcggtggatatttggaatatctgttgtggacaaaaaagagacagaaaaaaggaacagatcaaaaagtcaagtaatttgaagtgattatagggaaaagtgatctggacacactgygtcattcacaaaagcatctgaccaagagagtaaactctgccctgcggtcaacagttactattaaaatttcatcattcagattcagggcttatttctagttgatacaaaagtggcaccttgccctacataatgttatactttttgttattcagaaatgttgaagtttctatgcatgaggtttttgttatttgacataatgatttatttcactcattgtgtttatcttatcc

SEQ ID NO: 591471 - DNA, 627 bp, Homo sapiens
caaacattaattattttcaaagtggctaccaaaatgaataataagcaatcataaaataattatacaaaattatatagataaataagggcagaaattgtatatttttatataattattttattttatttttttgagagggaatctctctctgtcaccctgtctggagtgcagtggcacgattttggctcactgcaaactccacctcctgggttcacaccattctcctgcctcagcctccctagttgctgggactataggtgcctgccaccacatccagctattttttttttttttttgtatttttagcagagacgggatttcactgtgttagccaggatggtcttcatctcctgacctcatgatccgcccgccttggcctcccaaactgctaggattataggcatgagccactgcgcccagccagaaattgtatatttttaaatacactaataatcttaataatgcatcyggtatatgtatatgagttactgagaaaggtgtattagaatcaccttcaataattttggttttaaaaatttatccaattaagagacactagaccttcttttttcttcctagtgaaaatacaacgagaagacagctgtctgcaagccaggaagaattctt

SEQ ID NO: 591472 - DNA, 514 bp, Homo sapiens
ctcccagaggcaaatgacagccaactgccactgccaatgcagtggtacctgcccttgctgtcttagactgggaaagaaataaaagagcctgaatgctttactcatgcttccagcacactatgattaccatatgatcaccatatggcatggagcccaatctctattctctgtgagcccctgatcccctgctcttcaccaggcaggggccccagcaaaggctcatagtgcagcagccccactccagrctgaaaatgcccagtggcagtggttctgcatttctctggggtggagatcccagaagcaactgaaagtttctctgcaaccgctattcagcagtactgcccttgctgccctccaactggggagggaacaagatcccaagtgctttactcacacctccagcacactgcagctaccctacagagaagagatgaatctgtcttctcacaagccctgacaccctctgctcatcaccagtagtgtcccccagattggttccaaaatgcacaggccc

SEQ ID NO: 591473 - DNA, 514 bp, Homo sapiens
ctcccagaggcaaatgacagccaactgccactgccaatgcagtggtacctgcccttgctgtcttagactgggaaagaaataaaagagcctgaatgctttactcatgcttccagcacactatgattaccatatgatcaccatatggcatggagcccaatctctattctctgtgagcccctgatcccctgctcttcaccaggcaggggccccagcaaaggctcatagtgcagcagccccactccagactgaaaatgcccagtggcagtggttctgcatttctctggggtggagatcccagaagcaactgaaagtttctctgcaaccgctattcagcagtactgcccttgctgccctccaactggggagggaacaagaycccaagtgctttactcacacctccagcacactgcagctaccctacagagaagagatgaatctgtcttctcacaagccctgacaccctctgctcatcaccagtagtgtcccccagattggttccaaaatgcacaggccc

SEQ ID NO: 591474 - DNA, 178 bp, Homo sapiens
gccaaggtcctcacctcttttgtccccaagcttgtgaggaaaaaccttgagctcaccacagggctgtgatgtgcagcactgcagtgacaagccaagctatgcagccagcatttcagtaggagggaagcctacacacacagaatactgacacgragcatggctccaaatgtgagaaaat

SEQ ID NO: 591475 - DNA, 527 bp, Homo sapiens
acaggccccatcaaaggttgaccactccatttggcagcatctctgcatttctgtatggtggagctgcaaaagacaagtgacagacctccagacattaccactgccaaggtcctcacctcttttgtccccaagcttgtgaggaaaaaccttgagctcaccacagggctgtgatgtgcagcactgcagtgacaagccaagctatgcagccagcatttcagtaggagggaagcctacacacacagaatactgacacgaagcatggctccaaatgtgagaaaatacacatttgtgtatgaacaagagcctacctatcagccattataggtaggtaggctgaacaagagcctrcctatcagccattatacctaagtgtcatcagccagcttgcagcagaaacttcaacactaaaattactttgctaatataagcctctgtgaaacccaggacaataattcagctactaataaagatcatgcaaaaaggtgctttgaaaacatccagaaacaaagtcaactgactatgctcaa

SEQ ID NO: 591476 - DNA, 581 bp, Homo sapiens
aacataagaactctagcaactcaaaaatcagagtgtcactttacctccaaatgactgcactagttctacagcaatggttgttaaatagaaggaaatggctgaaatgacagatatagaactgagaggtagaagaaaatgaagatcattgaaattcaatagaaagttgaacactatttccaagaatctgaggaatccattaaaatgattaaagagaaaaaaattagccatttgaaaaaacaaaacaagacaaacaaacaaaaaccaaacctagcaggtagagttacaaaatacactacaagaatttcataaaatgattggaaatattcacagcagaatggactaagccaagaaaagaatctcagagattgaagactgattatttaagttaacacagccagaaaataaataaagaaaagaagaattttaaaaaatgaaaggtcaggcatggtggctcatgcctgtacctgtaatcccagcactttgggaggatattgagaccatcctggctaacayggtgaaaccctgtctctactaaaaacacacacacaaaaaaattcactgggcatggtggcaggtgcctg

SEQ ID NO: 591477 - DNA, 516 bp, Homo sapiens
ccgagatcatgccactgcactccagcctgggctacagagcaagactccatctcaaaaaaaaaaaaaaagaaaaaaagaaaaagaaaaaaaccttggagaaataagggattctrtaaaaaatttccccaatttcactagagagattgacatataaatttagaaaattcagataacccatgtaagatgctatgtaagacaaccattgcagagacacaaagtaatcagattcttgaaggtcaatgcaaaagaaaaaaatattaaaggcagttaacgacaaggggcaggtcacataaagtggaaactacatcaaattcacaggggaactctcagcaatatcccacagtcagaagacattaagaatccatattcagcatttttgaaaaaataaaattttgaaccaagaattttatgtcccaccaaactaagcttcataaacaagggagaaataaaatccatttcagataagcaaaagctaggggaatttattaccaccaggcctttagagaccagaagaga

SEQ ID NO: 591478 - DNA, 497 bp, Homo sapiens
cagctataagtcaattctcaacaaataaaaaaaaatgttaccagccacactctcagaccacagcacaataaaaatacaaatcaataccaagaagatctgccaaaactgtaggattaagtgaaaattaaacaacctgaacctgaatgacttttgtgtaaacaataaaatcaaggcagaaatcaagaaattcttagactctgatgaaaacaaaaatacaacacactagaaactctagaacacagataaagcayggttaaaaggaaagtttattgtgctaaacacttatgtcaacagctagaaagatctcaaatttgcaacctaacatcacagatagaggaacctaaaaaacaaaaaagaaccaacctgaaggtagtagaagaaaagaaatggccacaatcataacggaaattaacaaaatggagatgagaaaaaaatgtaaaaaaatcaacaaaactgaatgttgggtatttgaaagaaaaaataatgttgataggcca

SEQ ID NO: 591479 - DNA, 241 bp, Homo sapiens
gtactcagcgtgtaatgtgcaccaaatacatatatattggattaatatttaaatgcgtatatacttagctgtgaataaatagcatcaatatttgtcttttaaatgttaaawatataaagtgtatagccttcaaaagtacactgtacataaacaatttgaaggtgatgaagaggaccctgaaacaggaatggattcctaattcctagcagggatttaatggccatcacggagcagccagatg

SEQ ID NO: 591480 - DNA, 351 bp, Homo sapiens
cataacggaaattaacaaaatggagatgagaaaaaaatgtaaaaaaatcaacaaaactgaatgttgggtatttgaaagaaaaaataatgttgataggccattatctaaacttataaagaaaaaaagagacaatattcaaataaacacawtcacaaaagagacaaaggggacattaccagtgactccacagaaatacaacaaccctcagggatgattatgaacacctctatgtacacaaactgaaaaacccagagaagctgcataaattcctggaagcaatcttcaaagattgaaccaggaagaaaacgaaactttgaacagactaataggaagttccaaactgaattggca

SEQ ID NO: 591481 - DNA, 555 bp, Homo sapiens
attgaaccaggaagaaaacgaaactttgaacagactaataggaagttccaaactgaattggcaatacaatgcctatcaatcaraaaaagtgttggcctcaaaggattcactgccaaattctaccagatgtataaagaagagctgataccacacctactgacactatctaaaataattgaggaggagggactcatacctaactcattctatgaggacaacatcattctgataccaaatcctggcagagatgcaatgaaaaaaaaaacttcagaccaatatttctaatgaacatagatacagaaatattcaacaaaatactagcaaaccaaatctagctgtacatcaaaaagctaatccaccacaatcaagtaggttttatttcttgcaaaatatttccagaatggtacttccaaggttttcttctagagattttatagtttgaggttttacatttatgtctttaatccatcctgggttgatttttgtgtatggtgaaaggtaggggtccagttcaaatcttctgtgtatggtcagcaggttatcctggcaccattt

SEQ ID NO: 591482 - DNA, 387 bp, Homo sapiens
tcatactgttctcatgataatgagtgagttcttatgagagctgaaggttttataggggctttcccccactttactttgcacttctctctcctgcagccatatcaacaaggacatgtttgctgccccttccaccataagtgtatgtttcctggagcctccccagccatgcagaactgtgagtcaattaaaactattttgattctaaattacccagtctcagtcagttctttatagcagcatgagaacagactaatacagtgacccacycctttatatttgtttaactgagttgattcaatgaatccatctcacagctctaagtttttttcctcaatttagtcccttctgctgttaatacttccagttaaacaatgaaatgctcatagt

SEQ ID NO: 591483 - DNA, 529 bp, Homo sapiens
ctcctttatatttgtttaactgagttgattcaatgaatccatctcacagctctaagtttttttcctcaatttagtcccttctgctgttaatacttccagttaaacaatgaaatgctcatagtgagtttctcagctcttagacgagtttgggtcattgtctttctttccttttttttttttttttttttttgtgtgtgtgtgtgtgtgtgtgtgtgtgtgtgagatggagtcttgctctgtcaccaaggcaccaaggctggaatgcagtggtgtgatctcggctcactgcwacctctcaattcaagccagtctcctgcctcagtcacccgagtagctggaactacaggtgtgtgccaccatgcctggctaagttttgtatttttagtggagatggggtttcaccatgttggccagcctggtctcgaactcctgaactcaggtaacctggctgcctcggcctcccaaattgctgggattacaggtgtgaaccactgtgcctggcaagagtttgggtcttttaaaaaaatga

SEQ ID NO: 591484 - DNA, 604 bp, Homo sapiens
agtgtacttaatggaaaaaaatgtacatatcactataaattgttctctctgctaacatataatattttaaattttgaaaatagaaagttaatgttattaatcattttattaaataaagaaaagatagatcaaccctaattataataattacttcatgatatgtttggataaacatgtttattaaaacagaattctatatttgaaagatacwatacaacattttatttacatattttaattgaagtctactgaaaatacaccagaaaacctaacagatacacttaacataagggaaacattatcctacactgcttcactttttcaaagatgttattcctcctagttaatgacttactctaaaaagagtattagaagtagctgaaaagaaaggctatgtttaaatatgtgaagagggcaagtttgaacatttaatatttattgcccacctcttagctttgttatgctctcaagtgactcttaagagaatttcacacttcgacaatattcagagaataagagacatgacattgttaaataccatcaacatgcctgctgctccgttttgaaatgttcctgaattcaaaataccctaaaataattcaga

SEQ ID NO: 591485 - DNA, 561 bp, Homo sapiens
aaacctaacagatacacttaacataagggaaacattatcctacactgcttcactttttcaaagatgttattcctcctagttaatgacttactctaaaaagagtrttagaagtagctgaaaagaaaggctatgtttaaatatgtgaagagggcaagtttgaacatttaatatttattgcccacctcttagctttgttatgctctcaagtgactcttaagagaatttcacacttcgacaatattcagagaataagagacatgacattgttaaataccatcaacatgcctgctgctccgttttgaaatgttcctgaattcaaaataccctaaaataattcagaatatcttgcttctgatgtcaggatttactctgaacagaaatattttgaatgaagaaacacaaatatgtaatgaggtataatagtacccctcactaattattaaagaaagactacccgaagactagatttatcttcttgcttgaaaaacaaaatcaaggaaacacccacagaaatacaatactctggatatgagggaatgaattaattcccgaaagacagaa

SEQ ID NO: 591486 - DNA, 561 bp, Homo sapiens
aaacctaacagatacacttaacataagggaaacattatcctacactgcttcactttttcaaagatgttattcctcctagttaatgacttactctaaaaagagtattagaagtagctgaaaagaaaggctatgtttaaatatgtgaagagggcaagtttgaacatttaatatttattgcccacctcttagctttgttatgctctcaagtgactcttaagagaatttcacacttcgacaatattcagagaataagagacatgacattgttaaataccatcaacatgcctgctgctccgttttgaaatgttcctgaattcaaaatacccyaaaataattcagaatatcttgcttctgatgtcaggatttactctgaacagaaatattttgaatgaagaaacacaaatatgtaatgaggtataatagtacccctcactaattattaaagaaagactacccgaagactagatttatcttcttgcttgaaaaacaaaatcaaggaaacacccacagaaatacaatactctggatatgagggaatgaattaattcccgaaagacagaa

SEQ ID NO: 591487 - DNA, 561 bp, Homo sapiens
aaacctaacagatacacttaacataagggaaacattatcctacactgcttcactttttcaaagatgttattcctcctagttaatgacttactctaaaaagagtattagaagtagctgaaaagaaaggctatgtttaaatatgtgaagagggcaagtttgaacatttaatatttattgcccacctcttagctttgttatgctctcaagtgactcttaagagaatttcacacttcgacaatattcagagaataagagacatgacattgttaaataccatcaacatgcctgctgctccgttttgaaatgttcctgaattcaaaataccctaaaatarttcagaatatcttgcttctgatgtcaggatttactctgaacagaaatattttgaatgaagaaacacaaatatgtaatgaggtataatagtacccctcactaattattaaagaaagactacccgaagactagatttatcttcttgcttgaaaaacaaaatcaaggaaacacccacagaaatacaatactctggatatgagggaatgaattaattcccgaaagacagaa

SEQ ID NO: 591488 - DNA, 561 bp, Homo sapiens
aaacctaacagatacacttaacataagggaaacattatcctacactgcttcactttttcaaagatgttattcctcctagttaatgacttactctaaaaagagtattagaagtagctgaaaagaaaggctatgtttaaatatgtgaagagggcaagtttgaacatttaatatttattgcccacctcttagctttgttatgctctcaagtgactcttaagagaatttcacacttcgacaatattcagagaataagagacatgacattgttaaataccatcaacatgcctgctgctccgttttgaaatgttcctgaattcaaaataccctaaaataattcagaatatcttgcttctgatgtcaggatttactctgaacagaaatattttgaatgaagaaacacaaatatgtaatgaggtataatagtacccctcactaattattaaagaaagactacccgaagrctagatttatcttcttgcttgaaaaacaaaatcaaggaaacacccacagaaatacaatactctggatatgagggaatgaattaattcccgaaagacagaa

SEQ ID NO: 591489 - DNA, 596 bp, Homo sapiens
aaagacagaaaacaaaggagttaaaccctgctactgccctaatttagtggctagagtttccagcagtggggcagagaaagtgggctcctagagttgtacaaagccaagaaatccaggagactaaggtaactagagtttctaggtctgagaagctagagattcaaagagrgaaatctctgatatctacagatgttctcctttcagtgcttagcagaatactgattagtgtatatatgtgagtaatctgctcactgccagggaaacaagcatcttcaaagattaaaaacaaacaaacaataacaacaacaaaaaccagtgcctgacattcacatatgacctggattatacctgtatttgccagccaaatgaaagaaaaaagctaaattcacagtgcatttggtaaagcaatttaaaaggtcttgcctcaggggtagaaattaattacatttaaactgagtactgagttgaacgcaacaaaaaatcataaaagaagtatctaaaaggatcaagcggttttaaacaaattaactgtgtcctagagaaaaagctcatattttgtacagaaatacaaaatatccagcactcacaaagataac

SEQ ID NO: 591490 - DNA, 626 bp, Homo sapiens
taaaatttctttaacagattcacagagactggcagcacaaagttttgtaaggatttagagctactggaactctcataccttgatggtagaaatgtaaaatgttttaaaaacttctgaaaactctttggaaatgtcttattttctcataatgttaagcatacacctatactatgacaaagaactccattataaggtgtttacaggccctcgatcagaaaaaacataaccaaaacataagttgtataaacatgtatatggaaactttatttaagatagtcaaaaatttgaaaaattctaaatgtctatcaaagaaaagyggataaacattgtgtgacataatcacacaagagagattacctttcaccaattaacaattaatgagcttttgatacgcacaatgacacaattaatctcaaacacatgttgaaccaaaagatgccaggcagaaattagtgcacactgttttaattccaaaaacagatacaactacggtgcagatatgaaaaaagtgattgcttcattaatgagaggtattaactagaaagagatattaggaaaatttattgggtcatatttgtgcacttgaatgaaagcagaatttatttttgtaaaaatatagatgtcag

SEQ ID NO: 591491 - DNA, 626 bp, Homo sapiens
taaaatttctttaacagattcacagagactggcagcacaaagttttgtaaggatttagagctactggaactctcataccttgatggtagaaatgtaaaatgttttaaaaacttctgaaaactctttggaaatgtcttattttctcataatgttaagcatacacctatactatgacaaagaactccattataaggtgtttacaggccctcgatcagaaaaaacataaccaaaacataagttgtataaacatgtatatggaaactttatttaagatagtcaaaaatttgaaaaattctaaatgtctatcaaagaaaagcggataaacattgtgtgacataatcacacaagagagattacctttcaccaattaacaattaatgagcttttgatacgcacaatgacacaattaatctcaaacacatgttgaaccaaaagatgccaggcagaaattagtgcacactgttttaattccaaaaacagatacaactackgtgcagatatgaaaaaagtgattgcttcattaatgagaggtattaactagaaagagatattaggaaaatttattgggtcatatttgtgcacttgaatgaaagcagaatttatttttgtaaaaatatagatgtcag

SEQ ID NO: 591492 - DNA, 626 bp, Homo sapiens
taaaatttctttaacagattcacagagactggcagcacaaagttttgtaaggatttagagctactggaactctcataccttgatggtagaaatgtaaaatgttttaaaaacttctgaaaactctttggaaatgtcttattttctcataatgttaagcatacacctatactatgacaaagaactccattataaggtgtttacaggccctcgatcagaaaaaacataaccaaaacataagttgtataaacatgtatatggaaactttatttaagatagtcaaaaatttgaaaaattctaaatgtctatcaaagaaaagcggataaacattgtgtgacataatcacacaagagagattacctttcaccaattaacaattaatgagcttttgatacgcacaatgacacaattaatctcaaacacatgttgaaccaaaagatgccaggcagaaattagtgcacactgttttaattccaaaaacagatacaactacggtgcagatatgaaaaaagtgrttgcttcattaatgagaggtattaactagaaagagatattaggaaaatttattgggtcatatttgtgcacttgaatgaaagcagaatttatttttgtaaaaatatagatgtcag

SEQ ID NO: 591493 - DNA, 548 bp, Homo sapiens
tcaaaacttataaatattacttaaatttgttcaccctattttatgtaaattttatataaaaataaacaaaacagaaaaaaatcctagtctttttaggagtatgatcaaagttaatcacagattgtttatatgtgaatgaacacacaaaaaatatgtatgcacttacctctccaaaatgttgaagtgtccgcttgtaaaagataccattagtatttattcatttaacatattcatatgattcaaacatttaaayatttaaaacaaatattaccaacacttttagtaaattggaaagtttaagtcaatatcgaattgagagtttttttctcatttggttgattcattaattataatcaacaaaaaaaatttgcatatgttacgtttggttatacagatacatttgtgacatataattgcagtattgggcaatgactgataaagttgtattttatcaaaacagctttctgagtatgtgatactgtgatatataagtaaaaaaatatgctaattcatgatattctgtccctggaagaatatggacagaggtt

SEQ ID NO: 591494 - DNA, 548 bp, Homo sapiens
tcaaaacttataaatattacttaaatttgttcaccctattttatgtaaattttatataaaaataaacaaaacagaaaaaaatcctagtctttttaggagtatgatcaaagttaatcacagattgtttatatgtgaatgaacacacaaaaaatatgtatgcacttacctctccaaaatgttgaagtgtccgcttgtaaaagataccattagtatttattcatttaacatattcatatgattcaaacatttaaacatttaaaacaaatattaccaacacttttagtaaattggaaagtttaagtcaatatcgaattgagagtttttttctcatttggttgattcattaattataatcarcaaaaaaaatttgcatatgttacgtttggttatacagatacatttgtgacatataattgcagtattgggcaatgactgataaagttgtattttatcaaaacagctttctgagtatgtgatactgtgatatataagtaaaaaaatatgctaattcatgatattctgtccctggaagaatatggacagaggtt

SEQ ID NO: 591495 - DNA, 548 bp, Homo sapiens
tcaaaacttataaatattacttaaatttgttcaccctattttatgtaaattttatataaaaataaacaaaacagaaaaaaatcctagtctttttaggagtatgatcaaagttaatcacagattgtttatatgtgaatgaacacacaaaaaatatgtatgcacttacctctccaaaatgttgaagtgtccgcttgtaaaagataccattagtatttattcatttaacatattcatatgattcaaacatttaaacatttaaaacaaatattaccaacacttttagtaaattggaaagtttaagtcaatatcgaattgagagtttttttctcatttggttgattcattaattataatcaacaaaaaaaatttgcatatgttacgtttggttatacagatacatttgtgacatataattgcagtattgggcaatgactgataaagttgtattttatcaaaacagctttctgagtatgtgatactgtgatatataagtaaaaaaawatgctaattcatgatattctgtccctggaagaatatggacagaggtt

SEQ ID NO: 591496 - DNA, 667 bp, Homo sapiens
cagaggctttccatttttcgagagtggctagaaaaaaaagctatgtttacaacatgactctactaagaaacctgaatattatttcattacttcttatcaagctaatatgagaaaggaagcaataagattaaaataaatgacagtcacttcttgaactggaagcaaagaagtttaacaaaagaaaaaaaagcattcttccccactttcttaaaaattgagaccacattttaaaataattttgcttgaggtctaattaaaaatattatagtttctattttctggaagattatagtttttcaaaactgcaaccagtaggcagataaataaatataaattacgataaacataatgtagatgtatctttacagaaaactttagatcaaatrttagctttttctacaaagcgtcagattttaagtatgttaggctttgacaatcatacagtttctgttgcaaccactcaactctgacataatagcctgaaaacatctatagaccacatgtaagtgaatgatcttgtgtccaaaaaaaaaaccttgttatttatgaaaacactgcagtttttactttatgcaatcgttatatgctacaaaatgttattttaaaaaattgtttcaatcatttaaatctctaaaaaccattattaccttgcaggctgtaccaaaac

SEQ ID NO: 591497 - DNA, 578 bp, Homo sapiens
caatcatacagtttctgttgcaaccactcaactctgacataatagcctgaaaacatctatagaccacatgtaagtgaatgatcttgtgtccaaaaaaaaaaccttgttatttatgaaaacactgcagtttttactttatgcaatcgttatatgctacaaaatgttattttaaaaaattgtttcaatcatttaaatctctaaaaaccattattaccttgcaggctgtaccaaaaccataggccacaggctgccaatgctcacactgaagaarcaaaattgtgatatcagtgcagccttcacacagaaaatagagtttgaaactagaatatcaactacaactggagagttaaatgaaaagtcttattagttagttggagtgggttttgcaagacactggtgagaagtacagaatttggggtaattgcagtaattacgtgggcttaaatatatatgtgtgggtagaagagggagatgtcaagcgatgagagtagagatgagtttaggataaattacaaatgtcttcaggccatccaaagtgtttataatttattctaatggaagtgacaagacattaatga

SEQ ID NO: 591498 - DNA, 390 bp, Homo sapiens
tcgtatgcagactgaaatcctaatcaaagcattagtaaaaagaaaaaggtccttaaaattttctgaaatttttatatgtgaattatatttcaaagaagctcaatttaaaatgccctcrtgttcaaagtaaaaatacatattacaaattgtgtaatatgtattaattttaaattttataaaaaatcagtgaattctttcaagtttttcaaagtgttatggttaagtctaaataggaactatacttaaattagattgtttagaatgaaaaattatttttaatttattcaatgtttattttatgtgttcagcattctgatgattctttgagaaggaaaatagtataaatagttgaacatatttaaaaacatcatattgatcacaattatacat

SEQ ID NO: 591499 - DNA, 596 bp, Homo sapiens
aagaaacatagagcaattttcagcagtatggacttaccttaaaaccggaaaatggataccatcattttaaaatattaattagaactttgggtctgctttcccccatgccctattagtagtaaattccttatttgttcccttttaatatgtacatgccagtttaataatttcaaaacccctagagtttttttcatttcaaagttattttgattgttctaaatgataagcagagagaatcagtctttcccggttattgcttctttttgtcacatgaggtctgtatccagacccacatatattttctcgaggtcctcttggggcacatttgaccctatgtcctccgsacatgaacaataaaattagttatcaactaacattcatatgacttaccatgtttctccaaatcatagccagcccgtgtgcctgtacttgagtcaagagcctcagcacatcaccggctgaagttaattttaagtgcagggcttttccaagctgtgcagccttgtctggtatgaaatttccacttaataaggttttcttaactagactctttgaatacttttcctcagagttcttgaactcattgtgcaaatttt

SEQ ID NO: 591500 - DNA, 576 bp, Homo sapiens
aaattatataaattccagcagaaaatcatattagatgattatggtttatttaaggattctagtaaaatctttaacatagaaaaatactcatattggtatacgtacagaacacagtcatctaccattcrtagttcaagctggagctattaaaatattagattggataactcaatatcaacattgatatccattgtaaatatatacaatagaagccattaatcttaccaaaaagatataaaattactgaaattttttacaaacaagctttcataataatatttatcttctgggctgtagcattaattctaaaaaatgacaaaaatttgtaagaaaacatatgacataattttgacctattgaaatattattaaatgtgctattaatacaatagtcatgaaaaccattatacaaaaacaaagtgttgttcatggcatttacagagaacacattggtatgactccttcagggtatttataataagtatgaagcaagatttgactgagaatactgaagaaaacatttacttaattttttgaaacagctctgaatagatgaatagcacttatttaggttctt

SEQ ID NO: 591501 - DNA, 576 bp, Homo sapiens
aaattatataaattccagcagaaaatcatattagatgattatggtttatttaaggattctagtaaaatctttaacatagaaaaatactcatattggtatacgtacagaacacagtcatctaccattcatagttcaagctggagctattaaaatattagattggataactcaatatcaacattgatatccattgtaaatatatacaatagaagccattaatcttaccaaaaagatataaaattactgaaattttttacaaacaagctttcataataatatttatcttctgggctgtagcattaattctaaaaaatgacaaaaatttgtaagaaaacatatgacataattttgacctattgaaatattattaaatgtgctattaatacaatagtcatgaaaaccrttatacaaaaacaaagtgttgttcatggcatttacagagaacacattggtatgactccttcagggtatttataataagtatgaagcaagatttgactgagaatactgaagaaaacatttacttaattttttgaaacagctctgaatagatgaatagcacttatttaggttctt

SEQ ID NO: 591502 - DNA, 585 bp, Homo sapiens
accattcatagttcaagctggagctattaaaatattagattggataactcaatatcaacattgatatccattgtaaatatatacaatagaagccattaatcttaccaaaaagatataaaattactgaaattttttacaaacaagctttcataataatatttatcttctgggctgtagcattaattctaaaaaatgacaaaaatttgtaagaaaacatatgacataattttgacctattgaaatattattaaatgtgctattaatacaatagtcatgaaaaccattatacaaaaacaaagtgttgttcatggcatttacagagaacacattggtatgactccttcagggtatttataataagtatgaagcaagatttgactgagaatactgaagaaaacatttacttaattttttgaaacagctctgaatagatgaatagcacttatttaggttctttattctcttttkcttcctttctcctttccttcttttctgtcatagatgagccaggcaagtaacccaaatgcgtgatatggactaggtgtaataaaactaagcagtggagaaattgtggtaaaatgaagc

SEQ ID NO: 591503 - DNA, 505 bp, Homo sapiens
tttgcctgtgtagaacagattaatattaaaatctattttttcttttaacaaaatttagcaaatgaggaattttctattggttcatttcttctgacatttcttctatgttgacccttctcccacttcatgttgcaagatgtgagatctwacttcatttatcacattcatattcaaggcaaactaaatagaatcaggatgataggcttgtacatttatgcttttttacagaaacctttagagaagggttcagctatattgtatctcacctataaaaggtggttcacatttccaaatggataaaggctagaaaaatcaagaaaaagagctgtcatgagtacatgacagcaaacataatttggggcttagactcatgaccaaactgaagttctgtaagaaagaaattaagagaaaattaatattgggcaggcaaaatccatgttggtatatccttatgcatataactagaaatatattgctaattttaataaacttactttcaaaaatg

SEQ ID NO: 591504 - DNA, 633 bp, Homo sapiens
tccatgttggtatatccttatgcatataactagaaatatattgctaattttaataaacttactttcaaaaatgtattctgtgttattatactttaacatgtgttcaktaactgcgtgtgttcctaaaccttgtcatatttggatatgatttttagccataaatagtggggcaagatggaaaatctgaagttttacaaaaactaaatataagacaaaaacaatatatattcaactaaaaaggagttggcaacaaacttctctgattctatatcaaatcccaaaaaacaatggaatatgtatcagtaattattgactaccatagggtaataataataataaatggtcataaaataaattagttaatggaaaatgatagatattaattattgaatgataaagcacaatgtaaaacaaaatgatagaaataatcatactcacaaacataacaatctgtatgtagaagtctaggttttccaaattaaagctggttactcacaaaatccttgaaaagagtgagaagttggtggggtgattatatttttaagctatgaagtcagatagtgtgatgtttcatctcagtaccactataaaataaagttttaatcctgttcatgtcactcttaattttcacta

SEQ ID NO: 591505 - DNA, 533 bp, Homo sapiens
tgtgggcatgtttattttacacctcaattttggctcaaggaatataacacatagtggcttctttctttcatttgccatatcaaatccatgaacacctgcctttaagatgtatcagattacttttacctcttactagacatgtccaggcaactgccaaagcactggatcattggaatagcttcataagtgatgaccctatttctctcactttcattcctagaggctgtttttcagccaggagtcagmataattataaaacataaatcaaataatttcactgtcttgctcatagctttctaattgttccccttctcaaagtaaaacccaaaaccttgtcattgtttgtgaaagcaacaatatgggatccttctccatacctcccccaatttattttatcacagccctcattgttttggtcattctatccttaagagcctcctgatatttcttggaaatgccaagattcacccaccttagaaaccactttgtttttctgtctttaaaagagacatgcgctgtagatatttgcttgc

SEQ ID NO: 591506 - DNA, 533 bp, Homo sapiens
tgtgggcatgtttattttacacctcaattttggctcaaggaatataacacatagtggcttctttctttcatttgccatatcaaatccatgaacacctgcctttaagatgtatcagattacttttacctcttactagacatgtccaggcaactgccaaagcactggatcattggaatagcttcataagtgatgaccctatttctctcactttcattcctagaggctgtttttcagccaggagtcagaatrattataaaacataaatcaaataatttcactgtcttgctcatagctttctaattgttccccttctcaaagtaaaacccaaaaccttgtcattgtttgtgaaagcaacaatatgggatccttctccatacctcccccaatttattttatcacagccctcattgttttggtcattctatccttaagagcctcctgatatttcttggaaatgccaagattcacccaccttagaaaccactttgtttttctgtctttaaaagagacatgcgctgtagatatttgcttgc

SEQ ID NO: 591507 - DNA, 533 bp, Homo sapiens
tgtgggcatgtttattttacacctcaattttggctcaaggaatataacacatagtggcttctttctttcatttgccatatcaaatccatgaacacctgcctttaagatgtatcagattacttttacctcttactagacatgtccaggcaactgccaaagcactggatcattggaatagcttcataagtgatgaccctatttctctcactttcattcctagaggctgtttttcagccaggagtcagaataattataaaacataaatcaaataatttcactgtcttgctcatasctttctaattgttccccttctcaaagtaaaacccaaaaccttgtcattgtttgtgaaagcaacaatatgggatccttctccatacctcccccaatttattttatcacagccctcattgttttggtcattctatccttaagagcctcctgatatttcttggaaatgccaagattcacccaccttagaaaccactttgtttttctgtctttaaaagagacatgcgctgtagatatttgcttgc

SEQ ID NO: 591508 - DNA, 437 bp, Homo sapiens
tctgtctttaaaagagacatgcgctgtagatatttgcttgctactctacttacttctrgacatctcagcagaattcttttgagaggcagacagtcactctggatctgcattcaaatttcaccctagaacttatccgcatgttaatactgcgtttcattttttaatttttcactgcctttctctcccaaaaagaaagaacataagctcttttagtcagggacagctatttttttttttctgttttctctttttcttaacctggcatgaagacacatttctggcatagagcaaatgaataataaatatttgttgaataatcttgcataagttaatccttaatttgtcaactgttgattcattttgctctgaaatcaatgacaataaaaaagaattgtacttctattttgtacttttttactcagagtaaatatttattg

SEQ ID NO: 591509 - DNA, 437 bp, Homo sapiens
tctgtctttaaaagagacatgcgctgtagatatttgcttgctactctacttacttctggacatctcagcagaattcttttgagaggcagacagtcactctggatctgcattcaaatttcaccctagaacttatccgcatgttaatactgcgtttcwttttttaatttttcactgcctttctctcccaaaaagaaagaacataagctcttttagtcagggacagctatttttttttttctgttttctctttttcttaacctggcatgaagacacatttctggcatagagcaaatgaataataaatatttgttgaataatcttgcataagttaatccttaatttgtcaactgttgattcattttgctctgaaatcaatgacaataaaaaagaattgtacttctattttgtacttttttactcagagtaaatatttattg

SEQ ID NO: 591510 - DNA, 437 bp, Homo sapiens
tctgtctttaaaagagacatgcgctgtagatatttgcttgctactctacttacttctggacatctcagcagaattcttttgagaggcagacagtcactctggatctgcattcaaatttcaccctagaacttatccgcatgttaatactgcgtttcattttttaatttttcactgcctttctckcccaaaaagaaagaacataagctcttttagtcagggacagctatttttttttttctgttttctctttttcttaacctggcatgaagacacatttctggcatagagcaaatgaataataaatatttgttgaataatcttgcataagttaatccttaatttgtcaactgttgattcattttgctctgaaatcaatgacaataaaaaagaattgtacttctattttgtacttttttactcagagtaaatatttattg

SEQ ID NO: 591511 - DNA, 437 bp, Homo sapiens
tctgtctttaaaagagacatgcgctgtagatatttgcttgctactctacttacttctggacatctcagcagaattcttttgagaggcagacagtcactctggatctgcattcaaatttcaccctagaacttatccgcatgttaatactgcgtttcattttttaatttttcactgcctttctctcccaaaaagaaagaacrtaagctcttttagtcagggacagctatttttttttttctgttttctctttttcttaacctggcatgaagacacatttctggcatagagcaaatgaataataaatatttgttgaataatcttgcataagttaatccttaatttgtcaactgttgattcattttgctctgaaatcaatgacaataaaaaagaattgtacttctattttgtacttttttactcagagtaaatatttattg

SEQ ID NO: 591512 - DNA, 556 bp, Homo sapiens
gggacagctatttttttttttctgttttctctttttcttaacctggcatgaagacacatttctggcatagagcaaatgaataataaatatttgttgaataatcttgcataagttaatccttaatttgtcaactgttgattcattttgctctgaaatcaatgacaataaaaaagaattgtacttctattttgtacttttttactcagagtaaatatttattgagatttaatttgtgccctgtaaactgctaaactcctaaatccattasgtctatttctcccatgaggtaaatatttgctcttcattgaggatatagccagcaaggcagaaactagtctaggacttacaaacaatctgattttattatgtggagcaggtaacatcagggtgaaaataactaagaaacaaagcaaggaatagtgatgaaagtattagcactagcagagatctaatcctttcctcatgatagtaaggtcaatgggagaaactaaagttccagagatccagtaatgagccatttcacagtagaattactgctggtgagaaatgggaccag

SEQ ID NO: 591513 - DNA, 537 bp, Homo sapiens
ttatattctgtgcagaaaataaagaagatatttgcaaaaaagttagtaaaattgtgtgtttatgtagatcacaggayataataataatatacagaaatccagtatattttgatagatttgcaatgaccattcataatctgagaaaaaaaaaaacaaggaaaataagggagtgctcaaatgctaagaaagacatgttaaaagagctgagaaacttgaatagttcctactagcaaaattagcaaaaccgaatcaataaaataagtaaaggaacagatcatgggccactgaaagaaataggaatccatgggtccacgtgagataaatccatgaattaatgaatgaataaaagaaggaaacactatttttttcccacagagtgccaaccaataaaaggaaaagggttgatattgtatgttaaaaaattatcatttgaaaatcttcacattgtatttgattgagtgttgaggcatcaatggatgctaaacctagtgggtaaatgttggagaagaaataggatattttcacagtctcaaagta

SEQ ID NO: 591514 - DNA, 642 bp, Homo sapiens
attagtcatatgtttttgcttattttgtcctgttaggtgctctaaggtttatactatgtaccttaactttccaataacattaaggtgactgaatatttttgccctgatacctagaaaaagacaagcatgcttgctctgatacattcttttgaagcttatactacatgtcttagcaatgcattgagagaggtaagaatacatacaatttagaaagaaagatgtctttcttcacagatattatattctgtgcagaaaataaagaagatatttgcaaaaaagttagtaaaattgtgtgtttatgtagatcacaggacataataataatatacagaaatccagtatattttgatagatttgcaatgaccattcataatctgagaaaaaaaaaaacaaggaaaataagggagtgctcaaatgctaaraaagacatgttaaaagagctgagaaacttgaatagttcctactagcaaaattagcaaaaccgaatcaataaaataagtaaaggaacagatcatgggccactgaaagaaataggaatccatgggtccacgtgagataaatccatgaattaatgaatgaataaaagaaggaaacactatttttttcccacagagtgccaaccaataaaaggaaaagggttga

SEQ ID NO: 591515 - DNA, 589 bp, Homo sapiens
tatcttggattaagtgtttaattttgaattttattttatttcaactaataagattattagtcatatgtttttgcttattttgtcctgttaggtgctctaaggtttatactatgtaccttaactttccaataacattaaggtgactgaatatttttgccctgatacctagaaaaagacaagcatgcttgctctgatacattcttttgaagcttatactacatgtcttagcaatgcattgagagaggtaagaatacatacaatttagaaagaaagatgtctttcttcacagatattatattctgtgcagaaaataaagaagatatttgcaaaaaagttagtaaaattgtgtgtttatgtagatcacaggacataataataatatacagaaatccagtatattttgatagatttgcaatgaccattcataatctgagaaaaaaaaaaacaaggaaaataagggagtgctcaaatgctaagaaagacatgttaaargagctgagaaacttgaatagttcctactagcaaaattagcaaaaccgaatcaataaaataagtaaaggaacagatcatgggccactgaaagaaatag

SEQ ID NO: 591516 - DNA, 588 bp, Homo sapiens
gatcatgggccactgaaagaaataggaatccatgggtccacgtgagataaatccatgaattaatgaatgaataaaagaaggaaacactatttttttcccacagagtgccaaccaataaaaggaaaagggttgatattgtatgttaaaaaattatcatttgaaaatcttcacattgtatttgattgagtgttgaggcatcaatggatgctaaacctastgggtaaatgttggagaagaaataggatattttcacagtctcaaagtatctctccacaaaacacttaattttagattaattacatgtatatatacatgtatacaatagatagtctatatataaaatatcattttatgtcatgttatattaatataaagaaaatgaggagtacctctgcaatagagaaatctggaagacattacctttcaatatgatcaaaattaaaatcaccactgatgggaaaaattaatttttttttttacccggagaaatatggttagaaaagccttgcctcctggtgggggatttattgccaataatgcatgtcttgacatctcattatgagaaacaccagacaaatcgaaattggg

SEQ ID NO: 591517 - DNA, 514 bp, Homo sapiens
gcctcctggtgggggatttattgccaataatgcatgtcttgacatctyattatgagaaacaccagacaaatcgaaattgggagacattctaaaaatagaatccattggaatattaccttcaaaaaatgtttaggatgctatgaaggttgaagaaggactatggaatgcttctgatttaaagaagttaaagagacataggaaccaggaacaacacattatcctgaagtggattgttttttataaaaagcatcagggcagtttgtgaactagaatgggtcctctcttggtgattgttacatgacagctgtttgcatcactttacaacttaaagataaattgcttaaagataaattggcgtcgtttcatacaaacattaaagaaaatggtaatgtccaacaggcacagagtgcccgcctaattactgttccaggggtcctcagaggctgttttcctactatcttcttgatttttaaaatatattttagttgattggttttattcatgccataattgg

SEQ ID NO: 591518 - DNA, 550 bp, Homo sapiens
tcttgacatctcattatgagaaacaccagacaaatcgaaattgggagacattctaaaaatagaatccattggaatattaccttcaaaaaatgtttaggatgctatgaaggttgaagaaggactatggaatgcttctgatttaaagaagttaaagagacataggaaccaggaacaacacattatcctgaagtggattgttttttataaaaagcatcagggcagtttgtgaactagaatgggtcctctcttggtgattgttacatgacagctgtttgcatcactttacaacttaaagataaattgcttaaagataaattggcgtcgtttcatacaaacattaaagaaaatggtaatgtccaacaggcacagagtgcccscctaattactgttccaggggtcctcagaggctgttttcctactatcttcttgatttttaaaatatattttagttgattggttttattcatgccataattggtggaaattaatccttgattctataaatttttacctagtccgtttccaatgttttttgtttgtttgtttctct

SEQ ID NO: 591519 - DNA, 550 bp, Homo sapiens
tcttgacatctcattatgagaaacaccagacaaatcgaaattgggagacattctaaaaatagaatccattggaatattaccttcaaaaaatgtttaggatgctatgaaggttgaagaaggactatggaatgcttctgatttaaagaagttaaagagacataggaaccaggaacaacacattatcctgaagtggattgttttttataaaaagcatcagggcagtttgtgaactagaatgggtcctctcttggtgattgttacatgacagctgtttgcatcactttacaacttaaagataaattgcttaaagataaattggcgtcgtttcatacaaacattaaagaaaatggtaatgtccaacaggcacagagtgcccgcctaattactgttccaggggtcctcagaggctgttttcctactatcttcttgatttttaaaatatattttagttgattggttttattcatgycataattggtggaaattaatccttgattctataaatttttacctagtccgtttccaatgttttttgtttgtttgtttctct

SEQ ID NO: 591520 - DNA, 559 bp, Homo sapiens
ttttcctactatcttcttgatttttaaaatatattttagttgattggttttattcatgccataattggtggaaattaatccttgattctataaattkttacctagtccgtttccaatgttttttgtttgtttgtttctctttccttacttatttatttattcttttcttttactttttttgtaaagtggaataagttaggaatgagtatattatgaccaactaaactgagtagttttatgtcaagttgcaaattatgttaagtatcaaatatttgatttttcttagatttcaaaatagtcacgttttcagaaaaaatcattagtagttttctaaaaataaaatcctcttgattcaacaaaacatacttgatgtggtttttcctcccaaaacaggctcctccttgagttattgggaataagtaatgcttctcaataaagcttcgtgtcaacaaatctgaacatataacatctcagctagagcaagttactaaaaataggctcaatttgtagcttgcagtcatgccttcataaccacttttcaattaatcctgcttaattc

SEQ ID NO: 591521 - DNA, 559 bp, Homo sapiens
ttttcctactatcttcttgatttttaaaatatattttagttgattggttttattcatgccataattggtggaaattaatccttgattctataaatttttacctagtccgtttccaatgttttttgtttgtttgtttctctttccttacttatttatttattcttttcttttactttttttgtaaagtggaataagttaggaatgagtatattatgaccaactaaactgagtagttttatgtcaagttgcaaattaygttaagtatcaaatatttgatttttcttagatttcaaaatagtcacgttttcagaaaaaatcattagtagttttctaaaaataaaatcctcttgattcaacaaaacatacttgatgtggtttttcctcccaaaacaggctcctccttgagttattgggaataagtaatgcttctcaataaagcttcgtgtcaacaaatctgaacatataacatctcagctagagcaagttactaaaaataggctcaatttgtagcttgcagtcatgccttcataaccacttttcaattaatcctgcttaattc

SEQ ID NO: 591522 - DNA, 527 bp, Homo sapiens
tttgtttctctttccttacttatttatttattcttttcttttactttttttgtaaagtggaataagttaggaatgagtatattatgaccaactaaactgagtagttttatgtcaagttgcaaattatgttaagtatcaaatatttgatttttcttagatttcaaaatagtcacrttttcagaaaaaatcattagtagttttctaaaaataaaatcctcttgattcaacaaaacatacttgatgtggtttttcctcccaaaacaggctcctccttgagttattgggaataagtaatgcttctcaataaagcttcgtgtcaacaaatctgaacatataacatctcagctagagcaagttactaaaaataggctcaatttgtagcttgcagtcatgccttcataaccacttttcaattaatcctgcttaattcagagaatgtataaatatgtaattttgcatcacttttaaggcagccattttattttgaaatgcaactaacgttatatgcataaattcaataaatacaa

SEQ ID NO: 591523 - DNA, 520 bp, Homo sapiens
tttattgaatttatgcatataacgttagttgcatttcaaaataaaatggctgccttaagtgatgcaaaattacatatttatacattctctgaattaagcaggattaattgaaaagtggatatgaaggcatgactgcaagctacaaattgatcctatttttagtaacttgctctagctgagatgttatatgttcagatttgttgacacgaagctttattgagaagcattacttattcccaataactcaaggaggagcctgttttgggaggaaaaaccacatcaagtatgttttgttgaatcaagaggattttatttttagaaaastactaatgattttttctgaaaatgtgactattttgaaatctaagaaaaatcaaatatttgatacttaacgtaatttgcaacttgacataaaactactcagtttagttggtcataatatactcattcctaacttattccactttacaaaaaaagtaaaagaaaagcataaataaataaataaggaaagagaaacaaa

SEQ ID NO: 591524 - DNA, 559 bp, Homo sapiens
ttttcctactatcttcttgatttttaaaatatattttagttgattggttttattcatgccataattggtggaaattaatccttgattctataaatttttacctagtccgtttccaatgttttttgtttgtttgtttctctttccttacttatttatttattcttttcttttactttttttgtaaagtggaataagttaggaatgagtatattatgaccaactaaactgagtagttttatgtcaagttgcaaattatgttaagtatcaaatatttgatttttcttagatttcaaaatagtcacgttttcagaaaaaatcattagtagttttctaaaaataaaatcctcttgattcaacaaaacatacttgatgtggtttttcctcccaaaacaggctcctccttgagttattgggaataagtaatgcttctcaataaagcttcgtgtcaacaaatctgaacatataacatctcagctagagcaagttactaaaaataggctcaatttgtagcttgcagtcatgccttcatawccacttttcaattaatcctgcttaattc

SEQ ID NO: 591525 - DNA, 568 bp, Homo sapiens
ggctcaatttgtagcttgcagtcatgccttcataaccacttttcaattaatcctgcttaattcagagaatgtataaatatgtaattttgcatcacttttaaggcagccattttattttgaaatgcaactaaygttatatgcataaattcaataaatacaaagctgttttcaaaaattgaatgtttttacttgtaagttattctttcaataataataaagagatgatcactagtcattttatttttcatagttgaattgatttagttgaacttcattgggtgttcttatgttttagtcatgagtccatgctctttaacaagctaaaggaaaccataatatatgctaaaagatgtcagtttgtgaacaatttaatgaatatatagagttacaacatttttcccgattggatgttggggtttactataattctttgttactttatatgtgaatatactcactactcactatgtttatgtatgtaggaaacatgctagtgatgaaaattcaagcagttattaccctggttttctttcattaacaaaatacagaatagaaattatctacttat

SEQ ID NO: 591526 - DNA, 481 bp, Homo sapiens
cctctttccaccatgcatatttcacctgtgtgggaattcttgcagatctctatattattgatagccattttgctctgacattttatacaaagctgaatcagcaacagtatgactaaacacaaccaaaaaggaaagctagaaagattatattagacacttacgtgtatggatcattatggtgaggactgctaaaaaaacaaacaaacaaaaaaaaaaaacaaaaaacaccttcagccaaaataaatttacagtttaattgagtgrtgaatgattcataaattggaaagcccccacaatcacagcagattcagagagactccaggggtgtctcatagtcagaatgaatttatagacaatacaaagtaaagtgatgtatagaaatcagaagtgaggtacagaaacagctggattggttacagcttggcacttgccttatttgaacactcagctgtatgcgactagttgaagtatggctgctgga

SEQ ID NO: 591527 - DNA, 481 bp, Homo sapiens
cctctttccaccatgcatatttcacctgtgtgggaattcttgcagatctctatattattgatagccattttgctctgacattttatacaaagctgaatcagcaacagtatgactaaacacaaccaaaaaggaaagctagaaagattatattagacacttacgtgtatggatcattatggtgaggactgctaaaaaaacaaacaaacaaaaaaaaaaaacaaaaaacaccttcagccaaaataaatttacagtttaattgagtgatgaatgattcataaattggaaagcccccacaatcacagcagattcagagagactccaggggtgtctcatrgtcagaatgaatttatagacaatacaaagtaaagtgatgtatagaaatcagaagtgaggtacagaaacagctggattggttacagcttggcacttgccttatttgaacactcagctgtatgcgactagttgaagtatggctgctgga

SEQ ID NO: 591528 - DNA, 513 bp, Homo sapiens
ctcatagtcagaatgaatttatagacaatacaaagtaaagtgatgtatagaaatcagaagtgaggtacagaaacagctggattggttacagcttggcacttgccttatttgaacactcagctgtatgygactagttgaagtatggctgctggaattggccaagactcagcgattgttacaggtgcatattcctaagttaggttttagtcttgtgtacctattgaattaggttgcagttcattcacaaggactgaaatatagaagtatggcgtttttctcaggccatatttaatttgatttaacaggactttgggtatgtcattgtattttactaatatattttacaaacaccccatgttatcttaatctatttaagttcacactttttaatcaaattttactttaaatgtatctaacctcctaaatttctgcctttgtgaaccaataatactttttccaaattcttattatagcacatatcagactatatagctatagacactttggcatcat

SEQ ID NO: 591529 - DNA, 513 bp, Homo sapiens
ctcatagtcagaatgaatttatagacaatacaaagtaaagtgatgtatagaaatcagaagtgaggtacagaaacagctggattggttacagcttggcacttgccttatttgaacactcagctgtatgcgactagttgaagtatggctgctggaattggccaagactcagcgattrttacaggtgcatattcctaagttaggttttagtcttgtgtacctattgaattaggttgcagttcattcacaaggactgaaatatagaagtatggcgtttttctcaggccatatttaatttgatttaacaggactttgggtatgtcattgtattttactaatatattttacaaacaccccatgttatcttaatctatttaagttcacactttttaatcaaattttactttaaatgtatctaacctcctaaatttctgcctttgtgaaccaataatactttttccaaattcttattatagcacatatcagactatatagctatagacactttggcatcat

SEQ ID NO: 591530 - DNA, 513 bp, Homo sapiens
ctcatagtcagaatgaatttatagacaatacaaagtaaagtgatgtatagaaatcagaagtgaggtacagaaacagctggattggttacagcttggcacttgccttatttgaacactcagctgtatgcgactagttgaagtatggctgctggaattggccaagactcagcgattgttacaggtgcatattcctaagttaggttttagtcttgtgtacctattgaattaggttgcagttcattcacaaggactgaaatatagaagtatggcgtttttctcaggccatatttaatttgatttaacaggactttgggtatgtcattgtattttactartatattttacaaacaccccatgttatcttaatctatttaagttcacactttttaatcaaattttactttaaatgtatctaacctcctaaatttctgcctttgtgaaccaataatactttttccaaattcttattatagcacatatcagactatatagctatagacactttggcatcat

SEQ ID NO: 591531 - DNA, 502 bp, Homo sapiens
aacttgatgtctaactactgtggatatattttgtcagttattaacattcccctttcaggttaatatcaagtcaacaaaaatttggagttctcttgaccctttccccaatgtgtaaattagtaatataatgtcaatattcagayaggcaaataaactaagctccctttgatgaaaacgacatgcagtaacgattccctgctgagagtcatcttagtttgtgaaatcataatctggaatggctatatctgcaaaatacattaaaagaaagaaaatatgaaaaacataatctacaatacttttatgtatatctaatcattttatatttcttttttattatactacttgaaatacatacataaaggataaagagtttcaacaaatctcaaaaaggaaacctaattatgtataataatctgactgattttgtttgctcaccaaattgaaattgaaaagaaaaaatacagcactctataaaaaaacaaaatgatttcaaaatataatt

SEQ ID NO: 591532 - DNA, 574 bp, Homo sapiens
agtaacgattccctgctgagartcatcttagtttgtgaaatcataatctggaatggctatatctgcaaaatacattaaaagaaagaaaatatgaaaaacataatctacaatacttttatgtatatctaatcattttatatttcttttttattatactacttgaaatacatacataaaggataaagagtttcaacaaatctcaaaaaggaaacctaattatgtataataatctgactgattttgtttgctcaccaaattgaaattgaaaagaaaaaatacagcactctataaaaaaacaaaatgatttcaaaatataattattgtctccctttgaaaatataaatgtttaaataatggtgaaatagagaacataaacattcacaaatattacatatccattcaacattttcaggtattattttgttttgttcatacctccccttctgtcatttttctctcctttctttatctttagcataactgagctgctttccaaacatctatagttataccggacatagcattttccaacatcaaacatggtttttcttaaacaccagctccaaatattaat

SEQ ID NO: 591533 - DNA, 620 bp, Homo sapiens
cagtaatgtcatctaaccacaagtttgatacattttttaaagaaaaatttccaaaatactataactgagcaataggytaatacttcataaattaaaatatttaaatattcaatctttctgagtggatatttgctgcatatctcataacttggcctaattctgtaattgggatgagaactacccaattttattggtaacctcttttctgctctgcaactttggaaatactatggaggactccaaattcatttgagacaaaaatattaaaaatgtaacccccgattaggatttcagttccaaagctctccttggagggatatagagctggagaaaatcacatttattttttgtctccttaatattgatatataaaatcaggttaaaattagtatcaaaatgggaagcctgcattgtaaaccggctggaataatacactctgcaatatgaaggaaaaaggaaaaatttagttgatttatttacctagctataattttttaaagaattttaagtttctaataaatttaactataaatttttaattttctatctttcatttagtaccatctatataaacttttccaggctacttctctgaatcacctggcaaaatcttataattt

SEQ ID NO: 591534 - DNA, 579 bp, Homo sapiens
tctgtgggcccttaatatattctgcctgatgacagtgtttctatacatctttggctttagagtacagtgcacaagtggttttcagcgtctgaggccttggaccatgctgtgctcatttgaacagttaagcttatcctaacaatataatttagagtcaatggctatatttgatctgacagatgctgtagtctgagtagctgaaatcactcatataggcaccaccttacatgactgatgcccagtaaaagccctggagaccaaaacttaaatgagcttctctgattgacaacacttcaatatgctgtcaaatattgttgctgggagaattacatgtgttcttgtgggattccactgggagaggacacctgaaagcttgtacctgatatcttctacatttctccccatgggwtttttttctttgttgattttaatctgtatcttttcattgtagtaaactgtaactatgaatgtaacatgttttctaagacctgtgaatcattatagttaatctttgagcctaagggtggtcataaggagccccaacacactaataaattactttcataaagaatatataaa

SEQ ID NO: 591535 - DNA, 601 bp, Homo sapiens
tttgtggatttatatgttcactatcttgacaataatgatgatctcatggatgtataaatatgtcagagcatatctaataatttatcttacatatttttggcttttaatatgttaattatagctcmataaatttcttaaaaactcattggactctatctgtaatgtgtgtatgtttagttttaagtaaagtgcagctaaatttttctccaccattacaattttcaaacatactttcacttacagaatagcatactgaaaattaacacatgattttataattataaataaaatagtaatatatcttttctgctgaaattaatgcaaaccaattacaaggaatttattagtttttattttagttacttcatatatattagcacctaagcctcaaagattcactatgtaattgtgtaaattagtagtagggttacctgaatctggcttaataatcaattaatcagtatttatctttaaacattttttcctttatgaattgtgtcacacttttaaagagcccttcctacattacaagcatatataaaatatattcttatactattttagaataatttcagaagttagattgttttctagtttttag

SEQ ID NO: 591536 - DNA, 601 bp, Homo sapiens
tttgtggatttatatgttcactatcttgacaataatgatgatctcatggatgtataaatatgtcagagcatatctaataatttatcttacatatttttggcttttaatatgttaattatagctcaataaatttcttaaaaactcattggactctatctgtaatgtgtgtatgtttagttttaagtaaagtgcagctaaatttttctccaccattacaattttcaaacatactttcacttacagaatagcatactgaaaattaacacatgmttttataattataaataaaatagtaatatatcttttctgctgaaattaatgcaaaccaattacaaggaatttattagtttttattttagttacttcatatatattagcacctaagcctcaaagattcactatgtaattgtgtaaattagtagtagggttacctgaatctggcttaataatcaattaatcagtatttatctttaaacattttttcctttatgaattgtgtcacacttttaaagagcccttcctacattacaagcatatataaaatatattcttatactattttagaataatttcagaagttagattgttttctagtttttag

SEQ ID NO: 591537 - DNA, 601 bp, Homo sapiens
tttgtggatttatatgttcactatcttgacaataatgatgatctcatggatgtataaatatgtcagagcatatctaataatttatcttacatatttttggcttttaatatgttaattatagctcaataaatttcttaaaaactcattggactctatctgtaatgtgtgtatgtttagttttaagtaaagtgcagctaaatttttctccaccattacaattttcaaacatactttcacttacagaatagcatactgaaaattaacacatgattttataattataaataaaatagtaatatatcttttctgctgaaatwaatgcaaaccaattacaaggaatttattagtttttattttagttacttcatatatattagcacctaagcctcaaagattcactatgtaattgtgtaaattagtagtagggttacctgaatctggcttaataatcaattaatcagtatttatctttaaacattttttcctttatgaattgtgtcacacttttaaagagcccttcctacattacaagcatatataaaatatattcttatactattttagaataatttcagaagttagattgttttctagtttttag

SEQ ID NO: 591538 - DNA, 508 bp, Homo sapiens
gaataataatgaaattattaatattagtcaaatttaattagttgcttattatgtagtgggtacttggtgtgatatatggattatctcatttaatcatcatgacaagctaataaattggcaatgctgttatctccattttacagaagagagaaaaagattgtaagtactttgctcaaggtcatttagagggagagcaaattattcaaatccagatattctgctctcagagattgtattattaactattatgccacaatagaggcattgtagtctgcatgatagtccaactatttttatttgtagttatatattgataaatattttgagtatttttaaaaattacaacacaatactgcaattgacattcttgcatgattatctaccatgtatttccaaaagtggaaaggcaaacatatgtgtttagtttttacagaatgtagactatataacaattrtactccaaaggagatcttggttatacattgataccagcatagtttgagcctac

SEQ ID NO: 591539 - DNA, 622 bp, Homo sapiens
aactattatgccacaatagaggcattgtagtctgcatgatagtccaactatttttatttgtagttatatattgataaatattttgagtatttttaaaaattacaacacaatactgcaattgacattcttgcatgattatctaccatgtatttccaaaagtggaaaggcaaacatatgtgtttagtttttacagaatgtagactatataacaattataytccaaaggagatcttggttatacattgataccagcatagtttgagcctaccctcttccctgtaccctcaaaacccttgttaacatcttatgttttgccagtctgctgaagaaaaattggtatccaattgtttaattcaattacttgattactagtaaagtaagaatttttttatatttatcataatttgtattgcctgtaatctgaaagggttattcatatttttttgcctacttttctgttaagtcatgtctctctaagatctagcttaaacgttactttttccaaaaaatcttccctgatctcccacaactcaaaccattatcttcctgctttagtttcttacaatattttatctacatttctcttataacaccactttctactttgtatgattgttatttt

SEQ ID NO: 591540 - DNA, 559 bp, Homo sapiens
agtactttgctcaaggtcatttagagggagagcaaattattcaaatccagatattctgctctcagagattgtattattaactattatgccacaatagaggcattgtagtctgcatgatagtccaactatttttatttgtagttatatattgataaatattttgagtatttttaaaaattacaacacaatactgcaattgacattcttgcatgattatctaccatgtatttccaaaagtggaaaggcaaacatatgtgtttagtttttacagaatgtagactatataacaattatactccaaaggagatcttggttatacattgataccagcatagtttgagcctaccctcttccctgtaccctcaaaacccttgttaacatcttatgttttgccagtctgctgaagaaaaattggtatccaattgtttaattcaattacttgattactagtaaagtaagaatttttttatatttatcataatttgtattgcctgtaatctgaaagggttattyatatttttttgcctacttttctgttaagtcatgtctctctaagatc

SEQ ID NO: 591541 - DNA, 622 bp, Homo sapiens
aactattatgccacaatagaggcattgtagtctgcatgatagtccaactatttttatttgtagttatatattgataaatattttgagtatttttaaaaattacaacacaatactgcaattgacattcttgcatgattatctaccatgtatttccaaaagtggaaaggcaaacatatgtgtttagtttttacagaatgtagactatataacaattatactccaaaggagatcttggttatacattgataccagcatagtttgagcctaccctcttccctgtaccctcaaaacccttgttaacatcttatgttttgccagtctgctgaagaaaaattggtatccaattgtttaattcaattacttgattactagtaaagtaagaatttttttatatttatcataatttgtattgcctgtaatctgaaagggttattcatatttttttgcctacttttctrttaagtcatgtctctctaagatctagcttaaacgttactttttccaaaaaatcttccctgatctcccacaactcaaaccattatcttcctgctttagtttcttacaatattttatctacatttctcttataacaccactttctactttgtatgattgttatttt

SEQ ID NO: 591542 - DNA, 616 bp, Homo sapiens
tgtttaattcaattacttgattactagtaaagtaagaatttttttatatttatcataatttgtattgcctgtaatctgaaagggttattcatatttttttgcctacttttctgttaagtcatgtctctctaagatctagcttaaacgttactttttccaaaaaatcttccctgatctcccacaactcaaaccattatcttcctgctttagtttcttacaatattttatctacatttctcttataacaccactttctactttgtatgattgttattttagtactatctaatcagtcctttaatttcctttggggactattttatgctgattaatccttatgacacatattgtccacattttttggacaaaattcttcaatgaagattrataattaaaattaataaaaattaaaataattaaaaatttaattaacttagcttttaattttttaattatcatataggccacctactgagatatacaatttttggtctaaagtattactttgaaacaattataaggaaactagaaaaaaaaaatttattattctaagatccttcggattggaaagtagctttttctatataacaagatttactctttccatatattctag

SEQ ID NO: 591543 - DNA, 537 bp, Homo sapiens
cctgccttattcaattacacactccctcccttgaggagttgagagcagtgggctgagtaaatggggcacccctgtcaygagtcccatgaaggggtcagggaaatgccctgcttcaggaggatctcttgagcccaggaggtgaaggatgcggtgagccaggatcgtgcaactgaactctggcctgggtgacagagtgagactctgtcccaaaataaataaataaataatttaattaattaaatttagcttattcttttgaacttcattcttcatagtgttataaaatacatgatttaagacagtgagaaagagagagaagccaatgatggacttctaatagaattcagagtgggacttgtttgaacatttcaaccaaataacaaaagattcctgcaattagttgactcttcagtctacctcagttttaaacatgtttcaggttgcccttaacaaacgagtatagtttactttgggctgataaattctgtggatggcaagaggttgtgaatatccctttataaacccagaactaatgct

SEQ ID NO: 591544 - DNA, 537 bp, Homo sapiens
cctgccttattcaattacacactccctcccttgaggagttgagagcagtgggctgagtaaatggggcacccctgtcacgagtcccatgaaggggtcagggaaatgccctgcttcaggaggatctcttgagcccaggaggtgaaggatgcggtgagccaggatcgtgcaactgaactctsgcctgggtgacagagtgagactctgtcccaaaataaataaataaataatttaattaattaaatttagcttattcttttgaacttcattcttcatagtgttataaaatacatgatttaagacagtgagaaagagagagaagccaatgatggacttctaatagaattcagagtgggacttgtttgaacatttcaaccaaataacaaaagattcctgcaattagttgactcttcagtctacctcagttttaaacatgtttcaggttgcccttaacaaacgagtatagtttactttgggctgataaattctgtggatggcaagaggttgtgaatatccctttataaacccagaactaatgct

SEQ ID NO: 591545 - DNA, 624 bp, Homo sapiens
gggctgagtaaatggggcacccctgtcacgagtcccatgaaggggtcagggaaatgccctgcttcaggaggatctcttgagcccaggaggtgaaggatgcggtgagccaggatcgtgcaactgaactctggcctgggtgacagagtgagactctgtcccaaaataaataaataaataatttaattaattaaatttagcttattcttttgaacttcattcttcatagtgttataaaatacatgatttaagacagtgagaaagagagagaagccaatgatggacttctaatagaattcagagtgggacttgtttgaacatttcaaccaaataacaaaagattcctgcaattagttgactcttcagtctacctcagttttaaacatgtttcaggttgcccttaacaaacgagtatagtttactttgggctgataaattctgtggatggcaagaggttgtgaatatccctttataaacccagaactaatgctacatatccctggcattagtgccttatttatctaaacttacaaatatattgggcaaaattccrggatatgggcacagaattaataattgaataccttattttgtatggtcatttgctcactgacaaagatagagaag

SEQ ID NO: 591546 - DNA, 621 bp, Homo sapiens
gtggaatcaagttctaagtaatccagacataatactatttatagaataattcaatttttatgatatatttcatgtkttgctatcctcagttatatttactcacgtatagttacacttgtcaatgtcctagctataatcacctatttttagattttaataaatataattaaattaatagcatttctatttttataacaagttctaaaattaagccacagtctgaaaattcatgataagattaagtttgatttttatttcacttttatatgtatgaatcttaagaatttggtatttcctatctaatatttgtctttctgttcttggaaactaatttcaaattatttacaagtttcagaagtatgcacccagtgaagaatccaatatcattttgttcaatatacctataatttgaacttaaatatgtatacttccacaaatgtcactgaagcaagtatttcaagtatttatttccaggtataatttcaattatggggtattcagatatcttgttatatcaacaactaaacataacatattaaattatttgagatataaaaagtatatcttgaaaacagtgcagttctaaatctttaaggtaggaaagcagctcagcaaatgttt

SEQ ID NO: 591547 - DNA, 621 bp, Homo sapiens
gtggaatcaagttctaagtaatccagacataatactatttatagaataattcaatttttatgatatatttcatgttttgctatcctcagttatatttactcaygtatagttacacttgtcaatgtcctagctataatcacctatttttagattttaataaatataattaaattaatagcatttctatttttataacaagttctaaaattaagccacagtctgaaaattcatgataagattaagtttgatttttatttcacttttatatgtatgaatcttaagaatttggtatttcctatctaatatttgtctttctgttcttggaaactaatttcaaattatttacaagtttcagaagtatgcacccagtgaagaatccaatatcattttgttcaatatacctataatttgaacttaaatatgtatacttccacaaatgtcactgaagcaagtatttcaagtatttatttccaggtataatttcaattatggggtattcagatatcttgttatatcaacaactaaacataacatattaaattatttgagatataaaaagtatatcttgaaaacagtgcagttctaaatctttaaggtaggaaagcagctcagcaaatgttt

SEQ ID NO: 591548 - DNA, 571 bp, Homo sapiens
ttaatatcctaataaaggaagcttctgagagcttcctggctcttccatttcttctgccatgtgacaacatggcatttgtccattttgtccctttgcttttcctaccatgtgattaagtcatgcaaaatgacatctatgaaacaggccctcatcagacaatgaatatgttggtgccataatcttgaacttcccaactcctgaactttcagaaatacatttctataatcataaattacccagtctgtgatatttattataagaccaggaacagactaaaacagcaaatgctttcccccatccctgactactttcagaatgtttaagagttgtccatacagtttcttatggcaattatgaggcagatatttttcaggaaagtggcatgcatatatgtgaattttttagaggagttgaaaaacaaaacaaaacacttgtttggcaatgttcattcytcacagaatcagtgctattcattttggaaaatatcttagtatcctgcttgttgccttattagttgtttttctctcattgcaatcagctgttgccatgtaccttttgcatttagtggtca

SEQ ID NO: 591549 - DNA, 637 bp, Homo sapiens
cttctcttgcctagttttttatttggaaagtaaaatatccatgtttcttggtgtggccatgtgaattttgtgacattgaaatggatatcataagataggttcctaggaaagcctttaaaaaagcacaaacttggcctgcatggctttggccttttgcccctttgccctttgctgcttcagcctttcctatttttcttggctgcaatatgagcaatcatgactcagggtgctacagrcatcatgctatcttatatcatacctctttctaaggaaatgctattaatgtccctacatgtgtataacaaatcttcagcgtccctgtgtggctgctcttcttatcctgtcctggcttgtactctttcttttgtagaagtaagtaaacatcttgcctgtgaaaactgcttttagtagcaccctgtattccttatagctaaaccctatctacctgaaacctatattgatacttatgccatatatttagtttggagaccagattaaatttagagttccattaattccataataaatatttttgagtggctagtatgggtaatgtgatatttaagctactggtatagtgtggtaaactgaagatatgacctgaaatgtttgtaacttatatgataataagtggaga

SEQ ID NO: 591550 - DNA, 637 bp, Homo sapiens
cttctcttgcctagttttttatttggaaagtaaaatatccatgtttcttggtgtggccatgtgaattttgtgacattgaaatggatatcataagataggttcctaggaaagcctttaaaaaagcacaaacttggcctgcatggctttggccttttgcccctttgccctttgctgcttcagcctttcctatttttcttggctgcaatatgagcaatcatgactcagggtgctacaggcatcatgctatcttatatcatacctctttctaaggaaatgctattaatgtccctacatgtgtataacaaatcttcagcgtccctgtgtggctgctcttcttatcctgtcctggcttgtactctttcttttgtagaagtaagtaaacatcttgcctgtgaaaactgcttttagtwgcaccctgtattccttatagctaaaccctatctacctgaaacctatattgatacttatgccatatatttagtttggagaccagattaaatttagagttccattaattccataataaatatttttgagtggctagtatgggtaatgtgatatttaagctactggtatagtgtggtaaactgaagatatgacctgaaatgtttgtaacttatatgataataagtggaga

SEQ ID NO: 591551 - DNA, 560 bp, Homo sapiens
attaattccataataaatatttttgagtggctagtatgggtaatgtgatatttaagctactggtatagtgtggtaaactgaagatatgacctgaaatgtttgtaacttatatgataataagtggagagagctgaaaattaggtaaataaatagataaccacagattttgatctgttatacaaatacgataaatatggcagaaaggamtgtaagctaaggagtagagtaagagaaagcaattataaaaagactggcaactaaatgttatctaacaagtgatacttaaaggctgagatactttaaactataagacacagttttgtaaaaatcttggaaattgtgttttttaagttaatggtgcaatttatctaatgtgtaaatacaagtgctggtttgttgaaggagcagaaaaaaaagattagtttgagtatggggaaagagaaggagattggagagaggtttaagaactaagcatatgccagtttatatagagtttatgcaacaaagaagatattttttgtgcatcagcttgtattgttgcataatactataccccaaac

SEQ ID NO: 591552 - DNA, 560 bp, Homo sapiens
attaattccataataaatatttttgagtggctagtatgggtaatgtgatatttaagctactggtatagtgtggtaaactgaagatatgacctgaaatgtttgtaacttatatgataataagtggagagagctgaaaattaggtaaataaatagataaccacagattttgatctgttatacaaatacgataaatatggcagaaaggaatgtaagctaaggagtagagtaagagaaagcaattataaaaagactggcaactaaatgttatctaacaagtgatacttaaaggctgagatactttaaactataagacacagttttgtaaaaatcttggaaattgtgttttttaagttaatggtgcaatttatctaatgtgtaaatacaagtgctggtttgttgaaggagcagaaaaaaaagattagtttgagtatggggaaagagaaggagattggagagaggtttaagaactaagcatatgccagtttatatagagtttatgyaacaaagaagatattttttgtgcatcagcttgtattgttgcataatactataccccaaac

SEQ ID NO: 591553 - DNA, 658 bp, Homo sapiens
gtcagtgtatcaaacagaaccattttaaacagtcatgcaagatggagagaggaggtataataatgtgggccctgaaatgttacagtatgatagagtcatagttttatgatagtttttttcactttaatttccaggaataatcatgaagtttaagaagaaagaatactatcagaaaagaggcaatttttttttatatttaaaaagttccctttttccagtctgttcatttttatgcatcaactctcattttatgttgacaatttcataataactatatttacctttattttttatccatatgcatttcatttaaaagtgaaaacttccactcaaaatgtaaaaagaacttatagaacttgcctccaaagagctctactagtctgtctttcctatttcatccaatgttacgactacaattcccatctatcaaacacagcagagtcaattggtaagtcatttatgtctctttttatactatttttcatgaagtttctctattttccagttctrttgtatgtcacctcaaatatccatacaacacattattttaatctccttccctctaagcatttctgttccacttaatctaacacaatgttctcaaagatatgacaaactgcaactctgttaaaaaaccttcaaagactttccactgaac

SEQ ID NO: 591554 - DNA, 549 bp, Homo sapiens
  misc_feature 155: n = A,T,C or G
attctacaagggataactacaggctaaaattgtttagcatccccttgtatatttctctatttttaagtacaggtctgtgtatagaatattttataacrcatacggtagtgtttgtatcttcaaatttaaataagatgttattgttttatctgtantatttcaacacatgctttataatctcactatgatatttttgagaaccattgcagctgatacttgggtatccgtttttgtttaatttctatatgggatttcattatatatataatataaagctatcaattttcatatcagcagatgttggcatttttatatttaccattgtaaatgttaaaaacaaagctacaataaatatttatggttttgttgtttatatatattagaattttcataggatagacatagagcagggaaattttacaactttgggcactttcatccttacattgtcaagtagatttccaaagtcgttgtatgaatttatcttcccactatataattgttagagttcctgttttctaacagcctcatcaaagaggaaaatttctc

SEQ ID NO: 591555 - DNA, 549 bp, Homo sapiens
  misc_feature 155: n = A,T,C or G
attctacaagggataactacaggctaaaattgtttagcatccccttgtatatttctctatttttaagtacaggtctgtgtatagaatattttataacacatacggtagtgtttgtatcttcaaatttaaataagatgttattgttttatctgtantatttcaacacatgctttataatctcactatgatatttttgagaaccattgcagctgatacttgggtatccgtttttgtttaatttctatatgggatttcattatatatataatataaagctatcaattttcatatcagsagatgttggcatttttatatttaccattgtaaatgttaaaaacaaagctacaataaatatttatggttttgttgtttatatatattagaattttcataggatagacatagagcagggaaattttacaactttgggcactttcatccttacattgtcaagtagatttccaaagtcgttgtatgaatttatcttcccactatataattgttagagttcctgttttctaacagcctcatcaaagaggaaaatttctc

SEQ ID NO: 591556 - DNA, 549 bp, Homo sapiens
  misc_feature 155: n = A,T,C or G
attctacaagggataactacaggctaaaattgtttagcatccccttgtatatttctctatttttaagtacaggtctgtgtatagaatattttataacacatacggtagtgtttgtatcttcaaatttaaataagatgttattgttttatctgtantatttcaacacatgctttataatctcactatgatatttttgagaaccattgcagctgatacttgggtatccgtttttgtttaatttctatatgggatttcattatatatataatataaagctatcaattttcatatcagcaratgttggcatttttatatttaccattgtaaatgttaaaaacaaagctacaataaatatttatggttttgttgtttatatatattagaattttcataggatagacatagagcagggaaattttacaactttgggcactttcatccttacattgtcaagtagatttccaaagtcgttgtatgaatttatcttcccactatataattgttagagttcctgttttctaacagcctcatcaaagaggaaaatttctc

SEQ ID NO: 591557 - DNA, 549 bp, Homo sapiens
  misc_feature 155: n = A,T,C or G
attctacaagggataactacaggctaaaattgtttagcatccccttgtatatttctctatttttaagtacaggtctgtgtatagaatattttataacacatacggtagtgtttgtatcttcaaatttaaataagatgttattgttttatctgtantatttcaacacatgctttataatctcactatgatatttttgagaaccattgcagctgatacttgggtatccgtttttgtttaatttctatatgggatttcattatatatataatataaagctatcaattttcatatcagcagatgttggcatttttatatttaccattgtaaatgttaaaaacaaagctacaataaatatttatggttttgttgtttatatatattagaattttcataggatagacatagagcagggaaattttacaactttgggcactttcatccttacattgtcaagtagmtttccaaagtcgttgtatgaatttatcttcccactatataattgttagagttcctgttttctaacagcctcatcaaagaggaaaatttctc

SEQ ID NO: 591558 - DNA, 518 bp, Homo sapiens
gaggactacatagaactcaatgaaatgagaagtagtttctgattcaactratgtctgttaagtgattctctctatagatccaagtattatgagcaacctcacacaatcacgttcatgagatttctattactctgtgtgttggacttcaaggaaggaatggaatgccatcattaggcaccaaatagttccactattgattagcattgagatttttagtaaatatttaggagtactgggggatgaaggagagacaacactatttgttcttgtactagaatactcatttctaatgcctataattaaatcaataggagagttattgagaaaatctgggcattttgagatagttgaagagtaagtattccatatgtatgtcagttgaaaattatttttgctgtttgcttttgaaagaatataacaatgttagcaaatgaacaaggtaattcctggctgaattatataattattacagtacttccaaagatattaatctattaccattatatgtaattcatggg

SEQ ID NO: 591559 - DNA, 580 bp, Homo sapiens
ccatcattaggcaccaaatagttccactattgattagcattgagatttttagtaaatatttaggagtactgggggatgaaggagagacaacactatttrttcttgtactagaatactcatttctaatgcctataattaaatcaataggagagttattgagaaaatctgggcattttgagatagttgaagagtaagtattccatatgtatgtcagttgaaaattatttttgctgtttgcttttgaaagaatataacaatgttagcaaatgaacaaggtaattcctggctgaattatataattattacagtacttccaaagatattaatctattaccattatatgtaattcatggggaatgatattaaacaatagataaaataccaagttaatgtgtttcaggacatcactcacagcataatgaaaaactgacttacttctgtatttcaatagcttcaatacccattcaacattactgtgcattacaaatctattggtaaattgcttgcaaaaataagactgaaaacaattttaaattaagtgtacaaatttttctctttttcttttgaaataattaatatt

SEQ ID NO: 591560 - DNA, 576 bp, Homo sapiens
atgagaagtagtttctgattcaactaatgtctgttaagtgattctctctatagatccaagtattatgagcaacctcacacaatcacgttcatgagatttctattactctgtgtgttggacttcaaggaaggaatggaatgccatcattaggcaccaaatagttccactattgattagcattgagatttttagtaaatatttaggagtactgggggatgaaggagagacaacactatttgttcttgtactagaatactcatttctaatgcctataattaaatcaataggagagttattgagaaaatctgggcattttgagatagttgaagagtaagtattscatatgtatgtcagttgaaaattatttttgctgtttgcttttgaaagaatataacaatgttagcaaatgaacaaggtaattcctggctgaattatataattattacagtacttccaaagatattaatctattaccattatatgtaattcatggggaatgatattaaacaatagataaaataccaagttaatgtgtttcaggacatcactcacagcataatgaaaaactgacttact

SEQ ID NO: 591561 - DNA, 535 bp, Homo sapiens
ataacaatgttagcaaatgaacaaggtaattcctggctgaattatataattattacagtacttccaaagatattaatctattaccattatatgtaattcatggggaatgatattaaacaatagataaaataycaagttaatgtgtttcaggacatcactcacagcataatgaaaaactgacttacttctgtatttcaatagcttcaatacccattcaacattactgtgcattacaaatctattggtaaattgcttgcaaaaataagactgaaaacaattttaaattaagtgtacaaatttttctctttttcttttgaaataattaatattttattttatgactgtagtttcctttaactctataatttgaactgagatgtttggagaaaaagtatttttaaaagaatttataacaataagaataactgttagaatgccagtcctatcaagaaatgttagaaatatataagcaaaactcaaaagtaaatatcactgtctgtctaaccatattccatgcatagcttctactactgtt

SEQ ID NO: 591562 - DNA, 535 bp, Homo sapiens
ataacaatgttagcaaatgaacaaggtaattcctggctgaattatataattattacagtacttccaaagatattaatctattaccattatatgtaattcatggggaatgatattaaacaatagataaaataccaagttaatgtgtttcaggacatcactcacagcataatgaaaaactgacttacttctgtatttcaatagcttcaatacycattcaacattactgtgcattacaaatctattggtaaattgcttgcaaaaataagactgaaaacaattttaaattaagtgtacaaatttttctctttttcttttgaaataattaatattttattttatgactgtagtttcctttaactctataatttgaactgagatgtttggagaaaaagtatttttaaaagaatttataacaataagaataactgttagaatgccagtcctatcaagaaatgttagaaatatataagcaaaactcaaaagtaaatatcactgtctgtctaaccatattccatgcatagcttctactactgtt

SEQ ID NO: 591563 - DNA, 580 bp, Homo sapiens
ccatcattaggcaccaaatagttccactattgattagcattgagatttttagtaaatatttaggagtactgggggatgaaggagagacaacactatttgttcttgtactagaatactcatttctaatgcctataattaaatcaataggagagttattgagaaaatctgggcattttgagatagttgaagagtaagtattccatatgtatgtcagttgaaaattatttttgctgtttgcttttgaaagaatataacaatgttagcaaatgaacaaggtaattcctggctgaattatataattattacagtacttccaaagatattaatctattaccattatatgtaattcatggggaatgatattaaacaatagataaaataccaagttaatgtgtttcaggacatcactcacagcataatgaaaaactgacttacttctgtatttcaatagcttcaatacccattcaacattactgtkcattacaaatctattggtaaattgcttgcaaaaataagactgaaaacaattttaaattaagtgtacaaatttttctctttttcttttgaaataattaatatt

SEQ ID NO: 591564 - DNA, 555 bp, Homo sapiens
aaaactgacttacttctgtatttcaatagcttcaatacccattcaacattactgtgcattacaaatctattggtaaattgcttgcaaaaataagactgaaaacaattttaaattaagtgtacaaatttttctctttttcttttgaaataattaatrttttattttatgactgtagtttcctttaactctataatttgaactgagatgtttggagaaaaagtatttttaaaagaatttataacaataagaataactgttagaatgccagtcctatcaagaaatgttagaaatatataagcaaaactcaaaagtaaatatcactgtctgtctaaccatattccatgcatagcttctactactgttccccagaattgtctgttttatcatttctcttgacttttgatacatttattcatatatcctccatcctcacttagtccttactgtttgtacttcagcatcatatcaaccctatctcgccacttaaaagacaaagtaatactactttttcagtttttttcatttaatgtaagaagttatcatttccccaatagt

SEQ ID NO: 591565 - DNA, 535 bp, Homo sapiens
ataacaatgttagcaaatgaacaaggtaattcctggctgaattatataattattacagtacttccaaagatattaatctattaccattatatgtaattcatggggaatgatattaaacaatagataaaataccaagttaatgtgtttcaggacatcactcacagcataatgaaaaactgacttacttctgtatttcaatagcttcaatacccattcaacattactgtgcattacaaatctattggtaaattgcttgcaaaaataagactgaaaacaattttaaattaagtgtacaaatttttctctttttcttttgaaataattaatattttattttatkactgtagtttcctttaactctataatttgaactgagatgtttggagaaaaagtatttttaaaagaatttataacaataagaataactgttagaatgccagtcctatcaagaaatgttagaaatatataagcaaaactcaaaagtaaatatcactgtctgtctaaccatattccatgcatagcttctactactgtt

SEQ ID NO: 591566 - DNA, 437 bp, Homo sapiens
cattactgtgcattacaaatctattggtaaattgcttgcaaaaataagactgaaaacaattttaaattaagtgtacaaatttttctctttttcttttgaaataattaatattttattttatgactrtagtttcctttaactctataatttgaactgagatgtttggagaaaaagtatttttaaaagaatttataacaataagaataactgttagaatgccagtcctatcaagaaatgttagaaatatataagcaaaactcaaaagtaaatatcactgtctgtctaaccatattccatgcatagcttctactactgttccccagaattgtctgttttatcatttctcttgacttttgatacatttattcatatatcctccatcctcacttagtccttactgtttgtacttcagcatcatatcaaccctatctcgccac

SEQ ID NO: 591567 - DNA, 643 bp, Homo sapiens
ctatccatgttgtataatgatccattcagagtgaatctattatcttacatatttatcatttctttgtggtgagaacattcgaagacaactcttcaagctattttgtaatatacgatatttcactgttaaccatacttgctctacatgcaacagaacaccagaatttattgctcttatctagttgtaattttataccatcaatcaaagtttcctcatccttctttagtctctggtaacatttttctactctctgcttctatgctattaacttttttaaatgtttgtattttcttttttttttagactccacttatgagagagatcatgctgtayttgtctttctgtgtctggcttatttcacttaccacgatgtcctctagattcatccatattgtcataaatggcaagattttattttttatggctacagagtacttcattgtatacagatagtgcattttctttatgcattcatctgttgccagacacttaggcttattctgtatcttggctatcatacatagtgtgcaataaaaatgactaggtgcattgcaattagctttaaaaagatggaacggcattgtaaggacagaccatgaatctaagcccttaggttgaatacttaggttgaataaaattgttg

SEQ ID NO: 591568 - DNA, 257 bp, Homo sapiens
gtattattaggagaaaaaaaaagagagagaaagttgaaggagaggggaaaactgccacagcaggttaagcaacttgctttaaaataattgggattagtaagttttcagagatagaactggtgatgaaagagtgagactggaattaggaattaatttgtaacactaatgttgcaggttgggtcctggttatgagactaagcrgatgctcattctttggagctataactctgaccagtgtcacattaacagatttggaa

SEQ ID NO: 591569 - DNA, 570 bp, Homo sapiens
acaaagaaaattgtgggattcccttaatggctttcttacacttgagttctaaaatatttatcaatctcaaatatattttgcattatgttgaaaaatgactattaatagtttctgctaaaaggaattatcaactttttatgcatcaccatttcagagttgggcttataaaaatatcagtatctgtcctacatatataccaatgtttttcaatttttagtcaattaagtatgtttcattgattttctgctgtgtgcgtaaaactgtgcatgatgatattatagaaggtactgtgaaaaggcttaaagcagtatatttaaccactgcctaccagaatagtacatagagaagcaaacctaatctataagcaacaatgagagcrtgctacagataacttttaatattgtaaatatatatgatacagattataaaatctttatgaaataatctatagaagaggtgaaatgggtctctgccaggagaatgcaaaggcagtaaaaaattaaaaaccaaaatattgagaattattttgaggaaagtgttagtagaatttaataatacatttaatagaaa

SEQ ID NO: 591570 - DNA, 570 bp, Homo sapiens
acaaagaaaattgtgggattcccttaatggctttcttacacttgagttctaaaatatttatcaatctcaaatatattttgcattatgttgaaaaatgactattaatagtttctgctaaaaggaattatcaactttttatgcatcaccatttcagagttgggcttataaaaatatcagtatctgtcctacatatataccaatgtttttcaatttttagtcaattaagtatgtttcattgattttctgctgtgtgcgtaaaactgtgcatgatgatattatagaaggtactgtgaaaaggcttaaagcagtatatttaaccactgcctaccagaatagtacatagagaagcaaacctaatctataagcaacaatgagagcgtgctacagataacttttaatattgtaaatatatatgatacagattataaaatctttatgaaataatctatagaagaggtgaaatgggtctctgccaggagaatgcaaaggcagtaaaaaattaaaaaccaaaatattgagaattattttgagsaaagtgttagtagaatttaataatacatttaatagaaa

SEQ ID NO: 591571 - DNA, 593 bp, Homo sapiens
attttttgtacagaaataaaatctagagtatgtaatattaggggaaagaaaatgcctcatagatgtcaataaacyttgttccctctatttttttttactagtttcatttcctgtaataattgtggtaacagtaatgctgaaaaaattaaacctccaactcttaaaacaataaaagttattgcttgcttaaataataggaatgctatctgtgatttcctgcagggtcattcaaagatttattattttcccatctgtggttttgccatcctcaatacatagctcttgggggttttctgtggattgttttaatgttagccaaccagagagaataaaaagagtgttaaaaattattaattgtgggtctatgtgaccctgtaagaaggctacatcactactatatacttagaacctaaatttctatgccaaaatataggcgaatatagcaaatattgtccaaatttacaaggaaagagaaaatgaattgtgtattcatcttacagtttctaataaaatccccaacattgaacttaaatgactctccagttgttcattaggagcatatgctgttggttgactgccagcatacattatct

SEQ ID NO: 591572 - DNA, 593 bp, Homo sapiens
attttttgtacagaaataaaatctagagtatgtaatattaggggaaagaaaatgcctcatagatgtcaataaactttgttccctctatttttttttactagtttcatttcctgtaataattgtggtaacagtaatgctgaaaaaattaaacctccaactcttaaaacaataaaagttattgcttgcttaaataataggaatgctatctgtgatttcctgcagggtcattcaaagatttattattttcccatctgtggttttgccatcctcaatacatagctcttgggggttttctgtggattgttttaatgttagccaaccagagagaataaaaagagtgttaaaaattattaattstgggtctatgtgaccctgtaagaaggctacatcactactatatacttagaacctaaatttctatgccaaaatataggcgaatatagcaaatattgtccaaatttacaaggaaagagaaaatgaattgtgtattcatcttacagtttctaataaaatccccaacattgaacttaaatgactctccagttgttcattaggagcatatgctgttggttgactgccagcatacattatct

SEQ ID NO: 591573 - DNA, 409 bp, Homo sapiens
attgtccaaatttacaaggaaagagaaaatgaattgtgtrttcatcttacagtttctaataaaatccccaacattgaacttaaatgactctccagttgttcattaggagcatatgctgttggttgactgccagcatacattatctcaccttttctttctaagatagaacatattcaatatatccaaggcttccaaggcttcagtacttctctaagtttactgtctcgtcttcagattcaggtatgatgtgattactctaagtatagcctgattctttgccaaaagtaagaacaaaaatacacatatgacccaattcagtacaaaggcaaatcagggcaaattaccttaagagtttttaagataaatgtttctcttggtgtctctttcttggtcttctgggtaaggttgt

SEQ ID NO: 591574 - DNA, 451 bp, Homo sapiens
tcaggctatacttagagtaatcacatcatacctgaatctgaagacgagacagtaaacttagagaagtactgaagccttggaagccttggatatattgaatatgttctatyttagaaagaaaaggtgagataatgtatgctggcagtcaaccaacagcatattctcctaatgaacaactggagagtcatttaagttcaatgttggggattttattagaaactgtaagatgaagacacaattcattttctctttccctgtaaatttggacaatatttgctatattcgcctatattttggcatagaaatttaggttctaagtatatagtagtgatatagccttcttacagggtcacatagacccacaagtaataatttttaatactctttttattctctctggttggctaacattaaaacaatccacagaaaacccccaagagctatgtattga

SEQ ID NO: 591575 - DNA, 552 bp, Homo sapiens
catacattatctcaccttttctttctaagatagaacatattcaatatatccaaggcttccaaggcttcagtacttctctaagtttactgtctcgtcttcagattcaggtatgatgtgattactctaagtatagcctgattctttgccaaaartaagaacaaaaatacacatatgacccaattcagtacaaaggcaaatcagggcaaattaccttaagagtttttaagataaatgtttctcttggtgtctctttcttggtcttctgggtaaggttgtatctgaatatgttgaccctaaatgtctgcagacatttttgcagaaatgttaagggtaaaagtgacacagccaatagcaaagaagtgccagaaaatacgtaagcaaactgtgacctctttttacctcttgattgacttttatgttaaataatgcatttacatgaggcttgaaagaatttgaaatagtatttggcagtgaagaatttactcctcccagactttcatccaagagaaatttccaggaggagggttgatggtgggttacctccaactcaac

SEQ ID NO: 591576 - DNA, 409 bp, Homo sapiens
attgtccaaatttacaaggaaagagaaaatgaattgtgtattcatcttacagtttctaataaaatccccaacattgaacttaaatgactctccagttgttcattaggagcatatgctgttggttgactgccagcatacattatctcaccttttctttctaagatagaacatattcaatatatccaaggcttccaaggcttcagtacttctctaagtttactgtctcgtcttcagattcaggtatgatgtgattactctaagtatagcctgattctttgccaaaagtaagaacaaaaatacrcatatgacccaattcagtacaaaggcaaatcagggcaaattaccttaagagtttttaagataaatgtttctcttggtgtctctttcttggtcttctgggtaaggttgt

SEQ ID NO: 591577 - DNA, 552 bp, Homo sapiens
catacattatctcaccttttctttctaagatagaacatattcaatatatccaaggcttccaaggcttcagtacttctctaagtttactgtctcgtcttcagattcaggtatgatgtgattactctaagtatagcctgattctttgccaaaagtaagaacaaaaatacacatatgacccaattcagtacaaaggcaaatcagggcaaattaccttaagagtttttaagataaatgtttctcttggtgtctctttcttggtcttctgggtaaggttgtatctgaatatgwtgaccctaaatgtctgcagacatttttgcagaaatgttaagggtaaaagtgacacagccaatagcaaagaagtgccagaaaatacgtaagcaaactgtgacctctttttacctcttgattgacttttatgttaaataatgcatttacatgaggcttgaaagaatttgaaatagtatttggcagtgaagaatttactcctcccagactttcatccaagagaaatttccaggaggagggttgatggtgggttacctccaactcaac

SEQ ID NO: 591578 - DNA, 546 bp, Homo sapiens
atgaactcatcagatatacttacactaagcatactgattagaaagttctcctcatgtaatttcttcttcctgaatgatctcaaaaaatataatttcaggtctagataattgaaataaaagtgcatccctgaaacaaattatttagctcttactttttataaatactctaattgctaaacttatcaggatcatgacctactttgtatagacaaattaaattctaattctccagatcacaatatataggctttaagtcaccataattttttcccatttgcctcatttctgcctttctttgaggtctctaccttttgtaactagtttttaatttgtgaaatatttacttaatattrgctgatttataatgaattagtttagactagaatgacatttgaatacttgttgaaaataatatcacttgtagacctagaatactttggtagctacttcattttctctgtctctttctgaaaagttagccagcttgctttaggcagacagtaagggaagggtcccccagagaacctcctacctgctccacaagtg

SEQ ID NO: 591579 - DNA, 546 bp, Homo sapiens
atgaactcatcagatatacttacactaagcatactgattagaaagttctcctcatgtaatttcttcttcctgaatgatctcaaaaaatataatttcaggtctagataattgaaataaaagtgcatccctgaaacaaattatttagctcttactttttataaatactctaattgctaaacttatcaggatcatgacctactttgtatagacaaattaaattctaattctccagatcacaatatataggctttaagtcaccataattttttcccatttgcctcatttctgcctttctttgaggtctctaccttttgtaactagtttttaatttgtgaaatatttacttaatattggctgatttataatgaattagtttagactagaatgrcatttgaatacttgttgaaaataatatcacttgtagacctagaatactttggtagctacttcattttctctgtctctttctgaaaagttagccagcttgctttaggcagacagtaagggaagggtcccccagagaacctcctacctgctccacaagtg

SEQ ID NO: 591580 - DNA, 596 bp, Homo sapiens
gggagagtggcaactcccaacctccctcccctcccggctgaggcacatagcccaagggccccacttggctaggtggccagcatttcctgctcaytcttccctctccccacgcacccacagtgtctttcctcccctggctgagccagaaaggaggagacagcaattaaaatgctctctccctattggaggaactcatttgtataagaataaaaggtttctcctcgggcatcttccccaccctgcacttaagctgttttattttattttatttttcttttctccactttgtaaggagttaacttttatgagaggttttttgtttgtttttgtttttgttttcttattaggccaggacccccattcccaagatagccttttctcttccttgtttaaggaagacccagctccaaagctttaggttagcatgactcattgctgccgattaggctcccttccatctcgtggatagaggtcattctagtatccatggcatgcatgaaatctaaagaactcaaaggttatcaacaacagtgggacaagcagcgcatgggtaatggtggataactcgcaccctgtaagccccctgttaacatagg

SEQ ID NO: 591581 - DNA, 500 bp, Homo sapiens
taaggagttaacttttatgagaggttttttgtttgtttttgtttttgttttcttattaggccaggacccccattcccaagatagccttttctcttccttgtttaaggaagacccagctccaaagctttaggttagcatgactcattgctgccgattaggctcccttccatctcgtggatagaggtcattctagtatccatggcatgcatgaaatctaaagaactcaaaggttatcaacaacagtgggacaagcagygcatgggtaatggtggataactcgcaccctgtaagccccctgttaacataggtgaaagctgcattggcacccatgggtggtaacctgccaagatcaccaggactcagggatataagaacagaagaaagaaagaggacacttttctcctctccctcatgtacctcaggtatttactaggaaaaagaagaaactagggatgccttgctcccctcttcttaggtgagtaaccaatcatctgcagccc

SEQ ID NO: 591582 - DNA, 462 bp, Homo sapiens
aaagaactcaaaggttatcaacaacagtgggacaagcagcgcatgggtaatggtggataactcgcaccctgtaagccccctgttaacataggtgaaagctgcattggcacccatgggtggtaacctgccaagatcaccaggactcagggatataagaacagaagaaagaaagaggacacttttctcctctccctcatgtacctcaggtatttactaggaaaaagaagaaactagggatgccttgctcccctcttcttaggtgagtaaccaatcatctgcagcccatatttctcttgattgcctcctgaatcactaggactcttctgaaaaaacayctcctttctcctttttcctcctctgtcctctctttgtgggtgggtccttgtgtcgctgtaccacaggacactccctttgtatgcatcccttaaactgggaaaagttaatttccccaaaccttaaact

SEQ ID NO: 591583 - DNA, 572 bp, Homo sapiens
cagacttctggcctccctctccctgtgcaaaccagttgaataaatgataaaatctctgtttaaaycactgtttatatcctctctgaagttctgatgaatagaaaaaaaggatttatgaggctagtcttaagctgtagccaatgtagtgtgctttgtgtgtctttctgtatagttctgtcataaagaggggtaccttaggatagaatgcaggcctaggaccccaaaagtttgctgatcaagccagcctggcaaactggtcagtaacaaaccttgctgcagttcttcatcttgttttatgtccttaggagcttgaccttgtaaccaattgataatactttcttttggcctctgccattttacaatggtggcctgggtttaatcctggcttagggaatgagtatattgtggctaatatctgtgtgacttttaccatttgctgattctcttcccctctataaacaacttctagcttcctttcttaaatcttcctttgtctgaaccaactttaaagatcttagattctgtaaaaactgcttagcacctctttgaaaataacttttacacttacagtt

SEQ ID NO: 591584 - DNA, 510 bp, Homo sapiens
cttctcaaaatctatctctgtcttccagctatgcctgtttattaggccctagaaactgtatgctgtcctaggccctgctcttgaagggcttcacccagaggccaataatctattcagaagattggcaaatgaaaaatcttacaagtactgaatttgcttttgttcatctgtgtaattttatatttcttatgggcrtgatgtttatataaaaaagctctaggaaaataagcacttagatcaaatattttttgaagaaaaataaaagctgtaataccttttgagttcacatgactataatctttaagaaataaaggcagttttaaaaataattggtaaaatacaaatgtctttaaaatgtaaatatgtgggctgaatcatgtaggtcagatactaggttagctaaatgcttcaaagttattaactgcttctttggcttttaagaactatttgataaagtttggctctgtgtccccacccaaatctcatcttgtagctcctgtaatttccatg

SEQ ID NO: 591585 - DNA, 510 bp, Homo sapiens
cttctcaaaatctatctctgtcttccagctatgcctgtttattaggccctagaaactgtatgctgtcctaggccctgctcttgaagggcttcacccagaggccaataatctattcagaagattggcaaatgaaaaatcttacaagtactgaatttgcttttgttcatctgtgtaattttatatttcttatgggcgtgatgtttatataaaaaagctctaggaaaataagcacttagatcaaatattttttgaagaaaaataaaagctgtaatacctttygagttcacatgactataatctttaagaaataaaggcagttttaaaaataattggtaaaatacaaatgtctttaaaatgtaaatatgtgggctgaatcatgtaggtcagatactaggttagctaaatgcttcaaagttattaactgcttctttggcttttaagaactatttgataaagtttggctctgtgtccccacccaaatctcatcttgtagctcctgtaatttccatg

SEQ ID NO: 591586 - DNA, 510 bp, Homo sapiens
cttctcaaaatctatctctgtcttccagctatgcctgtttattaggccctagaaactgtatgctgtcctaggccctgctcttgaagggcttcacccagaggccaataatctattcagaagattggcaaatgaaaaatcttacaagtactgaatttgcttttgttcatctgtgtaattttatatttcttatgggcgtgatgtttatataaaaaagctctaggaaaataagcacttagatcaaatattttttgaagaaaaataaaagctgtaataccttttgagttcacatgaytataatctttaagaaataaaggcagttttaaaaataattggtaaaatacaaatgtctttaaaatgtaaatatgtgggctgaatcatgtaggtcagatactaggttagctaaatgcttcaaagttattaactgcttctttggcttttaagaactatttgataaagtttggctctgtgtccccacccaaatctcatcttgtagctcctgtaatttccatg

SEQ ID NO: 591587 - DNA, 510 bp, Homo sapiens
cttctcaaaatctatctctgtcttccagctatgcctgtttattaggccctagaaactgtatgctgtcctaggccctgctcttgaagggcttcacccagaggccaataatctattcagaagattggcaaatgaaaaatcttacaagtactgaatttgcttttgttcatctgtgtaattttatatttcttatgggcgtgatgtttatataaaaaagctctaggaaaataagcacttagatcaaatattttttgaagaaaaataaaagctgtaataccttttgagttcacatgactataatctttaagaaataaaggcagttttaaaaataattggtaaaatacaaatgtctttaaaaygtaaatatgtgggctgaatcatgtaggtcagatactaggttagctaaatgcttcaaagttattaactgcttctttggcttttaagaactatttgataaagtttggctctgtgtccccacccaaatctcatcttgtagctcctgtaatttccatg

SEQ ID NO: 591588 - DNA, 489 bp, Homo sapiens
agtttaaaaaaatctcacctcatggtcaaactagataagattagatataattatctataagttttcattaaaaaaattggggttgacatcaacagtagactaatgcaaggatgaaattaggctttcacttgaacaggatttccctgtaaaattaaygacagatcatttggaaagctaagttttccctctacctgtgaatatgcttttgcgttgttttaaaatgtttgagtcatcattttggctaaaataaatgacatatggtaacttggaattctattttataatatcaagtgctttgaacctctaacatatttaacaggcttcccaaaatcaaacttcagtttcaaaattgtctttcctggtccctggaacatccaaaagagaagaaaactggtttttttgaaatgtttagttatatggtatttccaaagttatatttaatctgctttaggttatattttagtgaataatattaatatgtttcaaaat

SEQ ID NO: 591589 - DNA, 619 bp, Homo sapiens
tttaggttatattttagtgaataatattaatatgtttcaaaattatatgagatttctaaaattctaatgtctgagtatatgctatcaatcataattaaggttattatgtttagttattgtaaaccctagaaatgactaaatttctttgycatttgtattcttgacagtaactaccttagacatttcatcattcacagacaaatgtcttgttttgatcctactcaaaagatgatttataatcagctataggattttgacaagtgttctcaaatgcaagattccattaactctggagattatgacattgaaaaaaatacagtactcatgaagaactgaaatgttcatgaatatctagcagaacaagagaacagaatggattggactaatagaaaacaagtattatttttaacctttttgcttaaaactttccttgctttgtttttctgagtcaaggatacttattttgaattatttaaagcctttaataattgagtaaactatactcctgtgaacaaaatttgaaggacgtttgtttctctctgcctggctttgccagaatttggaaactatttgtgagaatatttaatttatggcaatacagttattttcatcagtgtaa

SEQ ID NO: 591590 - DNA, 619 bp, Homo sapiens
tttaggttatattttagtgaataatattaatatgtttcaaaattatatgagatttctaaaattctaatgtctgagtatatgctatcaatcataattaaggttattatgtttagttattgtaaaccctagaaatgactaaatttctttgtcatttgtattcttgacagtaactaccttagacatttcatcattcacrgacaaatgtcttgttttgatcctactcaaaagatgatttataatcagctataggattttgacaagtgttctcaaatgcaagattccattaactctggagattatgacattgaaaaaaatacagtactcatgaagaactgaaatgttcatgaatatctagcagaacaagagaacagaatggattggactaatagaaaacaagtattatttttaacctttttgcttaaaactttccttgctttgtttttctgagtcaaggatacttattttgaattatttaaagcctttaataattgagtaaactatactcctgtgaacaaaatttgaaggacgtttgtttctctctgcctggctttgccagaatttggaaactatttgtgagaatatttaatttatggcaatacagttattttcatcagtgtaa

SEQ ID NO: 591591 - DNA, 629 bp, Homo sapiens
cttttaagtggagtatatagaccatttacagccaatgtcaattatgagacatgaagtggagttccagtcagtatgttgttacctagaaattttaggtttttttttttttcactttgttattgctttataggctctataagttttatactttcaagacgtctattctgatgcagctcaaccttttgtttcaagatttagcatttmttgtaggactggtctgatagggacagattccctcagcatttgcttgtctgaggaagacattatttctctttcatttatgagactcagttttgctggatacaaaatttttgactaatagttattttgtctaaggatattaaagataagcctaaagatagagtgaacttctgggctgtaagatttctgctgagaagtctgctgttagtctaataggttttcctttataggttacttgatacttttgtctcactgttcttagaattcatttcttcatgttgactttagatagcctgattactatatggctttgtaatgtcagttttgcagtgaacctccccagagctcatggagtttcttgtatttggacatctaaatatctagcaaggctagcaaagttttcttcaattatgccctcaaataagtat

SEQ ID NO: 591592 - DNA, 629 bp, Homo sapiens
cttttaagtggagtatatagaccatttacagccaatgtcaattatgagacatgaagtggagttccagtcagtatgttgttacctagaaattttaggtttttttttttttcactttgttattgctttataggctctataagttttatactttcaagacgtctattctgatgcagctcaaccttttgtttcaagatttagcatttcttgtaggactggtctgatagggacagattccctcagcatttgcttgtctgwggaagacattatttctctttcatttatgagactcagttttgctggatacaaaatttttgactaatagttattttgtctaaggatattaaagataagcctaaagatagagtgaacttctgggctgtaagatttctgctgagaagtctgctgttagtctaataggttttcctttataggttacttgatacttttgtctcactgttcttagaattcatttcttcatgttgactttagatagcctgattactatatggctttgtaatgtcagttttgcagtgaacctccccagagctcatggagtttcttgtatttggacatctaaatatctagcaaggctagcaaagttttcttcaattatgccctcaaataagtat

SEQ ID NO: 591593 - DNA, 574 bp, Homo sapiens
ttgtaggactggtctgatagggacagattccctcagcatttgcttgtctgaggaagacattatttctctttcatttatgagactcagttttgctggatacaaaatttttgactaatagttattttgtctaaggatattaaagataagcctaaagatagagtgaacttctgggctgtaagatttctgctgagaagtctgctgttagtctaataggttttcctttataggttacttgatacttttgtctcactrttcttagaattcatttcttcatgttgactttagatagcctgattactatatggctttgtaatgtcagttttgcagtgaacctccccagagctcatggagtttcttgtatttggacatctaaatatctagcaaggctagcaaagttttcttcaattatgccctcaaataagtattctaaaggttttgctgtttcttctccctcaagaacagcaattgctatatttggccattttacataatcacctatttctaagagactttgcttatttctttgaattctttttctggcatttcaaagatttcatcttggttgggatccatt

SEQ ID NO: 591594 - DNA, 574 bp, Homo sapiens
ttgtaggactggtctgatagggacagattccctcagcatttgcttgtctgaggaagacattatttctctttcatttatgagactcagttttgctggatacaaaatttttgactaatagttattttgtctaaggatattaaagataagcctaaagatagagtgaacttctgggctgtaagatttctgctgagaagtctgctgttagtctaataggttttcctttataggttacttgatacttttgtctcactgttcttagaattcatttcttcatgttgactttagatagcctgattactatatggctttgtaatgtcagttttgcagtgaacctccccagagctcatggagtttcttgtatttggacatctaaatatctagcaaggctagcaaagttttcttcaattatgccctcaaataagtattctaaaggttttgctgtttcttctccctcragaacagcaattgctatatttggccattttacataatcacctatttctaagagactttgcttatttctttgaattctttttctggcatttcaaagatttcatcttggttgggatccatt

SEQ ID NO: 591595 - DNA, 501 bp, Homo sapiens
agagactttgcttatttctttgaattctttttctggcatttcaaagatttcatcttggttgggatccattgctggggacttagtgtgttctttttgaggtgttatagaaccctattttgtcctattgacagaattatttttctggtttcttctcatttgggtagagtatatcttctaattacttttgagactatgtcttctaattatttttgaatttattttttgatttgactgtgatttttcacttttttttttcactttgaggatgtgactttaatgtttatagtttattgtaacctaattcagctctgsgtgctttcaggggtgaagactgtataagttccctggttatttaaaatctttgtatggtggctttctcagatgctagttgtggtaacattatgctcagtgtgtgtgtgtggaggttcactgtttcctgtggggtagcaatggcagaggtctcatgaagcttatctagttcccaagttgtgtgcacttttt

SEQ ID NO: 591596 - DNA, 503 bp, Homo sapiens
gggagggagccacttcagctcccttgccaggcccccaggaaagcaggtcacactcctaaatacagttctagctattcagattagcaggccctttttatttgcaggaattctgacgttccaagtagagagagattgtgattctatgccttatgcaaatctgaatctagaggggactcctcctctggggatgcagttaacttgaggtgttccagaaaggctatctacaggtccactcatgctaaattcccataagagaagtaccagctgtgtctgcagcrgtgaatgaggggggaaagtctttttcttcaagaccgttctgcagattttcccaagtacagcactgtacctgtgcctctactgaaagaaactttccacaggtcggatgttctggactcaaggcctgccatctagattcttttttccatggggtgtgccactgatgtgcactcccccttatcctaagagtaggagtccctgagggccagactagtatgaatgctgct

SEQ ID NO: 591597 - DNA, 532 bp, Homo sapiens
ccatctcaagaaaccactttctttgttcatctataagaaacaactcctcatctgttggttatattacaagattgcagcaattcagtgacgtctttaggctccacttttaatcctagttctcttgctatttccattacatctgcaattactttctcctctgaagtcttgaacccctcaaagtcatccatgarggttggaagcaacttgttctaaattcttactaatgttgatactttggccgccttcttccatgaatcacaaatgttcctaatagtatctagaatggtggatcctttccagaagatttttcagatccatcagaggaatcactatctatgacagctacaatcttacaaaatgtatatattaagttataagacctgaaagtcaaaattgcttcttgatccatgagctacagaattggtgttgtgttaggttgcatgaaacaacattaatgtccttgtatatgttcatcagaactcttgggtgaccacgtacattgtccacaagcagtaatatttgaaagagaatc

SEQ ID NO: 591598 - DNA, 522 bp, Homo sapiens
ctgcagatgctgtaatggattgtgtcagtaggcttccagccacaaggtggcacttgaaaaagagcaccagctggtagcagtgggatttgtgcttgccttatgttacccaggggaggtaatctgatgactcaggcaatgggcagggccattgagctctcaaaattttctattctttgtgttaagctaccagggcrgatggaggggcaaagccagctgggggctgaatcaggcaagttcacattctggctctcttttgtctgccatgtgtgggcaaaagcagtgtcccaagtggggatcagatagtggtcctctggctgtaggagtaatgttgcagggagtaccacagctgcctcttctgcagagaagcatctgtatgaggaatagggagcagcaggcagcagttagccccactcagctcccacacacttggcaaagcaagtcttgcacctgcagcctcccactcacagcagcttggttccaagcagtcaacactcagaactcaacactgcccaagtccataag

SEQ ID NO: 591599 - DNA, 522 bp, Homo sapiens
ctgcagatgctgtaatggattgtgtcagtaggcttccagccacaaggtggcacttgaaaaagagcaccagctggtagcagtgggatttgtgcttgccttatgttacccaggggaggtaatctgatgactcaggcaatgggcagggccattgagctctcaaaattttctattctttgtgttaagctaccagggcggatggaggggcaaagccagctgggggctgaatcaggcaagttcacattctggctctcttttgtctgccatgtgtgggcaaaagcagtgtcccaagtggggatcagatagtggtcctctggctgtaggagtaatgttgcagggagtaccacagctgcctctkctgcagagaagcatctgtatgaggaatagggagcagcaggcagcagttagccccactcagctcccacacacttggcaaagcaagtcttgcacctgcagcctcccactcacagcagcttggttccaagcagtcaacactcagaactcaacactgcccaagtccataag

SEQ ID NO: 591600 - DNA, 522 bp, Homo sapiens
ctgcagatgctgtaatggattgtgtcagtaggcttccagccacaaggtggcacttgaaaaagagcaccagctggtagcagtgggatttgtgcttgccttatgttacccaggggaggtaatctgatgactcaggcaatgggcagggccattgagctctcaaaattttctattctttgtgttaagctaccagggcggatggaggggcaaagccagctgggggctgaatcaggcaagttcacattctggctctcttttgtctgccatgtgtgggcaaaagcagtgtcccaagtggggatcagatagtggtcctctggctgtaggagtaatgttgcagggagtaccacagctgcctcttctgcagagaagcatctgtatgaggaatagggagcagcaggcagcagttagccccactcagctcccayacacttggcaaagcaagtcttgcacctgcagcctcccactcacagcagcttggttccaagcagtcaacactcagaactcaacactgcccaagtccataag

SEQ ID NO: 591601 - DNA, 575 bp, Homo sapiens
agtggggatcagatagtggtcctctggctgtaggagtaatgttgcagggagtaccacagctgcctcttctgcagagaagcatctgtatgaggaatagggagcagcaggcagcagttagccccactcagctcccacacacttggcaaagcaagtcttgcacctgcagcctcccactcacagcagcttggttccaagcagtcaacactcagaactcaacactgcccaagtccataagacttcccagaagagactgcaaccatggcttccaggtcaygcctctcctagtcggcccatgaagcaggggcacccagctcttgcacctatggctgcagcacatttcccatctgccccatggttctgaccaagggggtttgtctccactcgagattatatcacgaatctcagttgagagcttctctcaacctgtgaccactgcctgagttacctggctgacttctgtgaggtcccctgtgaggtaggatcagggatggctttcctctgtcctgctgggcatgcacactaagcccgtccccatgctgctacttctcatatatgccccactgctcactaaatca

SEQ ID NO: 591602 - DNA, 575 bp, Homo sapiens
agtggggatcagatagtggtcctctggctgtaggagtaatgttgcagggagtaccacagctgcctcttctgcagagaagcatctgtatgaggaatagggagcagcaggcagcagttagccccactcagctcccacacacttggcaaagcaagtcttgcacctgcagcctcccactcacagcagcttggttccaagcagtcaacactcagaactcaacactgcccaagtccataagacttcccagaagagactgcaaccatggcttccaggtcatrcctctcctagtcggcccatgaagcaggggcacccagctcttgcacctatggctgcagcacatttcccatctgccccatggttctgaccaagggggtttgtctccactcgagattatatcacgaatctcagttgagagcttctctcaacctgtgaccactgcctgagttacctggctgacttctgtgaggtcccctgtgaggtaggatcagggatggctttcctctgtcctgctgggcatgcacactaagcccgtccccatgctgctacttctcatatatgccccactgctcactaaatca

SEQ ID NO: 591603 - DNA, 532 bp, Homo sapiens
ccatctcaagaaaccactttctttgttcatctataagaaacaactcctcatctgttggttatattacaagattgcagcaattcagtgacgtctttaggctccacttttaatcctagttctcttgctatttccattacatctgcaattactttctcctctgaagtcttgaacccctcaaagtcatccatgagggttggaagcaacttgttctaaattcttactaatgttgatactttggccgccttcttccatgaatcacaaatgttcctaatagtatctagaatggtggatcctytccagaagatttttcagatccatcagaggaatcactatctatgacagctacaatcttacaaaatgtatatattaagttataagacctgaaagtcaaaattgcttcttgatccatgagctacagaattggtgttgtgttaggttgcatgaaacaacattaatgtccttgtatatgttcatcagaactcttgggtgaccacgtacattgtccacaagcagtaatatttgaaagagaatc

SEQ ID NO: 591604 - DNA, 601 bp, Homo sapiens
cccatgaagcaggggcacccagctcttgcacctatggctgcagcacatttcccatctgccccatggttctgaccaagggggtttgtctccactcgagattatatcacgaatctcagttgagagcttctctcaacctgtgaccactgcctgagttacctggctgacttctgtgaggtcccctgtgaggtaggatcagggatggctttcctctgtcctgctgggcatgcacactaagcccgtccccatgctgctacttctcatatatgccccactgctcactaaatcagctccagtgctgggtgggattaaggcctttccctgtggcctggattgcttggttccccagtaggagtatatgtcctagaggcagtttayccctatctgacattctagggacttatagttttcctcctggctcatgatgtggacagcaacctgacacttctttcaaaaggtctgtgctttctttcagttttttcctgttaattttctgtgttgcttcttggaaaaaatttacaatgtgaatctccacacacaattctgtctttccaaataggagaggcatgctaacaatgactctaatctgccattttgagaaaaa

SEQ ID NO: 591605 - DNA, 601 bp, Homo sapiens
cccatgaagcaggggcacccagctcttgcacctatggctgcagcacatttcccatctgccccatggttctgaccaagggggtttgtctccactcgagattatatcacgaatctcagttgagagcttctctcaacctgtgaccactgcctgagttacctggctgacttctgtgaggtcccctgtgaggtaggatcagggatggctttcctctgtcctgctgggcatgcacactaagcccgtccccatgctgctacttctcatatatgccccactgctcactaaatcagctccagtgctgggtgggattaaggcctttccctgtggcctggattgcttggttccccagtaggagtatatgtcctagaggcagtttatccctatctgacattctagggacttatagttttcctcctggctcatgatgtggacagcaacctgacacttctttcaaaagktctgtgctttctttcagttttttcctgttaattttctgtgttgcttcttggaaaaaatttacaatgtgaatctccacacacaattctgtctttccaaataggagaggcatgctaacaatgactctaatctgccattttgagaaaaa

SEQ ID NO: 591606 - DNA, 351 bp, Homo sapiens
ttaattcattaattttaaaattttgataaaaattatgacttaattatattattatgtattttcatttgattatctaggtttatgaaactgactaaactartaattatttgataatatgattatattctgccaattcactctacatgttccttggatatgttaataaacaatagaaacaagtccaactaaaatacatcacttattctgactcttgttttgaaaaataaaacctgacaaatcaaataaaagtaaatgaattattatttagacatccacttatggtttgggtatatattttgacagtccatgagaaaaattcctccaagggtcttcacttccagacataaaatc

SEQ ID NO: 591607 - DNA, 351 bp, Homo sapiens
ttaattcattaattttaaaattttgataaaaattatgacttaattatattattatgtattttcatttgattatctaggtttatgaaactgactaaactaataattatttgataatatgattatattctgccaattcactctacatgttccttggatatgttaataaacaatagaaacaagtccaactaaaatacatcacttattctgactcttgttttgaaaaataaaacctgacaaatcaaataaaagtaaatgaattattattyagacatccacttatggtttgggtatatattttgacagtccatgagaaaaattcctccaagggtcttcacttccagacataaaatc

SEQ ID NO: 591608 - DNA, 633 bp, Homo sapiens
tgacaaatcaaataaaagtaaatgaattattatttagacatccacttatgrtttgggtatatattttgacagtccatgagaaaaattcctccaagggtcttcacttccagacataaaatcactttgttgtttttctaaaagctatttttaaaaacatcagcatctttttaaattctcccatctataagttggcaaaaatatctgttgaggtttgtaagcaactttaacattttaaataataaatgtaatatttagggacaatttaatttagtgactcaaggcatctaatatttggtatcagtatatgaatattaacaaacatttagcccttttatttatagtatttttatagtaaaacaatttctactttctattatgcttcttgttctgtgatagtttactatttctgaaactttattttttacaaaatttcaagttgagtctaaaaaaattatattttgttgttttgaaaaatacatagcctaaaactttacatgctaacagttgagttttatcagtgttatttttactaaacctaatcactataaaatagctatatcttgtgtatgttaaaaatgtgaaataagatgagaatgtatttgctatacaattaattaaattatatgaattagt

SEQ ID NO: 591609 - DNA, 582 bp, Homo sapiens
aaatcaaataaaagtaaatgaattattatttagacatccacttatggtttgggtatatattttgacagtccatgagaaaaattcctccaagggtcttcacttccagacataaaatcactttgttgtttttctaaaagctatttttaaaaamatcagcatctttttaaattctcccatctataagttggcaaaaatatctgttgaggtttgtaagcaactttaacattttaaataataaatgtaatatttagggacaatttaatttagtgactcaaggcatctaatatttggtatcagtatatgaatattaacaaacatttagcccttttatttatagtatttttatagtaaaacaatttctactttctattatgcttcttgttctgtgatagtttactatttctgaaactttattttttacaaaatttcaagttgagtctaaaaaaattatattttgttgttttgaaaaatacatagcctaaaactttacatgctaacagttgagttttatcagtgttatttttactaaacctaatcactataaaatagctatatcttgtgtatgttaaaaatgtgaaataa

SEQ ID NO: 591610 - DNA, 454 bp, Homo sapiens
atatgaattagtagcaactattaagatgctttgaacattcccttaggtggacgagaacatgtgagcaagtactagcacagtggtagatgctttgtaaattgctcttactttcctaatgattgacaggctaatagctaaataactaagatawtataagcactttcttagaatttagagatccacttaaaagacaggttttcattaggaatttctgtactttaattcacatttccataaaaaaattcctcattgcaagaaccactgcacctattatatgaaaaaactcaagagaaaacaatcaggtgaccattacctctaaaacatctgatttgatttagttatcctataggaatcaagtatcaggctttacaagatcctcttttttcaatgttgttttactgactaaaacaatgtttaacatgactaattcacgtttctttttgtgatttatttt

SEQ ID NO: 591611 - DNA, 454 bp, Homo sapiens
atatgaattagtagcaactattaagatgctttgaacattcccttaggtggacgagaacatgtgagcaagtactagcacagtggtagatgctttgtaaattgctcttactttcctaatgattgacaggctaatagctaaataactaagatattataagcactttcttagaatttagagatccacttaaaagacaggttttcattaggaatttctgtactttawttcacatttccataaaaaaattcctcattgcaagaaccactgcacctattatatgaaaaaactcaagagaaaacaatcaggtgaccattacctctaaaacatctgatttgatttagttatcctataggaatcaagtatcaggctttacaagatcctcttttttcaatgttgttttactgactaaaacaatgtttaacatgactaattcacgtttctttttgtgatttatttt

SEQ ID NO: 591612 - DNA, 369 bp, Homo sapiens
tttataagcttgccaagaaaagcaagaacgaagaaaggaaagaaggaagaaaaacaaatrgcaaaacagagcaatatttaaatgtggttatgattcagccaaccattacatttaatgataatgtgcctgtttgggaaagaaaatagaagaattaactgaatgccaaggggagggggaaggaacacaagaaaaaatcaaaacaaaataaaactgtgaaagataattaatgggaatagaaaaattatgtacaaaaagcattttatttggagagtaatttaggagatctttaggaatatattggctatattcaagttcctatacttaagtgctacacaataataattaaaggtaccagatttagtaaaggga

SEQ ID NO: 591613 - DNA, 617 bp, Homo sapiens
aagcttgccaagaaaagcaagaacgaagaaaggaaagaaggaagaaaaacaaatagcaaaacagagcaatatttaaatgtggttatgattcagccaaccattacatttaatgataatgtgcctgtttgggaaagaaaatagaagaattaactgaatgccaaggggagggggaaggaacacaagaaaaaatcaaaacaaaataaaactgtgaaagataattaatgggaatagaaaaattatgtacaaaaakcattttatttggagagtaatttaggagatctttaggaatatattggctatattcaagttcctatacttaagtgctacacaataataattaaaggtaccagatttagtaaagggattttgcaccatgaatttttttttcctgtaaagatacaaatatatctccttagtagaacagataacctcacagatttatgacactgttatatatcaatctatatttatttatttaaccaagcaatcttaatgttattttgctaaattgcttctaaatgtcccagtttctcagattccctttgtgtcatttaaaacatctatttgttatttattaattcaagttaatatctttaaaacctattcattttatattt

SEQ ID NO: 591614 - DNA, 552 bp, Homo sapiens
aatatttaaatgtggttatgattcagccaaccattacatttaatgataatgtgcctgtttgggaaagaaaatagaagaattaactgaatgccaaggggagggggaaggaacacaagaaaaaatcaaaacaaaataaaactgtgaaagataattaatgggaatagaaaaattatgtacaaaaagcattttatttggagagtaatttaggagatctttaggaatatattggctatattcaagttcctatacttaagtgctacacaataataattaaaggtaccagatttagtaaagggattttgcaccatgaatttttttttcctgtaaagatacaaatatatctccttagtagaacagataacctcacagatttatgacactgttatatatcaatctatatttatttatttaaccaagcaatcttaatgttattttgctaaattgcttctaaatgtcccagtttctcagattccctttgtgtcatttaaaacatctatttgttatttattaattcaagttaatayctttaaaacctattcattttatatttgt

SEQ ID NO: 591615 - DNA, 602 bp, Homo sapiens
aaattatgtacaaaaagcattttatttggagagtaatttaggagatctttaggaatatattggctatattcaagttcctatacttaagtgctacacaataataattaaaggtaccagatttagtaaagggattttgcaccatgaatttttttttcctgtaaagatacaaatatatctccttagtagaacagataacctcacagatttatgacactgttatatatcaatctatatttatttatttaaccaagcaatcttaatgttattttgctaaattgcttctaaatgtcccagtttctcagattccctttgtgtcatttaaaacatctatttgttatttattaattcaagttaatatctttaaaacctattcattttatatttgtctgagagctatgattttaagcttctaaaaattatattttaatagaaatcagggactagttacctttaatctgggggagatactacrtattttaaagcctgaagtcaatgtctagacaaaagtttctgcttaacatcaaagggtatgcaacatttgctgtggctctcaaatattaagaaaggaaaacataactgggaatttgtcactagcactttat

SEQ ID NO: 591616 - DNA, 602 bp, Homo sapiens
aaattatgtacaaaaagcattttatttggagagtaatttaggagatctttaggaatatattggctatattcaagttcctatacttaagtgctacacaataataattaaaggtaccagatttagtaaagggattttgcaccatgaatttttttttcctgtaaagatacaaatatatctccttagtagaacagataacctcacagatttatgacactgttatatatcaatctatatttatttatttaaccaagcaatcttaatgttattttgctaaattgcttctaaatgtcccagtttctcagattccctttgtgtcatttaaaacatctatttgttatttattaattcaagttaatatctttaaaacctattcattttatatttgtctgagagctatgattttaagcttctaaaaattatattttaatagaaatcagggactagttacctttaatctgggggagatactacgtattttaaagcctgaagtcaatgtctagacaaaagtttctgcttaacatcaaagggtatgcaacatttgctgtggctctcaaatattaagaaaggaaaacayaactgggaatttgtcactagcactttat

SEQ ID NO: 591617 - DNA, 620 bp, Homo sapiens
cagtaatgtcatctaaccacaagtttgatacattttttaaagaaaaatttccaaaatactataactgagcaataggttaatacttcataaattaaaatatttaaatattcaatctttctgagtggatatttgctgcatatctcataacttggcctaattctgtaattgggatgagaactacccaattttattggtaacctcttttctgctctgcaactttggaaatactatggaggactccaaattcatttgagacaaaaatattaaaaatgtaacccccgattaggatttcagttccaaagctctccttggagggatatagagctggagaaaatcacatttattttttgtctccttaatattgatatataaaatcaggttaaaattagtatcaaaatgggaagcctgcattgtaaaccggctggaataatacactctgcaatatgaaggaaaaaggaaaaatttagttgatttatttacctarctataattttttaaagaattttaagtttctaataaatttaactataaatttttaattttctatctttcatttagtaccatctatataaacttttccaggctacttctctgaatcacctggcaaaatcttataattt

SEQ ID NO: 591618 - DNA, 462 bp, Homo sapiens
gaatactatacacagcgctgagaatttttgggtctacaaaattttaagaaarcacactcatggattcattgaacaactgtttttaaagtaacaaagaaagaaaaaagaaaacactaaaaaagacaagtgtgagaagcaagtggcaactgtaaacctgttaaatgtaagggtaaatctaaataagcattaattatttaaaaatgtgaggtcaggagtccagtcccacctgggtaacaaagtgaggcatgagttacaattaaaatactagaaaagtattgaccatttcaattaaatgtttctttcaaatcactaattattttcatgttccaaaatataaaggttaattttttattctcattttattgatctatcagtagtctctttttctttaattaaaaaacaaacaaacaaaaacacataaacaaacaaacaaacaaaaccagtttttttctttggcttcca

SEQ ID NO: 591619 - DNA, 568 bp, Homo sapiens
gatcattttcctttgaaatttgtcttttgagatttctttagaaggtgcttttggatgataaattttctgttattctttgtctaaaatgtcattattttgactyatttataaaaggagtttttgtgtttcataaacctctaatgtatagaagtgtgtctaaactcattgaggatattttccaaattttttcctactttttattgctgttgataagaagtcagtgttggtattttgacatttaagttatgtgtcattttgttgtggtagttctgaagatcttccctctgttttatattctccttcacctttcataaatgtactttatatttatttggtaataaattttgaacatatactatgctataaagataatctaggccctttggttacgtcttgtaaataaaatcaacaaaatctgttttgagattatattgtaatataagatacccaaagtaaataggatgtgtaccatatgtttgaaggtggtaaatacaatgagaaaaatagatcaggtcaggaagaatgaagatgattgaaggtacggttatgataaaaacttaggtgtgcc

SEQ ID NO: 591620 - DNA, 568 bp, Homo sapiens
gatcattttcctttgaaatttgtcttttgagatttctttagaaggtgcttttggatgataaattttctgttattctttgtctaaaatgtcattattttgacttatttataaaaggagtttttgtgtttcataaacctctaatgtatagaagtgtgtctaaactcattgaggatattttccaaattttttcctactttttattgctgttgataagaagtcagtgttggtattttgacatttaagttatgtgtcattttgttgtggtagttctgaagatcttccctctgttttatattctccttcacctttcataaatgtactttatatttatttggtaataaattttgaacatatactatgctataaagataatctaggccctttggttacgtcttgtaaataaaatcaacaaaatctgttttgagattatattgtaatataagatacccaaagtaaataggatgtgtaccatatgtttgaaggtggtaaatacratgagaaaaatagatcaggtcaggaagaatgaagatgattgaaggtacggttatgataaaaacttaggtgtgcc

SEQ ID NO: 591621 - DNA, 605 bp, Homo sapiens
aaacatggcctcatccttatcaggaccagagaatgctctcaaggtaaaaccttaattttcataaaattgttgtcttcttgcctgatcattgtgacactaaagcaagatttttttaatgtttcatccaacttttaagaattattttagtggtaggactgagccaggtttctaatccacactactgcagataaaaaaatgacaaaaggtaactttcaaaaatagaggccgggcgtggtggctcacgcctgtaatcccagcactttgggaggccaagggggttagatcaccgggtcaggaaattgagactctcctggctaacacrgtgaaaccccgcctctactaaaaatacaaaaaaaattagccggacgtggtgtcgggtgcctgtagtcccagctacttgggaggctgaggcaggagaatggtgtgaacccacaaggtggagcttgcagtgagccgagatcgcgccacaggactccagcctgggcgacagagagagactccatctcaaaaaaaaaaaaaatagaaattcgtctttttccatgaaagatttattatacattctaaataaaatggagatagaaagttagcatttgaactttaaagtt

SEQ ID NO: 591622 - DNA, 589 bp, Homo sapiens
cctcagacacaaaaatctacagatgctcaagacccttccataaaatgatgtataatagtattttatacacctacatccacactgtcacatactttaaatcatctctagatttcttatgataccaagtacaatgtaaatgttatgtagttagttatagtgtgttctttaggggataatgacaaggcagaattccatatgtgttcactttttcataaatgtttttccaaatatttttgatccatgggtggttgaatccacacatgcagaacctatggatatggagggtccactgtacttttttctatcctcctaactacatattggtttctatttttgtctttattaaatcttaaattgtagtcatactacaaattcgatcttttctattgtttcatttttttctatttcttgaacagtattctgtttctgtttcaatgcattagtatccacttatttatgtttaccaaaatattacacagtcaaataattcaggaagactttgaaaatttaaagtcaacagatttgtattagcstcaattatatcatctgtaataaatcagattatcctgtcattaggattaaatattaa

SEQ ID NO: 591623 - DNA, 612 bp, Homo sapiens
gttgctactgtaatatggggagaaaccacaaaccatacctttaagagatagcaacttaatcaatacatattgtgtgtcctctgactactccactgarcagaatttccctgtctctctccctctcttagtgactccaatttgtgagacacaacaatagtgaaattaggccagttaataaccttataatgggctctaagtgttcaagtgtaagaaagagtttcatgtgtgttactttaaatcaaaagctggaaatacttaagcctagcaaggaagacatgtcaaaagccaacttagatctaaagctagaactcttgtttttaacagttagccaagttgtgaatgcaaagaaaaaattcttgaaggaaaccaaaacttctactccagtgaacacaggaacagtaagaaagagaaacagccttattgctgagacttggaatgttttagtggtttggccagaaagtcaaatcagccacaacattatcttcagccaaaacgcaatctagaccaaagctctaatgctcttcaattctatgaaggctgagagaggtaagagaaaactgcagaagaaaagttggaagctgacaaaggttggttcttaaggtggaaggaaag

SEQ ID NO: 591624 - DNA, 419 bp, Homo sapiens
aagctgctcagtctatggcattttgttatagcagcccatgctaatgaatacagatgaccgtgagtctgcagaccttcctaggaaattattgagtccttcattgaatactaaactgtgaatacatgagagaaaataactgaagcctggggtaaaatgccaacacaaagkgtttgaagaacaattctcaaagctcagaaagctctgcaaatattattgttgccacaaaccaaagtagaagacagggtaatatatgagctattaggtagaatctttggaagaatcctgcttttgtgatggaactcactcattcctaaacctaaagcaactctacatcttctctaagaaaattttatagcaatctctaaaagcatcaaactgattccaaataatttaactgtgtttgagaacaaaatacaaat

SEQ ID NO: 591625 - DNA, 548 bp, Homo sapiens
tactaaactgtgaatacatgagagaaaataactgaagcctggggtaaaatgccaacacaaagtgtttgaagaacaattctcaaagctcagaaagctctgcaaatattattgttgccacaaaccaaagtagaagacagggtaatatatgagctattaggtagaatctttggaagaatcctgcttttgtgatggaactcactcattcctaaacctaaagcaactctacatcttctctaagaaaattttatagcaatctctaaaagcatcaaactgattccaaataatttaactgtgtttgagaacaaaatacaaatatacaaaaggaattcaacaaaatccrtcacataacaatatagaattcacaatatctggttttgatgaacataataattagtgttgaaacatgttaattcaggtgttaaaaatatgctttattttttcaaataagatgggaaaatatgtatattgtgagaaaataaaaatggaagaaataaaaacaagcagactcctaaaacagaaaaaataagtatattagattaaaaatgtat

SEQ ID NO: 591626 - DNA, 548 bp, Homo sapiens
tactaaactgtgaatacatgagagaaaataactgaagcctggggtaaaatgccaacacaaagtgtttgaagaacaattctcaaagctcagaaagctctgcaaatattattgttgccacaaaccaaagtagaagacagggtaatatatgagctattaggtagaatctttggaagaatcctgcttttgtgatggaactcactcattcctaaacctaaagcaactctacatcttctctaagaaaattttatagcaatctctaaaagcatcaaactgattccaaataatttaactgtgtttgagaacaaaatacaaatatacaaaaggaattcaacaaaatccgtcacataacaatatagaattcacaatatctggttttgatgaacataataattagtgttgaaacatgttaattcaggtgttaaaaatatgctttattttttcaaataagatgggaaaatatgtatattrtgagaaaataaaaatggaagaaataaaaacaagcagactcctaaaacagaaaaaataagtatattagattaaaaatgtat

SEQ ID NO: 591627 - DNA, 478 bp, Homo sapiens
tgctcatctcaacgttgtctcagcactgaacaaaatctaaagaatttcattgtcagccatcctccattgtcatttataagaaagattcctaaggcagaagtaaaattttatgagatgtatatgtgtgtctgcagaaaaaaactggcaatgtattatactgcatatcaagtgatatactattatttgaaagtaggctgtgawgagttaagtatttatattttaaaactgaaagtagaagttttatattttaaaccttaaaacacaagtatttatattttaaaccttaaagcagaacctataaaagaagtacattagtaaaccaatagtagaaataacataaaataatgaagtacatatttaactaatctacaaaatgtaaaaaaaggataaataattgaacaaggagcatataagataaatagaaaacatagcaagaaggtatatttaaacctaagcttattcataatcacattacatt

SEQ ID NO: 591628 - DNA, 478 bp, Homo sapiens
tgctcatctcaacgttgtctcagcactgaacaaaatctaaagaatttcattgtcagccatcctccattgtcatttataagaaagattcctaaggcagaagtaaaattttatgagatgtatatgtgtgtctgcagaaaaaaactggcaatgtattatactgcatatcaagtgatatactattatttgaaagtaggctgtgaagagttaagtatttatattttaaaactkaaagtagaagttttatattttaaaccttaaaacacaagtatttatattttaaaccttaaagcagaacctataaaagaagtacattagtaaaccaatagtagaaataacataaaataatgaagtacatatttaactaatctacaaaatgtaaaaaaaggataaataattgaacaaggagcatataagataaatagaaaacatagcaagaaggtatatttaaacctaagcttattcataatcacattacatt

SEQ ID NO: 591629 - DNA, 581 bp, Homo sapiens
tatatatttgagatcgagagtgcaagacttgtgtcttgtgtgacccgagagagtgcctcattaagtttttcaccagaggtaatttgctcatctcaacgttgtctcagcactgaacaaaatctaaagaatttcattgtcagccatcctccattgtcatttataagaaagattcctaaggcagaagtaaaattttatgagatgtatatgtgtgtctgcagaaaaaaactggcaatgtattatactgcatatcaagtgatatactattatttgaaagtaggctgtgaagagttaagtatttatattttaaaactgaaagtagaagttttatattttaaaccttaaaacasaagtatttatattttaaaccttaaagcagaacctataaaagaagtacattagtaaaccaatagtagaaataacataaaataatgaagtacatatttaactaatctacaaaatgtaaaaaaaggataaataattgaacaaggagcatataagataaatagaaaacatagcaagaaggtatatttaaacctaagcttattcataatcacattacattacatgtaaatcattcatat

SEQ ID NO: 591630 - DNA, 604 bp, Homo sapiens
atctacaaaatgtaaaaaaaggataaataattgaacaaggagcatataagataaatagaaaacatagcaagaaggtatatttaaacctaagcttattcataatcacattacattacatgtaaatcattcatatacatcaatgaaaaatcagaaatccaattctgtctaccaaaattctactgtaaatataaatacatagatatctgtgtgtgtagtgcaaacaaaaatttatagaaaactagagttactatattaatgtcaaactwaatatatttcagaacgaaatatattaccagtgatagaaaatatactcactgattataaaggggtcaatttattaaggtaactaaacaatattaacacaaagaaactatacatgttaaggtgatgaatatcagaatcctgatttgataattgtacatcgtatgcttgtatgcatatgtaccccacacatatgtgcaactattatgtatccataataattaaaaattttttagaaataaagaattagataaatgtaatagtgccatgtgtttatgttagaaaagaaaaaagaatctaatcagttcctaaagcaaattaaacccaaacaaaacagaatgct

SEQ ID NO: 591631 - DNA, 611 bp, Homo sapiens
agaacaaaaatcaataaaaattgaaagaacaccaaaatggaatatcaataaaataaaaagctaatttattaaaaaatgaaaaaattctagctatactcaacaaaaaagagaaaaaatactaaatactaaagccagtaatgaaagactgtcactaattatactatagttataaaatgatagtaagcacacaatgtttaaactttatgcaaatacattttaaaagtttggtaaacggacacattacttgagagaaaagaggttacaaaattcacttaaaaataaagaaacaccatgaataatcctgcatctattaaatacattaaatctataatttgaaactcacacgcaaaataattccaggtcaggaaggtttcactcttgtattctcacaatgtttaaagaataaatagtaacaattctatgcaaagtctttcagaaataaaagaagaagcaaccctaacagtacattatatgaggtacagattacccataaaggaaaaaaataggtagagattaacagaaaactacagacctacattttgatttraaaaatttgtataggattattttattaaaagtagaaaagcatttgatgacattttacacatatt

SEQ ID NO: 591632 - DNA, 580 bp, Homo sapiens
tgtattctcacaatgtttaaagaataaatagtaacaattctatgcaaagtctttcagaaataaaagaagaagcaaccctaacagtacattatatgaggtacagattacccataaaggaaaaaaataggtagagattaacagaaaactacagacctacattttgatttaaaaaatttgtataggattattttattaaaagtagaaaagcatttgatgacattttacacatattcataataaagacttacagaaaagtaggcaagagaaacaaattatttcaaaagtaataaacatatataaaaatagttaatatagtgaaataccaaatggttcctcctactataagaaagaatgcaaaaatatccactatgaaccattctgttcgatacttagaaaactgcaatacagtgctgagagacattaakgcagacctaaataaatggagagataaaccaagttcaataatttgaatgctttgtagtgttaagaaggtagttctactaaattgatttctagattaattgcaatatcagtccagatctcagtaggctttttatataaataacaaatattttttcaa

SEQ ID NO: 591633 - DNA, 520 bp, Homo sapiens
tgctagatgctggttaatatataaaggaaagaggcttaattgactcagaattctgcaggtctggggaggcctcagaaaacttacartcatgccagaaggggaagcaaaccatgtccttctgcacattgtggcaggaaggaaaagtgcagagtgaagggggtaaaagctttttataaaaccaccaaatctcatgagaactcactcactatcatgagaacaacatgggagaaccaccccatgatctaatcacctcccggagatccctcccccaacacatggggattataaatctgattataattcaagatgagattttgtgtgggaatggagctaaatcatatcactagaatagataatatatataatacataagtaaattttatagtatactagcagatggttaattctactaacaaatacagaaaggtaaaggacgaaagggatctcttgcttaagaaagagatacacatttatatgtgttgattttaaggaatcaacaaggaatgattagcaagacttg

SEQ ID NO: 591634 - DNA, 520 bp, Homo sapiens
tgctagatgctggttaatatataaaggaaagaggcttaattgactcagaattctgcaggtctggggaggcctcagaaaacttacaatcatgccagaaggggaagcaaaccatgtccttctgcacattgtggcaggaaggaaaagtgcagagtgaagggggtaaaagctttttataaaaccaccaaatctcatgagaactcactcactatcatgagaacaacatgggagaaccaccccatgatctaatcacctcccggagatccctcccccaacacatggggattataaatctgattataattcaagatgagattttgtgtgggaatggagctaaatcatatcactagaatagataatatatataatacataagtaaattttatagtatactagcagatggttaattctactaacaaatacagaaaggtaaargacgaaagggatctcttgcttaagaaagagatacacatttatatgtgttgattttaaggaatcaacaaggaatgattagcaagacttg

SEQ ID NO: 591635 - DNA, 520 bp, Homo sapiens
tgctagatgctggttaatatataaaggaaagaggcttaattgactcagaattctgcaggtctggggaggcctcagaaaacttacaatcatgccagaaggggaagcaaaccatgtccttctgcacattgtggcaggaaggaaaagtgcagagtgaagggggtaaaagctttttataaaaccaccaaatctcatgagaactcactcactatcatgagaacaacatgggagaaccaccccatgatctaatcacctcccggagatccctcccccaacacatggggattataaatctgattataattcaagatgagattttgtgtgggaatggagctaaatcatatcactagaatagataatatatataatacataagtaaattttatagtatactagcagatggttaattctactaacaaatacagaaaggtaaaggacgaaagggatctcttgcttaagaaagrgatacacatttatatgtgttgattttaaggaatcaacaaggaatgattagcaagacttg

SEQ ID NO: 591636 - DNA, 478 bp, Homo sapiens
aacctcacaatcatggcagatggccaggaagagcaagtcacatcttacatggatggtggcaggcaaagagagagcttgttcagaaaaactccctcttctttaaccataagatcttgtggaacttattcactatcatgaggatgggatggcctgccaccatgattcaattatctcccacctggtccctcccacaacacatgggaattcaagatgagatgtaggtggggataaagccataccatatcaccatctctgtgcaaatgctctctctcttctatttagctctgcaattctagctaaattttcctttctaagccccaatcttcaatttctcaatatacagggagagttatcctttctttggatwatcctttcactgtgtcttctggaaactgagagaaagcttgggataagtcagattttattttttcttttgtcagggatcagcatcctcagcttcttgtcaatgattaaaaat

SEQ ID NO: 591637 - DNA, 518 bp, Homo sapiens
ttacagtatatttctagcaaccatctagaaataggaaatagtatcagtaccatattgtcagatgacagtaggattaaataaaaccggagtgactaagtaactgaccctttattcaytgcatttaaaagaaaagtatgtcttggagttgaattaagtaacctgggatagatctctaaaaatctgtaagtgaagcaggggtcacatattaacatgttatactggaaaaagtgtctaagaaaggaatttggcactggaatctacatagggaacaattaaattatctataaatattttttactttatcctgaaaaaggtatagtaccaaaaactccagaaacaattctaggccctccataatacatgtgggctctaagataagagtggaaatagaggcccacataacatgtgtataaatatcttaacattataaagcaaactactccaataatctggcttgcatttctgcctaggttctcaatggcccacttcctgaccaccaccctctggagtccaaagga

SEQ ID NO: 591638 - DNA, 518 bp, Homo sapiens
ttacagtatatttctagcaaccatctagaaataggaaatagtatcagtaccatattgtcagatgacagtaggattaaataaaaccggagtgactaagtaactgaccctttattcactgcatttaaaagaaaagtatgtcttggagttgaattaagtaacctgggatagatctctaaaaatctgtaagtgaagcaggggtcacatattaacatgttatactggaaaaagtgtctaagaaaggaatttggcactggaatctacatagggaacaattaaattatctataaatattttttactttatcctgaaaaaggtatagtaccaaaaactccagaaacaattctaggccctccataatacatgtgggctctaagataagagtggaaatagaggcccacataacatgtgtataaatatcttaacattataaagcaaactactccaataatctggcytgcatttctgcctaggttctcaatggcccacttcctgaccaccaccctctggagtccaaagga

SEQ ID NO: 591639 - DNA, 420 bp, Homo sapiens
gcccacttcctgaccaccaccctctggagtccaaaggagatttgcttattcccartattattcctgcaggtcagccaaagaggagcaaagagtcatctacctcaatcatgttcaggaaatgatcaggtcaagatgtggagtgagcaagcttttctcttttgtgccacattttctgacccagtatttcaaggtacttctaatacacaaagactattacaagagggaggaaggaaggaaggtcagttatctgaagaactgaggctagctagaagcccaaatttggtgtgatgggggccatcaaatctcaacagaaacagctttctctctctgttatcctggacagggcttgtgattttttttttttttcctccactcagccatagactctcagctacatatcctctagcctggagtagtcaa

SEQ ID NO: 591640 - DNA, 420 bp, Homo sapiens
gcccacttcctgaccaccaccctctggagtccaaaggagatttgcttattcccagtrttattcctgcaggtcagccaaagaggagcaaagagtcatctacctcaatcatgttcaggaaatgatcaggtcaagatgtggagtgagcaagcttttctcttttgtgccacattttctgacccagtatttcaaggtacttctaatacacaaagactattacaagagggaggaaggaaggaaggtcagttatctgaagaactgaggctagctagaagcccaaatttggtgtgatgggggccatcaaatctcaacagaaacagctttctctctctgttatcctggacagggcttgtgattttttttttttttcctccactcagccatagactctcagctacatatcctctagcctggagtagtcaa

SEQ ID NO: 591641 - DNA, 420 bp, Homo sapiens
gcccacttcctgaccaccaccctctggagtccaaaggagatttgcttattcccagtattattcctgcaggtcagccaaagaggagcaaagagtcatctacctcaatcatgttcaggaaatgatcaggtcaagatgtggagtgagcmagcttttctcttttgtgccacattttctgacccagtatttcaaggtacttctaatacacaaagactattacaagagggaggaaggaaggaaggtcagttatctgaagaactgaggctagctagaagcccaaatttggtgtgatgggggccatcaaatctcaacagaaacagctttctctctctgttatcctggacagggcttgtgattttttttttttttcctccactcagccatagactctcagctacatatcctctagcctggagtagtcaa

SEQ ID NO: 591642 - DNA, 457 bp, Homo sapiens
ctgttcttgtggtagtaaataagtttcacgagatctgctggtttyataaacgggagttcccctgcacaagctctcttgcctgccaccacgtgggatgcgacattgcttctcattcgctttccaccatgattttgagggctccccagccatgtggaactacaagtcagttaaacgtcttccttttataaattacccagtctcagctatgtctttattagcagtgtgaggacaaactaatacaacgggtgtccacattctagtccccagaatttgtgaatatgttagttgcatggcaaaggaaaattgaaattgtagactaaactaaggttgttcatcagttgatattaagataggaaagttattctggattatcctgatgggaccaaaataatcagaaggacatttacaagtggaaggaggcagaagaagttagagtgatgagatgggaactcacaaa

SEQ ID NO: 591643 - DNA, 568 bp, Homo sapiens
aattccatgtgaagaatggggtcaggtagagagaatttaatcatggggacggtttatcccatgctgttcttgtggtagtaaataagtttcacgagatctgctggttttataaacgggagttcccctgcacaagctctcttgcctgccaccacgtgggatgcgacattgcttctcattcgctttccaccatgattttgagggctccccagccatgtggaactacaagtcagttaaacgtcttccttttataaattacccagtctcagctatgtctttattagcagtgtgaggacaaactaatacarcgggtgtccacattctagtccccagaatttgtgaatatgttagttgcatggcaaaggaaaattgaaattgtagactaaactaaggttgttcatcagttgatattaagataggaaagttattctggattatcctgatgggaccaaaataatcagaaggacatttacaagtggaaggaggcagaagaagttagagtgatgagatgggaactcacaaactgccattgctggccctttaaaacaatttaaatcttgttttatgacac

SEQ ID NO: 591644 - DNA, 606 bp, Homo sapiens
catggcaaaggaaaattgaaattgtagactaaactaaggttgttcatcagttgatattaagataggaaagttattctggattatcctgatgggaccaaaataatcagaaggacatttacaagtggaaggaggcagaagaagttagagtgatgagatgggaactcacaaactgccattgctggccctttaaaacaatttaaatcttgttttatgacacataattattgtacatatttatgggatacagtgtgatgtttcaacacgtgtatgtatagtttaaatattgaatcaggatattcaacatattcttcacttcatacatctttgatatctttatggtgagagaattcaaaaatcctctcttctagctattttgaaatatacaatacaatattgctaaccatagtcaccctgactccattcctcatttyaaaaatggaggaagggacagtgattaaaggaatgcaagcagcctctgggctgtggaaaaccaaaggaaacaaactcttcccacagaccacccccaagaaaaaaccaaccctggcagtatcttcgttttaacatggtgggatcaagtcagatttctgtcttacagaactgtaacat

SEQ ID NO: 591645 - DNA, 606 bp, Homo sapiens
catggcaaaggaaaattgaaattgtagactaaactaaggttgttcatcagttgatattaagataggaaagttattctggattatcctgatgggaccaaaataatcagaaggacatttacaagtggaaggaggcagaagaagttagagtgatgagatgggaactcacaaactgccattgctggccctttaaaacaatttaaatcttgttttatgacacataattattgtacatatttatgggatacagtgtgatgtttcaacacgtgtatgtatagtttaaatattgaatcaggatattcaacatattcttcacttcatacatctttgatatctttatggtgagagaattcaaaaatcctctcttctagctattttgaaatatacaatacaatattgctaaccatagtcaccctgactccattcctcattttaaaaatggaggaagggacagtgattaaaggaatgcaagcagcctctgggctgtggaaaaccaaaggaaacraactcttcccacagaccacccccaagaaaaaaccaaccctggcagtatcttcgttttaacatggtgggatcaagtcagatttctgtcttacagaactgtaacat

SEQ ID NO: 591646 - DNA, 598 bp, Homo sapiens
ctaatcaactgttctttatccttgatcttaaaagttctgtggttaaagtttcccagaataggaggggaaggagatccagttctaattgctatactgtattttcccagtcttcccccttttcagctccctgccttgcctacactttttgagtaaatagttcctctgatatttaagcccctctagattttttccaaaggagtaaattatgcttattgatctccccttccaggcacttgctatgcagcttttcagccctctgaactcctccatatgttttctatcttycaaaagatattctaagaaatattgaccacacttgcacttgttcactgctgctttatcttctgatagctttgttcttgcagggataaatggttttagctatagtactcttactgagttaggttttaggagaaaacagagataaatgtgtccaacaaatcaagtttaacctaaagtccactcacccttttacatcttcagattttctaaggtagtcattccattgctttacaggttgtaaacaccatgtgcagaccaataactcagaaatttgtgttttcatcctggattttactgaagaattccagattcatat

SEQ ID NO: 591647 - DNA, 598 bp, Homo sapiens
ctaatcaactgttctttatccttgatcttaaaagttctgtggttaaagtttcccagaataggaggggaaggagatccagttctaattgctatactgtattttcccagtcttcccccttttcagctccctgccttgcctacactttttgagtaaatagttcctctgatatttaagcccctctagattttttccaaaggagtaaattatgcttattgatctccccttccaggcacttgctatgcagcttttcagccctctgaactcctccatatgttttctatcttccaaaagatattctaagaaatattgaccacacttgcacttgttcactgctgctttatcttctgatagctttgttcttgcagggataaatggttttagctatagtactcttactgagttaggttttaggagaaaacagagataaatgtgtccaacaaatcaagtttaacctaaagtccactcacccttttacatcttcagattttctaaggtagtcattccattgctttrcaggttgtaaacaccatgtgcagaccaataactcagaaatttgtgttttcatcctggattttactgaagaattccagattcatat

SEQ ID NO: 591648 - DNA, 598 bp, Homo sapiens
ctaatcaactgttctttatccttgatcttaaaagttctgtggttaaagtttcccagaataggaggggaaggagatccagttctaattgctatactgtattttcccagtcttcccccttttcagctccctgccttgcctacactttttgagtaaatagttcctctgatatttaagcccctctagattttttccaaaggagtaaattatgcttattgatctccccttccaggcacttgctatgcagcttttcagccctctgaactcctccatatgttttctatcttccaaaagatattctaagaaatattgaccacacttgcacttgttcactgctgctttatcttctgatagctttgttcttgcagggataaatggttttagctatagtactcttactgagttaggttttaggagaaaacagagataaatgtgtccaacaaatcaagtttaacctaaagtccactcacccttttacatcttcagattttctaaggtagtcattccattgctttacaggttgtaaacaccatgtgcagrccaataactcagaaatttgtgttttcatcctggattttactgaagaattccagattcatat

SEQ ID NO: 591649 - DNA, 630 bp, Homo sapiens
tatcatcttccagaaaggatgagatttttctctattaatttattttccctattctggcttcttaacatgttttcatttccatgaactcttgattgttttctattctgacactaatagatttagtgctaatctcatttttcagctagcctactaacaaacaaaacaacctcagacaaaggtacttagaagtcttgcaccaactgaattatcaggtggtaatggttttcagacatatataaagaattttgatgagtataaccttacttattttagctgtcccattgaaaatgccatgtctttttggcaaaaacaagcaaacaaacatatagcatgttcagcgaagttgtaatatatgtctaacattgaaggttgccattctatttacattccaagyaaaaaaaaagaaagtgttataagtaaagtccaagtggagtagctacaatagctgttatttattaaatttattttaaagaagaaaacataaggctacacagctatagtgaaacttctaaattgatttcaatatcgtataacatagaactaattatggttttaagtatatatatatatttttggctttcaactacataacatatttgtcaattgctatctagtaaaacttagacattg

SEQ ID NO: 591650 - DNA, 569 bp, Homo sapiens
ttgggaggggacacaaagccacaatttgagtggggacccagagccaaaccttagcactgttgtacattagattgctagacttctttatccaatttaactacaagtttgtactctttgacttacttctccccgtttccttccctttcttgtccctggtacccaccattctactctctgtttctatgtgttgaactttttttttgtagattccacatgcaagtggatcacctcaaaccaatagaatggctattatcaggaagtcatcagataacaagggttggcgagaatgtagagaaaggggaacccttgtgccctgttggaagaaatgtaaattcgtacagccattatgaaaaacaataaggaggtrcctcaaaatattaaaatataattctataattattttatgatctggcaatgccctttcttgggtatatactcaaaggaaatgaaagcagtgcctcaaaggggtatctgcacccccatgatcacaggaatgttattcataatagccaagacatggagacagcctaagtgtccattggctgatgaatggacacaaaaatccgctc

SEQ ID NO: 591651 - DNA, 465 bp, Homo sapiens
tagtgatttaactgaaagatggccagatttatagaaggttagaatcaccctatccataggaaatggggtgaaaagggaatttmatcaccttaaccaaagttagttagtcctgttactggtcctgaacccccagaattatggaagcttactgtggccttgcaccacattagaatttggtctggaaatcaagctataggaacaagagatcgtaagccatattatactatcaacctaaattccagtctgacaattcctttgcaaagttgtgtaaaaccctcttatatgctagttgtaggaaacatagttattaaaccagattcccaaactataacctgtgaaaattgtagattgtttacttacattgattcaacttttaattggcagcaccatattctacaagtgagagcaagagagggcgtgtggatccctgtgtccacggaccacccgtgggaggcttccccatct

SEQ ID NO: 591652 - DNA, 465 bp, Homo sapiens
tagtgatttaactgaaagatggccagatttatagaaggttagaatcaccctatccataggaaatggggtgaaaagggaatttaatcaccttaaccaaagttagttagtcctgttactggtcctgaacmcccagaattatggaagcttactgtggccttgcaccacattagaatttggtctggaaatcaagctataggaacaagagatcgtaagccatattatactatcaacctaaattccagtctgacaattcctttgcaaagttgtgtaaaaccctcttatatgctagttgtaggaaacatagttattaaaccagattcccaaactataacctgtgaaaattgtagattgtttacttacattgattcaacttttaattggcagcaccatattctacaagtgagagcaagagagggcgtgtggatccctgtgtccacggaccacccgtgggaggcttccccatct

SEQ ID NO: 591653 - DNA, 439 bp, Homo sapiens
aaatataggagtgcagacatctcttcaatatattgattttcttatttttgtttgttttgatacatacccagtagtagaattgctgtatccatacagtagttttgtagttttatttttagttttttgagaaatctccatactgttctccatcgtggctgtactgacttacattcccaccaacagkttatgagggttcacttttctccacatttttgcccattttaaaaattgtatcatttggttttttctattgaattgtttgagttaatctctcatcagatggattgtttgcaagtattttctcccactcggtaggttgtctcttcgcttcgttgatttctttgctgtgcagaagctttttagcttgatgtaatctcattagtctattttttcttttgtcatctgtgctcttgtggtcttaccaaaaaaatttttgccc

SEQ ID NO: 591654 - DNA, 638 bp, Homo sapiens
cataaaattacttgtaattcatgacatttcattacctaatagttgtgttagaaatgtatactctaggtaacatggacacaaaaatttgctttcaatatatgaaagaaactcaacctacactcagacagacacacatgtaaaacacatatatacctaaaagatagttaatgtttaccatctgatgtaccaaatacaatatttctttctaattgtttgaaaaatagaatgctatttccttttcaaagcaaaatttctaatttgatattacatataactcagctgaaggaacttcatatgactataaaatttgctattagccttatataattagctttcttaatgaacagtcgaagcctaataaaacattcatctgtatttttaaagtgtacgtgtgcaaccactggtttcaaaatgacaatttcttaatagaacaaggatttaatttcttcaaaacattaaygctggcctcactgaatgtttgagttgagagtaactggattggaaaattggagtaagtttgtttatgggactgttcactttctctggcttcctggaaagagtttatattaacttgcaaattatttcttgctgcctcattttcttcttatttcttcttattccttaatttttatccctaa

SEQ ID NO: 591655 - DNA, 543 bp, Homo sapiens
  misc_feature 505: n = A,T,C or G
gttttgatttgtttccaggattttttcaagatttagagctccttttagcagttcttgtagtggtggtttggtaatggtgaattctctcagcatttgtttgtctgaaaatgactgtatctttccttcatatatgatgcttagttttgctggatacaaaattattgactgaaaattgttttgtttgaggaagctgaagatagggccccaattctttctagcttgtagagtttctgctgagaaatctgctgttaatctgataggttttcctttataggttacctggtgcttctgtctcacagcttttaagattctttccttcatcttgactttggataacctgatgacaatgtgcctaggcraagatctttttgcgatgaatttccaagggttctttgtgcttcttgtatttggatgtctaggtctctagcaaggccagggaagttttcctcaattattcccctgaatatgttttccaagcttttagaattctcttcttcctcaggancactgataattcttaggtttgggcatttaacataatcc

SEQ ID NO: 591656 - DNA, 581 bp, Homo sapiens
gaattttctatgtgatttttagtaggaggtaggctacttttgaaccattagagatggtttataaamacctgtttattctttgtctgaattcaacactcatccttttctttttcatatactattgctaaatatatgccaatctttgttcttttaaaaacatttgtataaatttaaggtatacaagtacagttttgttacatggatatattatgtcgtgctgaagtctgggctttcagggtaaccattacctggatagtgtacattgtacctattaaataatttctcatccctcaccctccacccttccagccttccaagtctccaaagtctgttattccacattctatgtcccggtgtacacatcatatagtttccaattacaagtaaaaacgtggtatttgactgtttctgagttgtttcacttaagataatggcctccagttccactcatgttgctgcaaaagacatgattttattctttttatggctgaatagtattccattgtgtgtgtgtctgcgtgtgtatggctgaatagtattccattgtgtgtgtgtgtgtgtgtgtgtgtgtgtgtgtgtgt

SEQ ID NO: 591657 - DNA, 645 bp, Homo sapiens
acattttattaaaatttttacatatttattttcattaatgaaataaggcaccaataatatttaatggccacatttaataaatagstgcaatttaacatgtctttaaatgtttgtttctctaaaaataatctttgttttcttctaaatacaaacctaatggataataataaacttagaaaaattgattaattatacaaatatatggtttgatagaagaaataagacctagtgttcaataaatcagtagggtgactatagtttacattaatctattgtacatttaaaaatagctagaatagaataatttgaatgtttctagcataaagaaaagacaaatatttaaggtgatggatatcccaaatatactgattcaatctttacaaatcatgcgaatgtattaaattatcaagtgtactccaaaaaaattaaataaaaaaattaacagcaagtacagtgaagaattcattttcataaacatatgttttaagaggtgaagattgttggttacaaaaatttgcaaagcatttgtattgaaatactggctttggaaatattctacctggtaattctgaactcagggtaaaaaaaaaaaaatgagaataaaatgctcttatgtgaccttatcacttctaaatatcactgcta

SEQ ID NO: 591658 - DNA, 563 bp, Homo sapiens
agtggttgacttctgctaaaaacattttgaaaagaggaaatggrgcctttctactctttgacatacaaagcacattgctgtctaatggattccacagcaaaagcaaaatccaaacaaagcagcatcttttttctctaacctacatgcaatgtaagtgagattccaagtatgcaaatggtgggaggaaagaaatgcattttcactaccccagttattacatatggttgagaatatgaatagtaattgcccctgaattggaggattaacgtgcactactttttttcttctttttaaatattcgagtcagtctgatttttatttactatttctttgattctttttctgtaaaaagtagtattgccattagagtaaaaaatataagctccctctatccaggccagttgtctctttctagatgtcagtaagactgtctcgtgtctgtcataagctcagtttttaaagtaagccatgacttcatttattcttttagtccaagtgtgagtaaaattggtgacattttacagcaatttctgcaaagcggggcactccagaaccccagtttt

SEQ ID NO: 591659 - DNA, 549 bp, Homo sapiens
ttaatcagctgtaaaatgaagataataaaagtatctacctcataggattgttgtgaagattaaatgagtgtgtgcttttgcatgaatgtgcacatgagtgtatatgtatataaatgtatacacatgtgtatatgtgtatgcatatttttgtgtaaatatgtgtatgcatatacatatatattcatatatattttagaacatttcttgaaaatacttamtgcttggtaagtgggagctcttactatttgtaagtgtttatttcagggttcttaacaaaacaactatgaggttcttgctgtcctggagtttaccatctagtaggaacagcagagaataaatcattaaacaaataataattacaaaccatgtcaagaattgtaaaggaaatgaatgggctgaaacaacagagaacaacaaaggagaagccacctagaaagcatcttagagggggtgacatttaagctaaaacaagaagagaagaggaggaatgccagcatgcaaagggagaaggaggagactgttccacgcaaaggaaagcacgctagcaaa

SEQ ID NO: 591660 - DNA, 562 bp, Homo sapiens
gacataagacaaaaatttacttaactgctcctcccaccaacatttgactttctggtattctaccatttgtattcttatttctctctattttagaagagttggccttttacgtgattaagagttatgctatcacctttactacagatcccatctcttcccattactttgtaaacattacatttttttcttgatctttaactcatctcactttaccaaattcttaccatcacttaaaaaagtgttttcactattttatttaaaattgtggatacatgttatgtaaaaatgtatccagytccatctcaaatacagagatgtacacattaaaaaatatttttcaccttgacacaaacaaaaggaaatctcctgctaacttttgaatttgtttgcttttgcttctctaattcttttaattgtgatgttagggtgtcgattttagatctttcctgctttctcctgtgggaatttagtgctgtaaatttccatctaaacactgctttagctgtgtcccagagattctggtatgttgtgtctttgttctcattggtttcaaagaacttat

SEQ ID NO: 591661 - DNA, 507 bp, Homo sapiens
gtattggatgcatatgtatttaggatagttagctcttcttgttatgttgatcccttcatcctaagcaaaaaaaacaaagctggaggcagcacactacctgacttcaaactataaaacaaggctagagtaaccaaaagagcataaccaaaagaacatgatactgataccaaaacagatatatagaccaatggaacagaacaaaggcctcagaaataacaccacacatcaacaaccatttgatctttaaaaaacctgacaaaaacaagcaatggagagataattccctatttaataaatggtgttgggaaaactggctagccatatgcagaaaactgaaactggaccccttcgttacaccttatacaaaaattaactcaagatggattaaagacttaaacgtaagacctaaaaccataaaaaccctagaagaaaacctaggcaatacattcaggacataggcatgggcaaagacttcatgactaaamcaccaagagcaatgacaacaaa

SEQ ID NO: 591662 - DNA, 472 bp, Homo sapiens
catttattattatgtaatacccttctttgttcttttcggtcattgttggtttaacgcttattttgtctgaaataagaataacaactactgctcttttttgtttgcyctttgcttaatagatttttctccatccctttaccttgagcctatgggtgtccttgcatgtgaggtgggtcttttgaaggcagcatacaattgagtcttgtttcttttaccaacttgccactctgtgtcttttaagtatggcatttagcccatttatattcaaggttaacattgatattagtggatttgatcctgtcattgtgttgttagctggttgttatgtggacctgattgtgtaattgctttatagtgtaaatgttctatgtacttcagtatgtttttgtggtggccggttatggtcattcatttccatgtttagtactcccttaaagacatcttgtaaggaaggtgctggtggtaatgaatt

SEQ ID NO: 591663 - DNA, 472 bp, Homo sapiens
catttattattatgtaatacccttctttgttcttttcggtcattgttggtttaacgcttattttgtctgaaataagaataacaactactgctcttttttgtttgctctttgcttaatagatttttctccatccctttaccttgagcctatgggtgtccttgcatgtgaggtgggtcttttgaaggcagcatacaattgagtcttgtttcttttaccaacttgccactctgtgtcttttaagtatggcatttagccyatttatattcaaggttaacattgatattagtggatttgatcctgtcattgtgttgttagctggttgttatgtggacctgattgtgtaattgctttatagtgtaaatgttctatgtacttcagtatgtttttgtggtggccggttatggtcattcatttccatgtttagtactcccttaaagacatcttgtaaggaaggtgctggtggtaatgaatt

SEQ ID NO: 591664 - DNA, 498 bp, Homo sapiens
attatttatcatatttaatgtataaagaaatttcagtgcttttgaattctttttttttttctttgagatggagtctcgctctgtagcccaggctggagtgcaattctcctgcctcagcctcctgagtagctgtgattacaggcatgtgccaccatgcccaactaattttygtatttttagtagagacggggtttcaccatgttggccaggctggtcttgaactcctaacattgtgatccaccagcctcggcctcccaaagtgctgggattacaggtgtgagccactgctcctggccgcttttgaattctttatcgggctccgtctcatctagaagggtgcctgacgcttaggcattactgattttcctcatggcagcaacatgtaggctgcctctcagcctaaactagcttcagggtctcagagtctgtgtcagttcaatgcttattccctgatgtgactcacttttcagaagtcctgagggttaatgggatgcaaaa

SEQ ID NO: 591665 - DNA, 553 bp, Homo sapiens
catatgtttaaaaattaaacaccattttgttttaaatatgattatacatatgttttaatatagtactgtatggtttttaacatcttggaaggtttaaataaatttcagtcatataaatacaacaagaactttgggtgagaagtagaccactaaaatataaaatatgtagaaaatcagagtacttattgaaataatccagtataggtgtgcctataacaggagactctaaagagaaggtgcttcctttatatacgatgattctcggagattgtaggttgctaccttgatgtatttttaaatgtttttggaaaggcactacaatcttacaccttttattagaatcagattatcaaactagaatgackattatatattacaatgggtgagagttttgctttcagtatgttcatattttaagagttttatgttttcatgacaaaattttccattatcagtttggaaagtagtggctaaacagatatctttcctgtagccctcacaaaactttaagtatgttttatatattatgattcttcaaaaataaagtataata

SEQ ID NO: 591666 - DNA, 553 bp, Homo sapiens
catatgtttaaaaattaaacaccattttgttttaaatatgattatacatatgttttaatatagtactgtatggtttttaacatcttggaaggtttaaataaatttcagtcatataaatacaacaagaactttgggtgagaagtagaccactaaaatataaaatatgtagaaaatcagagtacttattgaaataatccagtataggtgtgcctataacaggagactctaaagagaaggtgcttcctttatatacgatgattctcggagattgtaggttgctaccttgatgtatttttaaatgtttttggaaaggcactacaatcttacaccttttattagaatcagattatcaaactagaatgacgattatatattacaatgggtgagagttttgctttcagkatgttcatattttaagagttttatgttttcatgacaaaattttccattatcagtttggaaagtagtggctaaacagatatctttcctgtagccctcacaaaactttaagtatgttttatatattatgattcttcaaaaataaagtataata

SEQ ID NO: 591667 - DNA, 451 bp, Homo sapiens
ttgatgtctcatgtctctgtaaaaggaataaaaccaagctgtgctctgaccaccttaggtacatgtcatttggacctcctgaggctgtgtcatgggcgtgcaaacttaactttggcaaaataaacttcctaaattgactgagacctgtctcagatttttggggttcatacctcatatactctcaattggattaaggtctttagaggtactaaagttgaaatactaatgcttcctctcatactgtaccrtataaaactaaaaaagtacaattttaaataacaaatgcaaaacgtctaaaaattatgattttccccacaaattcttccttgctttttctaaagataagtctccatgttgggcaattcagtattgactagataaagcttcctgaatagtgtgaagaaaatcaagctatcttcaaattgatgcctattcaggttactattgctgc

SEQ ID NO: 591668 - DNA, 451 bp, Homo sapiens
ttgatgtctcatgtctctgtaaaaggaataaaaccaagctgtgctctgaccaccttaggtacatgtcatttggacctcctgaggctgtgtcatgggcgtgcaaacttaactttggcaaaataaacttcctaaattgactgagacctgtctcagatttttggggttcatacctcatatactctcaattggattaaggtctttagaggtactaaagttgaaatactaatgcttcctctcatactgtaccgtataaaactaaaaaagtacaattttaaataacaaatgcaaaacrtctaaaaattatgattttccccacaaattcttccttgctttttctaaagataagtctccatgttgggcaattcagtattgactagataaagcttcctgaatagtgtgaagaaaatcaagctatcttcaaattgatgcctattcaggttactattgctgc

SEQ ID NO: 591669 - DNA, 594 bp, Homo sapiens
caaaactcagaaactacccaattgtccctcagctgataaagagataaacaaaactgtggtgtattcatcccacgggaaactatcccacaataaaaaggaatgaattattgatacatgtaacaatgtgtatgatctcaaatacatgttgctcagtgaaagaaatcagacccaaaagattatgtattctattattattccatttgtatgatattttggaaaaggcagagctacagcaatgagagaactgatcagttctccaccaagttgccaagatttggtggtgaagaaagtttcaggcggggcacagtggccctcgcctataatctcagcactttaggaggctgaggcaggaggattgcttgagcccaggagttygagaccagcctgggcaacatggtaaaacttgtttctataaaaaaaaatatgaaaatttgcagaccatgtcggtgtgttcctgtagcccagctacttgggaggctgaagtgggaagatcacttgaatctgggaggctgaggctgcagtgagccataatcgtgctactgtattccagcctgggcaacagagtgaaaccatgtcttaaaaaaaaaaaaaaaa

SEQ ID NO: 591670 - DNA, 418 bp, Homo sapiens
gttattcttaaaaaaagattctcatgtagactgtttattataaagtggtggtagcagatacaacagactgatcagttaccttttatgcagaccagagggaacaaaatttaagcaagaaattatagggctacataatagagcaataattaaagcagattctgggaaagctgttagataatggcattgaaatcacatgaaactacagtgggtagatgatttcctgaacagttggcacaaataacagaatcctttagatctgacaaggcttgcgttcctatcatgggtgtgcaggtttatactgtctttggcactcaatgtgaagatgactgttgcaatcgctctatacgaaygagcccctggaacgcagatgattatagatttatgtgccaaattgtcctgtgagtctcacatgggccaa

SEQ ID NO: 591671 - DNA, 634 bp, Homo sapiens
ctcactgcagcctcgacctcccaggctcaagagatcctcctgaggagctgggaacacaggcatgtaccaccatgtccagttattttttttcagacttttttttttttttaatagagacagagtctccctgtgttgcccaggctggtcttgaactcctggcctcaagcaatccacctgccttggcctcccaaagtgctgcaattacaggtatgagccaccaygctgggccaatcatattttaatttttagaaaaaaatgaggatttggagttgttagaattgagaaactaaaaagaaccatgtacagaaagaattgttttgtaaacctctatactgagtcatctaatttcaatgtctacataaaagaagctcagagctctttcttgaatatcatgtagaaagatgataccttggttcccttgagaacctgattcatgacatcattgcttttggccattcaggagtcagttcggttttttgaaaggaacatggaactgggactcgggcacactgaaaatactaccagctttgacacttactagtggatgatctaggctgtttagcttgatctctctgaatctgtttccttatatgtggaaatgggaataaagatgggtcccagaatatagtgtgtg

SEQ ID NO: 591672 - DNA, 573 bp, Homo sapiens
gaggtcaggagattgagaccatcctggctaacacggtgaaaccccatctctactaaaagtacaaaaaattaattgggcgtgatggcgggcgcctgtagtcccagctactcgggaggctgaggcaggagaatcgcttgaccctgggaggcagaggttggagtgagctgagatcgcgccactgcactccaggctgggtgacagagcaagactcagtctcaaaaaaataaataaataaaataaacaaataaatctggaaaaacagtgatgtggacaccagacttccctaagaggctcagcagagtcccctgtcctgccacatatgatgccctttatatattagcaatgccaacagcgtggtaagccccatttattgagcccttaatatgtgctaggtactgttaagctctttacattttgttaacttatgtagtctaacaacaatcttagtagagagggattattaatttccccattttagatatggggaaactraagaatagagaaattaataacttgcccatggtcacacagatactaaatgctgagccagaagtaagctctgttttattcatc

SEQ ID NO: 591673 - DNA, 639 bp, Homo sapiens
cctgctctcctactacattcctttttgctgaaataatgaaaataataatcaataaaaactgagggaactcagaggccggtgccggtgcaggtccttggtgtgctgagtgccagtcccctggacccattgttgtttctttatactttgtctctgtgtcttatttcttttctccgtctctcatcccacccaactagaaatacccacaggtgtggaggggcaggccaccccttcacttaatactaataaaggattttaaaactggaaaaagccttaaagataatttctgcttgtcattttataaactagtcattttaaaactaaaaagttaagtgatgtagccatcgctatcaaccagatcttatcaaagagaaacacagatctctttgtaaaayagacttgaaaatagaaaaaatttccaggtaaacctctgcaaataaacatcagattgattcccaggagactttcccaaattagagatctgtcactatctcaaatccatcaaaggtttgttcttaaggtgaggaaagagtgagggtggatggtttacagccttaaagtctatttcatatactgtttaacaatccttaacctaaaaatagtttgtcaccaggctgcctgggacttccagatgatattctc

SEQ ID NO: 591674 - DNA, 513 bp, Homo sapiens
ccccagctgggcttggtttataggaatttattcttgagcgctcagtcttgggtccatgtttcaacacatatttccaggactcccaatgactcctctgaaccaacctgggccccatccagctgtataaccctgaaaagggtgtaccaaagtccctgggatattttcctcctccctaayccccaggtcggacttagacccaagggcttcagagacatatcaggagtgcaagtagaggctgactaatttggaaagcttgaattaagggtttagactggctcccttagctgatcctagtgcaaaggctaatcttttgcagagtcattttatggcgtgagatggtgctgttgattttgcacagttaataacagctcagcctgagtgctgctagccttagccaagggtgtagaatgcaagcagttgtttcagcgaaagtaagaatttgctgggagcacacttggcttttctgaagaggcctctgcactgccaagggagaaagaccccccctcaacagtg

SEQ ID NO: 591675 - DNA, 539 bp, Homo sapiens
ctacgctatgtgttctctgtatgatctcacttgatcctgataaccttatgatgtaggtcccatcattcataaatgaggaaactgaggctcagtgaggctaagcagctggcccatttacatagctagtgattggagaagccagaatttgattgtagaaaagactccaaagcctgtactcttaacygtgacatgcatggaagcgcgcgcacacacacacacacacacacacacaattgacatatatgtgcattctttggtctctacagtgtaatcttttttgtaatattcacaaatcatacgttgttagaaatggaagtcattttagagattacctatctgactcctccccaacttttacttccatagaaaaggaaactggggacctaccttagagaaatagttttcaaacctgagcaagcatcagaatcacccaagggactggctaaaacacagacctctggccccatctccagagtttctaattctgtaggtcgaggtggggcccaaaatatatatttctaacaagttcccaggtgctg

SEQ ID NO: 591676 - DNA, 539 bp, Homo sapiens
ctacgctatgtgttctctgtatgatctcacttgatcctgataaccttatgatgtaggtcccatcattcataaatgaggaaactgaggctcagtgaggctaagcagctggcccatttacatagctagtgattggagaagccagaatttgattgtagaaaagactccaaagcctgtactcttaaccgtgacatgcatggaagcgcrcgcacacacacacacacacacacacacaattgacatatatgtgcattctttggtctctacagtgtaatcttttttgtaatattcacaaatcatacgttgttagaaatggaagtcattttagagattacctatctgactcctccccaacttttacttccatagaaaaggaaactggggacctaccttagagaaatagttttcaaacctgagcaagcatcagaatcacccaagggactggctaaaacacagacctctggccccatctccagagtttctaattctgtaggtcgaggtggggcccaaaatatatatttctaacaagttcccaggtgctg

SEQ ID NO: 591677 - DNA, 539 bp, Homo sapiens
ctacgctatgtgttctctgtatgatctcacttgatcctgataaccttatgatgtaggtcccatcattcataaatgaggaaactgaggctcagtgaggctaagcagctggcccatttacatagctagtgattggagaagccagaatttgattgtagaaaagactccaaagcctgtactcttaaccgtgacatgcatggaagcgcgcrcacacacacacacacacacacacacaattgacatatatgtgcattctttggtctctacagtgtaatcttttttgtaatattcacaaatcatacgttgttagaaatggaagtcattttagagattacctatctgactcctccccaacttttacttccatagaaaaggaaactggggacctaccttagagaaatagttttcaaacctgagcaagcatcagaatcacccaagggactggctaaaacacagacctctggccccatctccagagtttctaattctgtaggtcgaggtggggcccaaaatatatatttctaacaagttcccaggtgctg

SEQ ID NO: 591678 - DNA, 415 bp, Homo sapiens
tttctcttattttcaccaaagaaattcctggatggtatcrtcttttatctgatgcttttctctggaaggagtagttatgaatctcctcgcttaagttctagattaattggactatgtttacacatgggtggtagcattgtgattgaaaagggcacttggttaaatggagctcctttctacttccttcttttacgtggctgctgcgttaagatggtaagatggctgagccttttggcaggtagaaggagacccaatcatcttttatgtcatctcccattctcctccacatatctctgtcctcagagagtctgcatgccctggccctctctggttatcacttttcctatgcttctttgaggtcatgttcaagtttaggggaggcctccagccttgaccatgcgctctagccaagctt

SEQ ID NO: 591679 - DNA, 415 bp, Homo sapiens
tttctcttattttcaccaaagaaattcctggatggtatcatcttttatctgatgcttttctctggaaggagtagttatgaatctcctcgcttaagttctagattaattggactatgtttacacatgggtggtagcattgtgattgaaaagggcacttggttaaatggagctcctttctacttccttcttttacgtggctgctgcgttaagatggtaagatggctgagccttttggcaggtagaaggagacccaatcatcttttatgtcatctcycattctcctccacatatctctgtcctcagagagtctgcatgccctggccctctctggttatcacttttcctatgcttctttgaggtcatgttcaagtttaggggaggcctccagccttgaccatgcgctctagccaagctt

SEQ ID NO: 591680 - DNA, 546 bp, Homo sapiens
cttgcctatttgtcactgctttctcataaatgcccatttatttttcaccactggtaatggaaagtatttaggaagagagggaatgatcagtcagggaaattcatctatagacattcattaygtttccttgcaatttgtcactttcccatttcatggaatctcaaaacaagatgctaaaatcatctctatactacttatcacctcccattgccaaagtgcttaccacatttctttctaaatacctcaagttagagtaaacttactacttccaattgtttgaagtttttccacccatcaagcaaaacactggcttcttggaggctttcactcattggtctcaggtttaatcactgacatccttccagcatctataagcagctatagtattctcctcaattcttgtccaggctaactatccctatttccttcaatctttcctcataagacataccttttagttcatctaccaccctggtctctttcctttgaaactgtttcagttttcctcactattaatggccagtatccagcattgaatacaactgc

SEQ ID NO: 591681 - DNA, 546 bp, Homo sapiens
cttgcctatttgtcactgctttctcataaatgcccatttatttttcaccactggtaatggaaagtatttaggaagagagggaatgatcagtcagggaaattcatctatagacattcattacgtttccttgcaatttgtcactttcccatttcatggaatctcaaaacaagatgctaaaatcatctctatactactyatcacctcccattgccaaagtgcttaccacatttctttctaaatacctcaagttagagtaaacttactacttccaattgtttgaagtttttccacccatcaagcaaaacactggcttcttggaggctttcactcattggtctcaggtttaatcactgacatccttccagcatctataagcagctatagtattctcctcaattcttgtccaggctaactatccctatttccttcaatctttcctcataagacataccttttagttcatctaccaccctggtctctttcctttgaaactgtttcagttttcctcactattaatggccagtatccagcattgaatacaactgc

SEQ ID NO: 591682 - DNA, 528 bp, Homo sapiens
gctgtcagcagggatctgcccgagccaacagacaaaaagagatggaaatgttcacagcacctgccatgtgcagacggtgggctggactttatcctcaccatagcactcagtttgtacatgagaaacccaaagctgggaagttgcagatgccaccttgggcgtcagcatgtcagctaagccccacaggcttagcaagtgagagacgtggaaggagtggagtaaaggtgttggaaaccctgccccagtgtgctcactcactttctgtgcttggttgattagggcaggggacagggcctcatgcagcacctcccacccccactggacagtaggtcctgggctgccccacacttcggtgactggccttcctggggagtggggaaactggcatgatgctccctttgctaaagattaagttctgtagactcactccttttcaaagtttgsgttagggttaggacacttggccactccaacagcagcttctggtagatagggtacactgtcattaggtcaaaagaggaagaattc

SEQ ID NO: 591683 - DNA, 569 bp, Homo sapiens
cagcattttacagcttattcagtaaaatgcctggaaaagtctgttcctcagcactatgaatgctggtcttcattaggaaattatgcagaatgtcacaatactataataacaactttttttttgtttttaaaatgtcagcttcttaagactccttatcaagttcttctgctctgaaaaaacagaatccttatcaattcttccttttactttctctataaagagccctagtcatagaatatatttctaaatttgccttcccctcctccaaatctctgctaccaggcaacaaccttcaagacagctttaaagtgttattgctcaggagaaaacaaatacaactccagtgtggccattatgtcattattccagtggcttttgctttggttctctgtgttttgttttcataatttaaagtccaaggagtgtctccttaaagtggccctcagctcttaagccattcctggggtcttctccttcagyttcacccattggaaggacatgcttagaagactgtgaggaaaccccataaagcaaggagggttaaactgggttttaaattcagtgggtaa

SEQ ID NO: 591684 - DNA, 569 bp, Homo sapiens
cagcattttacagcttattcagtaaaatgcctggaaaagtctgttcctcagcactatgaatgctggtcttcattaggaaattatgcagaatgtcacaatactataataacaactttttttttgtttttaaaatgtcagcttcttaagactccttatcaagttcttctgctctgaaaaaacagaatccttatcaattcttccttttactttctctataaagagccctagtcatagaatatatttctaaatttgccttcccctcctccaaatctctgctaccaggcaacaaccttcaagacagctttaaagtgttattgctcaggagaaaacaaatacaactccagtgtggccattatgtcattattccagtggcttttgctttggttctctgtgttttgttttcataatttaaagtccaaggagtgtctccttaaagtggccctcagctcttaagccattcctggggtcttctccttcagcttcacccattggaaggacatgcttagaagactgtgagsaaaccccataaagcaaggagggttaaactgggttttaaattcagtgggtaa

SEQ ID NO: 591685 - DNA, 569 bp, Homo sapiens
cagcattttacagcttattcagtaaaatgcctggaaaagtctgttcctcagcactatgaatgctggtcttcattaggaaattatgcagaatgtcacaatactataataacaactttttttttgtttttaaaatgtcagcttcttaagactccttatcaagttcttctgctctgaaaaaacagaatccttatcaattcttccttttactttctctataaagagccctagtcatagaatatatttctaaatttgccttcccctcctccaaatctctgctaccaggcaacaaccttcaagacagctttaaagtgttattgctcaggagaaaacaaatacaactccagtgtggccattatgtcattattccagtggcttttgctttggttctctgtgttttgttttcataatttaaagtccaaggagtgtctccttaaagtggccctcagctcttaagccattcctggggtcttctccttcagcttcacccattggaaggacatgcttagaagactgtgaggaaaccccayaaagcaaggagggttaaactgggttttaaattcagtgggtaa

SEQ ID NO: 591686 - DNA, 581 bp, Homo sapiens
gagtatgagtatgttcctgaagaataggttcatgagaatattcatatttcatatactcaagaagaatacattcttaatcatatctaaacaaagtgtgtcttcaatattgttttaatttaatatactcaaattaatttaatatactcaaaataaatgtttcaacaaaattgttggcacactagaaaatttattacattcagtgaattagtcattcaaaaaattgctccttcagggaactgatttttgatgacttggtctgttttcaatgcggactgaaattagtggggcaggattagggytgggatgagggtggtgggatctggaaacaatacagaatggctctcgttgagaatgaagtgagggcagcctaggacatagtgcctgtgtccattgctggggccagcctgcaggaaaaggggtgctataataagcctagataaatggaggcattgggcttgaggctacttatttatatcctgctaaaactcaaattgctctgaaaataaatagtgaggctggatctgtagaagattaaatgagttgacccagctgtgggagaactggggcaggcagaagctggg

SEQ ID NO: 591687 - DNA, 634 bp, Homo sapiens
ttactgctattcttataaactgaaaacaaaatatgttaggtgcttgaattggttgttctcagacgttttgatgtgggaagtactagctgggagcttggaggggagggtcaacataattggtttgtttgaattatactgatttgcagattaagtaagaatgtttgtgtgatttaggaagagaatgatagcacttcagaggtgaaaaggtatcggatttatagggtctattctctcattaaatcaatataaaaatagaggctcagagaaggaaaacaatttgtctacgaacatacagctgtctcgtgccaaacatgaatcttccgagagtcaagtctgttctccttccagttttgcattagttttattttacatgacattctctacaatattttaaagaaaagatatatttatatgtcattaactttctagaaagtaatatttttattaatattaaaaacatcttcaaaaattgtttttcccctgagaatggctgcttctcaaatagtgtgttttaaaaaattaagatagtctactgatatactcaaatactcacatttatcttcttagaaagcacccatgtatatcttccacatgatagttatgrcttaaaaaaaattcaaatttatgttgctgc

SEQ ID NO: 591688 - DNA, 623 bp, Homo sapiens
atataattatacttatttttaaatgctttcctatgaaaagaaaggttttcctgtttttttaatgagataccattcgataatataaaattaaccattttaaggtatacaattcaatagtttttggtgtattcacagttgtgtatgaccatcaagactatctaattccagaacatgaccccaaaaagaaaccccatagctgttagcagacaatccaattccctctccttcatcccctggcaaccactaatatattttctatcttgatgactttgcctattttgaacatttcctatgaatggaagcacactgtatgtgtcatttcatgtctagcttctttctcttagcataatgctttgaaggttaatccatgaggtagcatgtatcagtattcccctcctttttatagctgaataatattcctctgcatggagataccagattttgcatgcccattgatcagctaatggacatgtggtttgtttccacttttttgctattacaaataatactgctataaatattcaatgtacaagttttcatgtggacatatgttttcaattcttggatatatacctaggaatggaactgctgggtcaaayggtaactctatgtttaattttttg

SEQ ID NO: 591689 - DNA, 330 bp, Homo sapiens
aactctttcatggtgccattgcccgtagtataaaacccagacctccatatcattacctaccaggccctatataacctggtcctcrtccacctctccttcctcatccttggtcactccattcctaacttcctgagctccagccccactgttctttcatggctcagaacatgcgaaactcaataatatttcaaggcctttgcctgggctgtttcttcttcctggcacatttttctcccaaccttattcatcactggtttcttctctttgggtaggtctcagttctcctggaagaacctctgacatgtcatcaaagggtgcccttaacctcac

SEQ ID NO: 591690 - DNA, 330 bp, Homo sapiens
aactctttcatggtgccattgcccgtagtataaaacccagacctccatatcattacctaccaggccctatataacctggtcctcgtccacctctccttcctcatccttggtcactccattccyaacttcctgagctccagccccactgttctttcatggctcagaacatgcgaaactcaataatatttcaaggcctttgcctgggctgtttcttcttcctggcacatttttctcccaaccttattcatcactggtttcttctctttgggtaggtctcagttctcctggaagaacctctgacatgtcatcaaagggtgcccttaacctcac

SEQ ID NO: 591691 - DNA, 598 bp, Homo sapiens
aaaataaagcttgacagacaagtggacaacccaatttcaggacatcttctttgtgttttctttttccttttttctttttaaacataacyacatttatattcaggatatctttctacgctcatacttcagttgcacctcatttggaggttgtagcaacagaatatttcactctatgggtgtgccattacacacagagccagtcccattgaaggacatttaggcgttttcagatttttttccatccaagcaataatgcaatgaccttcctcatacatatctctctccacatttacataagggtttaggtagaattcatttcagtccatggatttgctagattggagtatactaacacttttaatttttagttttgatgcatattggcaaattacaataaaaccagcatgaattgcatgaaccagcaacaactcaaaaagatatttttaaatgaaataaaatacagcaaatcaaatgcaaacaggaaaaaataatagcaagtagcacttatccaacactccatagtttgcaaaatacttccaatactttccaatgaatcttttcacttgatcttattgttgaaggaattcttcctgaaccc

SEQ ID NO: 591692 - DNA, 598 bp, Homo sapiens
aaaataaagcttgacagacaagtggacaacccaatttcaggacatcttctttgtgttttctttttccttttttctttttaaacataactacatttatattcaggatatctttctacgctcatacttcagttgcacctcatttggaggttgtagcaacagaatatttcactctatgggtgtgccattacacacagagccagtcccattgaaggacatttaggcgttttcagatttttttccatccaagcaataatgcaatgaccttcctcatacatatctctctccacatttacataagggtttaggtagaattcatttcagtccatggatttgctagattggagtatackaacacttttaatttttagttttgatgcatattggcaaattacaataaaaccagcatgaattgcatgaaccagcaacaactcaaaaagatatttttaaatgaaataaaatacagcaaatcaaatgcaaacaggaaaaaataatagcaagtagcacttatccaacactccatagtttgcaaaatacttccaatactttccaatgaatcttttcacttgatcttattgttgaaggaattcttcctgaaccc

SEQ ID NO: 591693 - DNA, 569 bp, Homo sapiens
aataattttgaaagaaacaattgtgtctaaatcatagaaccccaaccacaagtattttaaagtaatctaaacttaactccctaataatgttgtatggtttataacaggagaattattagttcttcctagtaaaatttactttgcattaatgtgtcctttctaaagaacagtttctagagatttaaatctagccacaaattttcactagctactcctatttttcagctgagaattcatgttgacacctatatctgcatatctaatatatcaaaacacatacacgcttgcatacgtatgtgtgtatatgacaaccaccaccaatggtgttgcccatgttggttaatttcgaaagcagaaaaatataattgcaaatgtacaaaattatgcattcttgtgtgtgtgtgtgtgttttttgtttttttttttgagacagagtctcgctctgtcacccaggctggagtgcaatggcacgatctcggctcactgcaacctctgcctcccgggttcacgccattctcctgcttcagcctccygagtagctgggactacagctgcccgccaccacgccc

SEQ ID NO: 591694 - DNA, 521 bp, Homo sapiens
atcacagaaacaaggagctttctcatggatatacaagaatggagtaagtttaaaataacttcatggaaaattgaaagattagttgacaaaccaagctaagagatgtaaagaatgattgacaacaacagtgatgctcagttgagaatgaaaagcacaatttttatgtaatgatatgaatgtacatgtttatgtgttattatctccaagtaatcagcaatccttattcaygttataatatccaaactcatacatgttaaataatcctccgaaatgtttttataatttgtcaaagaaacaagatggatcatagaagcagttgaatttacaattttgctactcagaaaaaaagaaatatcagatgtatactatccacccactcctttgcagagattttttttttttttacaaaaacttgtttttaataggttaaacatattatggtgtctgtgtaagtagttgtaagctcacgtttaaatgtaaataattacttggaattttatatgacatatcacacttctgaa

SEQ ID NO: 591695 - DNA, 544 bp, Homo sapiens
catttcacccacagcagcagggtgtccctaagcaggattccacaagccacacctcattgtctcctcagcacacacacccgccagggcctgcctccctcccttgctgcagatctacacaaaaataaggataaccttcttcttttatctttgccccaggatgatttcatagcatttttcttaccctaaaaataaacgttgagtccttttagaaggaatccactgaaactcccttcttgaaaatggacacttatttgttgccatgaatattccrggagaagcctggagaaatctatcctgttactaacttttctcagtatctccctgcatggccactcctgcagtgactctccaactggaaacagcctggttggcaggaggctggctccagttcctccgaaagagcctcacagtttccccacagggaacctctccctggagttagagtaaagaatgaaattggactttggatcgggaggctgttgtccctctcagcatcatcttgaatggctgaactcctttcttcagaatgtcaggttgctgtcaa

SEQ ID NO: 591696 - DNA, 580 bp, Homo sapiens
tgtgtacaaataattctgataccttctttagacataagctgtggtrtgtgctactgaatctgaaatgaaggaggtatgagtcatgcgggctgtttaaatttgctgtgtgtcattcctgggcaaattacagactaagtctggcaaatcattgaatgtaagtactgaaagaataaatgatctcaatgcccaaccctctcattttacacactcatttcattcatttaacaaatataattggtatcttctatgtaacagagattgtgctaagcacagaggataccacgctgagccaaaacaaatatcaccatgttaatagtttagagagggaaaccagcattaataaataatcccaggtagcaatatataataagaaaatgtgatagtgctctgagagaagggtataaaatatataagatctggcagtggagagtcctgatctaatcaaggagtcatggggaatattactaaagaaatggcatttgcactgacaactgaaggataagaaggagttaggcagtgcccaggtgaagatgtgagataagattgctccaggttagttaacagtaaaggcaaagatgct

SEQ ID NO: 591697 - DNA, 420 bp, Homo sapiens
aaagagttctatgagacttacgttgacagatttttttttttttttttttttttttgagatgaagtctgtctctgytgcccagactggagtgcaatggcacgatctcggctcactgcagccttagactcactgcagcctctgcctcccgggttcctttaattctcctgcctcagcctcccaagttagctgggattacgggcacacaccaccatgcccagctaatttttgtatttttagtagagatggggtctcaccatgttggccaggttgattgtgaactcctgacctcaggcagtctgcccaccttggcctcccaaagtgctaggattataggcatgagccaccacacctggcctgatggatatttttaactatatatcactcttgtgcatatataaataaaatacagtggaaataatt

SEQ ID NO: 591698 - DNA, 415 bp, Homo sapiens
tctatgagacttacgttgacagatttttttttttttttttttttttttgagatgaagtctgtctctgttgcccagactggagtgcaatggcacgatctcggctcactgcagccttagactcactgcagcctctgcctcccgggttcctttaattctcctgcctcagcctcccaagttagctgggattacgggcacacaccaccatgcccagctaatttttgtwtttttagtagagatggggtctcaccatgttggccaggttgattgtgaactcctgacctcaggcagtctgcccaccttggcctcccaaagtgctaggattataggcatgagccaccacacctggcctgatggatatttttaactatatatcactcttgtgcatatataaataaaatacagtggaaataattgg

SEQ ID NO: 591699 - DNA, 593 bp, Homo sapiens
ggtggtgcacagctgtggtcctagttgcttgggaggcagaggtggggaagatcacttgagcccaggagatcgaggctgcagtgagccataattgcaccactgcattccagcctgggtgacagagggagaccctgtctcaaaaaaagaaaaaaaaaaaaagcagaatagtttgtagtaaaataataatgaagaatcggggtgaagggtatatgtactgttcttgaattttttatttttatttatttattttttgagataggatctccctccgttgcccaggctagagtgcagtgrcataatcttggcttgctgcaacctctgccttccagtttaagcgattctcctgcctcagtctcctgagtagctgggattacaggtgtctgccaccacaccaggccaattttttgcatttttagtagagatggggtttcgctacattggccaggctggtcttgaactcctggcctcaggtgatccacctgcctcgacctcccaaagtgtttttattacaggagtgagccactgggcccggcctgacatttttatttaggttggaaataatttcaaagtgaaaaggtaaagttgtcacaaaa

SEQ ID NO: 591700 - DNA, 593 bp, Homo sapiens
ggtggtgcacagctgtggtcctagttgcttgggaggcagaggtggggaagatcacttgagcccaggagatcgaggctgcagtgagccataattgcaccactgcattccagcctgggtgacagagggagaccctgtctcaaaaaaagaaaaaaaaaaaaagcagaatagtttgtagtaaaataataatgaagaatcggggtgaagggtatatgtactgttcttgaattttttatttttatttatttattttttgagataggatctccctccgttgcccaggctagagtgcagtgacataatcttggcttgctgcaacctctgccttccagtttaagcgattctcctgcctcagtctcctgagtagctgggattacaggtgyctgccaccacaccaggccaattttttgcatttttagtagagatggggtttcgctacattggccaggctggtcttgaactcctggcctcaggtgatccacctgcctcgacctcccaaagtgtttttattacaggagtgagccactgggcccggcctgacatttttatttaggttggaaataatttcaaagtgaaaaggtaaagttgtcacaaaa

SEQ ID NO: 591701 - DNA, 611 bp, Homo sapiens
atctttctccaattctacctttgctaccactcttctttttgagacggagtttcgctctgtcgcccaggctggagtgcaatggcgcgatcttggctcaccgcaacctctgcctcctgggttcaatcaattctgcctcagcctcccgagtagctgggattacaggcatgcaccaccacacctggctaattttttgtgtttttagtagagacagggtttcaccatgttggtcaggctggtctcaaactcccgacctcagataatctgcctgccgcagcctcccaaagtgctgggattacaggcgtgagccaccacacctgcccctggctaccactcttttagctggccctcctcaccctgaacagtacctattcayaggaccacctcaaccccctttctcagtttttttcttaccagctaagggctagaacactgagcagttaggtttgctacagttgcatggaaaacagtggccacctcctatggagtaaggcagaggaaacctcttacttttaggtttatttttagggtggaggctgccaactctgccttccagatagtccaggcttatcttgctgtcatacttttgagaattagtaacagatttaggtttg

SEQ ID NO: 591702 - DNA, 550 bp, Homo sapiens
ctttttggggccctgtggttcctgaaatctccaagcttctgggcaccaccatgttccctggtgcaagtcattgaagctgcttgcattgcacttggtctagctgtagcgtcatagagagctgtcacccattctggaacctggagctgcccaccacattgcagcagttggcgtgtctgactgtgcaatggccagaccccacacttgctcacacacccctcaccgctccatgcctgactcacccttagcaggcatggaatcttttatggtttataataaaattgtgaatctctttactaatagagttggaagaaaacaacaatatgtcatactatttcatttcaacaagggacatgtaaaggctttccaccattgtcaacatttattattttatgacatatcgtggagagcttctaatcattagagatgaaaataaataatcactgaaaattatattgttgaaatgtrtaaatgtagacataagttgccttatgaaaatgtgatgcaagttattacacaagatcacaatcctttgaaacttaaaacatttcaa

SEQ ID NO: 591703 - DNA, 620 bp, Homo sapiens
acttcactggtgatagcaacaagagacagcctaatgcctaggcagataggtgcaggtccccagtgaaaccccacctccaagccaaacaccgtttatagcctgaaaactaagctacaagttaaatcctcggactggattgataacttgtctttctgtttggcatactctcttctgattgaccttcccactccagtattagtctgttctcatgctgctaataaagacatacccaagactgggtaatttataaagaaaaagagttttaatgaactcacagttccacatggctgaggaggcctcacagtcatggtggaaggtgaaagaggaacaaaggcatgtcttacatttgggcaggcaagacaacacgtgtaggggaactgttctttataaaactatcagatcttgtggtatttattcactatcacgagaaccacatgggaaaaacccacacccatgattcaattacctcccaccaggtccctctcatgatgcatggagcttatgaaatctacaattcaagttgagatttgcatggggacacagccaaascatatcattccacccctgccgcctcccaaatttcatgtcctcacattgcaaaacacaatcatgccttccca

SEQ ID NO: 591704 - DNA, 600 bp, Homo sapiens
  misc_feature 556, 563, 574: n = A,T,C or G
gagttttaaagcttttcctytgtttctgttttttttttctttacaatgaaagaaaagttgtcatctgtttaaaataacttattgtaactatcagatgatttttgtaagtctcaagttaactacaaagtgaaaacctataataaatacaataaaaattaaaatcaatgaattaaagcataccaacagagaaaattacttaacaacaaaggaaggtagtaataaaaaggagagtggttaatttagttttcactttaataagaaaagaacagaggatatatcaaatgacgagaaaacaagtaacaaaatggcagtagtaagttcttacctattaataatagcattggatgtaaatagtctcaattctcccataaaaagatacagagaggataaatgaaacaagatccaagtaaatgctgcaaataagaaaacctcttcagctgggcatggtggtttatacctgtaatcccagcactttgggaggcaggggcaggcagatcacaaggtcaggagttcgagaccagcctggccaatatggtgataccccatctctactaanaatacanatattagctgngtaatggtggtgcatgcctgtagtcc

SEQ ID NO: 591705 - DNA, 507 bp, Homo sapiens
aacatgagccaagacattcctagataattatgaattctcaagtcataactcttaaaatgataggtgatactaactagcatatactttaacattcttgtacagacatgttcatgtatgcttaaaataaataccaaaaagtatgttccatttcacataattatttttattatctttctctatgcaggtgcactgtttaagttccaggaataaaagtaagatttgtttctcctcttctgatataaagtctgattcttattggcaaataaacaattatatttaagactgaactgattgttttatacctccaagttttcatcaggtgacacwtaaataaaaattagcatgagaccaaaactgtgatttttcctttccctataaatactttcaaagcaacttaaatagataaaacattaacaaaaataaactaagttcaggcaagccaccaacagccaccaacagctaccaattgacttgagtcccagttaaataactaaggaaattgaaaag

SEQ ID NO: 591706 - DNA, 411 bp, Homo sapiens
tcacaccaattacattttcattagtrcacacacacatatatatatgtgtgtgttgctatgtatgtgtataatcactaacatggtatttatgctgtatttggggaacattgtatttaagggaggcaggtgagctgtccctctcaagagaagtagggttgtacctcacatagtgtttctgactttatcttacacattatttcccacaagtgtttgcccatactgcctttattttcgttgtatgattaatgctaaaattgagtatgctgactgtttgaagctctctaaggtgaatatgctatcagagagagagatgcgttagaatatattgaacacatggagagggatatctacccccatcagaaaagaaatacattagtgataggaacttagaaaccaaataaatatccaaaa

SEQ ID NO: 591707 - DNA, 555 bp, Homo sapiens
caaacctctttccttttattctgtctctataatgcaaggagtacaagagggtggatagagttggggwgtaagcgtggacaaaggggtctgcactctttcccccttcagcacctgccttccatagccaacctccactcccaccctaccccaggtctcctaatttcaatgggaagaccataattcaccattatgccatggcttgtttggtatgtattttatgtagcctttgtcattttcttgctttaaaggaatatattcgactctgtcagaaatattactcctcagaaccccaggcagtagacttcctagaatgtgcagaagaagctagaaaaaagattaattcctgggtcaagactcaaaccaaaggtaaatccaagaaaatattttatttacttctttccagttagaaaactctgatctatctttttccatccatgaacttagttagccctcacccctttacaatttgtccaactgcagttactttggtggatgtgaatttattcctgattagctcagtggtgttttaactgagaagaaataattgaggcctac

SEQ ID NO: 591708 - DNA, 555 bp, Homo sapiens
caaacctctttccttttattctgtctctataatgcaaggagtacaagagggtggatagagttggggagtaagcgtggacaaaggggtctgcactctttcccccttcagcacctgccttccatagccaacctccactcccaccctaccccaggtctcctaatttcaatgggaagaccataattcaccattatgccatggcttgtttggtatgtattttatgtagcctttgtcattttcttgctttaaaggaatatattcgactctgtcagaaatattactcctcagaaccccaggcagtagacttcctagaatgtgcagaagaagctagaaaaaagattaattcctgggtcaagactcaaaccaaaggtaaatccaagaaaatattttatttacttctttccagttagaaaactctgatctatctttttccatccatgaacttagttagccctcacccctttacaatttgtccaactgcagttactttggtggatgygaatttattcctgattagctcagtggtgttttaactgagaagaaataattgaggcctac

SEQ ID NO: 591709 - DNA, 580 bp, Homo sapiens
atattatttagctcaattacagaagttatcacacagggtttcacaactgattttgaatgtctcccccagtgttctaggctcatccaggataattcttcctttctcatctcttgtatctgcactactcttaatttaggtctagtatattttttacaaaacgtttttgaataaatgagtaagtcagatcctcagactatctagaccagatctagcagtacatgatatattttggaaaggcactattatattccctaagaacctctctttcacttccctctgatttgaataactttcaactgccaagctttgagaaaagaatataaaagggagtgaaaatctccattccaaacttgataggcggtctaaattttaaatgcattatttcttcattttttcttggattttgcaagcttttgggaaatttgtttcaattttaattttgctttaaataaacctaaaaaactttagcttgaagattaacawctctgcaatttgaagaatttagtttgatggctactcagaagattcagtaagtaatttcacagttcttgattatgaaacctaaatatatgttatgttt

SEQ ID NO: 591710 - DNA, 359 bp, Homo sapiens
agacacaacacaaattaataattcagtaatattttcagtttcattgatcattattattccactaatttgaagctttctatttgtgttttataaaaaaaatactacctgggaaaaccatgccaaatattctctgttggcagactagagaaaggattaagcaaaaaaaggatgagttacaatttgtcagaatccaggtctctcatgtgtacagagatggaaaatgtgagtaactaaacaactcaggcaaacccttaactgtctctttctgtctttttattgagacttctgacaaaaataagcctgaaagaaagagtatacatgcttktgaaactgaatcaaagggtggagctaagaacagg

SEQ ID NO: 591711 - DNA, 552 bp, Homo sapiens
aatttgtcagaatccaggtctctcatgtgtacagagatggaaaatgtgagtaactaaacaactcaggcaaacccttaactgtctctttctgtctttttattgagacttctgacaaaaataagcctgaaagaaagagtatacatgcttgtgaaactgaatcaaagggtggagctaagaacagggaggtgctaaaattttttttttttttttaatttcttcagttgaaagtttctcaactcttcagccacaatctcttactrcaggagcaaattgccaattctgctccagtgggagaaaacaaggtattgtaaatatttctttggttaatgattttatttatgtttttcttcttggttgaagtgcccagctaggtaacaaataatgaagaccccttcccccaaaaaagtccagaaataatagataaggcccaatcccttaagaatttgtctgtataagtcagagagtaacctgagctggtttgaagtttgtactagaaaaagggatatgggagaaagaacattcattcccaaaaaaagttagagaaattgtttt

SEQ ID NO: 591712 - DNA, 539 bp, Homo sapiens
ctgggcccaatgattgcatgagaaatcactgaccttcaggtawctttccttctatctatctaatctatcatctatcattgatctctctcatctatcttacctatcatacatctatcaatcctatctatctatatattttatgaatcatctatttatcatctatcttctctgtcatctgtctatcttatctatttatcaatcagctatctcggggagtaacacctttcctcagtactccatttccttaaatgtcagctatccagttaaattataaaaactgagtatagactgctcctgttggcaaccaacttccacagtcatgcttatgaggtagattatgaagaggtatctcccaaagctctcttcctgggcactctgaagctccttctacccattgcccagggaattatgggctagaggaggtggacaggatcctgatcatgtggagattccgccaggtgttctgtggtacctggcagtccatcaggagggctctgtcccctgccctaggacaggctgctgctgtgaccaagccctgt

SEQ ID NO: 591713 - DNA, 361 bp, Homo sapiens
gagtgtcataggaatgtttattggaagaataattttttatgtgatttgggctgtgatccagtggatgttgcttaagagtaatggctagcagataggcccttactcagmtgcatggttattttgtatttccacacgtttgtagccatgctctgtggtggggatgcagagagatgatcccctcactaggttcactcctgggcctcaggagagccccctccaaacactggcactgtctgtgtttcttttattgggttaacagggctccctctgtggggctccctcaggtagatgccatggctaggagacaggccacacccttcctggtctggtcttatgtagggaggcacatcctgttcccatg

SEQ ID NO: 591714 - DNA, 432 bp, Homo sapiens
cacactgcagccctggagtgccaggactggactgaagctctgtcttctggactcttggaatcaggcaacagttatgctgggggatgtgaagtgcttcctggccacagggaagtactcaggtagagcctctggtagarcactcatactgagcagtggaggctgtgttgtgcactggcttctgtgggagtggccaggcagcgtccctgggagggcctgtcaggcatgagagcctgcagaacagaagcaccccagtcctgctgagaaactggtcccactctctcttggacctgcagtctgctggggctagagctactcagagggagatggggtgcccttggggatggggacctctgacagcatgctgctacagctgcaacatgtgccaaagtccctggattctgcccaggttggagctgggtctctgcctactct

SEQ ID NO: 591715 - DNA, 432 bp, Homo sapiens
cacactgcagccctggagtgccaggactggactgaagctctgtcttctggactcttggaatcaggcaacagttatgctgggggatgtgaagtgcttcctggccacagggaagtactcaggtagagcctctggtagagcactcatactgagcagtggaggctgtgttgtgcactggcttctgtgggagtggccaggcagygtccctgggagggcctgtcaggcatgagagcctgcagaacagaagcaccccagtcctgctgagaaactggtcccactctctcttggacctgcagtctgctggggctagagctactcagagggagatggggtgcccttggggatggggacctctgacagcatgctgctacagctgcaacatgtgccaaagtccctggattctgcccaggttggagctgggtctctgcctactct

SEQ ID NO: 591716 - DNA, 442 bp, Homo sapiens
ctgcttggcactcctgagctgcacactgcagccctggagtgccaggactggactgaagctctgtcttctggactcttggaatcaggcaacagttatgctgggggatgtgaagtgcttcctggccacagggaagtactcaggtagagcctctggtagagcactcatactgagcagtggaggctgtgttgtgcactggcttctgtgggagtggccaggcagcgtccctgggagggcctgtcaggcatgagagcctgcagaacagaagcaccccagtcctgctgagaaactggycccactctctcttggacctgcagtctgctggggctagagctactcagagggagatggggtgcccttggggatggggacctctgacagcatgctgctacagctgcaacatgtgccaaagtccctggattctgcccaggttggagctgggtct

SEQ ID NO: 591717 - DNA, 351 bp, Homo sapiens
aaaccagtgaaaataattcatattcaattgttgattaagtatggtcttgctttgtttcacttcccacgggtgaaatctaggatctcttatcaccccacagcctcatatctcccaatcagctggtgttggttaatgccatctccttcagagagaaccagaaaaatgcacttcagaaagaccaaacaaaagcaatggctttcacgttggatgaggtggtctcrtgtagtctcatggcttaatttgtttatctcttaaaagtaatcctcaaaatttttgtccttaagaactgctaaattatttctggccttagggaagcaaattaatttccaagtggctatcctagctacattt

SEQ ID NO: 591718 - DNA, 351 bp, Homo sapiens
aaaccagtgaaaataattcatattcaattgttgattaagtatggtcttgctttgtttcacttcccacgggtgaaatctaggatctcttatcaccccacagcctcatatctcccaatcagctggtgttggttaatgccatctccttcagagagaaccagaaaaatgcacttcagaaagaccaaacaaaagcaatggctttcacgttggatgaggtggtctcatgtagtctyatggcttaatttgtttatctcttaaaagtaatcctcaaaatttttgtccttaagaactgctaaattatttctggccttagggaagcaaattaatttccaagtggctatcctagctacattt

SEQ ID NO: 591719 - DNA, 535 bp, Homo sapiens
agtaagttttttctcttctgaaattcaaaccattctgacatttttcctggacttgcttttctttccttttttttgagacagagtctcactctgttgcccaggctggagtgcagtggtgcaatcttagcttattgcaacctctgcctcaaaggttcaagtgattcttgtgactcagcctcccaagtagctggaattacagatgcctgccaccacgcctggctagtttttgtatttttaatagrgatggtgcttcaccatgttggccaggctggtcttgaactccagacctcaggtgatccacctgcctcggcctcccaaagttttgggattacagacatgagccactgcgcctggccttggacttgcttttcaatggtaattggacagcgtgggttgtaattttgtctttacattcattattttattcctcgagttcctctgccttctgcctctaaactctggttcacttcacccctctcagtaccttttcatactcttcatcttttatcctccttctgccatcctccactcttcc

SEQ ID NO: 591720 - DNA, 355 bp, Homo sapiens
aaaaggacatggtacctggggccacgctgattgacatctggcagcttctaatttcattatgtggttcagtragacaagtgctattgtacaaaagtaaagctaacaagcttaaaccaaagtttatttttttcttcatatgactcaaaaagaaataacatcaaagaaaaatcagttacaattacaaaatgactaaactataagaaaagtgtaaggaccttttgtatcggctatgaatgagaacatactttcccaaaagctgtctttaaaagctgtgaacaccagagaaaagcagtgccgcacacccaggtgctctctgtgggcgtgctctgcagatgacttggggttaggaaagtga

SEQ ID NO: 591721 - DNA, 618 bp, Homo sapiens
atgtgggttggtgccgaaggattttataatggggacggatgtttttaggcgatagcaggtagacactgcattgacaggtgaaaatagggagctgttgcccagggaagaccccttcatgccctggctatgagatgcagaggagtcattgttgtactggcttcatgattcttcaggtaccaaagtctgaaaacaacattgggtttagttctggaggcccgggtgatcccttccttccaatcaattgctcttccttctgcggaagaactgaataaagagggaactttccatgaggctgaaatgtcatcctttgatctccaatccactatgcacctggactggactagcctcatgacaccaggataggacctaattccagcattcaagcaactccatgtctgtacatataaaacatgattaagrggcaatcaaataaggaccaccaccccttctgcctggctggacagcagtcctggagggcagtcaggtccctggtggctgctcctgctgctgctcagcaccaggtgggcacagtggtccaggaggactgtggcctccacactcctagactgggaaagcccccatgtggaggctcccgctttgcaagggatttgggggatt

SEQ ID NO: 591722 - DNA, 298 bp, Homo sapiens
ctggagtgcagtggcgtgatctcggctcgctacaacctccacctcccagccgcctgccttggcctcccraagtgccgagattgcagcctccgcccggccgccaccccgtctgggaagtgaggagtgtctctgcctggccgcccatcgtctgggatgtgaggagcccctctgcctggctgcccagtctggaaagtgaggagcgtctctgcccagccaccatcccatctgggaagtgaggagcgcctcttcccggccgccatcacatctaggaagtgaggagcgtctctgcccggccgcc

SEQ ID NO: 591723 - DNA, 298 bp, Homo sapiens
ctggagtgcagtggcgtgatctcggctcgctacaacctccacctcccagccgcctgccttggcctcccgaagtgccgagattgcagcctcygcccggccgccaccccgtctgggaagtgaggagtgtctctgcctggccgcccatcgtctgggatgtgaggagcccctctgcctggctgcccagtctggaaagtgaggagcgtctctgcccagccaccatcccatctgggaagtgaggagcgcctcttcccggccgccatcacatctaggaagtgaggagcgtctctgcccggccgcc

SEQ ID NO: 591724 - DNA, 298 bp, Homo sapiens
ctggagtgcagtggcgtgatctcggctcgctacaacctccacctcccagccgcctgccttggcctcccgaagtgccgagattgcagcctccgcccggccgccaccccgtctgggaagtgaggagygtctctgcctggccgcccatcgtctgggatgtgaggagcccctctgcctggctgcccagtctggaaagtgaggagcgtctctgcccagccaccatcccatctgggaagtgaggagcgcctcttcccggccgccatcacatctaggaagtgaggagcgtctctgcccggccgcc

SEQ ID NO: 591725 - DNA, 298 bp, Homo sapiens
ctggagtgcagtggcgtgatctcggctcgctacaacctccacctcccagccgcctgccttggcctcccgaagtgccgagattgcagcctccgcccggccgccaccccgtctgggaagtgaggagtgtctcygcctggccgcccatcgtctgggatgtgaggagcccctctgcctggctgcccagtctggaaagtgaggagcgtctctgcccagccaccatcccatctgggaagtgaggagcgcctcttcccggccgccatcacatctaggaagtgaggagcgtctctgcccggccgcc

SEQ ID NO: 591726 - DNA, 581 bp, Homo sapiens
ccacaaaaaatagaaataagaaaagacacattaaaaacactaaatgattttcaaaaattactaggagatattaattggattyggccaactctaggcattcctacttatgccatgtcaaatttgttctctatcttaagaggagactcagacttaaatagtaaaagaatgttaaccccagaggcaacaaaagaaattaaattagtggaagaaaaaattcagtcagcgcaaataaatagaatagatcccttagccccactccaacttttgatttttgccactgcacattctccaacaggcatcattattcaaaatactgatcttgtggagtggtcattccttcctcacagtacagttaagacttttacattgtacttggatcaaatagctacattaatcggtcagacaagattacgaataataaaattatgtgggaatgacccagacaaaatagttgtccctttaaccaaggaacaagttagacaagcctttatcaattctggtgcatggaagattggtcttgctaattttgtgggaattattgataatcattacccaaaaacaaagatcttccagttcttaaa

SEQ ID NO: 591727 - DNA, 581 bp, Homo sapiens
ccacaaaaaatagaaataagaaaagacacattaaaaacactaaatgattttcaaaaattactaggagatattaattggattcggccaactctaggcattcctacttatgccatgtcaaatttgttctctatcttaagaggagactcagacttaaatagtaaaagaatgttaaccccagaggcaacaaaagaaattaaattagtggaagaaaaaattcagtcagcgcaaataaatagaatagatcccttagccccactccaacttttgatttttgccactgcacattctccaacaggcatcattattcaaaatactgatcttgtggagtggtcattccttcctcacagtacagttaagacttttacattgtacttggatcaaatagctacattaatcggtcagacaagattacgaataataaaattatgtggraatgacccagacaaaatagttgtccctttaaccaaggaacaagttagacaagcctttatcaattctggtgcatggaagattggtcttgctaattttgtgggaattattgataatcattacccaaaaacaaagatcttccagttcttaaa

SEQ ID NO: 591728 - DNA, 584 bp, Homo sapiens
taaatatagaatcctaagcccctcaactgactaaatggaccccctcttggccaaggagaccccacagaaacctataaatctaaattcctggccatgatgggaagggaggttggacacactttgatatatcccctccattttggagtttatgcacaacttgccagcattaacactaaaataaagaycataaaactgacaaaacagaatttctgtggcaataagataccagcttacaacctgactctggtatagcatcacataacagatagcagaccctgaagaaaataaaaacattttaccccaaaacatattttttgacatattttgaaatgttcctgcaaagctgtctattgtgagggaaatatatatctgtagagaatcttcattaatgcagccaggctttctttttctagttctttcctggatctaagagagatacatcagagacctttaagatctgaagagatgcttatgtctattctctctgaagactgctacccgaagccttcatctgcataacaagaaccttggcctccacagccctccttaactcaagcattctttctactgacaagtctttagaa

SEQ ID NO: 591729 - DNA, 584 bp, Homo sapiens
taaatatagaatcctaagcccctcaactgactaaatggaccccctcttggccaaggagaccccacagaaacctataaatctaaattcctggccatgatgggaagggaggttggacacactttgatatatcccctccattttggagtttatgcacaacttgccagcattaacactaaaataaagatcataaaactgacaaaacagaatttctgtggcaataagataccagcttacaacctgactctggtatagcatcacataacagatagcagaccctgaagaaaataaaaacattttaccccaaaacatattttttgacatattttgaaatgttcctgcaaagctgtctattgtgagggaaatatatatctgtagagaatcttcattaatgcagccargctttctttttctagttctttcctggatctaagagagatacatcagagacctttaagatctgaagagatgcttatgtctattctctctgaagactgctacccgaagccttcatctgcataacaagaaccttggcctccacagccctccttaactcaagcattctttctactgacaagtctttagaa

SEQ ID NO: 591730 - DNA, 568 bp, Homo sapiens
tccaaactatattaacatccatataactgtttattttaaattacagttcagtataatgtcctaagcttataccaagaggctttagaaggacagttctatgaaataacatcaacatatttactacaaataagtggctgaatgtgtatcttgttaatggtacaggattttgttggtgaggcttactgcaggaatttctggtcttgataaaaggagtatcttcccttttctgaataattatattgttttggcatggagaaaccacatacttttctcactaattgcatttccttgatcacagtaaccactagaaagcttacagtcaagtttatagataccctctaatgtgagytgaggatatcttcagtacctattctaactcctggtttcatattttttcacattcttttattttttatttattttaatttctttaacatattttacttcattctttttcttaaaaaattctttgttctagacaagataaggtaaaccataataaacaaggaagccaatttactgtatggtaataataatcgtttgtaaaagtctatattgctaaaatagc

SEQ ID NO: 591731 - DNA, 591 bp, Homo sapiens
tggagatagggtaattaaagaggtaattaagtttaaatggaatcattaaaatgggccataatctagtatatgttgtgtccttacatgaggaggaaatttggatacagacacacacagaagaaagcccatatgaacatacgcagagaagatgaccatctgcaaaccaacaagacaggcctcggaagaaattaacctggctgacaccttgatctcggacattttgcctttcagaattgtatgaaataaattcctgttgtttatgtcatccagtctgtggtactttgttatggcagcccagccaaactaacacagctagcttttaaaataaggatataaaatattccacttccatggagttatcattttaataagatatgagtgttgtgtttcagccatatgttaatctcattatatatgkttttgtaggtaaacatttgaaatttctatcaaaacctgttactattttcctgtataagttttgagactcttatattaacaccgctattgtactgtaagagtaatcattggggctcaatttagaattctgaaaaaatatgtaaattaaaattttggtttaaagtaaaattgatg

SEQ ID NO: 591732 - DNA, 540 bp, Homo sapiens
ttgatcttcacattgactgcatgaaacaagcaagattattactatacccttttccataatgagagaattaatgctaaaattatttatctgcctaagatcatgcagctaataagtggcaaaatcagaactcagactcatattttctcactccaagtctataccctttctcttatatctatagatgcccacagattacaggactcttcatctatggcctgatctttcttggaatagaaagttttttacatgtgcataactaactttaaaaaaataaacatctaaaactcwtgggagttttaatcacattgatacttgcttctgagactttgggaagacagtaggaggtctaggttctaaaagttgttttgagtttcaattgaactgcagctattttaagacttatggggcatagacaatttttaaatcttagacttctctgatatttctcacgtagattagtacctcaattcaaactggatgtctacgttcttttgcattaaacaatccttagaaatctcttaccaggaagagaaaacaaag

SEQ ID NO: 591733 - DNA, 540 bp, Homo sapiens
ttgatcttcacattgactgcatgaaacaagcaagattattactatacccttttccataatgagagaattaatgctaaaattatttatctgcctaagatcatgcagctaataagtggcaaaatcagaactcagactcatattttctcactccaagtctataccctttctcttatatctatagatgcccacagattacaggactcttcatctatggcctgatctttcttggaatagaaagttttttacatgtgcataactaactttaaaaaaataaacatctaaaactcttgggagttttaatcacattgatacttgcttctgagactttgggaagacagtaggaggtctaggttctaaaagttgttttgagtttcaattgaactgcagctattttaagacttatggggcatagacaatttttaaatcttagacttctctgatatttctcacgtagattagtaccwcaattcaaactggatgtctacgttcttttgcattaaacaatccttagaaatctcttaccaggaagagaaaacaaag

SEQ ID NO: 591734 - DNA, 556 bp, Homo sapiens
tgagtggctgcagcaaagaatgatttattatttctcatcaatctatgggttggctagatgattctaccattgatctttcttgggctcattcctatggttgcaatcacattatggcttgaaagctgcatggttcaagatggatttaytcatgtgtctggttgttcttgctaactgtggggtaagtcatctctcctctcctccatgtggccttttctcctggaagctagactaacttcctttcaccatggtggtctcacagcagagtttcaagaggacaagccccaaggtctatgtgcttatcagaactctatttgtgtcacatctcctgatgtcccactggccaaaccaagtcacatggccaaatccagtcaaagcaggaggaaggttagattacacctcaggatgggaggagtggcaaataatttgcatctatttttaatctatcaaagatgttttggggaattttagaggcaaaattgatggcattgggagaaaaatgagatgtgggaaataggaagagggaagattaaagacgactcgggtaaggagaagttta

SEQ ID NO: 591735 - DNA, 644 bp, Homo sapiens
ataagttatatgtatccaaatcccagtttcagggcaaacaaaatgattgcaagtagagtcttactcaaaaaaactatttaccttctcagtaattgctcctttcagagtaccacatgtcataactcaggccccatggcaaacaagatgaggtaactgtgagcctcagacatagttggccatattcaccaccatgaagagatctgatgtaatagagaatgattagtcctgagttcttcttcattaaaacactggagagaaagtagtagagctgacttcttttctgaattgggacagagagtaatggttcagtgggggaaagattagttggttaaaaaagtaaaaggaaacatatggttctaagggtttttttatattttaaccatgttgggaaaaattttattgataaaagaaggatagatattgtttctgactgccagatatgttaaaataaatattaaaatacctttcacaaaatggttgagaaggtacaggttaaccacctagaagmcaaaatgtaaaaggaactttatatgctgaggaacctggaaacactaaatattttgccaaaaagagacaaaggaactttaatttttttttaattatactttaagttctgggatacatgtgcagaatgtgcagctttg

SEQ ID NO: 591736 - DNA, 562 bp, Homo sapiens
gggatggggtggaccatgggttgttttggaaaaggcaacattcaagttgggaaacaggaatacaagttctcactttgggttgcagtttcaggattgagggtggggttttgttggtaacccacccttttctgcctagaatttctctgcctcctstccctatcactagtaccaattcatctcctagcgtgtacttacaaagtgtgcaatatgatttgttttgatacattgttttttactttttctaaagcatgttagagtaagttgcattgctcttgtggttattttcttcccaacataactctagtttaagggcacaaataaattttgcagtctgactcataaaagcggccaaatgttgactggctacttttgcttaactgcagttctgtaagagaattaagctctatagaaaatgatgacagtggctgttttcttaattctcccagggaacatatctggtatattttagacgtatagaagctgatgtattacacataatgggtttttttcttttttttttgaggactgaattctctcaggaatcctgttgagggcctacggt

SEQ ID NO: 591737 - DNA, 540 bp, Homo sapiens
ttgatcttcacattgactgcatgaaacaagcaagattattactatacccttttccataatgagagaattaatgctaaaattatttatctgcctaagatcatgcagctaataagtggcaaaatcagaactcagactcatattttctcactccaagtctataccctttctcttatatctatagatgcccacagattacaggactcttcatctatggcctgatctttyttggaatagaaagttttttacatgtgcataactaactttaaaaaaataaacatctaaaactcttgggagttttaatcacattgatacttgcttctgagactttgggaagacagtaggaggtctaggttctaaaagttgttttgagtttcaattgaactgcagctattttaagacttatggggcatagacaatttttaaatcttagacttctctgatatttctcacgtagattagtacctcaattcaaactggatgtctacgttcttttgcattaaacaatccttagaaatctcttaccaggaagagaaaacaaag

SEQ ID NO: 591738 - DNA, 554 bp, Homo sapiens
agatctctaaagcctttgccaccaagaaccctaacattytaccttgccaccactgctgccagtttcctgcagcctaggccactaaggtacctacagtcatcactgacattgattatagctgaaaaaacctcatggagactacagtactatgcccacccagacccacactctacccaaatgacagtcaacacactctatccaattgacacaataagacccatcttcaagggaaagtcttcccctataaaagctattgtataaaattaaaaggcaactgtttcatcagatacacagagatcaatacagggacacaagaaacatgaaaaaaaaaaaaaagaaggaaacatgacaccaccaaaggaaaacaatatttctccagtggctgaccgcaaaagaaatggaaatatataagctgcctaaaaagaaattcaaaacaattttcttaaggaaactcagtgagatcaagagaacacagaagacaagtcaatgaaatcaggaaaacagtttgtgatctacatgagaaattcaacaaaaatatagatttaaaaaaaaaa

SEQ ID NO: 591739 - DNA, 534 bp, Homo sapiens
aatcagcactctgtaaaatggaccaatcagcgctctgtaaaatggaccaatyggcaggatgtgggtggggccaaataagggaataaaagctggctaccccagccagcagcggcaacccgctggggctcccttccgctctgtggaagctttgttctttcgctcttcacaataaatcttgctgctgctcactctttgggttcacactaccttttatgagctgtaactctcactgtgaaggtctgtggcttcactcctgaagtcagcaagaccacaaacccaccagaaggaagaaactccagacacatctgaacatcagaaggaacaaactccggacacaccatctttaagaactgtaaccctcaccacgagggtccagaaggaaaaaactccagacatatctgaacatcagaaggaacaaactccggacacaccatctttaaaaactgtaacactcaccacgagggtctgcagctttattcttgaagtcagtgagaccaagaacccaccagaaggaaccaattccagacacaaaac

SEQ ID NO: 591740 - DNA, 515 bp, Homo sapiens
agtcattctactaaaaagatgcatgcacttatatgttcatcacagaactattcacagtagcaaagacatggaatcatcctaggtgcccatcctaggttcccatggtggattatgtaaagaaaatatggtacatatataccatggaatrctaggcagtcataaataagaacaaaatcatgccttttgtagcaacatggatgcagctagaggccactctcctaagccatttaatggagaaacagaaaacacatgttctcacttgtaagcgagagctaaaaattgggtacttatggtaacaatagacatgggggataatagaggagtgaggtatggatgcaagggatgaaaaactaactgttgggtgctgtgctcattatctggatgacaggatcatttgtatcccaaacctcagcatcacgcaatatacccctgtaagaaacctgcatatgtactacttgaatccaagataaaatttgaaatgaaaaaaataaaaataataaatcatcccactttgt

SEQ ID NO: 591741 - DNA, 493 bp, Homo sapiens
ccttttgtagcaacatggatgcagctagaggccactctcctaagccatttaatggagaaacagaaaacacatgttctcacttgtaagcgagagctaaaaattgggtacttatggtaacaatagacatgggggataatagaggagtgaggtatggatgcaagggatgaaaaactaactgttgggtgctgtgctcattatctggatgacaggatcatttgtatcccaaacctcagcatcacgcaatatacccctgtaagaaacctgcatatgtactacttgaatccaagataaaatttgaaatgaaaaaaataaaaataataaatcatcccactttgtgtacatagagaaaaatatcacattgtatcccataaatgtatacaattattatttatcagtcaatgataatatttttaaaatgttgtagtggtgggggctgstcatcatggaataatgaagatgtaatcaggacacagttcaggattacatatatagt

SEQ ID NO: 591742 - DNA, 593 bp, Homo sapiens
taagcctaggtaaaaatttctttaacttgtcaartactgaataaactcatgagatggtggtggaggtgttaaaatacatatgtgataagaggtacaagagaattttgcaaagtttttagagagctaagaggaggaattcctgaactggtctgggagaagccagggaagattgcacagttgatatgacacttgcatggtgtcttaaaagatgaccaaaaatataaagttgacaaggacattttagaactaagtaagaacatgtgcaaagacacagagggatggaggtctctgttcacccacctcccaataatcagcagttcctgagcatgaaaagaagtgaggaaagaacagggaatgaaactagagggcacggagtgttatgatattatgttgtgtgaatacaatattttatatgaaatattcagtgtttatatgcaagaactaattcaaactcttaacaattagactattatataagcaaaaaacaaacatttctgagggaaaattccaattaaataacctgccattttgtaatctttgctctaatatatacatataagaataatacatacattgacttaatcataacccat

SEQ ID NO: 591743 - DNA, 593 bp, Homo sapiens
taagcctaggtaaaaatttctttaacttgtcaaatactgaataaactcatgagatggtggtggagrtgttaaaatacatatgtgataagaggtacaagagaattttgcaaagtttttagagagctaagaggaggaattcctgaactggtctgggagaagccagggaagattgcacagttgatatgacacttgcatggtgtcttaaaagatgaccaaaaatataaagttgacaaggacattttagaactaagtaagaacatgtgcaaagacacagagggatggaggtctctgttcacccacctcccaataatcagcagttcctgagcatgaaaagaagtgaggaaagaacagggaatgaaactagagggcacggagtgttatgatattatgttgtgtgaatacaatattttatatgaaatattcagtgtttatatgcaagaactaattcaaactcttaacaattagactattatataagcaaaaaacaaacatttctgagggaaaattccaattaaataacctgccattttgtaatctttgctctaatatatacatataagaataatacatacattgacttaatcataacccat

SEQ ID NO: 591744 - DNA, 593 bp, Homo sapiens
taagcctaggtaaaaatttctttaacttgtcaaatactgaataaactcatgagatggtggtggaggtgttaaaatacatatgtgataagaggtacaagagaattttgcaaagtttttagagagctaagaggaggaattcctgaackggtctgggagaagccagggaagattgcacagttgatatgacacttgcatggtgtcttaaaagatgaccaaaaatataaagttgacaaggacattttagaactaagtaagaacatgtgcaaagacacagagggatggaggtctctgttcacccacctcccaataatcagcagttcctgagcatgaaaagaagtgaggaaagaacagggaatgaaactagagggcacggagtgttatgatattatgttgtgtgaatacaatattttatatgaaatattcagtgtttatatgcaagaactaattcaaactcttaacaattagactattatataagcaaaaaacaaacatttctgagggaaaattccaattaaataacctgccattttgtaatctttgctctaatatatacatataagaataatacatacattgacttaatcataacccat

SEQ ID NO: 591745 - DNA, 593 bp, Homo sapiens
taagcctaggtaaaaatttctttaacttgtcaaatactgaataaactcatgagatggtggtggaggtgttaaaatacatatgtgataagaggtacaagagaattttgcaaagtttttagagagctaagaggaggaattcctgaactggtctgggagaagccagggaagattgcacagttgatatgacacttgcatggtgtcttaaaagatgaccaaaaatataaagttgacaaggacattttagaactaagtaagaacatgtgcaaagacacagagggatggaggtctctgttcacccacctcccaataatcagcagttcctgagcatgaaaagaagtgaggaaagaacagggaatgaaactagagggcacggagtgttatgatattatrttgtgtgaatacaatattttatatgaaatattcagtgtttatatgcaagaactaattcaaactcttaacaattagactattatataagcaaaaaacaaacatttctgagggaaaattccaattaaataacctgccattttgtaatctttgctctaatatatacatataagaataatacatacattgacttaatcataacccat

SEQ ID NO: 591746 - DNA, 564 bp, Homo sapiens
ttatttttaacttctctttttcactttgtttaaagtatactacttttaaataacaaatatcagagtatgttttaactactttttaaatgtttgggtcatttatgagaatattcagactattctatttactttaacataattattaatgtactacatcttattctttccatcatactttatttttattcattatttgaattattgcattctctttttcccagttttttatttttgctaattgacgaagttgtcattcactatttgttttcattaagttgaacactactcatttttttcattcaggaagtgattgccttctttttctctcctcataatttaacttctaagrccataaactgttttctccaatagggtgtgctctaatcaccttaattatccctgaaatctaaatgaagccaaaactcaaaatacttttactccacttttattctaatctcctaattcctaggttttactggtataatacttacaaagtccttacaatctgcctttttaagagttccttttcagcctttagattatacaagcttggatagtcaatat

SEQ ID NO: 591747 - DNA, 513 bp, Homo sapiens
acagaaacttaagtagcttcaaatgaaaagactgactttacagaattagttraggaaagtctcaaaacaaaaaaatgtaaccacaatcaccaccaacaacaatgagcaacaataataacccataggaaagcatagaatgcgagagcacagaacttagattttcagagttgcaacattatattattttaaatgtcccatttttaaacaaaacaacaaaaatatataagacatgataaacaggaaagtataacccatacacagaaaaacaaaaacaaaagtcaaaagaaactggttcctgaaaaagcccaggtattagactcattagacaagacagacattaaacagctattataaatatgaccaaaaaaaaaagaaaactgtctaaacaattatagtatggaatgatgcctcaccaagtacagaatatcgatacaaagatataaattattttttacaaaccgtatagaaattctggatttaaattaaaataattgaaaataaaatagaggaatt

SEQ ID NO: 591748 - DNA, 393 bp, Homo sapiens
gaccagtatgtctaaacaatggttttcaaacgttggtgagtctcagaggtacctagttaaatatattgaatttgccgcctctcgcactctttcccaacacactcttcatgtcaatttcatatgtttagggtagagtccaaacttcaggatttttagttagctatctgttctctacacttttagaatcattactttttaatgccaccatattgtcatgaaagaagagtcatmccacagagaccacagaagacaaattttataattgtgttttacatctgagaatgaatggggtgaagctccccactctcctttgaactacagggtctttgcttctagtttaagagtccttttcaggtgaattttctcaggcttttccaggggcccaaagctatt

SEQ ID NO: 591749 - DNA, 393 bp, Homo sapiens
gaccagtatgtctaaacaatggttttcaaacgttggtgagtctcagaggtacctagttaaatatattgaatttgccgcctctcgcactctttcccaacacactcttcatgtcaatttcatatgtttagggtagagtccaaacttcaggatttttagttagctatctgttctctacacttttagaatcattactttttaatgccaccatattgtcatgaaagaagagtcataccacagagaccacagaagacaaattttataattgtgttttacatctgagaatgaatggggtraagctccccactctcctttgaactacagggtctttgcttctagtttaagagtccttttcaggtgaattttctcaggcttttccaggggcccaaagctatt

SEQ ID NO: 591750 - DNA, 523 bp, Homo sapiens
gctcggttctaagggcaagcagtctgaggtagagagcctcttctaacctaatgttggaggccacacggtatcacttgtaccacattctattcattagaagcaagtcactaagtgtggcccatagtctatttataggatgaattgtttgtttgtttgtttgtttatttttgattgattgatagtgtctcactcactacattgcccaygctggccttgtactcctgggctcaaggggtcctcctgcctcagcctcgtgaatagctgggactacaggtgtattacatcatacccaatttcctttttatttttgtggacatgtataattgtacatatttatgggattcacagtgatattttgataagtgtagccactgtataatggtcaaatcaggctattagcaaagccatcaccttaaacatttactatttctttgtgctttgaacattgaaaatcctctcctctacctttttaaaaatacactataaatcataatcatagtgaccctacagtgccacggaacac

SEQ ID NO: 591751 - DNA, 523 bp, Homo sapiens
gctcggttctaagggcaagcagtctgaggtagagagcctcttctaacctaatgttggaggccacacggtatcacttgtaccacattctattcattagaagcaagtcactaagtgtggcccatagtctatttataggatgaattgtttgtttgtttgtttgtttatttttgattgattgatagtgtctcactcactacattgcccatgctggccttgtactcctgggctcaaggggtcctcctgcctcagcctcgtgaatagctgggactacaggtgtattacatcatacccaatttcctttttatttttgtggacatgtataattgtacatatttatgggattcacagtgatattttgataagtgtagccastgtataatggtcaaatcaggctattagcaaagccatcaccttaaacatttactatttctttgtgctttgaacattgaaaatcctctcctctacctttttaaaaatacactataaatcataatcatagtgaccctacagtgccacggaacac

SEQ ID NO: 591752 - DNA, 523 bp, Homo sapiens
gctcggttctaagggcaagcagtctgaggtagagagcctcttctaacctaatgttggaggccacacggtatcacttgtaccacattctattcattagaagcaagtcactaagtgtggcccatagtctatttataggatgaattgtttgtttgtttgtttgtttatttttgattgattgatagtgtctcactcactacattgcccatgctggccttgtactcctgggctcaaggggtcctcctgcctcagcctcgtgaatagctgggactacaggtgtattacatcatacccaatttcctttttatttttgtggacatgtataattgtacatatttatgggattcacagtgatattttgataagtgtagccactgtataatggtcaaatcaggctattagcaaagccatcacctyaaacatttactatttctttgtgctttgaacattgaaaatcctctcctctacctttttaaaaatacactataaatcataatcatagtgaccctacagtgccacggaacac

SEQ ID NO: 591753 - DNA, 553 bp, Homo sapiens
cctccccttccctctccgctcctcgtcaggaggagggagagcaacgggacttgctggttgggccctaacctccacaacccctccttctcgcctcgctctttcggcttttcccctcagccctgacgtacgaccgggagcgcgcccgcaattcacgctcagagaaagccgaagatgagaggtggccggggcaagagaggcgggaacaaagttrccgcgcactggcgtgctcgctcccgccatggggccggcaggccgcaccggaagtggcatgatgtagaaaccgctcggcttcccggcgagggtgggactccgtgtgaagaagggttaaagaaaggagaggattcgtgtgccgcccactgctgttgcttgagactctgcccgtggtggcgcgcctgtcgtgcttgttgcttgcgtccagcgcgcagtgccggattccgctgctgcagacgccgcactgcctgcctgttgagcgaaaggtcacagtgagaacaagtgtttctggagactgcgagggaaataatgctgttggtggccttctggagtaggcagttac

SEQ ID NO: 591754 - DNA, 592 bp, Homo sapiens
ttgcagagatctgtggaaaaagcatgatttcctgggcagggtagcacgatcactcaccacctcccttggctggggatgggagctcctctggcctcatgtggctcccaggtgggccgttgcaccaccctgcttctcctcactctccaaggctcgcaccaactgcctagtcagtgccagtgagaaaacctggatacctcagttgccagtgtgggattcactaatcattttcgttcttctcagtgggagcctctgaccacagttgtttctagtcagccrtcttggcccctccttccccaaatattattcctaaaaatggttgtgttttcttcataagctaaaccaagcaaaataaaataaagtactgtctttaatattttcataaataggctaatattaaaattatattatgatttaaggcaatattcaaatgaaagattcagccataatctggtaaggtttcattgattgttatagatcagacactattttaaattagaaatcggtggcaatattttctaaatcttaaaatattcactcctaaggaaacttagattgaaatcaaagtgttaatataaaggggaaaattcccaaa

SEQ ID NO: 591755 - DNA, 628 bp, Homo sapiens
gaaagaagaaagccctattataaatttgtagtaacttaactagttattaataatagaggaagtctttcccaaaacacacttttaaatttcatttatttgatgtcacagaggtcatttatttgcctggaaaatgagaaattaacgagagtatcgcgcgtctgtgtgtgtatgtgtgtgcgtgcgcacgcatattactgttaggggaactgaagttaaagagaaaatgaggaaggatagcttatatagtaccaaaaataatttatctagaaattcaaaattttgtacttcagttactaaaaattaaccatttctagtaccagtaccttaatgccacaccaatggcacacatcctgctggaagatcacaatttaaacagtgtgcagtttttactagcggaaataaagttgcartgtttctcatttttccacatgatcatgtgtaaaagcatttcttgggaataatctagaaataagattgttgacaagtgagtaatcagcatctttaatattattagctattctcaaattagatattaaaataattacaacaatttaggctcaaaataagtatgtacaatttctctttatttgatgtccagaccaatgctttgcatcaaaaaccttcaact

SEQ ID NO: 591756 - DNA, 598 bp, Homo sapiens
gttagccttatgtctacaggaaatcattatttcctctttggtgctgggtgctactttttttttaacaaattttttatttgtattttttatttyttgagacagcatctcactctggttgtcaagactggagtgcagtggtgtgatcttggttcactgcagcctcaacctcccaggctcagttgattctcccacctcagcctcccgagtagctgggactataggcgcatgccagcacacccggctaattttttgtatttttagtagagacaaggttttgccgttgttgcccaggctgagctcaaattcctgaactcaagcaatctgcctgcctcagtctcccaaagtgctggtattaaggcatgagccaccacgcccagtccgtgggtgttactttattcaaaatacctttattgccactgtatcttcaggccatgattgtccttgaaaacattctatcttggccttattgaaattattcttatttgaatgattttccttttattgtcaaggccctcaacaatctagaccaagatgagttcatcaggaaacgaaaggtagcaactaataagacaagtgtcactgctaaaacacggtatac

SEQ ID NO: 591757 - DNA, 598 bp, Homo sapiens
gttagccttatgtctacaggaaatcattatttcctctttggtgctgggtgctactttttttttaacaaattttttatttgtattttttatttcttgagacagcatctcactctggttgtcaagactggagtgcagtggtgtgatcttggttcactgcagcctcaacctcccaggctcagttgattctcccacctcagcctcccgagtagctgggactataggcgcatgccagcacacccggctaattttttgtatttttagtagagacaaggttttgccgttgttgcccaggctgagctcaaattcctgaactcaagcaatctgcctgcctcagtctcccaaagtgctggtattaaggcatgagccaccacgcccagtccgtgggtgttacttyattcaaaatacctttattgccactgtatcttcaggccatgattgtccttgaaaacattctatcttggccttattgaaattattcttatttgaatgattttccttttattgtcaaggccctcaacaatctagaccaagatgagttcatcaggaaacgaaaggtagcaactaataagacaagtgtcactgctaaaacacggtatac

SEQ ID NO: 591758 - DNA, 329 bp, Homo sapiens
atcacttgaacccgagaggcagaggttgcagtgagctgagattgtgccactgctctccagcctgggtgacagagcgagactgtctcaaaaaaaaaaaacacgccacaggggacaaaaaaaaatamccatacagaaagagctggcagggtagcacgtgcctatagtcccagctacctgagaggctgatgggggaagattacttgtgcccaggagattgagtccagcctgagcaacacggcaacactccatctctgaaaaaataatttttaaagaaaaaacatggaaaggcttcatcttaggacaacttagtaacactataagcacagaag

SEQ ID NO: 591759 - DNA, 603 bp, Homo sapiens
agagagaaattttaaagctgggcatctgggggagacatcatgtgtcagtaggttccgtgatgccccacaagccgcaaaaaccagcaagtttttattagggattttcaaaaggggagggagtgtgcraataggtgtggcacagacatcaagtactttacaaggtaatagaatatcacaaggcaagtggaggcagggtgagatcacaggaccacaggaccgaggcaaaattaaaattgctaatgaagttttgggcaccattgtcattgataacatcttatcaggagacagggttttgagatcaacaggtctgaccaaaatttattaggtgggaatttcctcttcctaataagcctgggagcgctgtgggagactggggtctatttcacccctacagcctcgaccatgagagacggccacgcccagggggggccagttcagagacccacccccaggcgtgcattctctttctcagggatgttccttgctgagaaaaggaattcagcgatatttctcccatttgcttttgaaagaagagaaatatggctctgttccgcccggctcaccagagtgagagtttaaggttatctctcttattccctgaac

SEQ ID NO: 591760 - DNA, 532 bp, Homo sapiens
cgaaggcctcggcctttcacattcgggaagcgtcgggattaggtgaaagtacgtagttgtctttcgtaagttaaaatgataattgggccgaaacttactgccttacctaaaaggcagcgcagtcaggatattggtaggtcgggggcggctttggaaacccttaagtttacaagcatgcgcggacttgagtgctcattaggtcgccgggcgtccacgtgcagccctggaccctgaaccccggcgtgcgtgggccgtgggccctcggggaaaggttccgtgcactcggggactccggtgaagcctgttcagccgtctgtgtcatgtggccatcttgagtctactctgtcgctcttgtgccctagcaccccgagaacygtcagtttgagccagatggtgagtaataacctgtagcagtttggttgctggttaattctggattgtgaatctccatgtatctttgggacctgtcagccgtggcagtctcccttcctagccatggaagagcatatccttgtttattggcaaagctgtc

SEQ ID NO: 591761 - DNA, 546 bp, Homo sapiens
cgtagtatttgcaagcttcatgataccctcaaatcaaaaaacatacaatggagacacaaaaaataaaaagcaactaactaaatcatatcaccaatgaaaattaccttcgcaaaaagaaagacatgaaggaaagaaagaaggaagagaagaccacaaaacagccagaaaacaaatcacaaaatggcaggggtaagtccttacttatctataaattgaatgtaaatggacacagttcttcaaaggacacagagtagctgaaggaataaaaaaacaatgaggccaggtgtggtggctcacgcctgtaatcccagcacttygggaggctgaggtgggcatatcacttggtcaagagatcaagaccatcctggccaacatggtgaaaccctgtctctactaaaaatacaaaaattagctgggcgtggtggtgtgtgtctgtagtctcagctactcaggaggctgaggcaggagaattgcttgaatccaggaggcggaggttgcagcaagccgagatcgtgccaccgtactccagcctggtgacagagtgag

SEQ ID NO: 591762 - DNA, 647 bp, Homo sapiens
acagccatgtgctaccatgcctggccaattttgtatttttagtagagacggggtttctccatgttggtcaggctggtctcgaactctcaatctcaggtgatccacccacctyggcctcccaaagtgctgggattacaggcgtgagccactgtgtccagccataaattatagtttttaagatctggaccacctcagcttttctaagagaataaatgcagcaataacaaaataaagccagaaaacaaatgaaaactactacttatcttaaatgtatatagtgttgggtctcagaaaatgatatcaccaaatgaaggcctcagaagtagtctcagaaacaagttttcctttgatcttttcctactttcctgtcactggcccttcattttcccctgaggctagccgcagaaactagaattcctcttttccaaggtgggccatagacaccagaaccccttgtttccacaatcagccataaaacctaaaaatattactcaactcccctcatgtcccagctttctgtgtaaaaactggccttaaaaatttatctgacctaccttgtttgattacataagacccccattccagagagggttcttctccatacccagaaaaaaacaaaacaaaactcaaagaggccaagaaaaatc

SEQ ID NO: 591763 - DNA, 590 bp, Homo sapiens
  misc_feature 1, 2, 3, 4, 5, 6, 7, 8, 9, 10, 11, 12, 13, 14, 15: n = A,T,C or G
nnnnnnnnnnnnnnngcccagtttttaatggggttatttggtttttgcttgttgagttgtttatgttccttatagattctagaaattagacctttatcagatgcacagtttgtaaatattttctcccactctgtaggttgtccgtttactctgttgatagtttcttttcctgtgcaaaagctctttattttaattaggtacaacctgtcaacttttatttttgttgtaattgcttttgaggacttagccatgaattatttgccaaggccagcatccagaatggtatttcctaagttttcttctagaatttttagttggagatyttacatttatatctgtaatccatcttgagttaatttttgtatatgcctttttatgatctttctaatgatatttaacactctcacagtaataataaaactagtatttggcatcattaaattaatgccaagtaagttaatgctaaaccaatgcaatcaacgtaattagaaaacatgataggctgattcaggagattatataatgaagcaaaggagaacaaagctgggaattacagctgggccagccaaccaaaaatattcacccctttt

SEQ ID NO: 591764 - DNA, 601 bp, Homo sapiens
gggactacaggtgtgcatcaccacacccagctaatttttgtatttttggtagagacagggtttcaccatgttggccaggctggtctcgaactcctgacctcaagtgatccacccgcctcagcctcccaaagtgctgggattacaggcaaacagaactaacagacatttacaggacatttcttccaacaatggcagattacacattcttctcgtcagcacgtggaacattctccaggacagactgaccatgtggtaggcacaaaacaagcctcagtgaatttgaaaaaatcaaaattatgtcaaaaatctcttctgrctacaatagaaaagaactagcaatcaattaacatgacaaattttggaaaatgttcaaatatatggaaattaaacaacacgctcctgaacaaccaatgggtcaaagaagaaattaataagaaaattaaaaatttcctttaatacatgaaaatagaaacacaacataacaaaacctatgagatacagcaaaacagtactaaaaggtaggtttattgcaataatcgcctacatcaaaaagtacaaagatttaacctaataacacatctcaaggtactagagaagaaca

SEQ ID NO: 591765 - DNA, 551 bp, Homo sapiens
gatattacaaatggatcactgaagtacaaagaatcactagagactattataaacaactatacacaaatacactggaaaatctagagaaatggataaattcctgaacacatacaagctaccatgactgaatcaggaagaaagagaaacctgaatggactgaggctgagtaatgcgcttgaagcagtaataaaagtccctcaatgaagaaaagcccagaacgggatggcttcactgctgaattctaccaaacttttaaagaactaacaccaattcttctcaaactatcccaaaaaaaytgaagaaggaattcttcccaatttgttttatgaggccagcattaccctgataacaaaaccagaaaacaagcatacaacaaaaaaaaggaaactacaggccaatacccgtgatgaacatagatgcaaaaatcttcaacaaaatactagcaaactgaatccaacagcacaacaaaaagataatacaccacaatagagtagtgttaattgcaaatcaatatacatgatgtatcacatcaacaaaatgaaggacaaaaa

SEQ ID NO: 591766 - DNA, 572 bp, Homo sapiens
acattaagtgaaataagtcaggcacagaaatttaaattttttaatttcaatatcacccagatacggacatttttaaaaacttgatctcatggaaatagagtagaatagaggctgggaagaataggaaggtgacggrgggagtacagagagacattcgttaacagatacaaaattacagatagcaggaataagttctagccttctatagcactttagagtaattatagtaaacaataatttattatattttctcaactacctagaaatcttttctaacattttgaatattatcaacacaaagaaatgataaagttttgaggtgacagatatgctgattactctgatttgatcatttcatattgaatatgtctgaaaatatcacactatataccccataaatatgtacaattattgtgccaattaaaatatacatattacaaaaagagaggcatcgcttaaagagaatacaacattggtcagaaagtaaagtatctatttctggagatttgtgaaatatcattaacagattttagagtgtacatgtaaccctcaagaatatcaattttcattag

SEQ ID NO: 591767 - DNA, 619 bp, Homo sapiens
aggggccggggtggaatgatatggtttggctgtgtcccaacccaaatctcatcttgaattgtagctcccataatccccaagtgtcaagggagggacctgatgggaagtaatttaattatgggatcagttaccctcatgttgtcatggtagtgagttctcacgagctctgatggttttatttatctatctatttatttatttttattttatttcattttattttttgagacaaagtctggctctgttgcccaggctggagtacagtagcgtgatcttggctcactgcaacctctgcctcccaggttcaagcgattctcctgcctcagcctccctagtagctggtattacaggcatgtgcccccacactgagctaattttgaaacatggggttttgccatgttggccaggctggtcttgaatgcctgacctcagatgatctgcctgcctcggcctcccaaagtgctaggattacaggtgtgagccactgcacctggcctctgatggttttataaagggtagttcctctgcacatgctctytcacctgctgccatgtaagatgtgcctttgctccttcttcatcttctaccatgattgtgaggcttccccagccatgtggaa

SEQ ID NO: 591768 - DNA, 551 bp, Homo sapiens
gagaactgagaaggatattcatagcatgttctctttaagaatggattaccactatgtttgactatatttgaagttgtatttcaaataatgaagctactgattattgcataagtctgcattctgtcagtaccaactatgagaaggggaactcccttcccttctgcaaataaaatacagaaaataaccattcctacttcataggtgtgtaatgaggattaaatagatgaatatatatatatatttatttatatagaatatatatatttatttatatagtgtgtatatatatatatatacgcacacacatatatatatatgtgtatatatatatatatcccaaagcttggcataccatcaatsatcaggcatcagtgcagtgagtgagagaatggaaagtaagttatatgactcctcagcttcctcttccgcttctgcaagccaacacaccccacttaggactctcacttgcccagatactctggtagtggcttcctcccctaagtgacccgactgtgagcaactgtcagctatcactttgccatgggtagttt

SEQ ID NO: 591769 - DNA, 621 bp, Homo sapiens
atagtatatttaattactgtggttaagcagttgaaacattaaaaaaaaaatgtccctgtagatttctgtttagagtagtggctgcttattttaaaaaataatttttaaatggtgaattttgccaaaaagcatgtgtacttcttattacttctaaattcttgtgtggccaattacattcttccatcaaaaggaagcatacttttgggtcactaagttagaaaatacttagaagtttccatcaagttgtgaattgtcagtttgttttttgatattttaaacaagtttcacgtgaagtactcagctttcagttttatactccaggcaatcagcatctagcatatggtatacaagtcaccaaacggaacaggacggcttcgtaagcaaggcakctggtagattccacagttcctttccaaattactcatcatgttttgagttgctgctgggaaaaaatgtggtgcccatctccaaaatagatgttctttttttatttttaggcttgggagaggcttccaatagaaaaataagacagatgggtataggaagcaagatatttttcccaatttagaccattttcttctgtcagtttcctcatcagaagagttttccaaataaacaaat

SEQ ID NO: 591770 - DNA, 621 bp, Homo sapiens
atagtatatttaattactgtggttaagcagttgaaacattaaaaaaaaaatgtccctgtagatttctgtttagagtagtggctgcttattttaaaaaataatttttaaatggtgaattttgccaaaaagcatgtgtacttcttattacttctaaattcttgtgtggccaattacattcttccatcaaaaggaagcatacttttgggtcactaagttagaaaatacttagaagtttccatcaagttgtgaattgtcagtttgttttttgatattttaaacaagtttcacgtgaagtactcagctttcagttttatactccaggcaatcagcatctagcatatggtatacaagtcaccaaacggaacaggacggcttcgtaagcaaggcatctggtagattccacagttcctttccaaattactcatcatgttttgagttgctgctgggaaaaaatgtggtgcccatctccaaaatagatgttctttttttatttttaggcttgggagaggcttccaatagaaaaataagacagatgggtataggaagcaagatatttttcccwatttagaccattttcttctgtcagtttcctcatcagaagagttttccaaataaacaaat

SEQ ID NO: 591771 - DNA, 580 bp, Homo sapiens
tatgcatccatctattcatttacatgtaacacaattaccaaaatttatttaaacatagttattggtgaattaaacttaagcttaaaagagatgcagaaagcttactaagtcaatgaattgaaaaattttatcttccaaatgtttacaaataattaccacttaaatatctgcaaaagcaagctgttaacttacttagatttcacaaagccaaatgaaaaataagatatattaaaaccacaaacactcagatttcatgccaaagaacacagctccactatccctcccccacttagggtaagcatctacttaaaacattttacttaattttgtttaaataggcatgcaggcaataaatatgcagcagctaaaaatatccctaaaatactgggactcggagtaacttaaaagaagtgtggaaagtcgtagaattttttaatttagttcataacttttttcttaacatcaaacataactaataattgattattttatacatacaraaaaggagagcaatgctttcttattgtatcctaatacaatatatttttctcctataagaaaagctagcagttcataaaca

SEQ ID NO: 591772 - DNA, 608 bp, Homo sapiens
caaaactagctgtgacttcctattgttttcaggacaaatacaaacattttaggcttgcatttaaaactgccataaccagatgtcttctacttctagatttagctagaagaataacccagcttaattttattagaggctaaggcatgaactaatayagtcctaatttatagaccttgacatgagaaaaagcattgtctatttaccaatcatgccaactaaacttaactacccttactcttccatcctttaattatcatggttacttttctgtctgcaagttttgccttaaaattctgcttattaaatatgtcataagtggttagggaaaaaacttatccactacttttttatccactactttcattgtgaagccatccattaccatactataaaaatcgaattactgcctttttgaaaacttattgctacagcaataattctgcacttagttacattttgtattgttatctattttgatgaaggcagacatcttgtctgcttcactcactgcaatatccacactcccaaacatagagtttttaacatccagtagcaaaatcaagtggttaagagcacaggctcaggagcaaaatggccagagttgtatt

SEQ ID NO: 591773 - DNA, 631 bp, Homo sapiens
tttttgaaaacttattgctacagcaataattctgcacttagttacattttgtattgttatctattttgatgaaggcagacatcttgtctgcttcactcactgcaatatccacactcccaaacatagagtttttaacatccagtagcaaaatcaagtggttaagagcacaggctcaggagcaaaatggccagagttgtattcatggacttggcctcttaatgtgcttgtaagrgttggcaatatacttaaattttctgggtctctatctcctaattagcaaaataagtgctaaagataacatctatttcgtggagtgagtgtgagctttaaatgacatataaagtacttaaaacaggcacacaaaaagcacgatacatgttagctattattattccactactaggagctcaagaaacactagtggtgaatacatgatacatatcttgtttcctactgatataaaggccaactgtgaatggcttcaatatttcaaattactttacctgagtatagtttagagcaagtactaggctaaaatgcatgcagataaacactttctgtttaactttgccagtaaaaatgtgagaaaaacaattattttgataatggcctcagaaaagttactggtgat

SEQ ID NO: 591774 - DNA, 580 bp, Homo sapiens
taatcccagctacttgggaggctgaggcagaagaatcacttgaacctaggaggccgaggttgcagtgagctgagattgtgccactgcactccagcttgggtgacaagatcgaaactccatctcaaacaaacaaccccacacataacaaacagtcaacatggcaacattatatgtaataattttaatttttacttattcatttggatatgtatggggggaggggataagtcaaaatggcaagagagttgggcgaaactggcccctttcaccaccacgaagacacacctgttgttatttgttaataatcaaagagcaaaacagttgtctaattgaatatatgtcatgccagattaattatttaattaactgggcaaacttgccactcttttatttaaaactatgagagcaatgaattcatattaccctccctaaatgtaagcctgcttgtcagccatttctccccatygctgaccactctgtgattctgtggtttcttccatcatcttcctttagacctcattactataacaactgaaacttcctggtccactgaccacaaactaccctatacttcaatgcc

SEQ ID NO: 591775 - DNA, 612 bp, Homo sapiens
tatacttgtttggtagaataaaagattttaagaggaaggagagcagacatcttttgcttagaggacaagagtttcgtatctgggtttacagaccagtttcccacttactggataagttactcaatagttactgcctacatttttgcacatgtaaaacagatataaagttactacttttttcagttattttgagaattacaagagacaatgcatatcaactactcagaatggacagaacattcaataaatgccactcatttgtgttcttttttttcccccakatcctctatcttagagcaaacccagctcctcttgatttctaaagctttctttactcccaacttctccaggccctatgagtatcccacaaacagcctgactcagaataacaataaacttgcttgaatatacatctgtaatgtttgtctttaaggtagatgaaccttaatcctttgtttcctgatgagtcagcaaaattatcagacaggaaccatttcttctgttgtagtatcagaactcggtttcaatgattaaaaggggaacagactgagctacttgtcttccatagctttctctctagtttcacctcctttattccttatttatttatat

SEQ ID NO: 591776 - DNA, 573 bp, Homo sapiens
cttaatggcatctataatggtatatcctttccagaaggtttttaattaaccctgcccagatccttcagttgaattactgtctacagcagctatagccttggaaaatatatttcttaaataagacttgaaagttgaaattattccttgatccatgggctgctgaacagatgttgtgttaacaggtataaaaacattaatctctttgtacatctctrtcagagcttgggtgacaaggtacacgtagatgagaagtcatattttgaaaggaatttttttttctgcagagtagatctcaacactgtacttaaaatatttcggtaggtaaaccatgctgtaaagagatatgctgtcattcaggctttgtttttccatttacagagcacaggcagagtagatttggaataattctaagggtcatagaatttttgaaatagtaaatgagcatcagtttcaacctaaagtcaccaactgcattagttacttacaagagagttagtctgtcatttaaagccaggcattgacttcttttcttcagccatcaaagtcctaggtaacatcttctttcaatatatg

SEQ ID NO: 591777 - DNA, 573 bp, Homo sapiens
cttaatggcatctataatggtatatcctttccagaaggtttttaattaaccctgcccagatccttcagttgaattactgtctacagcagctatagccttggaaaatatatttcttaaataagacttgaaagttgaaattattccttgatccatgggctgctgaacagatgttgtgttaacaggtataaaaacattaatctctttgtacatctctatcagagcttgggtgacaaggtacacgtagatgagaagtmatattttgaaaggaatttttttttctgcagagtagatctcaacactgtacttaaaatatttcggtaggtaaaccatgctgtaaagagatatgctgtcattcaggctttgtttttccatttacagagcacaggcagagtagatttggaataattctaagggtcatagaatttttgaaatagtaaatgagcatcagtttcaacctaaagtcaccaactgcattagttacttacaagagagttagtctgtcatttaaagccaggcattgacttcttttcttcagccatcaaagtcctaggtaacatcttctttcaatatatg

SEQ ID NO: 591778 - DNA, 590 bp, Homo sapiens
tccttcagttgaattactgtctacagcagctatagccttggaaaatatatttcttaaataagacttgaaagttgaaattattccttgatccatgggctgctgaacagatgttgtgttaacaggtataaaaacattaatctctttgtacatctctatcagagcttgggtgacaaggtacacgtagatgagaagtcatattttgaaaggaatttttttttctgcagagtagatctcaacactgtacttaaaatatttcggtaggtaaaccatgctgtaaagagatatgctgtcattcaggctttgtttttccatttacagagcacaggcagagtagatttggaataattctaagggtcatagratttttgaaatagtaaatgagcatcagtttcaacctaaagtcaccaactgcattagttacttacaagagagttagtctgtcatttaaagccaggcattgacttcttttcttcagccatcaaagtcctaggtaacatcttctttcaatatatgcatgctttgtctacattgaaaatctgtttagtatagccactttcatgaatgaacttctggataacttgaataacttg

SEQ ID NO: 591779 - DNA, 590 bp, Homo sapiens
tccttcagttgaattactgtctacagcagctatagccttggaaaatatatttcttaaataagacttgaaagttgaaattattccttgatccatgggctgctgaacagatgttgtgttaacaggtataaaaacattaatctctttgtacatctctatcagagcttgggtgacaaggtacacgtagatgagaagtcatattttgaaaggaatttttttttctgcagagtagatctcaacactgtacttaaaatatttcggtaggtaaaccatgctgtaaagagatatgctgtcattcaggctttgtttttccatttacagagcacaggcagagtagatttggaataattctaagggtcatagaatttttgaaatagtaaatgagcatcagtttcaacctaaagtcaycaactgcattagttacttacaagagagttagtctgtcatttaaagccaggcattgacttcttttcttcagccatcaaagtcctaggtaacatcttctttcaatatatgcatgctttgtctacattgaaaatctgtttagtatagccactttcatgaatgaacttctggataacttgaataacttg

SEQ ID NO: 591780 - DNA, 590 bp, Homo sapiens
tccttcagttgaattactgtctacagcagctatagccttggaaaatatatttcttaaataagacttgaaagttgaaattattccttgatccatgggctgctgaacagatgttgtgttaacaggtataaaaacattaatctctttgtacatctctatcagagcttgggtgacaaggtacacgtagatgagaagtcatattttgaaaggaatttttttttctgcagagtagatctcaacactgtacttaaaatatttcggtaggtaaaccatgctgtaaagagatatgctgtcattcaggctttgtttttccatttacagagcacaggcagagtagatttggaataattctaagggtcatagaatttttgaaatagtaaatgagcatcagtttcaacctaaagtcaccaactgcattagttacttacaagagagttagtctgtcatttaaagccaggcattgacttcttttcttcagcyatcaaagtcctaggtaacatcttctttcaatatatgcatgctttgtctacattgaaaatctgtttagtatagccactttcatgaatgaacttctggataacttgaataacttg

SEQ ID NO: 591781 - DNA, 592 bp, Homo sapiens
gctttgtttttccatttacagagcacaggcagagtagatttggaataattctaagggtcatagaatttttgaaatagtaaatgagcatcagtttcaacctaaagtcaccaactgcattagttacttacaagagagttagtctgtcatttaaagccaggcattgacttcttttcttcagccatcaaagtcctaggtaacatcttctttcaatatatgcatgctttgtctacattgaaaatctgtttagtatagccactttcatgaatgaacttctggataacttgaataacttgataaagcttccatattagcccttgatgctttaccttgtacttttagttatgaagatggcttttttcctcaaatctcatcaaccaacccctggtagcttcaaatttttcttctacagcttcctcacctctctcagccttcaaggaattgaagacagttagggccttgctctggattaggctttggcttaagggaatgttgtgactcactgatctatccagactctaaaacttycttcatatcagcaataggctgtttgactttcttatcattttttgtgttcactggagtagcactttta

SEQ ID NO: 591782 - DNA, 565 bp, Homo sapiens
atcaatataggaattaatactcaagccagttgtaacaaaatgtttagagcaatctcagttggcagaagatttaacattggtcatcacttatttttgaccacagaaagaaagctagactaactactgttttgtaatatagcatgagctagtgtaaggcctcaaaggttttccattaattgtatcagacgtaattctgaatatccacctgttttatgaacgataacagtcacattaactggctcttctagttcatcaactttgcttcccacaaatatggtttgccttttccataacaatttcttcatttagaaacatttgagagtcaatcttctataaaatattataagtagttaaatgatagccggtatcttaagcattacatttggtgtgttcttaggaatatagaataaaacrtaggctttggacagaatatcttatttttcaagtgtatgtatctggacatttttgttgacaggtgaaaacataagatctttttaatgattaataattatcttttattcttttaaagaaatatggaggtacaaagaatcaaagaccttgccca

SEQ ID NO: 591783 - DNA, 449 bp, Homo sapiens
aaaatttaggcctctcagataattaagaaaatctcaatctacattttaaataggtcttaaacttgtggaatcataagatttattggcttatttagcagattaagaaatgtagaygctgggaattaagtgatttctaatgttaatatcatgcctaattagtgattaatgaaagacttttaaaaggtaaatggtaagcaaaatataaatggcacatttcagcatatcacatcaaaggaatgtgtgggattttccttgttttagctatagcactgtaatatgttaaaaagatcatgatctttgaagtcatgattttgatgaaaccactctgccacttactagctaagtaagcagtaagcttatatagggcactaaatcttctagagcccctgtcaattagttggcaccagtattgtctacttcatatattttgggagggttgaagtggaggc

SEQ ID NO: 591784 - DNA, 449 bp, Homo sapiens
aaaatttaggcctctcagataattaagaaaatctcaatctacattttaaataggtcttaaacttgtggaatcataagatttattggcttatttagcagattaagaaatgtagatgctgggaattaagtgatttctaatgttaatatcatgcctaattagtgattaatgaaagacttttaaaaggtaaatggtaagcaaaatataaatggcacatttcagcatatcacatcaaaggaatgtgtgggattttccttgttttagctatagcactgtaatatgttaaaaagatcatgatctttgaagtcatgattttgatgaaaccactctgccacttactagctaagtaagcagtaagcttatatagggcactaaatcttctagagcccstgtcaattagttggcaccagtattgtctacttcatatattttgggagggttgaagtggaggc

SEQ ID NO: 591785 - DNA, 568 bp, Homo sapiens
  misc_feature 199, 201, 203: n = A,T,C or G
atcctggccaatatggtaaaaccccgtctctactaaaaatacaaaattagctgggtgtggtggtgggcgcctgtaatctcagctactctggaggctgaggcaggagaatcgcttgaacctgggaggtggaagttgcagtgagcccagaccgcaccattgcactccagtctgggcaataagagcgwgacttggtctcatnananagaaaaaaaaaaaaaagaaattgagctgttcattttttctttagtttctaagctcttgcagagatgtggcaagtcactggtggtttcctttggagaggactttgttgcaaagccttctctccttgccttgtggtcagctccatttgccttctgcccattcagagccgtcgcagatgctggtgggctatcctttgtctctgagaggcattgagaagactatactcaaaatttctgatgtgcttgccatttgcaaagcatcacttcccttttaagagaagaagttattctttatcaagaaaaaaaaatgcttacactttggatggtttgcacagaagcagaccacatattttctcagaaatatgcag

SEQ ID NO: 591786 - DNA, 352 bp, Homo sapiens
atttctgtatcattcctattttaatatatgggctgctgaagtgagcattccaaccctgtttttgggataagagcacttaacatgaratttatgtttaaacaaaatgtttaagtttacaatacagtaaactataggcactatgttgcacagcaaatctctaaaacttattcatcttgcatgtaaaatgttgcagccattatggaaaacaatatggagattcctcaaaaaattaaaaaaataaaactaccatagtacctgcaacctcacttctggctatatatccaaaagatttgaaatcaggatctcaaagagatatttgccctcctatgtttattgcagcattattcattgg

SEQ ID NO: 591787 - DNA, 590 bp, Homo sapiens
atttctcctctgtccacgtggtcttcatgcttcaaccaacaggtcccactgcctagaaacttcccacataatcctttcctatgctgtcagttaattatcgactttcatacwttgttactgaattgtcgaatgcgtgaagtcttgtcttatcagctatacgatgttcctaaaggtcaggaattgtgtcatcttttcttttcctctgtatgcattagtgctgaatgagtcggtaaatgcagaatatactcaagctgtggcttagacccattcagcctagtttagcatattcagtggattcctgcttactaaggagggtgatgggatgataggttgtacattgattagagaataacaacccaaataatcatgtgaaaatggaaaaaaaaaagcctaacatgtaataataatggtagtattttaagagaaaaactacgtaactttattcttgtgtgtgagccatgtcaaatgtccactctttaagagcatatttaggcataaagaagaagattatagaacatataagatcctattatgattatttgacttttaccagcatacttataagagcattgttaagaaattagagccat

SEQ ID NO: 591788 - DNA, 566 bp, Homo sapiens
ctagggataagaaaaggagaaagtccaggggaagttataaaagaattatgggttttttctttaaactttcttaaaaaaacaaaacaaaaaaaaaaccttagaaacagcaaaatgaaataaactactagagtaatgatttaagccagggtaatcagaactggttggattgtgaaagctgagtaacaattcagtaaaatagattacgtatttggtcagtggttagttgactattgttagttaaccttttttttttctttacatctataaatagatagtccctacgtagcagaagcagagaatatctgsgcaaaggctgactccgcaagataaggatttactctgttaaactgctttctaatagaatgtcgatatctctgcctgtcagcctgccttggtaaatgtgctggagagggccatgtgtgtatggttcctggtgcccacacaggctcacctgtgtgaaactgcatcagcccatacatggctacttgctggctcctggacccatatttgcacttgtttctccccttctgttgccacatcactttccctgaggtcggattgtgtgt

SEQ ID NO: 591789 - DNA, 566 bp, Homo sapiens
ctagggataagaaaaggagaaagtccaggggaagttataaaagaattatgggttttttctttaaactttcttaaaaaaacaaaacaaaaaaaaaaccttagaaacagcaaaatgaaataaactactagagtaatgatttaagccagggtaatcagaactggttggattgtgaaagctgagtaacaattcagtaaaatagattacgtatttggtcagtggttagttgactattgttagttaaccttttttttttctttacatctataaatagatagtccctacgtagcagaagcagagaatatctgcscaaaggctgactccgcaagataaggatttactctgttaaactgctttctaatagaatgtcgatatctctgcctgtcagcctgccttggtaaatgtgctggagagggccatgtgtgtatggttcctggtgcccacacaggctcacctgtgtgaaactgcatcagcccatacatggctacttgctggctcctggacccatatttgcacttgtttctccccttctgttgccacatcactttccctgaggtcggattgtgtgt

SEQ ID NO: 591790 - DNA, 573 bp, Homo sapiens
gtcaaaatgtagaacaatgatatcagactgctactcagcaaatgtgaaaggcgtcactggctggtcactaacgtgctccaaagcttaccagaccatatgaaaagatagcacagacccacccaccgtctcagatgcttttcacgttatcagtggagacaaaaaatgatgcttaagttacaacaggcagggttcagaatgctgaaccaattgccatactatttatcagctgtgcatttgaggtctgtgaaagggctaagaattcattaattagccattacctgagaccagttatagctctgagcagacaagatcagcatgacatcaataattacaacaagaagtaatgttgctgtcacccttacagtatagtcttttcttgacaagcttgtttgagcattattggaatattgtgaggtagaaataatgagtattcccattttctggaagcccagagrggtccatcataacatgttagcctaatgagagagcagggactcaagctatgttttctgactccaaatccatgaccttggcattgcttcccagtagacccccattgtgagaagacgggat

SEQ ID NO: 591791 - DNA, 579 bp, Homo sapiens
attgcatgttaccttcagaggaaaaatctaacagcagatctctcgtgtgttgaaaattctcagattgttttgtgtaaatttattgttgttttgctacttaattgttaaatttgtaattagtaaattattcgactagtaaatttgttttcatgtgatagtagataatcatctctcacaaaaccaatttaacaaattcaaaattatgaagagaaacctgcaaatcgtagtattctgtagtctttctttttattttttatttttttgccttcatactttctattccaattcctgcayctagattatacattcttcattggtgtagaaaaaaaggaccagtttggctcaaatttgtgattttgattttaagttggactgcagcacttttgctaaattgtggttcatatgagctcgtaatggtatagtggacattttgattctgatctgtctccctccacaacttccctccccctcccaaactgatgcacgtataattttatcatataaacccatgacttagcttcaggggaccatgttgggaagacttaacatttgatgaactgtaaccgtgtaccttattca

SEQ ID NO: 591792 - DNA, 561 bp, Homo sapiens
atggaattttagtagtaaataaaggccatgaagaaaaccaaaggctgggtgaggtggtagatggtgatgctgttgggaagctgttttggagagtgtcactacaccactgcttctcctcattgacaagggagcctgcctagtccctttccaattctccgtttgaagaggaggttaaaggagtggacctctttgggaagtgcaactcaagagagtggcaggctttatatttcctctatccttttttgcagcatctggaggagcagaggatggggggttagagagtggttaaagggcactgtctgtttatcactatggtgacctacatgtatttctttgtgctgaccatgctgttttgggtgacacttctttatattcartgctcttcttctggaatcaaattccttacctgctgcttctgtccacttgggggattttttttttttctcactcatcctttaaaatcatggccaagcattgtcttcctttcttagaaccttccttgatgactctgtccgatgcagagttgactactctctctttttagaggggttagtgttactc

SEQ ID NO: 591793 - DNA, 428 bp, Homo sapiens
ggcagtcgtccccagggcccagggttcttcctggaaagcatctgggaagctcttgaagggtcagaattcattgaatagacacaagaaacagaacccagcacatctcagggcacgaygagaagcccataatggcatcaggagccattttctctgagcagcccgaagctttgcagcgagtgctctgaggcagctggaagtgcctctctatgaagacccagtttgtgcttcagactgagcttttccagaggaaggtcacagacagaaatgctcacagatctgtggtctctacattttcttcttaccaattacaattgtcccttgggagactggttctaggaccccatggataccaaaatccaaagacgctcatgtgccaagtccctaatataaaacagcgtagtatttgtatatacctactcacatccccc

SEQ ID NO: 591794 - DNA, 433 bp, Homo sapiens
ggcagtcgtccccagggcccagggttcttcctggaaagcatctgggaagctcttgaagggtcagaattcattgaatagacacaagaaacagaacccagcacatctcagggcacgatgagaagcccataatggcatcaggagccattttctctgagcagcccgaagctttgcagcgagtgctctgaggcagctggaagtgcctctctatgaagacccagtttgtgcttcagactgagcttttccagaggaaggtcacagacagaaatgctcacmgatctgtggtctctacattttcttcttaccaattacaattgtcccttgggagactggttctaggaccccatggataccaaaatccaaagacgctcatgtgccaagtccctaatataaaacagcgtagtatttgtatatacctactcacatccccctgtat

SEQ ID NO: 591795 - DNA, 589 bp, Homo sapiens
tgactatgtacctgaaaaattattgcattgtgtatgttttaaagtgctacctagtacatattggaatttcaaactagatattttagtgtgttaatcctttttaaaagaaataatcttattctggaaaaaatttttgctctaagatgatttcagttagtagaaattgagttcaaatcagaattttctgcttgattcttgcactcaaaatatagacacatttaaaatatttgacatagggaaatttgttttaaattcatttaaccttttactttttaaaaatatgctcaatatttctccttagatgaactgaatttatcaaaatgaaatagatcaaagtatcccaaaattatactaacatcaaagtaatctttatctataggtgtttataatttgaaatatctaccaaccaccacccaagtatttrctgagcacctaatatgtgaaaggatgtaaagtgtgacaactgctttatatgcattacctcaagcaatgttcacaacaaacctctgagacaagtattgtcaaagaacgttgttcacatttgaggaaactgaggtttgggaggctgagtaacttgcactgaatcact

SEQ ID NO: 591796 - DNA, 563 bp, Homo sapiens
cactatagctttaaagtgatcatatccttgaaattattagctaagcttgagactggttaacagctcaggtttatgcaggtatatgatcctttatgggtctcataaatgattctggacttcttcataaatgagaatcaaaattattgaataaaaagtttcttgggaacaggaaagtcacagagattcaaagtatcaccttgcatatttcttagtacttacaatgccatgacattctacaagaaagttgacctagatttttgaagacagttaatttsataaataatttttttaatttaaaaagaactagaaatgatagagtatataaaacacataacaaaataatatattaaaacataaggaatacatttcatcactttatttactccaaaaccttttcacagaggtggcaagaattcaataaatatttgctgaatttctctataagtaaggtgggtatcttttaaaccactcagcctgtgccttaagtagaggccaaggagaaagacacagtcaatgactaatatttggattttgttacaaatcacatcagaacaataattcat

SEQ ID NO: 591797 - DNA, 582 bp, Homo sapiens
tgatgtttgcttcaatgtagtggcatccttagcctcggttgaaactcctattattatctgttggtaaatactccctgacctggaccctaaggaaaggcaaaacaacttatttctagaaaaayggctttctatagtaaagttttccaagtccaagtgctgttcttccatcttaagtgatgtttggtgcaaaaaaaaaacatcgtatgtgtaatgaattctagacattttcttgaagagagctataggagactttgatctatgttcttttcatgggagatgggagaagcctacctctgcttagctttctgaaacctctttaggctttgacttgcattaatgaaatgaattccttcagtgcttatgttgcatgtattttaaaagcatgtaataaaaatctactacctaggctttatgtgagttactttattttaaaggcaaagagatcaaatcaattacagtcttgttactgagatctgcaacataaactctaagaaacctgcacatcatcacttctaaactactcctgtgaatttatgaattaagaataaaatgattaggcttctggttctgtaccagtaaacc

SEQ ID NO: 591798 - DNA, 458 bp, Homo sapiens
aattaaagtttataatgaataacactttatttggtataaacatggtgtctgtggtacatttgaataatatattaatgacagtttcaggcacatatttttatgatgtaatattataagtcctgtaagcattacagtgagtagctttgcatctctaacttcctcttaatgctttaccagggggaattgtaggctttktggggcctaaatcttgtgtaatttggggctctttttaagggaaataacacaaaattacaaaaagaaaattaattcaaaaagtgaatacttattaagaatgagaaaattactaatgagatttttaaagctaatcacacaatttggaaaataagatacttttattaattacttttctaacatgcttttataatttgtaatttttttacactttagctgtatagtcttaatagtcccttcatatcataattttaatatcattttct

SEQ ID NO: 591799 - DNA, 458 bp, Homo sapiens
aattaaagtttataatgaataacactttatttggtataaacatggtgtctgtggtacatttgaataatatattaatgacagtttcaggcacatatttttatgatgtaatattataagtcctgtaagcattacagtgagtagctttgcatctctaacttcctcttaatgctttaccagggggaattgtaggctttgtggggcctaaatcttgtgtaatttggggctmtttttaagggaaataacacaaaattacaaaaagaaaattaattcaaaaagtgaatacttattaagaatgagaaaattactaatgagatttttaaagctaatcacacaatttggaaaataagatacttttattaattacttttctaacatgcttttataatttgtaatttttttacactttagctgtatagtcttaatagtcccttcatatcataattttaatatcattttct

SEQ ID NO: 591800 - DNA, 589 bp, Homo sapiens
tgtttgttttagaaagaagggtggcacgtattcatactgctttactaaaaagaaaataaaagttggcattctaaatatatacaatatctgggaaatttcaaaatcattagttattttcaaacaaatatagagtcctgagaatcactcattgaaatgattttaggacaaaagtaacttatctgcctatcatttggatataaacagacttatttacattaaacacatatctccaaccaatagattctattaatcaaaatagcaggtctttctttgaaacaattatgatccatgacagtacatataaaaatctgttagcataatgcaccttgaagctggaaatgagctcaggtttatcccagtgatgtggaatgtcaaaaaaactgatgattgtcatawgaatgaattatagtgtctttttgctaaaatatacaaaccaaatcaaaagtgccattttaaattatatagtggagtgtttcagaaaatgacaacaaaactactttaaaaaaatggcttttagcaccgcttaccaagagaatgggttgaagtacagacaatcaacacatggccattctgcatttattcattaatt

SEQ ID NO: 591801 - DNA, 589 bp, Homo sapiens
tgtttgttttagaaagaagggtggcacgtattcatactgctttactaaaaagaaaataaaagttggcattctaaatatatacaatatctgggaaatttcaaaatcattagttattttcaaacaaatatagagtcctgagaatcactcattgaaatgattttaggacaaaagtaacttatctgcctatcatttggatataaacagacttatttacattaaacacatatctccaaccaatagattctattaatcaaaatagcaggtctttctttgaaacaattatgatccatgacagtacatataaaaatctgttagcataatgcaccttgaagctggaaatgagctcaggtttatcccagtgatgtggaatgtcaaaaaaactgatgattgtcataagaatgaattatagtgtctttttgctaaaatatacaaaccaaatcaaaagtgccattttaaattatatagtggagtgtttcagaaaatgacaacaaaactactttaaaaaaatggcttttagcaccgcttaccaagagaatggsttgaagtacagacaatcaacacatggccattctgcatttattcattaatt

SEQ ID NO: 591802 - DNA, 540 bp, Homo sapiens
gacaatcaacacatggccattctgcatttattcattaattcatccagacatctattgaattgattactcatctattaattgattttttcaacatattcttactgagtgtaaagtgatctcaacactggtgctacatayatagttaatccacaaccttaccttcgaggagctccaccatctggtgaaaagatgagaatattcatgctactaagtgttcttaccctgggagatacaagagagcacaatggtctagatcagggtaggcttcttccagtggtgaaacctgagctcaatctgactaggttgactagaagtcagtcagatgaaaaaaagtggctttacagccattcgtggccatttgcaaagacacagaagggagaaacagctagataggtagagggaatgacaaccaacgaattgttattgaaggaatgaagcatcaaaacatgagaggagtagacagtaattaataaaaggtgaatttaagtttgaagttttagaaatagttgaaaatttatatcagactcccaaagaaaaaaa

SEQ ID NO: 591803 - DNA, 540 bp, Homo sapiens
gacaatcaacacatggccattctgcatttattcattaattcatccagacatctattgaattgattactcatctattaattgattttttcaacatattcttactgagtgtaaagtgatctcaacactggtgctacatatatagttaatccacaaccttaccttcgaggagctccaccatctggtgaaaagatgagaatattcatgctactaagtgttcttaccctgggagatacaagagagcacaatggtctagatcagggtaggcttcttccagtggtgaaacctgagctcaatctgactaggttgactagaagtcagtcagatgaaaaaaagtggctttacagccattcrtggccatttgcaaagacacagaagggagaaacagctagataggtagagggaatgacaaccaacgaattgttattgaaggaatgaagcatcaaaacatgagaggagtagacagtaattaataaaaggtgaatttaagtttgaagttttagaaatagttgaaaatttatatcagactcccaaagaaaaaaa

SEQ ID NO: 591804 - DNA, 651 bp, Homo sapiens
tatcagactcccaaagaaaaaaatataaaatgtagcagaaaagttttggggaaaaaaatcttatgaacatagccctagagcattcaaatcatatcttatatctaaatatgtatataagtgtgctagtctttttcattagattcaatgatgttttaagaaaaagttggaaaaataaatgaacaaaactaaattgcatgagcaaaaatgagagtttagcttgtgtggccaagaaaaagtctagataatccaactttgaaggaggcaagtcacatcactcttgacagaatgtctccaatattctagtgttggtagaaaacaacataagtaatgttgtctcagtcaccttcaaaatgataaaaataatgttaatctgcagagtattagggtgttgtagttttaaatttcatttatttacgtggatattccttttygtattgttccttttggaaaccacatgcatggaaacaaaagttacgctacattattcagagatttctaacacttaaaccactgttaggttatattaatttgcaactacccatcagttgttgtgatttggactaagtaattcagtttatttaatctttaaccaatgtatttagggtattaattaattaattaaaataagttatcaagtatcctgcagtttcc

SEQ ID NO: 591805 - DNA, 592 bp, Homo sapiens
ctgggtaatttataataaaagaagtttaattgactcaggtccacatggctggggaggcctcaggaaacttacaattatggcggaaggagaaagggaagcaagaacctttttcatagggctgcaggagagggagagagaacgaagcaggaagtgacacttctaaaccatcagatcccatgagaactcattcactatcatgagaccagcaytggtgaaactgccgccatgatccaatcacctcccaccaggtccctcccttgacacatgaggattacaattgaagatgagatttgggtggagacacagagcagaaccataacatggtgtctacctttatctctagaaacgttaacacattaatcatagttattttcaacttcctatttgataatttcgacatctgtatcatctctgagtctggaggtgtgaattggattgtcccttgacaatgcaaactgtgatatgctttttgggcatataatttttttaattgatgttataatatgtggaatagtaaaaactgaggtaaatattatttatgcttggaaatagaaacacttctactagaatatcagtgtaagtggttgtgtca

SEQ ID NO: 591806 - DNA, 580 bp, Homo sapiens
ggcaagtcctttctgcctatgagcctgtaaaatcaagatacaatggggaaacaggcattgggcaaatataccctttcccagaaggaaaaattggccaaaacaaaggggctacaggttccacgcaagtctgaaattcagcagggcagtcaaatgttaaagctccaaaatgatctcttttgactctacatctcacatccagggaacactgatgcaaggggtgtgttcctatagtcttgagcagttctgcccccatggttttgcaaagyacagcattcatcctggctgctttcaaaggctggcattgagtgtctgcagcttttccaagtgcactgtgcaagctgtcagtggatctaccattctggggtctggatgatagtagtcctcttctcacagctccactaggcagtgttcctgtggggactctgtgtggggtcttcaaccccacatttccctttctcactgctctagcagaggttatccatgagagctccacccctgcagcaaacttctgcctggacatctaggcatttctatacatcctctgaaatctagaggttcccaaaccccaattcttgacttc

SEQ ID NO: 591807 - DNA, 525 bp, Homo sapiens
ggtctcgatctcctgaacttgtgatccgcccgcctcggcctcccaaagcgctgggattacatgcatgagccaccgcgccgggccgggaattttatttttayctaagactcttgtttggtttagtgacagtagaactaaacattagattgggggcaattattaattatattgttaatgaagagataccactagcacactaagaactgtctgcttctctttatttattctacaatttagtgttttacattaatatttatgtttctccctctgatgtcttcctacagaagcatattttatagacactccagacagtgttataagctgccagcaactctgaattttagtagtcctagtcttcctgtttaggtctaagttccatacaattcaaacatagcaattggcggtattaatcttgaacaaaaagctagccctatacaagcgacatgcttaaaatatattgacattttgtacaaacggaattcacgaagtcatcatatttaaatagatgacaatgacttgcaaaat

SEQ ID NO: 591808 - DNA, 492 bp, Homo sapiens
gacatgcttaaaatatattgacattttgtacaaacggaattcacgaagtcatcatatttaaatagatgacaatgacttgcaaaatgctctggtctaagaaggtcttctagagtagttacaaaaaaaatagaaaacatatagaatgagccaactacttaaataatacttaattaaratgacaacatttctgggcttaaagttatatatatgtccttattcatacatactgtagaaatatatttttattttatgcccctttaccttctttttcagagaatcacaaaatatactgtttttggtcagttatgtcataaaaagaaatagctattttgttgttaaaaacataaaatttacttttaaaagcattttttactgctttgcattaaataataagaaaaatattcagatgtaattttaagtgaaaacattctattacatttttatacttagaatttagatatataagtcaatcaaagtctggctgtatttttt

SEQ ID NO: 591809 - DNA, 406 bp, Homo sapiens
agacttggtagctctttaagatacaccaaaataggtgtcctaattagtttgatgagatgattgtagaatctctaattgcatcagttgtagccttactatattgagtttcttgaaagaattaagcctagtatattcttccaacacagtataggcactgtgatttcagaaagtctaagacatagttacaaactaaacactatactaaggtatttttatatgtcatttaaaaattatattattctttataagtaaatttkcccaggcctctacatagtaagtgctggagttaagattttaagacagtgtgtatgccaactttagataattcataaattaataacagatttttagaggcaggtaggacatccttcaaatagtaatagtaaacaccagctaagatgtccat

SEQ ID NO: 591810 - DNA, 406 bp, Homo sapiens
agacttggtagctctttaagatacaccaaaataggtgtcctaattagtttgatgagatgattgtagaatctctaattgcatcagttgtagccttactatattgagtttcttgaaagaattaagcctagtatattcttccaacacagtataggcactgtgatttcagaaagtctaagacatagttacaaactaaacactatactaaggtatttttatatgtcatttaaaaattatattattctttataagtaaatttgyccaggcctctacatagtaagtgctggagttaagattttaagacagtgtgtatgccaactttagataattcataaattaataacagatttttagaggcaggtaggacatccttcaaatagtaatagtaaacaccagctaagatgtccat

SEQ ID NO: 591811 - DNA, 599 bp, Homo sapiens
agaaagattttattatgaaaatgtgataagtcgtcaggttgaaaattcagaattttgacttcattcactcccatgcaactcttccattgttttagaattggaagtattattttagtaaaaaatatgattgtgaggtcccatcccttgaagaacttcattccaaaagatttttttttggccagttgaggttctctatttcaaaatatatgtatttcaagtaatcttttaccttttgtaaaatattacatagaataaaatagtttttttaattaagcataaaatactagaggataaatacttacaagctggaagaaaaatggggtaattaccttcagtgatgaatagtttaatacaagaagatctgtagtacataaatctttctaaaaaagttttaaatttgtttgggaactcagaactctcttgaaatttctgtgaatttgctattgcaataacaataaggacaattttccatcagcgtaaacaaattttaatggtctagcagktactatgtaattatatgtgcaatgacatgatgaatgtgtttatattttatacattataaaaatattattgaattattaaagtatgattttggatta

SEQ ID NO: 591812 - DNA, 599 bp, Homo sapiens
agaaagattttattatgaaaatgtgataagtcgtcaggttgaaaattcagaattttgacttcattcactcccatgcaactcttccattgttttagaattggaagtattattttagtaaaaaatatgattgtgaggtcccatcccttgaagaacttcattccaaaagatttttttttggccagttgaggttctctatttcaaaatatatgtatttcaagtaatcttttaccttttgtaaaatattacatagaataaaatagtttttttaattaagcataaaatactagaggataaatacttacaagctggaagaaaaatggggtaattaccttcagtgatgaatagtttaatacaagaagatctgtagtacataaatctttctaaaaaagttttaaatttgtttgggaactcagaactctcttgaaatttctgtgaatttgctattgcaataacaataaggacaattttccatcagcgtaaacaaattttaatggtctagcaggtacwatgtaattatatgtgcaatgacatgatgaatgtgtttatattttatacattataaaaatattattgaattattaaagtatgattttggatta

SEQ ID NO: 591813 - DNA, 547 bp, Homo sapiens
ggtaagagaggaggtttgttttgcccagaaaattctgtgtttttttccattctttggcatattaaagtggagcatcaaaaggcaattgcatatttgaatatggatattagaaagagataattgtgagtcagtggacaaaaggtaatatataaacctatgggaacgcattaaataatctaggtagaaaatgattggagagtagaaaagaaaggtcacaatggagagcaggaaagagttcaaaatattaaaaggtttggcagaaaataagaaaccagctaaggggacagtgataaattagtgaggaaaaargaaaacccaaaaaaagcatgccatgaaatacaagaaataacagcccttcagggaacacgaagtagttcacagtatgaggtctttcgagggataaaatgagatggagacagagacgtgttactggcaaccctgaaaaaagctgttccaatggcatgatgacagcagagtcattccattaagagtttacagtagagagagggaaaaagattcattgttataacatagtaaattgctgtgg

SEQ ID NO: 591814 - DNA, 547 bp, Homo sapiens
ggtaagagaggaggtttgttttgcccagaaaattctgtgtttttttccattctttggcatattaaagtggagcatcaaaaggcaattgcatatttgaatatggatattagaaagagataattgtgagtcagtggacaaaaggtaatatataaacctatgggaacgcattaaataatctaggtagaaaatgattggagagtagaaaagaaaggtcacaatggagagcaggaaagagttcaaaatattaaaaggtttggcagaaaataagaaaccagctaaggggacagtgataaattagtgaggaaaaaggaaaacccaaaaaaagcatgccatgaaatacaagaaataacagcccttcagggarcacgaagtagttcacagtatgaggtctttcgagggataaaatgagatggagacagagacgtgttactggcaaccctgaaaaaagctgttccaatggcatgatgacagcagagtcattccattaagagtttacagtagagagagggaaaaagattcattgttataacatagtaaattgctgtgg

SEQ ID NO: 591815 - DNA, 547 bp, Homo sapiens
ggtaagagaggaggtttgttttgcccagaaaattctgtgtttttttccattctttggcatattaaagtggagcatcaaaaggcaattgcatatttgaatatggatattagaaagagataattgtgagtcagtggacaaaaggtaatatataaacctatgggaacgcattaaataatctaggtagaaaatgattggagagtagaaaagaaaggtcacaatggagagcaggaaagagttcaaaatattaaaaggtttggcagaaaataagaaaccagctaaggggacagtgataaattagtgaggaaaaaggaaaacccaaaaaaagcatgccatgaaatacaagaaataacagcccttcagggaacacgaagtagttcacagtatgaggtctttcgagggataaaatgagatggagacagagacgtgttactggcaaccctgaaaaaagctgttccaatggcatgatgacagcagagtcattccattaagagtttacagtmgagagagggaaaaagattcattgttataacatagtaaattgctgtgg

SEQ ID NO: 591816 - DNA, 556 bp, Homo sapiens
atataagatatgtatttgaaataacaaaatgakttaaaagaaattctttcaattgcagattcttcaggtctgatctatattatcttgtccccaccaatgaacttgccaaatatattacctgtaacagtactgggtttgattgaagaccagaaaaaaaaaaaaaactcttgcatcaaggtgctttttatttcaggaaagtatctatataaaagtcaaaggattcctgaagtaaaaaattcagagtactaattagaaagccctcctgattttattttttacattcaattaaagcaatcattttataatataatattaactcttctttctcagttgattatttgcatatctattttctaagtacaatataaagttttggagagcagggacataactttttcaactttgatggtgctcaagttccatgtgactgttagcaaacactcaggtagatatttggtggatgaagaaagcacggatggggagaggtgatatactggttgtgaattgaaagattactatgagaaaaatgcaagggaatgaagaaaatgagcagaag

SEQ ID NO: 591817 - DNA, 556 bp, Homo sapiens
atataagatatgtatttgaaataacaaaatgatttaaaagaaattctttcaattgcagattcttcaggtctgatctatattatcttgtccccaccaatgaacttgccaaatatattacctgtaacagtactgggtttgattgaagaccagaaaaaaaaaaaaaactcttgcatcaaggtgctttttatttcaggaaagtatctatataaaagtcaaaggattcctgaagtaaaaaattcwgagtactaattagaaagccctcctgattttattttttacattcaattaaagcaatcattttataatataatattaactcttctttctcagttgattatttgcatatctattttctaagtacaatataaagttttggagagcagggacataactttttcaactttgatggtgctcaagttccatgtgactgttagcaaacactcaggtagatatttggtggatgaagaaagcacggatggggagaggtgatatactggttgtgaattgaaagattactatgagaaaaatgcaagggaatgaagaaaatgagcagaag

SEQ ID NO: 591818 - DNA, 556 bp, Homo sapiens
atataagatatgtatttgaaataacaaaatgatttaaaagaaattctttcaattgcagattcttcaggtctgatctatattatcttgtccccaccaatgaacttgccaaatatattacctgtaacagtactgggtttgattgaagaccagaaaaaaaaaaaaaactcttgcatcaaggtgctttttatttcaggaaagtatctatataaaagtcaaaggattcctgaagtaaaaaattcagagtactaattagaaagccctcctgattttattttttacattcaattaaagcaatcattttataatataatattaactcttctttctcagttgattatttgcatatmtattttctaagtacaatataaagttttggagagcagggacataactttttcaactttgatggtgctcaagttccatgtgactgttagcaaacactcaggtagatatttggtggatgaagaaagcacggatggggagaggtgatatactggttgtgaattgaaagattactatgagaaaaatgcaagggaatgaagaaaatgagcagaag

SEQ ID NO: 591819 - DNA, 556 bp, Homo sapiens
atataagatatgtatttgaaataacaaaatgatttaaaagaaattctttcaattgcagattcttcaggtctgatctatattatcttgtccccaccaatgaacttgccaaatatattacctgtaacagtactgggtttgattgaagaccagaaaaaaaaaaaaaactcttgcatcaaggtgctttttatttcaggaaagtatctatataaaagtcaaaggattcctgaagtaaaaaattcagagtactaattagaaagccctcctgattttattttttacattcaattaaagcaatcattttataatataatattaactcttctttctcagttgattatttgcatatctattttctaagtacaatataaagttttggagagcagggacataactttttcaactttgatggtgctcaagttccatgtgactgttagcaaacactcaggtagatatttggtggatgaagaaagyacggatggggagaggtgatatactggttgtgaattgaaagattactatgagaaaaatgcaagggaatgaagaaaatgagcagaag

SEQ ID NO: 591820 - DNA, 604 bp, Homo sapiens
tttctttatgttcctgttttcattttctttggatatatacccagtagtcagattgctacatcatatggtagttctatttttaactttgtgaaaacttcatactggttccatactattttatattctaccaatggtgtgcaattgttccaatttctccacatccttgccaaaatttattatcttttgttttttcaataatagccatattaacaagtacgcagtggtatctcattctagttagaagttacatttccctgatgatcaatgatgttgagcacctattctcatatacaatggctatatgcggaagaataaaattggacctctatcttatcctgcacataaaaattaactcaaaatagattaaaggtttgaatgtaagacytgaaatcataaaacttttagaagaaaacatagaagaaaagtttcataacatcgatcttggcaatgatttcttggataagacatcaagagcacgtgcaacaaaagcaaatatagacaagacatattagataaagtacaaagcttggcacagcaatagaaacaatcaaatgagtgaaaaggcaacctagaggaagggaaaatatttgtaaaccatttatct

SEQ ID NO: 591821 - DNA, 602 bp, Homo sapiens
tatataaatttttccattaataaattgtcaatatgcataattttaaacttgcatttgccattttcaaatattagtttaatgtctgtctatgaattcatgctgttactacaaagcaccatagaatcagytgcttacagtaaagcagaaatttatttctcacagtttgagaggctggaagtccaagaatggggtgccaggataggggtggggggttgtacaggagggatacagattgctgacttcttgtatcttctcatgttgtgaaagaacaagaaaattctctcatatatcttttataaggcactaatcccatttatggaagttccaccctcatggcctaatcacctcccaaaggccccatctccaattaccatcatattggggtttgggtttcaatatatgaatttggaagggaaggcacaaacatgcatcccatgacaatggccaagtacaaattatttgtctaagaatgagttaaattgtcaaatcaactgtgaatacctagccaaacataatggtatctttaaaaataatcttggagaaaaagatctccccatagattatattattccatactcataaaagtgaggaaagcaaaacag

SEQ ID NO: 591822 - DNA, 561 bp, Homo sapiens
tgcttggcatgattgttcaagttttaccatgtgaaatcaaggtgctggtcaggtctgaagttttaatgagattcctggggttcttttccttgaaattcactggttgtgacaaacttgaaattctgcaattagatgacagaggcccacgttttcatgctagctcttgaccaggtaattctcccttctcctagattctttccacactttcttgccatgtggacccatcagcagctcaaaatctgcacatttactttctttcaggcctacctgagtatatctctctgattttctattcttctactagttggaggaaactcctctgcttttaagaagtttgtgggattaaattgggcccatccagcttatatccttgtyttaaaggcaactggttagtaacctgaattatatgggcaaaaacgcttttcatcatgtaaagtcatttaattacaagattaatgcctagaagcaaaagcagctttgagagctgtttagaattctgcttactacaacaatatattaaagctactttataataggcaaatattaacaacttcttaaaat

SEQ ID NO: 591823 - DNA, 634 bp, Homo sapiens
ggtacagtgtagataggggaaaagagcggaatggttatccccaggtttagcatatcaaggaggtttgacctctttatgaaaaattcggactcttggagacgttggctgggttagtgctgccttgtgggtagaggacctcaacaccaacatgctctagggttatactctatttgttagagctgaaaaaaatgtgaaaatattgacttgtagctggaactccctcatgacaatctgtaaaatggaaatacttatagagcacttcaaagtattcaaacaagagctacaggagagaacaagctcacagagaaggcgtcaagggtcagctgggttagccatagaggcagtaacaactgagaaaaagatttaagaaccagttaagtgtagtgccacaagtcccttttctcaccacacatcctatttgattttcattgtaacacagaaaaggaagtggatttcaataaagtaaagcaggtatctgagaaccagaatcatttcccacttctgtctctgaacagtcagaatatcaacttaagacctctagaagggtaaaaagcagatagaatgtaatgagtttgagcttgcaatattaactgaatggatcaaacartggtgaaaaattgagttatctgactat

SEQ ID NO: 591824 - DNA, 581 bp, Homo sapiens
catcacacatgtaagtcctatttgcaagaagcagtttgcttttgtggcctctgacaaaaaagaggtcctttgagttgtgaaaatgaatctattaggcaagatgtaatggaccgtcagtagcacagagaaatattatgtagggaagttgaacagataaaccraattttttcaataatgaataattaaaaagaattgacccagcatttccataaagatagtaaaagaagataaaaaataaaaatatgtttactagcaaaagactataatcagaaacatattgtcattttttaggtaagaagtgaaataaagtttcccccattaattaacaattggttagtgaaacaatcatctctctggaagagggtcaagaaatttaaatgcagaaattcagagaagtggctggaagataccatgaggggataaaataagagatggcataattcaggaaaattgtatcctcctgcaccccccactcccgccaaattacacaaataaatacaaaattgatagcagcccaagggcaaatcgactctgtggcaaagtaacacatagcatattaaataaaaatagtaagtacaatg

SEQ ID NO: 591825 - DNA, 581 bp, Homo sapiens
catcacacatgtaagtcctatttgcaagaagcagtttgcttttgtggcctctgacaaaaaagaggtcctttgagttgtgaaaatgaatctattaggcaagatgtaatggaccgtcagtagcacagagaaatattatgtagggaagttgaacagataaaccgaattttttcaataatgaataattaaaaagaattgacccagcatttccataaagatagtaaaagaagataaaaaataaaaatatgtttactagcaaaagacwataatcagaaacatattgtcattttttaggtaagaagtgaaataaagtttcccccattaattaacaattggttagtgaaacaatcatctctctggaagagggtcaagaaatttaaatgcagaaattcagagaagtggctggaagataccatgaggggataaaataagagatggcataattcaggaaaattgtatcctcctgcaccccccactcccgccaaattacacaaataaatacaaaattgatagcagcccaagggcaaatcgactctgtggcaaagtaacacatagcatattaaataaaaatagtaagtacaatg

SEQ ID NO: 591826 - DNA, 581 bp, Homo sapiens
catcacacatgtaagtcctatttgcaagaagcagtttgcttttgtggcctctgacaaaaaagaggtcctttgagttgtgaaaatgaatctattaggcaagatgtaatggaccgtcagtagcacagagaaatattatgtagggaagttgaacagataaaccgaattttttcaataatgaataattaaaaagaattgacccagcatttccataaagatagtaaaagaagataaaaaataaaaatatgtttactagcaaaagactataatcagaaacatattgtcattttttaggtaagaagtgaaataaagtttcccccattaattaacaattggttagtgaaacaatcatctctctggaagagggtcaagaaatttaaatgcagaaattcagagaagtggytggaagataccatgaggggataaaataagagatggcataattcaggaaaattgtatcctcctgcaccccccactcccgccaaattacacaaataaatacaaaattgatagcagcccaagggcaaatcgactctgtggcaaagtaacacatagcatattaaataaaaatagtaagtacaatg

SEQ ID NO: 591827 - DNA, 598 bp, Homo sapiens
agaacactaggatggaatgcaagagaacagaattctaacatggttttgctactgattgtatataaaaaaagagaaatgtagtagactttattgggtcttttaatagtagtagtagattattggaagaaacgaaaatgatatgaaaggcatgtttttactcaaaaactcaataccagattgctttacaggtgagttctatcaactacaaaaagaargttcaatccaatccggtgcgatacaagtagttccagaaaatagagaaaaagctgtcaagtgcactttatgaggctaaagtattttgtcagtaaatgtttagaaaccaaactgtagctaaaataaatcataaaacatatttataccccagtaaattttcacaaagtgaatgcttctctgtaactataatctagatcaaataatggaatatggcaaatgcccagaagactctttcatgctgcctcctaaactttatgcttctcaaagtgaacagctgccctgccttctaaagctaatctatgttttgcctctttatgaacttttggtaaatcaaatcatacagaaattactctcagtatgtctggcttctttcattctatgtttt

SEQ ID NO: 591828 - DNA, 598 bp, Homo sapiens
agaacactaggatggaatgcaagagaacagaattctaacatggttttgctactgattgtatataaaaaaagagaaatgtagtagactttattgggtcttttaatagtagtagtagattattggaagaaacgaaaatgatatgaaaggcatgtttttactcaaaaactcaataccagattgctttacaggtgagttctatcaactacaaaaagaaagttcartccaatccggtgcgatacaagtagttccagaaaatagagaaaaagctgtcaagtgcactttatgaggctaaagtattttgtcagtaaatgtttagaaaccaaactgtagctaaaataaatcataaaacatatttataccccagtaaattttcacaaagtgaatgcttctctgtaactataatctagatcaaataatggaatatggcaaatgcccagaagactctttcatgctgcctcctaaactttatgcttctcaaagtgaacagctgccctgccttctaaagctaatctatgttttgcctctttatgaacttttggtaaatcaaatcatacagaaattactctcagtatgtctggcttctttcattctatgtttt

SEQ ID NO: 591829 - DNA, 598 bp, Homo sapiens
agaacactaggatggaatgcaagagaacagaattctaacatggttttgctactgattgtatataaaaaaagagaaatgtagtagactttattgggtcttttaatagtagtagtagattattggaagaaacgaaaatgatatgaaaggcatgtttttactcaaaaactcaataccagattgctttacaggtgagttctatcaactacaaaaagaaagttcaatccaatccggtgygatacaagtagttccagaaaatagagaaaaagctgtcaagtgcactttatgaggctaaagtattttgtcagtaaatgtttagaaaccaaactgtagctaaaataaatcataaaacatatttataccccagtaaattttcacaaagtgaatgcttctctgtaactataatctagatcaaataatggaatatggcaaatgcccagaagactctttcatgctgcctcctaaactttatgcttctcaaagtgaacagctgccctgccttctaaagctaatctatgttttgcctctttatgaacttttggtaaatcaaatcatacagaaattactctcagtatgtctggcttctttcattctatgtttt

SEQ ID NO: 591830 - DNA, 443 bp, Homo sapiens
gtacaggttggaggccagagtgcaaactggtatttgtttaaggttgactaaggcaggtaaatgatccaaggaagctcatggaaacattgaagggcagacaawtgaaaacctgaggcatgtttttaagagtcaggttgatagcctctttgctctgtaaagatctgaagatgcgtccacttaacctgcacccatctctttatcactgtcaaatatttacagataaatgtttaagtgcctggaagcttggagagctttgcttatcagaaagccagttttaaaaggcacttaatgctggagttggtgggctgatgaaaatgccctctgtcccatttacttcccaatagtcacaaagctaattggggttggcataggctattctgactttgctgggaagaaaatcttgaaacattttcaaagaattcatagctataaaaggaaaggct

SEQ ID NO: 591831 - DNA, 613 bp, Homo sapiens
actcaaactgagggtttcatgctagtttgtttggtttttactatatagctcagcgttggaaggaatttaacttttatgaatgtatcttttcattacatttaaatagaaaatttttgatttcttaggaagaaggggaaaaaattaatttgttggtgctttttcttttttttaaattttattttggtgccttttttttttaacatggttttttgtgtttatttttgttttgagacagactctcactcttgcccaggatggaatgcagtggttgatcatgggtcactgcagcctctacttcccaggctcaggtgattctcccacctaggcctcctgagtagctgaggctacaggcacgtgccaccacacctggctaatagctggggctacagacatgtgctcccacaccttgctaatttttgtattttttgtagacayggggtttgctatgatgcccaggctggtcttgaactccagaactcaagcagtctgcctgcctcagcctcccaaagtgctgtgattacaggaatgagccaccgtgcctagcctacaagttttctttatcctatcctgtgtctctcagttattattcaactcttttagcttaaaggtctat

SEQ ID NO: 591832 - DNA, 583 bp, Homo sapiens
aggcccagggccccccctgctatgtgcagccttaggacttggtgctctaatgcttcaactgtggctaaaaggggtcaaggtacagcttggaccttggcttcagggatgcaagtcccaagccttggcaggttccatgtggtgttgagcctgctgatgcatagaagtcaagaattgaggtttgggaacctcgacytagatttcagaggatgtatggaaacagacagactttgctgcaggggcagggacctcatggagaacctccgctagggcaatgcaggagagaaatatggggttggagctcccccatacagagtccctagtagggcactgcctagtagagctgtgagaagaggtccactgtcctccagaccccagaatgatagctccaccaacagcttgcactgtgtgtctggaaaagccacagacactcaattccagcccataaaagcagctgggaggggggctgtaccctgcaaagccacagaggtggagctgcccaagactgtgagagcccacctcttgcatcagtgtgacctagatgtgagacatggagtcaaaggagataattttgaactttaagttt

SEQ ID NO: 591833 - DNA, 471 bp, Homo sapiens
aaatcatacccagtgtctttacagaccatataaaataaaactactaatcattaataagaagaatcttataaactagaaaaacacatggaaattaaacaacatcctcctgaataacctataggtcaatgaagaaattaagaaggaaattttaaaatattgaaacaaatcaaaatcaaaacacaacataccaaaatctaaaagataaagtaaaatcagtactaagagtgaattctatagcaataaatgcctacattacaaagttgaaatatttcaaataaacaacctaatgatgcaactcgaggaaccacaaaagcaaaaacaaaccaaaaccaaattagtacaaggcaagaaataaagatcagagcaataagaaatgaaatcgagattataaaatacagaagagaggtgacmcaacaaaagctttttttttttttttttttggagggtaaagataaacaaaactgaaacttt

SEQ ID NO: 591834 - DNA, 370 bp, Homo sapiens
agttgcaagcaattgatctcttcccacaacactaattttttacctctcctgtgctaagtatagcagtgctttgtccaaactttatcttcaaatatttgtttccttttatattttagtggtattttgagagtgctatatagcatagccttcactctctggatatatatatatatctcttgtatctcgagtatttatatatgtgtatatatataaatatcaaatatatatataaaaatactagagatacatatctatatccctgtgtgtgtatatatatatatgtatattgccttgtatctctagtatttatacatatgtgtgtgtgtgtgtgtgtgtgtgtrtatatatatatatatatatatatatatac

SEQ ID NO: 591835 - DNA, 663 bp, Homo sapiens
tgaaaggttgtggattagtagattattttgctgtttctactgctcttatggtcattggtgctttgggctctggtgacgaagagtctgtgcgtgaagaagcagaaaggacaacagttccgttgccaaattcttcagcaagagtggggagaaaagcatagctaatatacttctgagcagttacaggcccaaagaaaaacgtgtgaaagcacacatggtgggtggagtgggagaggcggagaaagtggggcatggaatggtggagagaatgcaaagcattctttcctcagaatgatgagaggctctggggcgtttccttggtatttggaattttagtaagaattcatgtcaactatgtacttgaatcacctttattattttttgagagatcaagtaaagattgtaaacatcattcaaactgtgcttccctgattgtaccacttccctgagcataactatgtggggcacatcttaagcaggaatatagaagagactgtcaaagaggagtttgggcatggctgtcactctgaggtttcctaaaaaagagaagtttaactggaatttcckgaaatagatactggaattccaaacaacttgctggttgttttaccttctttgtgagcttaatatctacccaatttcttaggaaagaggaaaagtttcaaa

SEQ ID NO: 591836 - DNA, 583 bp, Homo sapiens
ttgggtgagccccatgtttttagacaggtaaaaggctatttgctgagaggaagacagttggttggagacctgagaaaatttacaagtttagaattgcaatttcagtgaataggttaaagatgtgtttagggatgagtaaaatattggtcaagaagcagttgggaggaagttggtagtactgttaatcagggaaattggcatctcagacacttttggtgasagtgtaaggtgctagctatctttggaggccaatttggcattatcttttgaaatttaaccagtgttttcactttgatgcagaagttcctcttctgtgaatttgccatgtagaaataatttcacatatgtacagaagtgaatatgtgaggttgttcactgaagaactgtttaaaacaaacatcaaattggaaataacataaattcctagtcaatagacaattgactgaaaaaaaatacagtacaaccccacgatgggatcctatttagatggaagtctgtgttaggtgatggcacagataggtgttggtgagaagagatagcaatattatgttaaagtgaataaagtgaaaataataatatttat

SEQ ID NO: 591837 - DNA, 583 bp, Homo sapiens
ttgggtgagccccatgtttttagacaggtaaaaggctatttgctgagaggaagacagttggttggagacctgagaaaatttacaagtttagaattgcaatttcagtgaataggttaaagatgtgtttagggatgagtaaaatattggtcaagaagcagttgggaggaagttggtagtactgttaatcagggaaattggcatctcagacacttttggtgacagtgtaaggtgctagctatctttggaggccaatttggcattatcttttgaaatttaaccagtgttttcactttgatgcagaagttcctcttctgtgaatttgccatgtagaaataatttcacatatgtacagaagtgaatatgtgaggttgttcactgaagaactgtttaaaacaaacatcaaattggaaataacataaattcctagtcaatagacaattgactgaaaaaaaatacagtacaaccccacratgggatcctatttagatggaagtctgtgttaggtgatggcacagataggtgttggtgagaagagatagcaatattatgttaaagtgaataaagtgaaaataataatatttat

SEQ ID NO: 591838 - DNA, 567 bp, Homo sapiens
cagtggcacaatctcggctcactgcaacctctgtttcctgggttcaagcgattctcctgcctcagcctcttgagtagctgggaccactacaggtgtgtgccaccacgcccggctaatttttgtatttttggcagatacagggtttcaccatgttgcccaggttggtctcaaactcctgagttcaagcgatccacctgccttggtctcccaaagtgttgggattacaggcgtgagccactgcgccgggccactgctgttatctttctttcctttttttttttttttgagacagagtcttgctctattgcccaggctggagtgcagtggggtgatctcggctcactgcaacttccaactcccgggttcaactgattctccagcctctcagcctccygagtaactgggactataagcacgtgccaccacacctgactaatttttgtatttttagtagagacagggtttcgccatgttggccaggctggtcttgaactcctgacctcaggtgatctgcccgcctcagcctcccaaagtgctgggatgacaggggttagccacatcgcccgg

SEQ ID NO: 591839 - DNA, 617 bp, Homo sapiens
ggttactgtctctgcctcagttttcgtgtctgtaaaataaggataataatacttctacttcacaaggttgttgtgaggattaaatgacgtaatgacaatacaagtaaagtgcttagaactgtggctggttcacagaatgccctcagggttagctctcttattattttaatttgcagttggaatcctatgtaacatttaaaataatgagaatgatacagacatgaatactcttcaaaaaatgtttattgggggacctttttgcatgctgaacacaacatctacatgtttctataggttgttacttagaaaargtctgaaaagacagtgttttccagaaggttaacagtcatcaattcagaggattggaataggttgggggtataataaaaatggcttctagctttatgtttgaaatttttattgtgaggctgtgtttatgcattgtgtaattaaaaagaggtaaaattggccaggtgtggctgcacgcctgtaatcccagcactttgagaggcgggcggatcacttgaggccaggagttcaagactattctggccaacatagtgaaaccccatctctacaaaaaatacaaaacttagccaggcatggtggcatatgcc

SEQ ID NO: 591840 - DNA, 617 bp, Homo sapiens
ggttactgtctctgcctcagttttcgtgtctgtaaaataaggataataatacttctacttcacaaggttgttgtgaggattaaatgacgtaatgacaatacaagtaaagtgcttagaactgtggctggttcacagaatgccctcagggttagctctcttattattttaatttgcagttggaatcctatgtaacatttaaaataatgagaatgatacagacatgaatactcttcaaaaaatgtttattgggggacctttttgcatgctgaacacaacatctacatgtttctataggttgttacttagaaaaggtctgaaaagacagtgttttccagaaggttaacagtcatcaattcagaggattggaataggttgggggtataataaaaatggsttctagctttatgtttgaaatttttattgtgaggctgtgtttatgcattgtgtaattaaaaagaggtaaaattggccaggtgtggctgcacgcctgtaatcccagcactttgagaggcgggcggatcacttgaggccaggagttcaagactattctggccaacatagtgaaaccccatctctacaaaaaatacaaaacttagccaggcatggtggcatatgcc

SEQ ID NO: 591841 - DNA, 589 bp, Homo sapiens
ggtcaagtgaaaactagggcttatactgaacctatgtttgcttaacaaaacgcagattctgtttattttggctaggggcaaggaatatgatagagactacacaagatcaagagttttctccaagcaaacgctggaccctgctgtaatctctgctgtttatttctttgtatgtakagtgtcaagtcaacgtcgacatatttttcctcatcatgaatcaaacaggcttctgtttctactctgtttctatttctcatattatcttgcatatgttactctttttctaaaataaaaaataaattcaacattggttgtcaaatgtcttcattaatcatgaatgccccaatgcagtgtaatatagaaagcatggttttctttttttaagaatgaaatgtaatctttaggggtgacatttaaaatatgtttcttagcaaaagtcttatgatctttctttgacatattctcacctggataaatttaattttaaattaggaatggtaaaaatttaaaatctttttatttaatatgtaatatcttaatcatgaagataaagtttaataggactgcatgtttatgtttgtattaatggtag

SEQ ID NO: 591842 - DNA, 589 bp, Homo sapiens
ggtcaagtgaaaactagggcttatactgaacctatgtttgcttaacaaaacgcagattctgtttattttggctaggggcaaggaatatgatagagactacacaagatcaagagttttctccaagcaaacgctggaccctgctgtaatctctgctgtttatttctttgtatgtatagtgtcaagtcaacgtcgacatatttttcctcatcatgaatcaaacaggcttctgtttctactctgtttctatttctcatattatcttgcatatgttactctttttctaaaataaaaaataaattcaacattggttgtcaaatgtcttcattaatcatgaatgccccaatgcagtgtaatatagaaagcatggttttctttttttaagaatgaaatgtaatctttaggggtgacatttaaaatatgtttcttagcaaaagtcttatgatctttctttgacatattctcacctggataaatttaattttaaattaggaatggtaaaaattkaaaatctttttatttaatatgtaatatcttaatcatgaagataaagtttaataggactgcatgtttatgtttgtattaatggtag

SEQ ID NO: 591843 - DNA, 552 bp, Homo sapiens
ctgtagctttgtagtaagttttgttttcagatttctgaagccaaatgcatttccatatttaagggggccagcacctccacaccggtgggtatttctcgtcaggcaggacgagaaactgagaaaagaaataagacacagagacaaagtattgagaaagaaaaatgggcccaggggactggcgctcacatgcgaaggacccacactggcaccagcctctgagttctctcagtatttgttgattactattttcactatctcagyaaggggaatgcagcgggagaacagggtgacagtggggagaaggtcagcaagaaaacatatgagcaaaggaatgtgtgtctcaagttcaagggaaggtactatgcctggatgtgcacgtaggccagattcacgcttttctccacccaaacatctcagtggagtaaagagtaacagagcagcattgccaccagcatgtcttgcctcctgccacagggcggtttttctcctatctcagaatagaacaaatgtacaatcgggttttataccgagacatttcattcccaggggcag

SEQ ID NO: 591844 - DNA, 552 bp, Homo sapiens
ctgtagctttgtagtaagttttgttttcagatttctgaagccaaatgcatttccatatttaagggggccagcacctccacaccggtgggtatttctcgtcaggcaggacgagaaactgagaaaagaaataagacacagagacaaagtattgagaaagaaaaatgggcccaggggactggcgctcacatgcgaaggacccacactggcaccagcctctgagttctctcagtatttgttgattactattttcactatctcagcaaggggaatgcrgcgggagaacagggtgacagtggggagaaggtcagcaagaaaacatatgagcaaaggaatgtgtgtctcaagttcaagggaaggtactatgcctggatgtgcacgtaggccagattcacgcttttctccacccaaacatctcagtggagtaaagagtaacagagcagcattgccaccagcatgtcttgcctcctgccacagggcggtttttctcctatctcagaatagaacaaatgtacaatcgggttttataccgagacatttcattcccaggggcag

SEQ ID NO: 591845 - DNA, 566 bp, Homo sapiens
attttaccaagtgatcaaggttgaaatcattaatattgggtcggtactgaaaggaattaacataatggcctgagactgctgtccttacaaaggcttcttgcaaggttagtcaccagcatctgggaacttggctctccaaatgttccctgggcaacagttaactgataataatggtggggttcactgtgcatagactgcacgtgcaaacaatatggttatgttaaatgcctgcttttctcttcagagtctagaatttgtgtacatgtaaggtagagggcgcctacaaataaataaataaaatcttaaataaaaaataagatttttttcttttttacaatattaaaatatatctactaattatcayattcacaaattaaacgtttatgaataaaaaataaaaatcttaactacttaaattaaaaaacaaaaatcttagctgcttagtctctaatgagctcccctaggcagaaatattgcacatacgttgctgcagatggggttcaggacatgctacaccaaaatatggcagcttggcctttaagaaaacagcagaagcaggatgtcca

SEQ ID NO: 591846 - DNA, 647 bp, Homo sapiens
atatattgcatttaagtatatatataaagctttaagccttgtgtgtgtgtttactaaatggaatcataatataaatactacccaacaacttatttttttcactgaataatatgtcaagaacaaccctgtaggtcagtacataaaattctaattaaccgtttttttaaaaatgcacacacaaatatataattttgtatgaaagagtatttttttgttgttgtttttagagcaatctttttctgttgattttttttttcttttgcctctcgcttaccttttcttccgccacttacttatttctccacacatcctctctaaccaggtaacccatgttaaaaatctggagtattttgttctattccttacttcctgtctgtttaaattatttttatagcttttaaaattactgctataaatgaaccattttcacaattctatttatatgtttattattagatttataaggttaaaagtgtaactatttttgtctctrattttgcttagtttgcaaaacaacagctttcacattgcaaaatgaattgtgagactaacatcatctatttacataaggagatgaaaatccatttttcaatatttttaacagctacttacagcccataaaagtcattgggttgtggcaggttaaa

SEQ ID NO: 591847 - DNA, 647 bp, Homo sapiens
atatattgcatttaagtatatatataaagctttaagccttgtgtgtgtgtttactaaatggaatcataatataaatactacccaacaacttatttttttcactgaataatatgtcaagaacaaccctgtaggtcagtacataaaattctaattaaccgtttttttaaaaatgcacacacaaatatataattttgtatgaaagagtatttttttgttgttgtttttagagcaatctttttctgttgattttttttttcttttgcctctcgcttaccttttcttccgccacttacttatttctccacacatcctctctaaccaggtaacccatgttaaaaatctggagtattttgttctattccttacttcctgtctgtttaaattatttttatagcttttaaaattactgctataaatgaaccattttcacaattctatttatatgtttattattagatttataaggttaaaagtgtaactatttttgtctctgwttttgcttagtttgcaaaacaacagctttcacattgcaaaatgaattgtgagactaacatcatctatttacataaggagatgaaaatccatttttcaatatttttaacagctacttacagcccataaaagtcattgggttgtggcaggttaaa

SEQ ID NO: 591848 - DNA, 421 bp, Homo sapiens
agatgtctgacattatactatagccacttttccatcaggaaaaaaaaaaaaaattgaggctggcaatgaagcaagcacagagtgaatttgaataaattatattggacagaattactgaaaaacagagatagggtgactagatcaagccaatcttgaagcctgacttctatctggtcttccagttttgtgagccaaaaatttttcttaacatataagaaagtttataaggtagaatgtcaaggacaacagaaggtaaaaagcctaaagtaatagtcttgtttttagcaaaaatytaggcattgataaggtttagaaatttataaaggagatcaaataggggaataggtcttaagaatttagatataatcattcaaataaaaaattgcctcacaattccaactttcaagttatcagaaaagaa

SEQ ID NO: 591849 - DNA, 471 bp, Homo sapiens
tcttgagaaagtgagggtttattgcttggctttcttgcatgatgtattagtatcacactcacattttcatgcatacttatctagttaccagtatatgataactaacatgaaatgctatttttcattttgagatgggcgtatttttaactgtgtactttttagagaaaaaccattattttttcayacattttcatagtcatttcacattcaacaacaaaaagaagtaaataaaacacttaacattttaaagtgcttttcatattattctgtgtcattagaaatgaaaaaaagtcttttccattacactgatcttcattttcctgttctgtattctgctatgagttctctgtttttcaaataaaatttatgtgttaaataacaaataaatgttcccctgctttgttatagattatattacagtttaaatatgttacatgtttaatattttatgtatgtttattatatgtaaca

SEQ ID NO: 591850 - DNA, 563 bp, Homo sapiens
tctatattagtccattctcacactgctaatgaagacatacccgagactgggtaatttatttaaaaawaaaaaagaagtttaattggtgcacatgtccacaatgctgaggaggcctcacaatcatggaggaaggtaaaggaggagcaaagccacgtcttacctggcggcaggcaagagagcatgcacgctggaactctcctgtataaaaccatcagatcttgtgagacttattcactaacatgagaacagcatggaagaaaacctgcctccatgattcaattaccttccactgcatccctcccacatcacatggggattgctacaatttaaggtgagatttgggtgggaacacagagccaaaccatatcatcttctctcaatgtatagaaatcaataaatgtgatgcaccgcataaacagaattaaaaacaaaacacatatgattatctcaatagacacgagaaaagcttctgataaaatccaacacatcttcatgataaaaacccttaacagattagaggcattggaggaacatacctcaaaataataagagccgtctgtgac

SEQ ID NO: 591851 - DNA, 554 bp, Homo sapiens
actgtggactatggtggagagcgtgggttgaaaaactacctactggggactatatttactacctgagtgcaatatacccatgtaacaaacctgcacatgtactccctgtatctaaaataaaagttggaagaaaaaaccttttgttgagagagaaatagatctgatggcaaagctttttaatataattgtctaagatatatgataccatctgtatcttagactttaaaactcagacaataggttatttgggggatggtaagtattggtttttacagcaccatcatcactaatcagagaaatgcaaatcaaaatatcttctaccagtcagagtggctattattaaaaagtcaaaagacaacagawgtcggagagtctgctgagaaaagggaacacttacaccctgttggtgggagtaaattagctcagccactgtggaaaacagcttggacatttctcaaataacttaaaaccgagctaccatttgacccaacatataaacagaatataaagcctgaaaattctgtttgaattaaggcttatcaaaatcccttata

SEQ ID NO: 591852 - DNA, 554 bp, Homo sapiens
actgtggactatggtggagagcgtgggttgaaaaactacctactggggactatatttactacctgagtgcaatatacccatgtaacaaacctgcacatgtactccctgtatctaaaataaaagttggaagaaaaaaccttttgttgagagagaaatagatctgatggcaaagctttttaatataattgtctaagatatatgataccatctgtatcttagactttaaaactcagacaataggttatttgggggatggtaagtattggtttttacagcaccatcatcactaatcagagaaatgcaaatcaaaatatcttctaccagtcagagtggctattattaaaaagtcaaaagacaacagatgtcggagagtctgctgagaaaagggaacacttacacmctgttggtgggagtaaattagctcagccactgtggaaaacagcttggacatttctcaaataacttaaaaccgagctaccatttgacccaacatataaacagaatataaagcctgaaaattctgtttgaattaaggcttatcaaaatcccttata

SEQ ID NO: 591853 - DNA, 570 bp, Homo sapiens
aaggtctttttagtaacaagactcacaactattttaactatcaactggtacgagtggggaatttagaggagtagagagtgaaatctctgaatttgaacaggaaaagggaagggaagatcttggaagagacatccctaaacagtacagcagaggaaaaagaaagaggctcagcactatataagcaaaacagaatgggttccttaacattccatctattaatattttctgatgacagtcctggcaaaccatgaacaggggctggggcagacgcaagtccttttgataaccacctcaccattcactgtccaccatgacttcaaaatgattccatctacttattagtgcactcttagaaaataacatctttattactgagaaatccaaaawcatttcacttgacaggaaaaataagtacatagaactacaaaatgttatgcttcagacataagatgacactcatattcttgttgtagtctctctgaaattaactatgagtttaatactttgaagataatgtgataatcaactgagcaaagagaataagataggctatgatataaaatgcatttc

SEQ ID NO: 591854 - DNA, 383 bp, Homo sapiens
ataagtacatagaactacaaaatgttatgcttcagacataagatgacactcatattcttgttgtagtctctctgaaattaactatgagtttaatactttgaagataatgtgataatcaactgagcaaagagaataagataggctatgatataaaatgcatttcaataaagagagataatgttaccacattcattccccaaagagacagtgaagaaacatatatacttcacactgtttcttcytatttcacttcaaattaactcgtgtataaagggaacttttccactatattttagttatttgctctttttttgaacatataccactaccatgggtaatcttttttaggatatatcaaatctgtggggtaaatataatatttt

SEQ ID NO: 591855 - DNA, 510 bp, Homo sapiens
aggaaaataattaaaaatcaagatactaattgtctggtatttcactgtctgttgtggtaagtactaatgacaaatggctgtttaaatttaattatatttctaatgtaaattaattaaacttagataaaattaggaattctgatctttagttgtactagtcacattgcaattgctcagtaaccaaaagtggatattggctgccacatcaaacaaggaagaactttccattatcacaaaaagttgtattggacaagtggttgagcctagggttaaatggtttctgtatacctgaagaagacaggaaacacaaaacagtcaagcaaacacaaatggttaataacagtgtaaaaatatttagtaagctctcaggttctgttgaacttaatgtagttactctttatakgtagagttgtcctcaaatccttcgtgaaggagcagatgaatactggaattttaaaaatgagacaaagctttacaaatggaagaaaggggttagtatttcaagcattc

SEQ ID NO: 591856 - DNA, 510 bp, Homo sapiens
aggaaaataattaaaaatcaagatactaattgtctggtatttcactgtctgttgtggtaagtactaatgacaaatggctgtttaaatttaattatatttctaatgtaaattaattaaacttagataaaattaggaattctgatctttagttgtactagtcacattgcaattgctcagtaaccaaaagtggatattggctgccacatcaaacaaggaagaactttccattatcacaaaaagttgtattggacaagtggttgagcctagggttaaatggtttctgtatacctgaagaagacaggaaacacaaaacagtcaagcaaacacaaatggttaataacagtgtaaaaatatttagtaagctctcaggttctgttgaacttaatgtagttactctttataggtagagttgtcctcaaatccttygtgaaggagcagatgaatactggaattttaaaaatgagacaaagctttacaaatggaagaaaggggttagtatttcaagcattc

SEQ ID NO: 591857 - DNA, 537 bp, Homo sapiens
cacagtgactcacacctttaatctcaacactttgggaggctgagatgagagccttscttgagcccaaaagtgtgatatcagcctgggcaacatagtgagaccctgtctctacaaaaaatattttaaaaattagttgggcattgtggcacgtgcctgtagtgccagcaacttgggtggctgaggtgggaggatcacctgagcccaggaggttgaggccgcagtgagccatgatcacaccactgcactccagtttaagcgacagagcgcgacccagcctacccgcacacttccccaaaaatacagatatgttttgtatttctttcaatgaattcttcagttccagagtttgtttgtatctttttatgatatcaatctctttggtaaatttctcattcatattctgaattgttattctgatttctttatattgtttttggaattctcttatatctcattgagctcctttagatcaatattttgaattctttttctgggattttgtgaatttcttaaattgggttctgttgctggataatt

SEQ ID NO: 591858 - DNA, 537 bp, Homo sapiens
cacagtgactcacacctttaatctcaacactttgggaggctgagatgagagccttccttgagcccaaaagtgtgatatcagcctgggcaacatagtgagaccctgtctstacaaaaaatattttaaaaattagttgggcattgtggcacgtgcctgtagtgccagcaacttgggtggctgaggtgggaggatcacctgagcccaggaggttgaggccgcagtgagccatgatcacaccactgcactccagtttaagcgacagagcgcgacccagcctacccgcacacttccccaaaaatacagatatgttttgtatttctttcaatgaattcttcagttccagagtttgtttgtatctttttatgatatcaatctctttggtaaatttctcattcatattctgaattgttattctgatttctttatattgtttttggaattctcttatatctcattgagctcctttagatcaatattttgaattctttttctgggattttgtgaatttcttaaattgggttctgttgctggataatt

SEQ ID NO: 591859 - DNA, 451 bp, Homo sapiens
aaaataattttataataaaaatattttcacaatgtctagatagtttcatttattagcacatttgagttgctattggctaatttttatactaataatgaataaaagggtaaaataccatggttatgtgggatttagcccaaaaatgaaaagctaatgtaacattcaaaatcacttgctacagttttctgtatttacagaataattagaaaaataaaaggatcatctcaattaatgcagaaaaagcaattgaccaaatccaacacacatttatgaattttttaaaaaatttcataaaactgtcagaaaactgaaaatggatggaagcatcctcaatattataaaagaaatytgtgaaagacctgtaactaatatgtaggatggtgaactattagatgattttcctaagattggagatgaagcccagaggcccccttccaccacttctattccc

SEQ ID NO: 591860 - DNA, 624 bp, Homo sapiens
tgctagcctagtgctaggccctgggggaaagaaaaatgaagatgatacagccttgccctccaatccagcatacacagacgcaggccccattttggtgactctgagatagcaagattagtctactggagcaattagagttaaaggatagctacttctgatggaaagacattgagatggagtaggggagtgaaaaacataagtaggtataactaattggtaattttctaattatttggttgggctctgtctccatggtgtttattagtagrccgaggtgggtggatcacgaggtcaggtgttcgagacctgtctaggcaacatagtgaaatctcgtctctactaaaaatacaaaaaattagccgggcatggtggcgggtgcctgtaatcccagctactcaggaggctgaggcaggagaatcacttgaacctggaaggtggaggttgcagtgagctgagatcacgccactgcactccagcctgggcgacagtgcgagactccatcttaaaaacaagcaaacaaacaaacaaaaaaccttattgatcaattgcatgaaacaataaaattgcattatgaaccatggattataaattctgtgcatctaaaattctcacaaggaagtaggg

SEQ ID NO: 591861 - DNA, 624 bp, Homo sapiens
tgctagcctagtgctaggccctgggggaaagaaaaatgaagatgatacagccttgccctccaatccagcatacacagacgcaggccccattttggtgactctgagatagcaagattagtctactggagcaattagagttaaaggatagctacttctgatggaaagacattgagatggagtaggggagtgaaaaacataagtaggtataactaattggtaattttctaattatttggttgggctctgtctccatggtgtttattagtaggccgaggtgggtggatcacgaggtcaggtgttcgagacctgtctaggcaacatagtgaaatctcgtctctactaaaaatacaaaaaattagccgggcatrgtggcgggtgcctgtaatcccagctactcaggaggctgaggcaggagaatcacttgaacctggaaggtggaggttgcagtgagctgagatcacgccactgcactccagcctgggcgacagtgcgagactccatcttaaaaacaagcaaacaaacaaacaaaaaaccttattgatcaattgcatgaaacaataaaattgcattatgaaccatggattataaattctgtgcatctaaaattctcacaaggaagtaggg

SEQ ID NO: 591862 - DNA, 624 bp, Homo sapiens
tgctagcctagtgctaggccctgggggaaagaaaaatgaagatgatacagccttgccctccaatccagcatacacagacgcaggccccattttggtgactctgagatagcaagattagtctactggagcaattagagttaaaggatagctacttctgatggaaagacattgagatggagtaggggagtgaaaaacataagtaggtataactaattggtaattttctaattatttggttgggctctgtctccatggtgtttattagtaggccgaggtgggtggatcacgaggtcaggtgttcgagacctgtctaggcaacatagtgaaatctcgtctctactaaaaatacaaaaaattagccgggcatggtggcgggtgcctgtaatcccagctactcaggaggctgaggcaggagaatcacttgaacctggaaggtggaggttgcagtgagctgagatcacgccactgcactccagcctgggcgacagtgcgagactccatcttaaaaacaagcaarcaaacaaacaaaaaaccttattgatcaattgcatgaaacaataaaattgcattatgaaccatggattataaattctgtgcatctaaaattctcacaaggaagtaggg

SEQ ID NO: 591863 - DNA, 439 bp, Homo sapiens
tgggcattggtctaggcaaagaatttatgactaagatttccaaagcagagacaacaaaaacaaaaatggacaaatgagacttaaactaaagagcttctgcacaacaaaagaaataatgaacagtgtgaagaaacctattgaatgggagaaaatctttgcaaactaaacacatgacagyagaccaatatccagaatatacagggaaatcaagcaactcgacagaaaaaaaaagatgaaacccatctctactaaaaatacaaaaattagctgggtgtggcggcatgtgcctgtaatctcagctactcaggagactgagacaggagaaacgcttgaacctgggaggcagaggatgcagtgagccaagatcgcgccattgcactccagcctgggcaacaagaaagaaattctgtctcaaaaaagaaaaaagaaaaaaagtgtg

SEQ ID NO: 591864 - DNA, 439 bp, Homo sapiens
tgggcattggtctaggcaaagaatttatgactaagatttccaaagcagagacaacaaaaacaaaaatggacaaatgagacttaaactaaagagcttctgcacaacaaaagaaataatgaacagtgtgaagaaacctattgaatgggagaaaatctttgcaaactaaacacatgacagcagaccaatatccagaatatacagggaaatcaagcaactcgacagaaaaaaaaagatgaaacccatctctactaaaaatacaaaaattagctgggtgtggcggcatgtgcctgkaatctcagctactcaggagactgagacaggagaaacgcttgaacctgggaggcagaggatgcagtgagccaagatcgcgccattgcactccagcctgggcaacaagaaagaaattctgtctcaaaaaagaaaaaagaaaaaaagtgtg

SEQ ID NO: 591865 - DNA, 602 bp, Homo sapiens
taaagtattcagaattctctcagaaaaatctaacaaagagattgaaataatttagaataaccacgcagaaattctgaaactgaaaattgcaaatggcatagtgataaatgcatcagagtctgttaatagcaaaattgatgaagcagaagaaagaattagtaagctgaaagacaggctatctgaaaatacacagtcaaaggagacaaaagaaaaagaataaaaaacaatgaagcacacckacgggatctagataatggcctcaaaagggcaaatctaagagttattggcctcaaagcaggcatagagaaagaaataagggtagaaagcttattcaaaaggataatagcacagaacatctcaaccctagagaaagatatcaatatccaagtacaagaaggctctacaataccaagcagatttagcccaaagaagactaactcaaggcatttaataatcaaactcccaaaagtcaaggataaaaataagaattataaaagcaacaagacaaaggaaacaaataacctacaatagtgctccaataaatctggaagcagacatttcagtggcaaccttacaggccagcatagagtggtataacacat

SEQ ID NO: 591866 - DNA, 558 bp, Homo sapiens
ggcctcaggaaacttagaattatggcaggaaggaaggagaagcaaaataccttcttcacaaggtggcaggaaggagaatgaatacaggaggaactaccaaacccttataaaaccatcagatcttgtgaraagtaactcaatatcatgagaacagcatggggaaaaccacccacatggtacaattacccccacctggtctctcccttgaaacacagggattatggggattacaattcaagatgagatttgggtgaggactcaaagcctaaccacatcaactcatatctcttggaatgcacagaagtctaatcaaagttaactaaagacttaaatctaagacctcaaactatgaaactattactagaaaacactgggacaaatctctaggacactggtttgggcaaagatttcttgagcaataccctacaagcacaggcaaccaaagcaaacatggacaaatggaatcatgccaagttaaaaaccttttgcacagcaaaggatacaatcaagaaagtgaaaggacaacccacagaatgcaagaaaatatttgcaaactac

SEQ ID NO: 591867 - DNA, 558 bp, Homo sapiens
ggcctcaggaaacttagaattatggcaggaaggaaggagaagcaaaataccttcttcacaaggtggcaggaaggagaatgaatacaggaggaactaccaaacccttataaaaccatcagatcttgtgagaagtaactcaatatcatgagaacagcatggggaaaaccacccacatggtacaattacccccacctggtctctcccttgaaacacagggattatggggattacaattcaagatgagatttgggtgaggactcaaagcctaaccacatcaactcatatctcttggaatgcacagaagtctaatcaaarttaactaaagacttaaatctaagacctcaaactatgaaactattactagaaaacactgggacaaatctctaggacactggtttgggcaaagatttcttgagcaataccctacaagcacaggcaaccaaagcaaacatggacaaatggaatcatgccaagttaaaaaccttttgcacagcaaaggatacaatcaagaaagtgaaaggacaacccacagaatgcaagaaaatatttgcaaactac

SEQ ID NO: 591868 - DNA, 359 bp, Homo sapiens
aattttcatactctatcaggccatttgtgtatcttttcctgtgaagaatttmttttcaaggctttgaccatcattctactgaattattgtttcttctgttgttgattatcaggagctttaatatatagttgacacttgaacaacatggatctgaactacacaagtccacttattggtggattttcttcagcctctgccacccttgagacaacaagaccaatacctcctctttttccttctcctcagcctactcaacttgaagatggtgagaatgaagacctttatgatcatccacttctacttgttgaatagtaaatatattttttccttatggttttcttaataacactttcttttct

SEQ ID NO: 591869 - DNA, 655 bp, Homo sapiens
aaaatattctgagatcaggagtttgagaacagcctgaccatcatggtgaaatgctgtgtctagtaaaaatacaaaaattaactagttattgtggtgtatgctgttaatcccagctactcgggaggctgaggcaagagaatcacttgaacccagaaggtggaggttgcagtgagctgagatcacgccactgcactccagcctgggtgacagagtgagactgccacaaaaacataataatagtaataataaaagaaaaaggcaaaaattcaaacaacagaaactgcaaagccctccacaaaagaggaaatgtgaaggaatagctaataaaaacacgaagagggtctcagcctaacagggggagatgtcacgtgacacccaccagactggcaaaaatcccacaacccaatccatgcaagwgttagggagaatggagagtagcaggaacaccaggcactgctaagaacggttgtgaaatatatttttgttatgcttctatatgaaagggtgtgtgttgtgggttatgagaaaaattacatttcttacctgggatgaaattttaaacattggaagctattgaccagaagaaacttgcacttttgtacaaaagaaatacccaagaacattcctaacaaaacagagtcctaaaggccccaac

SEQ ID NO: 591870 - DNA, 589 bp, Homo sapiens
ttttgaagaaaaactaaggtttgcttgtggaagtgagtattgaaagggtttcagcttgggaggaattgcaaagtggtgaaataagaattatctgaaatcagacagaaagctgtaacaccagatatagatgggtggtctcatcacacctgtgctgagctgaagtagctgttggatgtttgaggtttgtttatgcttacattttatgtattgctacatggctttgttctgccaggtgccattttgtgcatccgcctagtgtttctcaaagatgaggtaacacataggcaaacaagaaatttgtgtcatgctcaaattgttccttaatatataaatagttttggagctaattcattttttaaaaaacaagccttttaaaagaacttactgcactgccttctaatcagatacatttgtttgcaggtgcataatttggcacagactttgtgcagtttaatttaatacaattccttttaagtactgaataaatcccattaaatctgtagaacatttgatccaatatatcagcctttggkattttactaaagaagtagaaacatttttattgcaaaaatatttaatatgagtatga

SEQ ID NO: 591871 - DNA, 506 bp, Homo sapiens
taaatccactaagatagtgagaaaccagtgcaaaaaggctgaaaattccaaaagccagaacacctcatctcctccaaaggatcacaacttctggccagcaagggaayaaaactggatggagaatgagtttgacaaattgacagaagtaggtttcagaaggtgggtgataacaaactcctccgagctaaaggagcatgtttaacccaatgcaaggaagctaagaacctggaaaaaaggttagacaaattgctaactagaataaccagtttagagaagaacataaatgacctgatcgagctgaaacacagcattaaaacatcctgatgcataaacaagtatcaatagctgaatcaatcaagcagaagaaagcatctcagacattgaagatcaacttaatgaaataaagtgagaagacaatattaaagaaaaaagaataaaaaggaatgaacaaagcctccaagaaatatgggactatgtggaaaaaaactaaatccacatttaattgt

SEQ ID NO: 591872 - DNA, 506 bp, Homo sapiens
taaatccactaagatagtgagaaaccagtgcaaaaaggctgaaaattccaaaagccagaacacctcatctcctccaaaggatcacaacttctggccagcaagggaacaaaactggatggagaatgagtttgacaaattgacagaagtaggtttcagaaggtgggtgataacaaactcctccgagctaaargagcatgtttaacccaatgcaaggaagctaagaacctggaaaaaaggttagacaaattgctaactagaataaccagtttagagaagaacataaatgacctgatcgagctgaaacacagcattaaaacatcctgatgcataaacaagtatcaatagctgaatcaatcaagcagaagaaagcatctcagacattgaagatcaacttaatgaaataaagtgagaagacaatattaaagaaaaaagaataaaaaggaatgaacaaagcctccaagaaatatgggactatgtggaaaaaaactaaatccacatttaattgt

SEQ ID NO: 591873 - DNA, 506 bp, Homo sapiens
taaatccactaagatagtgagaaaccagtgcaaaaaggctgaaaattccaaaagccagaacacctcatctcctccaaaggatcacaacttctggccagcaagggaacaaaactggatggagaatgagtttgacaaattgacagaagtaggtttcagaaggtgggtgataacaaactcctccgagctaaaggagcatgtttaacccaatgcaaggaagctaagaacctggaaaaaaggttagacaaattgctaactagaataaccagtttagagaagaacataaatgacctgatcgagctgaaacacagcattaaaacatcctgatgcataaacaagtatcaatagctgaatcaatcaagcagaagaaagcatctcagacattgaagatcaacttaatgaaataaagtgagaagacaatattaragaaaaaagaataaaaaggaatgaacaaagcctccaagaaatatgggactatgtggaaaaaaactaaatccacatttaattgt

SEQ ID NO: 591874 - DNA, 531 bp, Homo sapiens
gtttctctaggccatccatccaacaaaaggtttttcaggttcatagcaaggagccactcacaccaccctcatgccttctcactgtgtattcagtttcaagctaaaacacccatcacaaagcycatgctatcagacagaagagtcaaagggcactctatgaaatagaaaatatatttttcttgtttttgatatattagataatttctcacaatggtgatattcgaaaccaatgtattagtctgttttcatgctgctgataaagacacacccaagactgggcaatttacaaaagaggtttaatggacttacagttccatgcggctggggaggcctcacaatcacggttgaagacaaggaggagcaagtcatattgtacatggatgggagcaggcaaagagaaagagagagagcttgtgcagggaaactcctgtttttaaaaccatcagttcttgtgagagttattcactatcacaagaactgcatgggaaagacctgccccccgccgattcagttacctcccacggggtctct

SEQ ID NO: 591875 - DNA, 531 bp, Homo sapiens
gtttctctaggccatccatccaacaaaaggtttttcaggttcatagcaaggagccactcacaccaccctcatgccttctcactgtgtattcagtttcaagctaaaacacccatcacaaagcccatgctatcagacagaagagtcaaagggcactctatgaaatagaaaatatatttttcttgtttttgatatattagataatttctcacaatggtgatattcgaaaccaatgtattagtctgttttcatgctgctgataaagacacacccaagactgggcaatttacaaaagaggtttaatggacttacagttccatgyggctggggaggcctcacaatcacggttgaagacaaggaggagcaagtcatattgtacatggatgggagcaggcaaagagaaagagagagagcttgtgcagggaaactcctgtttttaaaaccatcagttcttgtgagagttattcactatcacaagaactgcatgggaaagacctgccccccgccgattcagttacctcccacggggtctct

SEQ ID NO: 591876 - DNA, 531 bp, Homo sapiens
gtttctctaggccatccatccaacaaaaggtttttcaggttcatagcaaggagccactcacaccaccctcatgccttctcactgtgtattcagtttcaagctaaaacacccatcacaaagcccatgctatcagacagaagagtcaaagggcactctatgaaatagaaaatatatttttcttgtttttgatatattagataatttctcacaatggtgatattcgaaaccaatgtattagtctgttttcatgctgctgataaagacacacccaagactgggcaatttacaaaagaggtttaatggacttacagttccatgcggctggggaggcctcacaatcacggttgaagacaaggaggagcaagtcatattgtacatggatgggagcaggcaaagagaaagagagagagcttgtgcagggaaactcctgtttttaaaaccatcagttcttgtgagasttattcactatcacaagaactgcatgggaaagacctgccccccgccgattcagttacctcccacggggtctct

SEQ ID NO: 591877 - DNA, 531 bp, Homo sapiens
gtttctctaggccatccatccaacaaaaggtttttcaggttcatagcaaggagccactcacaccaccctcatgccttctcactgtgtattcagtttcaagctaaaacacccatcacaaagcccatgctatcagacagaagagtcaaagggcactctatgaaatagaaaatatatttttcttgtttttgatatattagataatttctcacaatggtgatattcgaaaccaatgtattagtctgttttcatgctgctgataaagacacacccaagactgggcaatttacaaaagaggtttaatggacttacagttccatgcggctggggaggcctcacaatcacggttgaagacaaggaggagcaagtcatattgtacatggatgggagcaggcaaagagaaagagagagagcttgtgcagggaaactcctgtttttaaaaccatcagttcttgtgagagttattcactatcacaagaacwgcatgggaaagacctgccccccgccgattcagttacctcccacggggtctct

SEQ ID NO: 591878 - DNA, 590 bp, Homo sapiens
gaaggcaagagtttaggaaacttcacttagatttcagaggatgtatggaaacacctggatatccaggcagatgtctgcttcaggagtggagccctcatggagaacctctactagggcaatgtagagaggaaatgtggggttggagcccccacacagagtcccactgtggcactgcatagtggagctatrcaaagaagccaccattctccagaccccagaatggtaggtccacagacagtttgtactgtgctcctggaaaagccacagacactcaacacagcccatgaaagcagccgggaggggagctgtagcctgcaaagccacaggggtggagctgcccaaggctttgggaggccaatctttgtatccacatgtcctgtatgtgagacatgacgtcaaaggagattattttggagctttaagatttaatgactgtcctgctgggtttcagacttgcaaggggcctgtagaccattgcttttggccaatttctcccttttgcaatggcagcatttacccagcgcctgtacccccactgtttcttggaagtaactaacttgcttttgattttacaggctcataggccaaaa

SEQ ID NO: 591879 - DNA, 590 bp, Homo sapiens
gaaggcaagagtttaggaaacttcacttagatttcagaggatgtatggaaacacctggatatccaggcagatgtctgcttcaggagtggagccctcatggagaacctctactagggcaatgtagagaggaaatgtggggttggagcccccacacagagtcccactgtggcactgcatagtggagctatgcaaagaagccaccattctccagaccccagaatggtaggtccacagacagtttgtactgtgctcctggaaaagccacagacactcaacacagcccatgaaagcagccgggaggggagctgtagcctgcaaagccacaggggtggagctgcccaaggctttgggaggccaatctttgtatccrcatgtcctgtatgtgagacatgacgtcaaaggagattattttggagctttaagatttaatgactgtcctgctgggtttcagacttgcaaggggcctgtagaccattgcttttggccaatttctcccttttgcaatggcagcatttacccagcgcctgtacccccactgtttcttggaagtaactaacttgcttttgattttacaggctcataggccaaaa

SEQ ID NO: 591880 - DNA, 590 bp, Homo sapiens
gaaggcaagagtttaggaaacttcacttagatttcagaggatgtatggaaacacctggatatccaggcagatgtctgcttcaggagtggagccctcatggagaacctctactagggcaatgtagagaggaaatgtggggttggagcccccacacagagtcccactgtggcactgcatagtggagctatgcaaagaagccaccattctccagaccccagaatggtaggtccacagacagtttgtactgtgctcctggaaaagccacagacactcaacacagcccatgaaagcagccgggaggggagctgtagcctgcaaagccacaggggtggagctgcccaaggctttgggaggccaatctttgtatccacatgtcctgtatgtgagacatgacgtcaaaggagattattttggagctttaagatttaatgactgtcctgctgggtttcagacttgcaaggggcctgtagaccattgcttttggccaatttctcccttttgcaatggcagcatttacccagcgcctgtacycccactgtttcttggaagtaactaacttgcttttgattttacaggctcataggccaaaa

SEQ ID NO: 591881 - DNA, 620 bp, Homo sapiens
aattgtcctaagttatacagctagtaggtaagagttggtacaatcaaattcrgtaagcctaggcccaaattcagtgccctcaagactgttgctctactgttcctcctagatatgtatgtgcctatgaaatgagtaaaaagaaagcggatgaaattcggaaaataaagagaagacagactaatctcaaatatgttcctacaaatataaaacaatttaatatatagctttttatgtaggcaatcccataactccaaaagtgaagaataataaaattattgagaaggcctaaaaataggaaattagggtgaaaggaaaataactatttataatttgatgcatacaggtctagattttatcaaaacacagtgatcaaaagcagtctggtgagaatctatttctgttttggctacatcctccttttctcatattttgttccacttgaaatacctattattttatatatttgagatgcattgtcatagtaagagtagcttaaaagctgtcttcaaatagagttattgtgttctctgaaggccagtattcctattgtttagcaccttttcttattagaattcaaaagctaccattcaaggtccacctgatatctatttgaatcacca

SEQ ID NO: 591882 - DNA, 620 bp, Homo sapiens
aattgtcctaagttatacagctagtaggtaagagttggtacaatcaaattcagtaagcctaggcccaaattcagtgccctcaagactgttgctctactgttcctcctagatatgtatgtgcctatgaaatgagtaaaaagaaagcggatgamattcggaaaataaagagaagacagactaatctcaaatatgttcctacaaatataaaacaatttaatatatagctttttatgtaggcaatcccataactccaaaagtgaagaataataaaattattgagaaggcctaaaaataggaaattagggtgaaaggaaaataactatttataatttgatgcatacaggtctagattttatcaaaacacagtgatcaaaagcagtctggtgagaatctatttctgttttggctacatcctccttttctcatattttgttccacttgaaatacctattattttatatatttgagatgcattgtcatagtaagagtagcttaaaagctgtcttcaaatagagttattgtgttctctgaaggccagtattcctattgtttagcaccttttcttattagaattcaaaagctaccattcaaggtccacctgatatctatttgaatcacca

SEQ ID NO: 591883 - DNA, 620 bp, Homo sapiens
aattgtcctaagttatacagctagtaggtaagagttggtacaatcaaattcagtaagcctaggcccaaattcagtgccctcaagactgttgctctactgttcctcctagatatgtatgtgcctatgaaatgagtaaaaagaaagcggatgaaattcggaaaataaagagaagasagactaatctcaaatatgttcctacaaatataaaacaatttaatatatagctttttatgtaggcaatcccataactccaaaagtgaagaataataaaattattgagaaggcctaaaaataggaaattagggtgaaaggaaaataactatttataatttgatgcatacaggtctagattttatcaaaacacagtgatcaaaagcagtctggtgagaatctatttctgttttggctacatcctccttttctcatattttgttccacttgaaatacctattattttatatatttgagatgcattgtcatagtaagagtagcttaaaagctgtcttcaaatagagttattgtgttctctgaaggccagtattcctattgtttagcaccttttcttattagaattcaaaagctaccattcaaggtccacctgatatctatttgaatcacca

SEQ ID NO: 591884 - DNA, 618 bp, Homo sapiens
tcttaaaaataaatgtgcttctataaacctgaagaaggtataatgttgatttgtctctgtttatttaaaaagtatgtcatagtcttagtaaagacacttatcatttttttctttgcttcataattatttgactactcatttcacytcctcgactagactcttaatttccatagtaagagggttcatgctcatttctgagtttcccacattaatttgcctctagacccaaagtctaaaattaaagatatagtgaaatattttcccagtaaatcatatcaacaaagatgatacgttactgccttaattataacagcatgcattttcatttttcaatgtatcttttttatctaattttttcattgcatcattgttattagattggttggagtatgatactagaaagatcaattaagggttcaaattctatgtgggacttttacttgtctttctcatggccacaaattcactctccactttggccatatttgcagctgtgcaatattggttaaaaataaaagagagtgggtggacagaagtagaaatattatatgaattcatttatatctctggaaaataagtttggagaacactatctgttctgtctgaatcagaagcatg

SEQ ID NO: 591885 - DNA, 597 bp, Homo sapiens
atagattaagtaaccagatcaaggccataagaaaaggcctcccaggaaagtaaaaccctcaactcaatggcttcattactgcattttacaaaacatttaaagaagaagtaatattgatcctactcaaactagttttgcaaaatagaggaggagagaatactctcatactcattctgtgatgccagtattaccctgataccaaagccaggcaaagacatatcaaaaaaaagaaaactacagaccaatatccctgatcaacattaatgtcaaaatccycaacaaaatactcgcaaacaatacactcaacaatacattagaaagatcattcatcatcaccaagtgggatttatctcagggatgcaaggatagttcaatgtatgcaaatcaatcaatatgaaacatcatataaacagaatgaaggacaaagcctatatgatcatttcaatcgatgctgaaaaaagcatttgataaaattcaatatcactttatggtaaaaaacataaaaaaagctgggtgtagaaagaatgtacctcaacacaataaaagccatatacaacaacaacaaaaaaaacaaaaacaggaaatgtcgtactgaat

SEQ ID NO: 591886 - DNA, 568 bp, Homo sapiens
aaatcatcgcctatccaatttgatcatcaaagataaaaatacctgtctactgggctagacaccttcattctgttgccactcacaataatactctttccagggagaattrtttctaacacctgatttgtagaatcagagcctataactttaaacagactaacctaattcccatagtatttgaaaaccagtaaatctcttggcccctcgctacacacaaaagccactcccagcagctcctctgggggttacaagatcaatcttagacttcaatctcagtcctattgtagtcatgctaaggcacacttagggataaaccaaacaactgatccaaatcggtgttcatgtagctggtgggagagtggttagataaagggaagatattgcagaaaggagaagggatgaagataattttattgtgaaacaacacttcaggttttatttgtctaatacaagaaatacagagaggtttgggtgtggtgacttaggcctgcaatgccagcattttgggaagtcaaggcaggcagattacttgagcccaggaattcaaggctgcagtgagccatgacag

SEQ ID NO: 591887 - DNA, 663 bp, Homo sapiens
aaaaatcactgcaaatactttccttagcaaaactatttaatattttatagggccaaaatgaacaaatacacattagtctttaggatcagctatatataaacatggttttaaataagttatttgaaattttatgtctttcttataataatgaagtaaacacaaaataaaatcctctgaactgaaatcaggataaaaatattggaacatttttcaataaaaagaaaaagaagtattttaaaaagttatcctaaaagatttatttaactatattaaaatccaaatagagaaaaataaaagaaagtaattttaagtttaatataatgaaaaagttaatcatacagcaacaggaattatagttgtagaaaagctgacatgagtctctgtaaaagttaagcactcatattccattaaacataatagattctagccttgattatatatcttaatgaasttattcatatatggcctgatcttgattaggtacttggctagtgaagcaaaattggttgacctcattttttaaaaaaagaaaacaagataggagtgatagatcagactaatcggtcagttattcagcaaaatgtatcttttgtgatgattattctagttagcaactaagatggactattaaaaaaagtccttgatataaattggttttatatt

SEQ ID NO: 591888 - DNA, 591 bp, Homo sapiens
ttcattttgcccagtacttttcccctgtgaaactcatataatgcctgactgtaaaagtccttccacaacttccatagcagtaaattctttggttttaggttactgaatcatgacagcataaattcacaccatacacctgtgcggtatgtgccagtgtttgttttttttcttgggtagttttttttttccccwcccactcaaagctccagacagaaggcaagctttcttctcactgtttcccaggccactgagtagttttactagatctctgctgatagatggggcagctttctgaagcctcagactttctatagttggattgcttttagttctccaaaactacaaaggccgaggacactctcctgtctacgcaacaacacttagatcccaattcttagccatttagagcatatagctgtctaaaataattaagatcatccagcgtacccttaatattttgtcttttattgttcctgttgtattttatgaacacctatacatttccctttcttttgggcttggctcattttttctgtcattacattttatccaacattttaatgaatttttaacagctctgggtctattaat

SEQ ID NO: 591889 - DNA, 466 bp, Homo sapiens
aatgatgtattcagcagcaaaaatacatgcaagaagatgatgtcgtgcctcacaagtgctgagggaaaatatttgtcaatctggactgatatagccaaataaaatatttttcaatgaataacactggaataaaataacaacattattatttaaatgtgttaaaacattttaccacctaaaaactttctgagaaagaactattgggaacaaacacactktgccaagaaaaaaattaaacccaggagaattagcaaacatattgttgaatctaattaattataggccattaaaaataatacttctatttttatgattaaaaattaagaattaaactttagcacaaataatataggtgatgtaagtgacggaacacaaggggcaacaaaacacattaattgaaagttctactcaagaataaaagggaaaaagttaaaaacatcaaactttgctaaaattaaaaaaaagt

SEQ ID NO: 591890 - DNA, 561 bp, Homo sapiens
aaaactcactcactctcaacatttcaaatattatttctattgaaaacctatggtacctgaatcctacgtcaggggccagagttttattattaactgccacctggatattcttagttgctatgattacctgaagttcagcacattgaaagctagaactcgcattcaggcttcactggctgcacacttgctgtcttccgttcattgcgctgccattctgccagctccaggtgttaaaaattttactgtaagcattaccgcttttctttcctatttcctgcgtccagcagttatatataacctattagataagcacacagttgttagtyggaaatgcctattgcatcacttttattcactctgcttatatgtacattcgtatttttctacctcccaccccactatgacctagctagctggcttgttttgctgaaggcagacttatttcctccaatattgccagattaaatatcttaaaatatgactttcataatgtgctctgcttaaaagttttcctaggccccttcctgctgagatgataaaatgtgtagttggtgattttta

SEQ ID NO: 591891 - DNA, 583 bp, Homo sapiens
ggatttaggattagacagtttttcactgaaatctctgctctacattgtgacactgggaaaaataaacctctttatgtcttgattttctcggctgcaaagtggggctaatagtaccctttatacactaattttgagtattaaatgggataatataaaatactcagcaaaatacctggaatagttaggtgtttaataaatagtagttatttttattgcaataataaatacagtartcctcaatgcagggctctgaagaggttttctggtagtcattgaagttacagaaaatagtgacccaagttaaaagttgatctataatacagagggtatgtgtgtcttactgcagcctggctattacaaaataccctgcactgggtggctaataaagaacataaatctatttctcacactttggaggtggccagtccaaaaataaaagtgctagcagactcattgtctcgtgagagcacgctttttcatagatgacacattctcactgtgtccttacatggcagaaggggactagctagctctctggggtctcctttatttatgttttatttatttatttatttatttttga

SEQ ID NO: 591892 - DNA, 583 bp, Homo sapiens
ggatttaggattagacagtttttcactgaaatctctgctctacattgtgacactgggaaaaataaacctctttatgtcttgattttctcggctgcaaagtggggctaatagtaccctttatacactaattttgagtattaaatgggataatataaaatactcagcaaaatacctggaatagttaggtgtttaataaatagtagttatttttattgcaataataaatacagtagtcctcaatgcagggctctgaagaggttttctggtagtcattgaagttacagaaaatagtgacccaagttaaaagttgatctataatacagagggtatgtgtgtcttactgcagcctggctattacaaaataccctgcactgggtggctaataaagaacataaatctatttctcacactttggaggtggccagtccaaaaataaaagtgctagcagactcattgtctcgtgagagcacgctttttcatagatgrcacattctcactgtgtccttacatggcagaaggggactagctagctctctggggtctcctttatttatgttttatttatttatttatttatttttga

SEQ ID NO: 591893 - DNA, 533 bp, Homo sapiens
tcagttactgcctcctgaattcacccttggctctcaaagaagcaagttatataaagcacccaagttagtgaagtcctccgatgacaggatctaccatagtcatgtcagaggtgttaaattaacatgtgtccttctgacctccataaagccagtgtaggtcacttgcattcattacactcctactaccttgaaaggggtattgtatttttgagtcagagagggggaaatgtgattatacctcacagaaaactgtgttaaacccacagtttcacccacggaagcaggttagttgtattatcctacggaagagtcagcttatgaaagtgtgaagccactgggggatcagttttcacctaaattacaccttacatgcagcagtattaaaattaataatgtatccctctcccctttgatcattaattataaaaaactatgccaatattttttgtcaggcttctactggtacttcttggtagtgatataacttcctaagagaatattttcrggattttgtagtaacctgactttggttg

SEQ ID NO: 591894 - DNA, 544 bp, Homo sapiens
agaattccttgaacctgggaggcgaaagtcactgtgagccaagattgtgccactacactccagcctgggtgacagagcgagactctgtctaaaaaaaaaaaaactaccagcrtccaaacacaagaacgataagacgataagaattagaaaaactctagattcctgttaatttcctccccccacctcaatctactttctttttcagccgtagttctacagggctcctcaggccactgccgctgcccacctcccggcccccacaggcctgaagtcagaagcctggagagcaaggtgggataaagcactgcagctcagaacaggctgtgagctgcggccctggcagtctccacagagtgcaagaaactagctatgaagtaaaatagctagctcttgcttgatgcatgtcagagcaagacacttgtattagtcctaatactaaacctcagccagattaaatttaaaaagagaagttagaagaaattgtcctctcttggtgatgttccttaattcatcacctttaacattgtaccaatatacaaaataa

SEQ ID NO: 591895 - DNA, 595 bp, Homo sapiens
tctggccacatatccagatactgttgccagccaagttgacacataaaattaacatcccatgtatcttggttgtggtagtggtcacacacatctagatatgtgggaaaatgacatggaactatactyatagattgtaccaatgtcacatattaggttttgacgtactatcattatttattcaataattatttcaattacttaaacaattgtttaataattattaagataaaaccatcaagggcacctacatgggagttcactgtactatctttgcaacttcctgtgtgtctaaaattatttcccaaaaaaaaagcttgattttttttttaatcgtgcacattcctatccatttgtagctgctcctccaaattccccagctccaggattctgatccacttggacaattggcagtttggttgcaaataggctactgctgacctccatgtaaaaattgtccctagtggagacattatctgagtggagctgtgataatatgtacaaaaaggaactgtttagcacttttttactttagaggggaaaaaaaggagtagcaaattaggagagaatatagtactgcaagtaaacaatagtcctt

SEQ ID NO: 591896 - DNA, 601 bp, Homo sapiens
tttccttatctgtaaaatggagttaacacagtacccacctcatacgttgtgacaattaaatgagttaatagcacgaagggcttggaatggcacctatgtgcaatgcagcacagtacacaggaggtactacacagttgctgactgttattgcttctggcatttccctggcttcctggtgctgcttaggtggtgtggatccattggaagggtttgtgtaatagtaataacagcagtgatgctaacagctggcccttatccactgttacaggatgaggaggggatgccgggcacyccctcataccagctgccagggaattccgcacagaagctgggctggctgcagagggctgagttgtagactccaggagaaggtggggcatccagccagaggggactggattcccagaggagcagaggagcagagggtcccggggcagctgaggggctcacagagctgtggggaagggagctataggctggagcagagagtgggaaagacgggcagaggccagacagccaagaagcttgcagcctggactgtgccctgagatgcttggatgctctttcattttcttactgaaaatcctggaaaaaaacagcc

SEQ ID NO: 591897 - DNA, 349 bp, Homo sapiens
ccttcggccaattactttgaggcttacacttcactggttacatgggcccrttgttttctgggacaagtcaagatttactgtctgtccctgacatcacgtttgcccagagaggcttaagagtgaagagctcatctctcctatctcccgtttccaccagttaagggttctgtagatttgctgaagttgggaaacttggtgtaacccttgcctccctggccacctcaccacaaagggcatgtgccaagctcattcattcctgcctcagggcctttgcgctggctgttctctccacccagaatacacttccctctgatatttgctcagctcactcccttactacttcagatct

SEQ ID NO: 591898 - DNA, 349 bp, Homo sapiens
ccttcggccaattactttgaggcttacacttcactggttacatgggcccattgttttctgggacaagtcaagatttactgtctgtccctgacatcacgtttgcccagagaggcttaagagtgaagagctcatctctcctatctcccgtttccaccagttaagggttctgtagatttgctgaagttgggaaacttggtgtaacccttgcctccctggccacctcaccacaaagggcatgtgccaagctcattcattcctgcctcagggcctttgcgctggctgttctctccacccrgaatacacttccctctgatatttgctcagctcactcccttactacttcagatct

SEQ ID NO: 591899 - DNA, 447 bp, Homo sapiens
tcatttacttctccctgctgttctgttgccctcagtggaggagaaatggagaaggtgatgctagaagcctttctggattcttcccacaagcccagctgtctttgccagaggagctgacttttgccctactttctggcccacaccctgtggtcaccctttagggaattttctaccttaatagctcacawctctctaaggaagtgccactaaaaatacaaaaattagccaggcatggtggcaggtgcttgtaatcccagctactccagaggctgaggcaggagaattgcttgaacccaggaggcagagattgcagtgagctgagatcacactgctgtactccagcctgggcagcagagtgagactccatctcaaaaaaaaaaaatcaggaaatgattcctaaaaggatgttagagacaccttctgcacaaaatattagtgtaatactta

SEQ ID NO: 591900 - DNA, 508 bp, Homo sapiens
ggtcttgctatgttccccgggctggtcttaaacacctggactcaagcaattcttctacctcagccttccaaagtgctgggactacaggcctaagccactgctcctggcccttaacctctttctttatgggtaaaatgggaagaaaatatcacctctcccacacattcgaggtagagactaatattagttaatataggtaaagtgtttggagtaacacatggcatgtaataaatgctccacaaaacacaagctgttattagttcagttctgtgattagttctgtgaatgctgaggaggcagagggagtgaaattcaaatcctagctccatcccttcttagctctaggaccttggtgaaatctcgtaacttctctaggtgttcgtttttcttacctgttaagcaaagaagatcttagtattcaccttgccaggtggttgagagggtctatgtctttgtaaastgcatggaaataattcaccttatgggggaagaagataagtcccaaaga

SEQ ID NO: 591901 - DNA, 508 bp, Homo sapiens
ggtcttgctatgttccccgggctggtcttaaacacctggactcaagcaattcttctacctcagccttccaaagtgctgggactacaggcctaagccactgctcctggcccttaacctctttctttatgggtaaaatgggaagaaaatatcacctctcccacacattcgaggtagagactaatattagttaatataggtaaagtgtttggagtaacacatggcatgtaataaatgctccacaaaacacaagctgttattagttcagttctgtgattagttctgtgaatgctgaggaggcagagggagtgaaattcaaatcctagctccatcccttcttagctctaggaccttggtgaaatctcgtaacttctctaggtgttcgtttttcttacctgttaagcaaagaagatcttagtattcaccttgccaggtggttgagagggtctatgtctttgtaaactgcatggaaataattcacctyatgggggaagaagataagtcccaaaga

SEQ ID NO: 591902 - DNA, 458 bp, Homo sapiens
aaatctacatgcccttagagcaggaatccgtgcagctgtgcaatctgtcacttctcctgtcctccatatgcttccagcaagaagaaaatgcagcgtggccattgacccctgagcamccccctcaccaccaaggtaggaagtgggtgacaagcacacgaagtgtggaggaggggacagaatggggtctggagtcccagagctccacattctcagtcctggctgtaactgtggacatggcttttcccctctctgagcctcagttttcttatctgtagaatgggtgcaatccttgtaataccccttctgttgatatgcaggatggaagaagcctgggtatagaactaggcacaggagaggtactcagaaaatggcaactgtttctattatgtggaaggggccactgaagccctctcccctcacccaatctttcaagcccagtttgactcctcatgaccaag

SEQ ID NO: 591903 - DNA, 553 bp, Homo sapiens
gttgcaatagcaggaattgtagcttagtccattaacccactatattaaagattgctgccagctgtctgccaccttataaaggtctgagacagactgaagttagtggtgagcttgagcagtttgtagtcatgcaactatactgggaatacactgtgccccagtttacatacccttagttcatcttctgcctcatttgtccgtatataaactgacagtaccttgagtcaggtgcactgcaggggtcttgcttttgcatcaagagcttctttgatgttgcagcatgggacccatagaggaatcctgtggacacttatgtgtgcatattctggaggtwtgaaaacattaacaccccatggggcaatccttaaccaactaagaagtggaccagtgaattaatgcttttctgactctcaggttaccagtcctaaagttcatagcccagccccaatttcccttagcagtgactagcttgataaatcacccttgtattgattttgcttctgtattagatagcttttgttgtataacaaaccattccagatcttagttgctt

SEQ ID NO: 591904 - DNA, 553 bp, Homo sapiens
gttgcaatagcaggaattgtagcttagtccattaacccactatattaaagattgctgccagctgtctgccaccttataaaggtctgagacagactgaagttagtggtgagcttgagcagtttgtagtcatgcaactatactgggaatacactgtgccccagtttacatacccttagttcatcttctgcctcatttgtccgtatataaactgacagtaccttgagtcaggtgcactgcaggggtcttgcttttgcatcaagagcttctttgatgttgcagcatgggacccatagaggaatcctgtggacacttatgtgtgcatattctggaggtttgraaacattaacaccccatggggcaatccttaaccaactaagaagtggaccagtgaattaatgcttttctgactctcaggttaccagtcctaaagttcatagcccagccccaatttcccttagcagtgactagcttgataaatcacccttgtattgattttgcttctgtattagatagcttttgttgtataacaaaccattccagatcttagttgctt

SEQ ID NO: 591905 - DNA, 528 bp, Homo sapiens
ctggagtgcagtagtgcaatctcagctcactgcaacctctcyctccctggatcatgtgactctactgcttcagcctgggattacaggcacctgccaccatggctggttaattttttttgtatttttattagagatggcattttgccatgttggccaggctggtcttgaactcctgacctcaagtgatctgccctcctcagcctcccaaagtgctgagattacaggtgtgagccaccacacccagccattctgggtagacgaaaggttaattattaaaaataacttaaaaaggtaacataacattgctatgtattcttggtacaggtaacaccttctggaacctggcacaaaaatcaaatatcacaaaggaaaagactgaggctttttcctatataagaattagaaattcctgggaaagttacaaactcaagagccagaatttggggaaaaatatgttttaaggcatatactgcacaaatggttaatatttatgacatcacatctctttcatgtagttttgtgaaaggt

SEQ ID NO: 591906 - DNA, 528 bp, Homo sapiens
ctggagtgcagtagtgcaatctcagctcactgcaacctctctctcccyggatcatgtgactctactgcttcagcctgggattacaggcacctgccaccatggctggttaattttttttgtatttttattagagatggcattttgccatgttggccaggctggtcttgaactcctgacctcaagtgatctgccctcctcagcctcccaaagtgctgagattacaggtgtgagccaccacacccagccattctgggtagacgaaaggttaattattaaaaataacttaaaaaggtaacataacattgctatgtattcttggtacaggtaacaccttctggaacctggcacaaaaatcaaatatcacaaaggaaaagactgaggctttttcctatataagaattagaaattcctgggaaagttacaaactcaagagccagaatttggggaaaaatatgttttaaggcatatactgcacaaatggttaatatttatgacatcacatctctttcatgtagttttgtgaaaggt

SEQ ID NO: 591907 - DNA, 528 bp, Homo sapiens
ctggagtgcagtagtgcaatctcagctcactgcaacctctctctccctggatcatgtgactctactgcttcagcctgggattacaggcacctgccaccatggctggttaattttttttgtatttttattagagatggcattttgccatgttggccaggctggtcttgaactcctgacctcaagtgatctgccctcctcagcctcccaaagtgctgagattacaggtgtgagccaccacacccagccattctgggtagacgaaagkttaattattaaaaataacttaaaaaggtaacataacattgctatgtattcttggtacaggtaacaccttctggaacctggcacaaaaatcaaatatcacaaaggaaaagactgaggctttttcctatataagaattagaaattcctgggaaagttacaaactcaagagccagaatttggggaaaaatatgttttaaggcatatactgcacaaatggttaatatttatgacatcacatctctttcatgtagttttgtgaaaggt

SEQ ID NO: 591908 - DNA, 528 bp, Homo sapiens
ctggagtgcagtagtgcaatctcagctcactgcaacctctctctccctggatcatgtgactctactgcttcagcctgggattacaggcacctgccaccatggctggttaattttttttgtatttttattagagatggcattttgccatgttggccaggctggtcttgaactcctgacctcaagtgatctgccctcctcagcctcccaaagtgctgagattacaggtgtgagccaccacacccagccattctgggtagacgaaaggttaattattaaaaataacttaaaaaggtaacataacattgctatgtattcttggtacaggtaacaccttctggaacctggcacaaaaatcaaatatcacaaaggaaaagactgaggctttttcctatataagaattagaaattcctgggaaagwtacaaactcaagagccagaatttggggaaaaatatgttttaaggcatatactgcacaaatggttaatatttatgacatcacatctctttcatgtagttttgtgaaaggt

SEQ ID NO: 591909 - DNA, 590 bp, Homo sapiens
tccaatctcaggtagtgtgctatagcaacacaaaaaagactaagacattatactaagaaactctaaactaaaaacaattcattgattcacattatcagtttgctacactcattgccataaaaattagcaaatatcctggaaatggtgcctacttgcctcttcccattatcttggaatgagagaaaatagaaaaaagcagaaatgaggtgttttgatattatctgtcgtcacttttctcttacgagatattaatacatgaaatgagcaaaaaarggtatgcagaaaaaagaccaacccagtaatatcaaagaaattctaaaaagagcaatagaatttgaaataaaactatgacaataacatgaaacaaatgctctagaaaatatatgctctgatgaaatttatatcaccaaaatcattcaagaagtggaaaatttgaaaagatcaattattgtagaaaagattggaaagataattagatagctaccattcatgaaagtatcaggactagatggtttcatagattagttctaagaacatttgtagttccaatcctatttgaattattctataccacagaaaaaagtttcccc

SEQ ID NO: 591910 - DNA, 522 bp, Homo sapiens
cgtgtaaccctgtctatgggccaaggtctgaattgtttactatggccaccaaagattcactttcatatgtttgtggccatgtgcaggtagttttggaacaaggaggcaatagttaaaacacttcacattaattgctgcttttaggaaatctgccctctgaccttcattgttttcactaaaaggaataatttccaaaagataatacagacatcaaagtaccaaatgtctataaaatgaaggctcattgtgttcctgacattctgtttttctatgtctgagttgggagaacaatgatgaagagctttcttccctccgtgtgtgcaacatgtaaaaaggcactaattaccactaargaggaaagatgtgctagtttctggcattgtgccattattaatttgtcccaggacatttttgtaccaagtgttttgctttttattttttatttttattttttgagatggagtcttgctctgtcgcccaggctggagttcaatggcacaatctcggctcacttcaagctcc

SEQ ID NO: 591911 - DNA, 580 bp, Homo sapiens
gaagctagagattcccagagaatgttttaccctttggttagttcagcacaacagagacaataaataaaaaaagctcaaaattcttcagccatctgctttcatccattttgacaatggaatggtttttttgtatgaccagtctgattagaggtgtagaaacttgtcctctagtgaaaaaaaaataaaaacaaaaacaaaaamcaaaacccagtcagtgacaacgccttcgagaaaaccatcagagatctcaggcataagattgtatttatctccctcacttccaaaagaagttatagcttttgcacgttgtttgtatatcagttgtcatctaatattttaccaaaaaaaaaaaaaaaaaaaaaaaacaacagaaagctaattgaaacattgtttaccccaggaggaaggacactgcagaagaaaatggtttgaagataaactctatcctgttgacacacacacattctatttgctactgtttattagtgtttacaatgtatcagaaatatctttcctctaatcaagaatgccaagatacgggctcttaaattgctgcaaagatgaagaaactgaggcacag

SEQ ID NO: 591912 - DNA, 508 bp, Homo sapiens
ttacataacatgtgatgtctagagaaagaatgggattcttcaaaaattctgcagtaacaagaatgaaatcttctaaagcttacctgtcaatatgctaggttatgtgtgatcactatactatacgaacattccaaaatcttacagatagcatgaccatttatctgtgtttttataatgttttcccccattagtaatcaacccatgtttgcttttgagtgattagttctcaatattatccacctgctcgtctatgctgtaggctttgtagatcattcccttcttcaamattatcctgaaatttagtccttggatctatgtacctcagacatttatcaaggcaccccaattctctcactttccagctctttctgttgtctagttatttactcttggaagtctttgcagacttacttttcagcatcaagattgtcttaccatttttgtctctaaagcatcattgaatctgaacatgacacttcaatgctacagttcctaaaattttatttct

SEQ ID NO: 591913 - DNA, 508 bp, Homo sapiens
ttacataacatgtgatgtctagagaaagaatgggattcttcaaaaattctgcagtaacaagaatgaaatcttctaaagcttacctgtcaatatgctaggttatgtgtgatcactatactatacgaacattccaaaatcttacagatagcatgaccatttatctgtgtttttataatgttttcccccattagtaatcaacccatgtttgcttttgagtgattagttctcaatattatccacctgctcgtctatgctgtaggctttgtagatcattcccttcttcaacattatcytgaaatttagtccttggatctatgtacctcagacatttatcaaggcaccccaattctctcactttccagctctttctgttgtctagttatttactcttggaagtctttgcagacttacttttcagcatcaagattgtcttaccatttttgtctctaaagcatcattgaatctgaacatgacacttcaatgctacagttcctaaaattttatttct

SEQ ID NO: 591914 - DNA, 508 bp, Homo sapiens
ttacataacatgtgatgtctagagaaagaatgggattcttcaaaaattctgcagtaacaagaatgaaatcttctaaagcttacctgtcaatatgctaggttatgtgtgatcactatactatacgaacattccaaaatcttacagatagcatgaccatttatctgtgtttttataatgttttcccccattagtaatcaacccatgtttgcttttgagtgattagttctcaatattatccacctgctcgtctatgctgtaggctttgtagatcattcccttcttcaacattatcctgaaatttagtcyttggatctatgtacctcagacatttatcaaggcaccccaattctctcactttccagctctttctgttgtctagttatttactcttggaagtctttgcagacttacttttcagcatcaagattgtcttaccatttttgtctctaaagcatcattgaatctgaacatgacacttcaatgctacagttcctaaaattttatttct

SEQ ID NO: 591915 - DNA, 508 bp, Homo sapiens
ttacataacatgtgatgtctagagaaagaatgggattcttcaaaaattctgcagtaacaagaatgaaatcttctaaagcttacctgtcaatatgctaggttatgtgtgatcactatactatacgaacattccaaaatcttacagatagcatgaccatttatctgtgtttttataatgttttcccccattagtaatcaacccatgtttgcttttgagtgattagttctcaatattatccacctgctcgtctatgctgtaggctttgtagatcattcccttcttcaacattatcctgaaatttagtccttggatctatgtacytcagacatttatcaaggcaccccaattctctcactttccagctctttctgttgtctagttatttactcttggaagtctttgcagacttacttttcagcatcaagattgtcttaccatttttgtctctaaagcatcattgaatctgaacatgacacttcaatgctacagttcctaaaattttatttct

SEQ ID NO: 591916 - DNA, 522 bp, Homo sapiens
aagttgagaatagaacaaaggaagtttgatgtggaggaaaaagaaatctttagcaagagttgtagcaagaaccctttagcaagacaaagatttctgaacgtgagtctgccactaagtagccgcagtggcctacgcaagtcatttcccttctctgggtgctggccctcgtctgtgaaatgaaggactttgacgaggtgtgtagggtccttctagttctaatagtgttgtattatagatcaaatatgatgttttgtcatacctggctaccaggtaaaagaagggccctaaaagaaaattagaacaatggaaaacaaacacaaaaatcaagcatcactgttataaaagcaagacacttaagtcgatttaaattatactactttcatctgtgytcacaactataattaagacatataaaaatctaagcagtgagaggagaaaaacaaaaccaaccaactaaccaaaaataacaacaaactgagattagtgggtagtccggaagtaccattttacatcccaaagtga

SEQ ID NO: 591917 - DNA, 491 bp, Homo sapiens
tgatatgcagacaattaaatattaattttgctaaataatayaaaaattgtgttacatgcactagaattctagacttgtattctgcaggatgagtcttactggctgctgaatattatatttgtctggctacttgcttttgaagaatgtactttaattattgttaaaatactagaaaaagcattttaaggtttttgtcttggtggctgttcttgtgttagctgtggagagtacaacatggacaaaagtaactcaagctgtaggctacaatagacttgattcaaattctggctctattagcaggctgctttgtgatcttggctaatttatttagcatctcagcctcaatttcttgatatataaaatttgaataatgataataatacttcaaagagtagttgtgtgggtccaagatttagtatagcccctggattgtcctaagttctcagtgtaatttagctagtagtgcagtatttattgttaatgttgttcac

SEQ ID NO: 591918 - DNA, 559 bp, Homo sapiens
cccaatgtatgttctcggcacttttycaaaaatgagttgactgtaatttatgggttgtctattctgttccattggtttatgtgtctgtttttatgccagcaccatgctgttttgattactatagctatgtagtatagttaaaagtcaggtaatgtgatcctgtctagttttgttctttttgctcaggatggctttggctagtctaggtcttttgtggttccatataattttttttctatttctgtgaagaatgtcatcagcatttggatggggactccactgaattgtagattgctttgggtagtatggacatttaaaaaatattggctcttttaacccatgaacgtggaacatctttcattcttttgtgtcctcttcaatttccttcatcaatattttacagttttcattataggcatcttttactactttggttaagtttatttctaggtaacttatttgtagctattgtaaatgagattagtttcttgattttttttgtttgtttgttttttgttttttttcagattgaccactgctggcatatagaaatgctact

SEQ ID NO: 591919 - DNA, 559 bp, Homo sapiens
cccaatgtatgttctcggcacttttccaaaaatgagttgactgtaatttatgggttgtctattctgttccattggtttatgtgtctgtttttatgccagcaccatgctgttttgattactatagctatgtagtatagttaaaagtcaggtaatgtgatcctgtctagttttgttctttttgctcaggatggctttggctagtctaggtcttttgtggttccatataattttttttctatttctgtgaagaatgtcatcagcatttggatggggactscactgaattgtagattgctttgggtagtatggacatttaaaaaatattggctcttttaacccatgaacgtggaacatctttcattcttttgtgtcctcttcaatttccttcatcaatattttacagttttcattataggcatcttttactactttggttaagtttatttctaggtaacttatttgtagctattgtaaatgagattagtttcttgattttttttgtttgtttgttttttgttttttttcagattgaccactgctggcatatagaaatgctact

SEQ ID NO: 591920 - DNA, 538 bp, Homo sapiens
cattctccaacatctataatctggttttcaatgcaatctttaagtatataagttttacatacctcattttatgaaattattgcatgtttcaaaagaatatctgaactcataaacattcttgtaaatgaaattataatgatttctgcttggacatttatttgcatatacctagctacataaaatgataagatggggaaaatattagaagcagttatgtaaaataatttccrtaactatcgaataaggtcatcaaagatgttttgaaataaaacataactgagaattttttcctctagcaactccatttaggccatcatttcttgctttataaacctcaattttatacttttattctgtacatatcctattataactcaaagcaaactagcatagaaaaactgtgttcattatactctaatatacaaggagaagtgaaagctgagtagaggcttaaccatgaagaaatttgcatccaaggtggtgaatgtgaaagagaatgcaattgtggaggaattatacattatttaaagaaaagaga

SEQ ID NO: 591921 - DNA, 653 bp, Homo sapiens
ttaatattttccagccctttccttgaatatcttaatgcattttttctttattagctctttcatgtctacactaggattgcatgtgtttttattgttaagcttcttattctttgatgaagaaacaagatgaaaactatgtattttaaaaatggcttggtatwatccagtctactctgtcccttctaaaattactaggaatgctgcgtatgcttttaggatcatactataaaaatatacataacttgtgatgtgtttaacagagagtaactttaaatgtttagggactttaaatgtagtgattgaatgactgaaagagtaaagatatctccagctggagtaaaaaaatgataaactattcaggaggtggggggcgcgatgatgataatgtgatatcgctaatagagatgtgagcatctgaggagagaggtgagtaatattgtgtgggctctatgggttcaacaccggcaacagtgtataggatgacaggcagattttatatcagcgtagagactttcctaacacgagatatgactaagataaaatggacagttgtaagaagtgaatttcccatcactggagattttaaagcaatgactgaatgtctacttgatgagaatgttgtagagaaaaatcgtgcattgaacaggaagaag

SEQ ID NO: 591922 - DNA, 524 bp, Homo sapiens
attgaacagatgggggattggaggcattaatcggaggaggaaacagggacattgcccatgggtatcaggcaaaaccactttcatggagtgctcagccatggttgtttccaattcacatgttgaacatggatttttttcccaataagtcttgtctgagagartgatgtacctagtagagtttgaataactctagtagtgccacatgaatactgctggctggataaaaggatgctgcacgcatggatggatggatagatggctgaatactgagccactggaagggttcaaggaatggtgcattggtgcattatggcagaggggctttattcctaatactacaaccatgatcaacaattccatgttcttcgaggtgacagcaaagctggaagccagcagatctgcgaaaaagccagagaccagagatagaaacaaaacctacagtttgcccgaagccaaggatcatagaacatgtgggcccttatttgtcacagcctggaagtaactcgcctttaacgtgtttgtat

SEQ ID NO: 591923 - DNA, 169 bp, Homo sapiens
ggttctagatcgactaaactccagctgcctgtcagatgtgtgagcaagaaattaatgctcrtagttttatgccactggatttagggttcattgtcttatagtttcaagatgcctcagcacactcagctttatcaaaaatgcctgttagacataggatcttctgttagag

SEQ ID NO: 591924 - DNA, 565 bp, Homo sapiens
tgcttgggacaaagtaagagcttgccaaatgttagttcctccctttgcccattttctcctgctttttgaaaattgaatctcatatttttcttctatgtatggttaacagtcatttaaattatcattaaaatttattttttgctcagagcatttatgtgaaactggggtcaaaaaatttgccttatttcacaacaccttctagtttcttctgagatggctttgttttcatattacacacttctgctacctctggcatggattgagtttacagacattcttccagcacattgaagaaaatatcgaagtttaaaataaaatatgttactatgtatatagttaaaaagcactaaaagtccattttagtcagtcttttttactcaaaatacaaaatcaaatttaaagcttccctggatgtaaaagaggaactaatggtttyaggatacttttgttttacatttccccttaaaaacagaaccaacaactttaaaaatggagtgaagatgactgaactagtaaagttaatacatctgatttattatggaggtgaagagtaaaattggttctg

SEQ ID NO: 591925 - DNA, 452 bp, Homo sapiens
tttttttttgtgagctgttctcctagattaatcatagaggtcctaatggtgcataccaggctgctgttatcattattattgttaatataacaataataacaatttgaattatgtattatcatattatttattattatcatattattgttatgttaacaataataatggcggcagttttatragaataatcattatttttttaacttggaaaaattcaatattaactctttagagcagaatagaccgtaatggccaagtatatcaccttaactttgcagacactctactgggcttcccaaagcagtccttccaaaccattgccactctcttctgtcccttactgtctttgcctccaaagagaagttatcagcaatgactgcctcaccctccttcctctgtacttcaaactccctaccttcatgcatcttctactcttgtgtcgtttcttggag

SEQ ID NO: 591926 - DNA, 663 bp, Homo sapiens
atgtataggcataactcttagaaaaayagatcatgtaaacactgtcagattatttccccacactttctttttcttgccagcaccattataaaattatagagggcttccatatatcgggacctgcatcatgcaaaaatggttggggtggagtgggagtagaggttccaaacttctagtggctttatggagaaagcctcactgtccctattacctgaactcttacctctgaggtggttgggttttgtttgtttgtttgtttgtttttggttttggttttttcgagacatggtctcactctgtaacccaggctggagtgcaatggcacaatctcggctcactgcaacctctacctcccaggttcaagtgattctcccaccttagtctcctgagtagctgggactagaggtgcacgccaccacacccgggtaatttttggttttgtttttgtgtttttatacagacaggtttcgccatattgcccaggctggtctcaaactcgtgaactcaagtgatctgtctgcctcaacctcccaaagtgctgggattacaggcgtgagccaccatgtccagcctcaagatagttgttacacgcttctttattttgcccttcacctactttctcctctgaattatctttcctcagctccttcttctcatgcattt

SEQ ID NO: 591927 - DNA, 592 bp, Homo sapiens
tgatcatatcaacagatgcagaaagaacacttgacaaaattcaacacttattcaagacaaacattttcagtaaagtaggaatagagggaaacttccttatcttgataaagcacatctacaaaaatgtacagttaacattattcttaatggtgagaaactggatgctttttctctaaagtcaggaacaagtcaaggatgtcctatcttatcactcttactaaacatcatagtggaaattctagctaatgaaaaacaaggaaaggaaattaaaaaataattgggatatttattctaaagtaacatgcttttctatgtagaaaatctcaaagaatcaacaaagaactgtcactaacaagtgattatggcatgactgcagaacacaaaattaatagttaaattcaattgctttcctatatataaacaatgaacaattagaatttgaaataaaaaacacacaaccatttacatgaacaccaaaattttgaaaacttaggtatggattgaaagtataagatctgtatgaggaagattacaaagctctgatgaaaaaaaattacagaaataaatayggaaatattttgtgttcatggat

SEQ ID NO: 591928 - DNA, 541 bp, Homo sapiens
tgcaaaagacattgttaaggaaataaaaaggctacccacaactgggagaaaatacttgcaaaacaaatagctgataaaggacttgtttccaaaatataaaaggaactcttaaacatcaaaaataaaatcaaaaagcttaatttaaaaatgggcaaatgatctgaacaggcatttcaccaaagaagatatgcaaaaggaaaataaacatatggaaagatgctgaacatcatatgtcattcaggaatttcaaatgaaaacaacaataaaatactacacatctattagaatggctaaaatctaaaacacaacaccaaatgttgataagaatatggagcaaccagggcagttaattgctgctgggaatgaaaaatatacaaccactttggaagacagtttagcagttccttacaaagctaaacatamtcatgccataaaattcagcattcacattcctaggtatttaagtaagttgaaaatgtccgtataaaaaccttatgtccttataaaagcctgaacacagatgtttatagcagctttattt

SEQ ID NO: 591929 - DNA, 515 bp, Homo sapiens
agtcaggtggtgtattagtttgttttcacattgctgtaatgatactacctgagactgggtaacttataaataaaagaggcttaattgacttacagttccacatggctgagtaggcctcaggaaacttaccatcacggtgaaaggcaaaagggaagcaagcaccttcttcagaaggcagcaggagagatagagcggtgggggtgatatggttaggctttgtgtccccatccaagtcttatcttgaattgtaatttccataatccatgtgtccagggagggaccgggtgagaggtgaatggattatgggagaagtttcccccytgctgagatctgatggttttttaaggggctctttccccttcactcatgtgctctctctcacctgccaccataaaagatgtgcctttgcttctctcttgccttctgccatgatttgtaagtttcctgaggcttcccccaccatgtagacctgtgagtcaattaaacctctttcctttaaaaattatccagtctca

SEQ ID NO: 591930 - DNA, 450 bp, Homo sapiens
  misc_feature 120: n = A,T,C or G
acttctttgcaaacaccttgcaatagtatctcaaacataaataattttttatttataaagtaaatgtaatgcagacagaagggaataggaagctgaaaactcaacactaaactatagtcntccttaggcacccattagtaacaaatattaatggccaggtaggacacaggagaaaaggccttgggctctgtgtatggtggagagtcagatttctagacacargtattaagctacgtcctgcaaaatggtacattcttgattaaagcataccttagtactggtttcattctttgtcaactatagcaaaaaggaaactaatctcccttagaaattgactctggatgaaaaaaaagcctcttctaataaattgtaattattagactatactttaactagttcacaatatgaatatggatctaagtttgggcagcttctaagtattttaaaggg

SEQ ID NO: 591931 - DNA, 540 bp, Homo sapiens
tctctccacctcctccagccattgattttcataccctaagcacacagaccttctttctgctcatcaaatcccaacatcccctccctccctccctcctgtcctccattgtactaggttcttccctgccgagaatataccctcactcaccccatcagtgcctccctaccagccccatttactgctctcaccagagcagatgcagtgcctggaacagagctaggagcaagataaatgtgctgaataaaaatatgtttaggatactgagggcctccgctgtttcctttgtccttctcctctgctgttgctgtgatcctcattcctgttgctccttccctgttccctgcatcacttcttttcagtaactcacctccttatcrtaacctcatggctattgaagttgtcagctttagaaagaagcactgccacatccccacggtcattgccccaggattactcaccagctggatgacaactgcctcactctaaccctgagcctcctgggataggaccaatcctttctagagatggacagaaggcccc

SEQ ID NO: 591932 - DNA, 640 bp, Homo sapiens
tttggtggtcatgcatcagtggtaatgcattctttgatggaatagagggatgtggagggaaacagcccagtaaaagctaaaacaatcccttcagatattgaaggaaaaaaaaagaaccatggaaaarctgtggtgtagctgtctatccccaactactgcacctttcggagatgttaggacctagccaaaaatgagagaaagaatcatattcccattactggtgactgtagaggcaccttatgagtaagattggatgattaaagaaccagcttcacgatactgtaagttattactgttgcttttgcagatcttttgtcacattgatttgtgtgtggtcagtgcatagtatttatgttttgatcacagagagctgaagttaacaagatttgatttgaaatgtcaagttgtggcttcctctgttttgtgagtttcttccgagagaaggctgcagtctacatacaggaagggtgattgtccctgtaatcatgcacacatatacttacggagcaagtggtgaggtttatattagaaggaccatgcatgtcatataaatggaataggcatccctaagtgaaactttttcagagaaatggaaatagagcatgcaagaaagatgacaaaaagaaataagaaaataaaa

SEQ ID NO: 591933 - DNA, 640 bp, Homo sapiens
tttggtggtcatgcatcagtggtaatgcattctttgatggaatagagggatgtggagggaaacagcccagtaaaagctaaaacaatcccttcagatattgaaggaaaaaaaaagaaccatggaaaagctgtggtgtagctgtctatccccaactactgcacctttcggagatgttaggacctagccaaaaatgagagaaagaatcatattcccattactggtgactgtagaggcaccttatgagtaagattggatgattaaagaaccagcttcacgawactgtaagttattactgttgcttttgcagatcttttgtcacattgatttgtgtgtggtcagtgcatagtatttatgttttgatcacagagagctgaagttaacaagatttgatttgaaatgtcaagttgtggcttcctctgttttgtgagtttcttccgagagaaggctgcagtctacatacaggaagggtgattgtccctgtaatcatgcacacatatacttacggagcaagtggtgaggtttatattagaaggaccatgcatgtcatataaatggaataggcatccctaagtgaaactttttcagagaaatggaaatagagcatgcaagaaagatgacaaaaagaaataagaaaataaaa

SEQ ID NO: 591934 - DNA, 640 bp, Homo sapiens
tttggtggtcatgcatcagtggtaatgcattctttgatggaatagagggatgtggagggaaacagcccagtaaaagctaaaacaatcccttcagatattgaaggaaaaaaaaagaaccatggaaaagctgtggtgtagctgtctatccccaactactgcacctttcggagatgttaggacctagccaaaaatgagagaaagaatcatattcccattactggtgactgtagaggcaccttatgagtaagattggatgattaaagaaccagcttcacgatactgtaagttattactgttgcttttgcagatcttttgtcacattgatttgtgtgtggtcagtgcatagtatttatgttttgatcacagagagctgaagttaacaagatttgatttgaaatgtcaagttgtggcttcctctgttttgtgagtttcttccgagagaaggctgcagtctacatacaggaagggtgattgtccctgtaatcatgcacacatatacttacggagcaagtgrtgaggtttatattagaaggaccatgcatgtcatataaatggaataggcatccctaagtgaaactttttcagagaaatggaaatagagcatgcaagaaagatgacaaaaagaaataagaaaataaaa

SEQ ID NO: 591935 - DNA, 506 bp, Homo sapiens
tatcacaccagggtccactcggaaaatagagtagattctttcaaataaagtgactgctccatcgatggcaagagaaaagtgtcaccccaatctaataagctctgttgtctagtgagccaatgttaagcactttggtgctttgggatacactaaattaatcagtggtatcttcaaagagctcaggaatgtatgtgctggcaccaacgcaaggcacaayaacaaaaattcttttgctaaactctccagggtcttctgtgaaaactggttgagggaagaagtactgcagagccagcctcatatgaggccatgtggactaggaaaggctggtcttccttctttctcactccctgcaggagcgccctgtgccctccatcatagcccctcacctcttttctcatcaaggagaaggatttgatattgtgttcacaacaaaaatctatggcttgttttcccagtgctttcaaagtacctacatcttagttaacacttgaaaatcataagcccaa

SEQ ID NO: 591936 - DNA, 506 bp, Homo sapiens
tatcacaccagggtccactcggaaaatagagtagattctttcaaataaagtgactgctccatcgatggcaagagaaaagtgtcaccccaatctaataagctctgttgtctagtgagccaatgttaagcactttggtgctttgggatacactaaattaatcagtggtatcttcaaagagctcaggaatgtatgtgctggcaccaacgcaaggcacaataacaaaaattcttttgctaaactctccagggtcttctgtgaaaactggttgagggaagaagtactgcagagccagcctcatatgaggccatgtggactaggaaaggctggtcttccttctttctcactccctgcaggagcgccctgtgccctccatcatagcccctcacctcttwtctcatcaaggagaaggatttgatattgtgttcacaacaaaaatctatggcttgttttcccagtgctttcaaagtacctacatcttagttaacacttgaaaatcataagcccaa

SEQ ID NO: 591937 - DNA, 590 bp, Homo sapiens
gctatagcttttcattagtaaagaggggttaggtttagggagggactattatcatccttgcttcaaaattaaattataaactaaattcttcccatggttagcttggcctacaccctacacacaggaatgagtgaggacagccagcttgcaagggtagaagtaagagtcagccatgctaactttctctcattatagtctgcaaaggtgggtcatactgactctaattgattgactgccagactagactccttgctagtccagggccttggacgtatcacccaaggcctttctgtgaaagacactcaaatatttgttcaatgatttctaattgtatccattacttatttgtagcttcaaaaacaacgtttgaatcttaacttgtttcaccttgagttaattttgtttctatacctcttcaaagaaaaggaagattgaaggggtctttaacgcctccattaactcctgcaacgtgaatttgatatactctcttttgcatgaattcagctttgtgatttctgaaatggtatcacctgaaagccacttaaggccagaccaatgaaatgttayaggcaatatttgaacctaggact

SEQ ID NO: 591938 - DNA, 554 bp, Homo sapiens
actatgcagattcccccacctttaagaaagaatcaagcccagagtcagggttggagctttgttgcctgacagcttctagctgcagctctttcaggctgtaccttggcattccaggccagggctgcctcttctctggtggctctccgtccacagctgagcaggggcagagcaagagcctggccgtttctccctgtgaggcactcctctagctggcaagttttgctcctgagctcttccagattggcagagattctgttgtcccgccttcttcatcgaggtcagatggctcctcccgcctgatcctgcttctgcttcatgccctggactgtcacaagtgtcactgcccaataaacctttgactcacccacttctgtctcagtatccamttcccatgaatgtggcccctgataagtatccccctcttcacctcatcaacaaacattaagctccagttttgtgcaaggcaccgagctaggaacctgctcattcaattgacatttattgagttggtactattgctttagcactgggtgtgtaaaagatatggtcccagc

SEQ ID NO: 591939 - DNA, 606 bp, Homo sapiens
aagagggtttctggtgagtttgtcctgtggaagtctctgtcaagtgaaccttccttttgaggtggtgatacctgaacagctggggttggaaagtgcagaagcttggcaggtcactggtaaggttcttgaaaagccttgacctcaggacagcctgtctttccctttctagtcaagtcmccattctccagagctatgccgatctggggatgcagggacagcactagccagtggtatgtatctgaccaggggagcaatccaggaactacgttactgactcacaacagaacttatctgggtttgttgcaaaatgattttttttttgtctatagaaaatagagttatttgtctcctccctgaaacttattgtgatatttttgaataatgtgttcactgttcttcccaaggtgggtcagttttatgtgtctacttggcaaggctattgtccccagtcatttaaacactctggaagttctatttgcttttttattgagtataaatgagaaaaatctgaaaacgtgagtgaggatcaatgagtagttggagtgtctgtggtggcactatcattgtggttgaggtcaccttggatctcacagctataggtatggg

SEQ ID NO: 591940 - DNA, 655 bp, Homo sapiens
aacaggaaaaccaaaaaattcaaatatatttagagcatttattctcaaccttggctatatcagaatcacctgggaacattttcaaactaccaaggtcagggccctaactgtcagagattctgatttaattggtccacagtggagcccaggcactggtatttttaaagttccctagtttcagattcaatgactttaataattgcattaagctcctgggataagtcttttaagtagtcttaatattaaacattaaattaaaaattaaacttaacattagttagcttccagttatccaaaggaaaatagaaacacatttctcaactgacaggtgactgaaaaaaaaatggcagataggaggcagtactaaagtgcagctcccactctggatagacagagcagaatgtggagactagcattgtggactattgctccaaaaactactgcaggagtataccagaaaagccaagagaatccacagaccctttgaaggaagyggattcctcctgcaggatccaggagacatctcaaataccgtgctggtatccacagctgagagaactgaacacagttcacctcacaggactctgtgcagacacccccagtaccagcccagagcctggcagccctgcttgctggctagattcagaagagaaat

SEQ ID NO: 591941 - DNA, 636 bp, Homo sapiens
agacaagcctgaccaacatggtgaaaccccatccatacaaaaatacagaaaattagctgggtgtggtggtgcatgcttgtaatcccagctgcttgggaggctgaggcaggagaatcacctgcagctaggaggcagatgttgcagtgagccaagatcatgccactgcactctagcctgggcaacagagcaaaactccatctcaaaaaaaaaaaaaaaaaccaaaaaaaacccaaaaaacaaaaaaaaacttaggaggactgttgggaaggcatgattggttttgaaatgtgaaagggacatgagatttgggagggtccaggggcaggtggaatgatatggttaggctttctttccccacccaaatctcaggggggttgtttcccctatgctgttctctgatagtgagtgagttcttatgagatctgatggttttataataggctcttccctcctttgctcagcaccccttcctgctgccttgtgaagaaggtgccttgctttctttttgccttctgccataatcgyaagtttcctgagacctatccagccatgctgaactgtgagtccattaaacctcttgcctttataaattacccagtcttgggtggttctttattgcagtatgaaaatggactt

SEQ ID NO: 591942 - DNA, 636 bp, Homo sapiens
agacaagcctgaccaacatggtgaaaccccatccatacaaaaatacagaaaattagctgggtgtggtggtgcatgcttgtaatcccagctgcttgggaggctgaggcaggagaatcacctgcagctaggaggcagatgttgcagtgagccaagatcatgccactgcactctagcctgggcaacagagcaaaactccatctcaaaaaaaaaaaaaaaaaccaaaaaaaacccaaaaaacaaaaaaaaacttaggaggactgttgggaaggcatgattggttttgaaatgtgaaagggacatgagatttgggagggtccaggggcaggtggaatgatatggttaggctttctttccccacccaaatctcaggggggttgtttcccctatgctgttctctgatagtgagtgagttcttatgagatctgatggttttataataggctcttccctcctttgctcagcaccccttcctgctgccttgtgaagaaggtgccttgctttctttttgccttctgccataatcgtaagtttcctgagacctatccagccatgctgaactgtgagtcmattaaacctcttgcctttataaattacccagtcttgggtggttctttattgcagtatgaaaatggactt

SEQ ID NO: 591943 - DNA, 626 bp, Homo sapiens
aaaaaaattagctttttaataaatagttacaaaggagaaaatagaatttgcaagttagatatcatttacagtatatatcaagggcaataaaatatcagtaagataaattaaaaatgatttctgccctttcacagaaatattcttcaaaagattcatcgatatgctttggcatcagtgctgaccatccactcactcctgatcttctggcaactttgatttctctctcctgttactctaatgaagtctctctgttgtcactagtgaacaaatggtcacatttaatttttttctctttagtccatatctgcctggacatttctgaaatataacactgttgaacatgtttaccttcctttgctccacaacctcagctcctctgtggtgatctttttgaaaacacacacacacacacacacacacacacacactttaaaagttgaatatatgttagacttttttactcttttcatcccctaaatgaaagtattaatcaagatttattttagcccattgactttctctttacatattcttcctcaaatggttccttcaccctcacagyttcaagtaacctcattcttatgcttttaattttagggtatcttgggctgtgttagaactagttg

SEQ ID NO: 591944 - DNA, 608 bp, Homo sapiens
taatcaaggggaagagagtgcctctgtaaagattaatggcwgtacacaaaaagattgcatttagattaggacatccccatggcacaaaatggggtgcagacaaagttttttttttttttttttaacgttcagaggaaataaatttttgataaaggaaataaaagtatcaaagtaatttttctattgggagaaaatcatgtcaatggaagaaataaatttactgcagataagaaaagcatggatttataaccatgaacaatcctcctttttttctgttttctctctggtcctatcaatccccaacaagtacatcagcatattgcctccttttcccccaaaacaaccacctttgagaagttgaaaaacaaaagtgttaaataagcacaggatttgtttggtcacaacttctcaaaatgccccttttttttgagacgttgtcttgctctgtcatccaggctggagtgcagtggcaagatcttggctcactacaacctccacatcccgggttcaagcaattccctgcctcagtctcccgagtagttgggattacaggcgcccaccaccatgcctggctactttttgtatttctagtagagacggggtttcac

SEQ ID NO: 591945 - DNA, 608 bp, Homo sapiens
taatcaaggggaagagagtgcctctgtaaagattaatggctgtacacaaaaagattgcatttagattaggacatccccatggcacaaaatggrgtgcagacaaagttttttttttttttttttaacgttcagaggaaataaatttttgataaaggaaataaaagtatcaaagtaatttttctattgggagaaaatcatgtcaatggaagaaataaatttactgcagataagaaaagcatggatttataaccatgaacaatcctcctttttttctgttttctctctggtcctatcaatccccaacaagtacatcagcatattgcctccttttcccccaaaacaaccacctttgagaagttgaaaaacaaaagtgttaaataagcacaggatttgtttggtcacaacttctcaaaatgccccttttttttgagacgttgtcttgctctgtcatccaggctggagtgcagtggcaagatcttggctcactacaacctccacatcccgggttcaagcaattccctgcctcagtctcccgagtagttgggattacaggcgcccaccaccatgcctggctactttttgtatttctagtagagacggggtttcac

SEQ ID NO: 591946 - DNA, 306 bp, Homo sapiens
atatattcaatatgcggtgtgttgcatataggtaatatatgacatgcaacatatatgttacatgttgcatatatatgtgtgacatgttacgtatatgtgatatgttgcatgyatgtgatatgctgcatatatgtgatgtgtgatatgtcacatatatgtaatatgtgatatgtgatatattacatatatgtaatatgtgatatgtaatatgttacatatgtgtgatatgcgatatgtaatatgttacatatatgtagtgtgtgatatgtaatatgttacatgtatgtgatatgtaatgtgtaatat

SEQ ID NO: 591947 - DNA, 559 bp, Homo sapiens
attacatttttatttccaaaacstcttatgcatcttctgattttctcttaaatacataaagcatcaatgtcttgtttcatggattcaggattttttttttttttttttttttgagacagagtcttgctctgttgcccaggctggagtgcagtggcacaatcttggctcactgcaagctccacctcctgggttcacgccattctcctgcctcagcctcccgagtagctgggactacaggcacccaccaccatgcccagctaatttttttgtatttttagtagagacagggtttcactgcgttagccaggatggtcttgatctcctgacctcatgatctgcctgccttggcctcccaaagtgctgggattacaggcgtgaaccattgctcctggcaagattcaggatattcttacctttaaggatattattttatctgccattatctcttcatgggcatcttgttttgcctatgccctctatattaatttttcctatttcctcattggttttcagctctgtttttcatattaatgttttctgatcctacttggcagtctgt

SEQ ID NO: 591948 - DNA, 559 bp, Homo sapiens
attacatttttatttccaaaacctcttatgcatcttctgattttctcttaaatacataaagcatcaatgtcttgtttcatggattcaggattttttttttttttttttttttgagacagagtcttgctctgttgcccaggctggagtgcagtggcacratcttggctcactgcaagctccacctcctgggttcacgccattctcctgcctcagcctcccgagtagctgggactacaggcacccaccaccatgcccagctaatttttttgtatttttagtagagacagggtttcactgcgttagccaggatggtcttgatctcctgacctcatgatctgcctgccttggcctcccaaagtgctgggattacaggcgtgaaccattgctcctggcaagattcaggatattcttacctttaaggatattattttatctgccattatctcttcatgggcatcttgttttgcctatgccctctatattaatttttcctatttcctcattggttttcagctctgtttttcatattaatgttttctgatcctacttggcagtctgt

SEQ ID NO: 591949 - DNA, 583 bp, Homo sapiens
tatcatgttcatgcttaatacccttcagtgactgcctacagaataatatttgggcaggttattgtgacactacttcttcataatataatcctcacctcccctttagctataaatgtcacaaactccagcctctggctgctgaagcatcatgaaatccatggtatttcccaaattttaaaaatcatttmtcagcagggcatggcggctcatgcctgtaatcacagcactttgggaggctgaggtggacagatggcttgagcccaggagtatgagaccagcctgggcaacatggcaaaacctcatctctacaaaaaaatatgaaaactcatctggacatcatggcacatacctctagtcccaactacccaggagggtgaggtgggaggatctcctgagcccatggagatcgaggctacagtgagcgatgatcgtgccattacactccagcctgggcaaccgtgagactctgtcaaaaaaaaaaagaaggaaataattatttctctcctggctgtctttgctcttaacaatgacatttttaaatggatgctttaaaaggaaaataggcagtagaaattgtggaagc

SEQ ID NO: 591950 - DNA, 583 bp, Homo sapiens
tatcatgttcatgcttaatacccttcagtgactgcctacagaataatatttgggcaggttattgtgacactacttcttcataatataatcctcacctcccctttagctataaatgtcacaaactccagcctctggctgctgaagcatcatgaaatccatggtatttcccaaattttaaaaatcatttctcagcagggcatggcggctcatgcctgtaatcacagcactttgggaggctgaggtggacagatggcttgagcccaggagtatgagaccagcctgggcaacatggcaaaacctcatctctacaaaaaaatatgaaaactcatctggacatcatggcacatacctctagtcccaactacccaggagggtgaggtgggaggatctcctgagcccatggagrtcgaggctacagtgagcgatgatcgtgccattacactccagcctgggcaaccgtgagactctgtcaaaaaaaaaaagaaggaaataattatttctctcctggctgtctttgctcttaacaatgacatttttaaatggatgctttaaaaggaaaataggcagtagaaattgtggaagc

SEQ ID NO: 591951 - DNA, 583 bp, Homo sapiens
tatcatgttcatgcttaatacccttcagtgactgcctacagaataatatttgggcaggttattgtgacactacttcttcataatataatcctcacctcccctttagctataaatgtcacaaactccagcctctggctgctgaagcatcatgaaatccatggtatttcccaaattttaaaaatcatttctcagcagggcatggcggctcatgcctgtaatcacagcactttgggaggctgaggtggacagatggcttgagcccaggagtatgagaccagcctgggcaacatggcaaaacctcatctctacaaaaaaatatgaaaactcatctggacatcatggcacatacctctagtcccaactacccaggagggtgaggtgggaggatctcctgagcccatggagatcgaggctacagtgagcgatgatcgtgccattacactccagcctgggcaaccrtgagactctgtcaaaaaaaaaaagaaggaaataattatttctctcctggctgtctttgctcttaacaatgacatttttaaatggatgctttaaaaggaaaataggcagtagaaattgtggaagc

SEQ ID NO: 591952 - DNA, 604 bp, Homo sapiens
accaatgtggtaccactacaagtctgcaacagccacagtgatactgagcttggggtgtcctctaatgcagatatagctacagtgaccaaagacttagatgacaacactcaatttcatttgaatacctgaaaagtattctcaagaaggatgggtacaaataagctaagactgcaaacattagaatacatacataactgttcaacgcccagacacaaacatccacaagcatcaggaccacccaggaaaacataacctcatcaaacaaactaaataaagcaccagtgacctatccaggagcgacagakatatgtgaccttgcagacagagaattcaaaatagctgttttgaggaaactcaatgaacttcaagataacacagaggaggaactcaaaatctatcagataaattcaccaaagagattcaaataattttttaaaatcaagcaaaaattctagagctaaacaattcaattgagaaactgaggaatgcattggatatctcaatagcagaattgatcaagcagaggaaagaatcagtgagcttgaagacaggttgtttgaaaatacacagtcagagaaaacaaaagaataaaaaataaaaaaga

SEQ ID NO: 591953 - DNA, 613 bp, Homo sapiens
ctacaagtctgcaacagccacagtgatactgagcttggggtgtcctctaatgcagatatagctacagtgaccaaagacttagatgacaacactcaatttcatttgaatacctgaaaagtattctcaagaaggatgggtacaaataagctaagactgcaaacattagaatacatacataactgttcaacgcccagacacaaacatccacaagcatcaggaccacccaggaaaacataacctcatcaaacaaactaaataaagcaccagtgacctatccaggagcgacagagatatgtgaccttgcagacagagaattcaaaatagctgttttgaggaaactcaatgaacttcaagataacacagrggaggaactcaaaatctatcagataaattcaccaaagagattcaaataattttttaaaatcaagcaaaaattctagagctaaacaattcaattgagaaactgaggaatgcattggatatctcaatagcagaattgatcaagcagaggaaagaatcagtgagcttgaagacaggttgtttgaaaatacacagtcagagaaaacaaaagaataaaaaataaaaaagaatgaagcatgccttcaagatctaa

SEQ ID NO: 591954 - DNA, 539 bp, Homo sapiens
agggtcttataggacaccatcaagccaaccaatatacacattatagtaattccagagggagaagagagagaaaagaggaagagagtctgtttgaagaaataataaccaaaaacttcccaaatttgaggaaataaatggacatacaaattcaagaagctcaaagaacttcaactaggataaaataaaaaagaattacaccaagacatactgtaatcaaactgtcacatcacaatgaaaaaatcctgaaagcagcaaaagagactaatcacttatgagggaaccaactctgtaagataatcagcagatttctcagcaraaaccttgcatgccagagggagtggggtgatatattcaaagcactaaaaaaaaaaaaagaaaataactgccaatcaaaaatactatccagtaaaactatttttcaaaaaattaagtgcaaattaagacttttctagataaataaaagttaagagaatttaacacctctagacatatcctacaagaaatgctaaaaggagtccttcaagttgaaatgaaaggac

SEQ ID NO: 591955 - DNA, 539 bp, Homo sapiens
agggtcttataggacaccatcaagccaaccaatatacacattatagtaattccagagggagaagagagagaaaagaggaagagagtctgtttgaagaaataataaccaaaaacttcccaaatttgaggaaataaatggacatacaaattcaagaagctcaaagaacttcaactaggataaaataaaaaagaattacaccaagacatactgtaatcaaactgtcacatcacaatgaaaaaatcctgaaagcagcaaaagagactaatcacttatgagggaaccaactctgtaagataatcagcagatttctcagcagaaaccttgcatgccagagggagtggggtgatatattcaaagcrctaaaaaaaaaaaaagaaaataactgccaatcaaaaatactatccagtaaaactatttttcaaaaaattaagtgcaaattaagacttttctagataaataaaagttaagagaatttaacacctctagacatatcctacaagaaatgctaaaaggagtccttcaagttgaaatgaaaggac

SEQ ID NO: 591956 - DNA, 559 bp, Homo sapiens
tggttgttttatttttatttaaaatttattagatttgtaaatagaataacaagagttgtagttgagggcagacataggcaaacgatcaaaatattttgtttcaaaaattaatttgaaagccaagtaactgtaaatagttctttctgcacacacagaaactcatgctgatattttaagcacacttcaattatagtaattactgtattgtgctataatggtttgtgtcctcccatgtcgccctgcgtcattgtaaagtctgggctycttgcaagctgagagtttctgaccttagtccagttcctgtggtgaacctgaggaagtgctgcccagctcccccacttcaatgtcaccccaacttctggaggtgctatcagcccattcagggactgctgctactgcagagagccacctgcccaaagtcatgcccccaggggagcccacacaccacgtgcctgatgaatgtgggtggggaaataacactgaaatgccagagctccaggctgtccctggcctgcctcacagctcagcttctccctctgcccagtctgcctcttcccct

SEQ ID NO: 591957 - DNA, 553 bp, Homo sapiens
ctctgcctcccgggttcaagcgattgtcctgtctcagcctcccaagcagctgggattactggcgcctaccaccacacccggctactttctgtatttttagtagagacagggtttcaccatgttggccaggatggtctygatctcctgacctcatgatccacccaccttgacctcccaaagtgctgggattacaggcgtgagccaccaagtccggcccacttaattgtttaaatttctttaactttgtaatatttttacaccctttaatatttcagtctacctttttggacaaggcaagatataaattatttaaaatatattattccataaagtagttcagactcccaagatataaatacgaatatgaatggaaattaaatagaggagagacaactttggacactaagctcatatgtcatacagaaagggactcaccctgtgctttgccccttccatacacatttacagtgagttttgcattcacttggctcacagcaaaaatagataaatgggagaaagtcccatccccaatgagattatttaaaaagtcagt

SEQ ID NO: 591958 - DNA, 553 bp, Homo sapiens
ctctgcctcccgggttcaagcgattgtcctgtctcagcctcccaagcagctgggattactggcgcctaccaccacacccggctactttctgtatttttagtagagacagggtttcaccatgttggccaggatggtctcgatctcctgacctcaygatccacccaccttgacctcccaaagtgctgggattacaggcgtgagccaccaagtccggcccacttaattgtttaaatttctttaactttgtaatatttttacaccctttaatatttcagtctacctttttggacaaggcaagatataaattatttaaaatatattattccataaagtagttcagactcccaagatataaatacgaatatgaatggaaattaaatagaggagagacaactttggacactaagctcatatgtcatacagaaagggactcaccctgtgctttgccccttccatacacatttacagtgagttttgcattcacttggctcacagcaaaaatagataaatgggagaaagtcccatccccaatgagattatttaaaaagtcagt

SEQ ID NO: 591959 - DNA, 582 bp, Homo sapiens
aggtaaagggagtctgtgggagctggtgaggcaggccattattggtgttaatggcaagtcagaaaatgtcaaagccaagaattcaactatacaaagggttttgtgccaggcagggatgaataatgatgatgggatgaaaggatttgggtgtctgaaggactggggctagaaattataatgagagatagtaggtcttaccygttgacaggttgagctccagagccaaatcccttttcctccactgccttggaaagttactctgtacttcagtttcctcttctacaaaatgagggtaataaaagcagcacctaattatagcattgttgttgggactaaatgagttattcacatgtaatgagtttcccacagtgtgtttagaacagttttcaattcacagcagattcatgttagttatcactacaattcttcaacattcctattttgcagataataaaactgagtccgcccaggattcaagacctgccggaacttacatagctgtctggtagcagaggagatttataacatccagccagaaaaggggctggttctgcactcatatgtgtggatgagcacgacaag

SEQ ID NO: 591960 - DNA, 582 bp, Homo sapiens
aggtaaagggagtctgtgggagctggtgaggcaggccattattggtgttaatggcaagtcagaaaatgtcaaagccaagaattcaactatacaaagggttttgtgccaggcagggatgaataatgatgatgggatgaaaggatttgggtgtctgaaggactggggctagaaattataatgagagatagtaggtcttacctgttgacaggttgagctccagagccaaatcccttttcctccactgccttggaaagttactctgtacttcagtttcctcttctacaaaatgagggtaataaaagcagcacctaattatagcattgttgttgggactaaatgagttattcacatgtaatgagtttcccacagtgtgtttagaacagtwttcaattcacagcagattcatgttagttatcactacaattcttcaacattcctattttgcagataataaaactgagtccgcccaggattcaagacctgccggaacttacatagctgtctggtagcagaggagatttataacatccagccagaaaaggggctggttctgcactcatatgtgtggatgagcacgacaag

SEQ ID NO: 591961 - DNA, 341 bp, Homo sapiens
ggatggtacaaagaggacggtgcaacacttattcatgagaaacttcycccatgatccaatcacctcccgctaggttccacctccaatattagggattacaatgggacataagatttgcacagggacacagatctaaaccatattctgcccctggcccctcccaaatctcatgtccctctcacattacaaagtacaataatcctttctcaacagtcccccaaagtcttaactcattccagcattaactcagaagtccacagtccaaagtctcatctgaaacaaaacaagtcctttcacctatgagcctgtaaaatcaaaaacaaatcagttacactcaagat

SEQ ID NO: 591962 - DNA, 513 bp, Homo sapiens
gtgccactgcactccagcctgggcgacagtgagactccgtctcaaacaaacaaacaaaaatgtgtaaaaatacaaaattagctgggtgtggtggcacgcgcctgtaatcccagctactcaggaggctgaggcaggagaatcgcttgaatctgggwagcagagggtgcagtgagccaagattgcaccactgcactccagcctgggcaacaagagtgaaactatctattataaaaaaaaaaaaaaaaaaaagactatactgtaaaataacaatcttagagttaagtcatatctttgttgaccatgtgaaccatgatgaaggtattgctacttgttttattaacactgtcaagttacagaccacagctggttcatggaaaaactaccttaaataatagaattgaattccacagaaatgttctacaggatcaagtcagctataaggcagttttgtgtctccaaaactgtcaaataatattcctatagatgattggggccatctcaaaattcaacctt

SEQ ID NO: 591963 - DNA, 513 bp, Homo sapiens
gtgccactgcactccagcctgggcgacagtgagactccgtctcaaacaaacaaacaaaaatgtgtaaaaatacaaaattagctgggtgtggtggcacgcgcctgtaatcccagctactcaggaggctgaggcaggagaatcgcttgaatctgggtagcagagggtgcagtgagccaagattgcaccactgcactccagcctgggcaacaagagtgaaactatctattataaaaaaaaaaaaaaaaaaaagactatactgtaaaataacaatcttagagttaagtcatatctttgttgaccatgtgaaccatgatgaaggtattgctacttgttttattaacactgtcaagttacagaycacagctggttcatggaaaaactaccttaaataatagaattgaattccacagaaatgttctacaggatcaagtcagctataaggcagttttgtgtctccaaaactgtcaaataatattcctatagatgattggggccatctcaaaattcaacctt

SEQ ID NO: 591964 - DNA, 627 bp, Homo sapiens
cccagagaggagtcaacactggagacctggaggaaagagaggctatgaggagttggagggagggagagcatagaataagcctttctggaaacaacagaggctatggttattgatctaatttaattgagcttgattttgggttttgtagtattccctttatctctacctttgggatcatcagaatctccagctccatctatgttgctgcaaaggacatgatctcggcttttktgtgtgtgtgtgtggctgcatagtattccatggtgtatatgtaccatattttctttaatccagtctgccattgatgggtatttaggttgattccgtgtctttgctattgggactgctgcaatgcacatacatgtgcatgtgtcttcatggtagaatgatttatcctttgggtatatatccaaaaatgagattgctgggtcaaatggcaattctgtcttaagttctttgacaaattgccacacagctttccacaatggctgaactaatttacactcccaccagtacataagcattctcttttctctgcgacttcaccagcatctgttatttttttgactttttaataatagctattctgactggtgtgagatggtatctcattgtggtgttgacttg

SEQ ID NO: 591965 - DNA, 477 bp, Homo sapiens
gggtcccccggcagtgcgcccaccgcgctgcgctcgatttctcacggagccttagcttccttcctgcggggcagggctccagacctgcagcccgccatgcctgagcctcccacccactccatgggctcctgtgcggcccaagcctcccctactagcaccaccccctgctccagggcgcccagtcccaccgaccacccaaggactgaggagtgcgagcgcacggcgaggactgacaggaagctccacttgcagccttggtgcgggatccactaggtgaagccagctgggctcctgagtctggtggggacgtggagagtctttatgtctagctcagggattgtaaacacaccaatcagcaccttgtgtttagctcaaggtttgtgagtgcaccaatggacactctgtatctagctgctctggtggggccttggagaacctttrtgtctagctcagggattgtaaatacaccaatcagca

SEQ ID NO: 591966 - DNA, 603 bp, Homo sapiens
aataatcaattgtatctttacatattgtatatactaccaaaaagactagaaattgaaacttaaaagtaatactaattaaattaccatcaacaatataaaatacttaagaataaatctctttcaaatgtgaaagaccacatctactcayggtttaaaaaagaaaaaaaaaaaactcttaatgaactaggaactaaaaggaagttccttaacttgataaagaaatctgtcaataaaatagaaaaattcaaacattaaactaatattaacctcatacttaattgtgagaaactagaagtttttgcactaagaccagaaaaaaggcaagaatgccctctctcaccactccttttcaacactgtacttaaagaaatacctaatgcaatgcaagaaaaataaacaaaagccatacattgggaatgaagaaataaagctgccttcattcatagatgacatgatcatctatgtagaatataaaagaatcaacaaaaaactcaaaaaattataaaatgattatagtgagattgcaggatgcaaagtttgtcgctttcttacacgacatcactctctcttatgtactagtgatgaccaattggaatttacaag

SEQ ID NO: 591967 - DNA, 629 bp, Homo sapiens
cttttgttttaaggtgatcaatttggagtaaattgttatgtagcaacagataactgatataatcttctacgcatttttaggatatatggagcttaagggaaaaaaatgctattttatagagatacagtgagaaagtgcagaatggcatgcacaggtggaaagtaattagggaattggggcctgtgaatatagttaaactgtttgagtcttttaggtacatatttgctttaatgagataaatacattttaaaagtccaggatggcagagacatttatattttttattcaattatctcatattttatttcagtgttaactacccatctatggcaaattaattatgctcattggattattttacttttattcaaattttgttatctggtacttattatatggaatatgcaaatcgaagtcctgtccttcagcaatcaataaggtaaaggagaagaaagacaaaaacgagtagaattttatgataatttaagatacaaacagactttgctttgcatgagagtgtgagaccataaaaatttactatgaaagctgaaactgtggcaataaamcttaataatcaatggggaaaattatgattgttccatgacctataaaatatttgttaaaaattt

SEQ ID NO: 591968 - DNA, 572 bp, Homo sapiens
aatagggaacaaatataattccttaatactataaaatataatgaaaaaccataagctattataaaatgtatttaaaattctaagatatacactgtcactaacaaaaattatttctaatattttgtcattttatcacacagtgtttttaacagacataggttttcaattaaggaatttttaaatagayttataataccttctatattcattaattttagacaattctattttatatcatagtaacaatataaatgacatttccattttgacatttttagatttcttgtaatagatacaatagtatcaaatttttatgtgtattctctcacataatatgcttctgttctttttcagagtcataacttaggaaatttctcctaaatttactctgtcctgtagttgaatttgtttgttcttcctgtagaaacatagttttgattttatttaatagtaaaatatatttccaccaatgattctgttttatcctgataaaggaagcagctttcagtaatagaatttaaacatgtgaatgaatgttcccatattgattcttgttgagaaaggttcacata

SEQ ID NO: 591969 - DNA, 572 bp, Homo sapiens
aatagggaacaaatataattccttaatactataaaatataatgaaaaaccataagctattataaaatgtatttaaaattctaagatatacactgtcactaacaaaaattatttctaatattttgtcattttatcacacagtgtttttaacagacataggttttcaattaaggaatttttaaatagacttataataccttctatattcattaattttagacaattctattttatatcatagtaacaatataaatgacatttccattttgacatttttagatttcttgtaatagatacaatagtatcaaatttttatrtgtattctctcacataatatgcttctgttctttttcagagtcataacttaggaaatttctcctaaatttactctgtcctgtagttgaatttgtttgttcttcctgtagaaacatagttttgattttatttaatagtaaaatatatttccaccaatgattctgttttatcctgataaaggaagcagctttcagtaatagaatttaaacatgtgaatgaatgttcccatattgattcttgttgagaaaggttcacata

SEQ ID NO: 591970 - DNA, 334 bp, Homo sapiens
cgcgcgcgcacacacacacacacacacacacacacacacayatatatatactatccttaaaagatatataattttcaatgtaaatattttatatataataatatatataataaaactatattagtaggtaacatggatttcaaacttctttcttttcaatttggatagactctgaatatataggttttatgtagtttccacatccttagcataagataaagagaaaagaatctcataagctttcgttgagctgctggtaggtttataatctaatttctttggagggataggagcatgatatatggctatctcttttggaaattagtttacatga

SEQ ID NO: 591971 - DNA, 634 bp, Homo sapiens
  misc_feature 600, 601, 602, 603, 604, 605, 606, 607, 608, 609, 610, 611,612, 613, 614, 615, 616, 617, 618, 619, 620, 621, 622, 623,624, 625, 626, 627, 628, 629, 630, 631, 632, 633, 634: n = A,T,C or G
actcaaaaacctggcaggagccatgcaaattgtcattcccagtagaagcctgctgacctcagacttgcctgtagaccctgaaatagcttaatgctctggatacagtcttgctctactgggttcctgaaggcagtcctgcccacccaggggtccacgggggaccttatcaatgagagtctttttggcaggagctgtacctatataagactctgattaaaaggactgtcatattcagactcaactgtagacccaaaagttaccccacaacccaactctattcctgctcacctacagtcacagagttagtcccaccagtctgggtatccagcagaagaaggtctatatctgccagaatcagtctgtaaacaatgataaaattatttgctccttcaaatgtacggacactaatgcaagtctacaatgatcaccaagaatcagaaaaacatgacaccatcaaaagaaactaataaaggcccagtaattgactctaaaaaaatggagtttcayaaactgcttgacagagaattcaaaataatcatcttaaggaaactcaatgagctacaaaaaaaaaaccatgtagataatggaacaaaaatcagnnnnnnnnnnnnnnnnnnnnnnnnnnnnnnnnnnn

SEQ ID NO: 591972 - DNA, 595 bp, Homo sapiens
gatggatcacgaggtcaggagattgaaaccatcctggccaacatggtgaaatcctgtctctactaatacaaaaatgagccaggtgtggtggcatgtgcctgtagtcccagctactcaggaggctgaggcgggagaatcacttgaacctgggaggtggtggttgtagtgagcagagatcacgccgctgcactctagcctgggcgacagagtgagactccatctcaaaataaaataaataaattcaaaaaatttaaaaataaataaataaaaataaaaagtaaaagtagcaataataaataaaacacattactatcaacacagtaacattaagattgacaactgacttctcaacagaaacgttggaaaactgaaaacacatcattgcatttaaagtgtttaaaaakaataacggccaacttgagattctatgccttaaattcaaggcaaataattacatgttttagtaaacaaaacctgagagattagtcactagcaaagtttcattacaagaaatggtaaaaatgaattcttcagtcagatggaaaataattttggttgaaaaagttaagataaaatgaaagtatgaaaagggatg

SEQ ID NO: 591973 - DNA, 595 bp, Homo sapiens
gatggatcacgaggtcaggagattgaaaccatcctggccaacatggtgaaatcctgtctctactaatacaaaaatgagccaggtgtggtggcatgtgcctgtagtcccagctactcaggaggctgaggcgggagaatcacttgaacctgggaggtggtggttgtagtgagcagagatcacgccgctgcactctagcctgggcgacagagtgagactccatctcaaaataaaataaataaattcaaaaaatttaaaaataaataaataaaaataaaaagtaaaagtagcaataataaataaaacacattactatcaacacagtaacattaagattgacaactgacttctcaacagaaacgttggaaaactgaaaacacatcattgcatttaaagtgtttaaaaagaataacggccaacttgagattctatgccttaaattcaaggcaaataattacatgttttagtaaacaaamcctgagagattagtcactagcaaagtttcattacaagaaatggtaaaaatgaattcttcagtcagatggaaaataattttggttgaaaaagttaagataaaatgaaagtatgaaaagggatg

SEQ ID NO: 591974 - DNA, 586 bp, Homo sapiens
ttctgtattctattggcaggaaaataaaatttttataaataaataactttttaaatggagagagatttctgaacttattacctttaagtttttcattatcctcttactgaggtgctttgtggtgctaacattttaaagtcaaaggattttgctgaacccaaataaaaacatataaagatttcaagaacctattttggatttttaaatagttatatttagttgaagaaatttaaattacctatttctacgtaatctttttatgtagccaccatgtactatgtttgtgtatgtttgcaaatgtgtacatatatgtaaagtttatgaaaagtattccatattactttagtatttctcttctttctattacttgcttttatttaattcaggtgaataatgtgtgtgtatgatatrgtttgtctgtgtccccacccaaatctcatcttgaattgtagctcccataattcccacgtgttgtgggagggacctggtgggaagtaattgaatcctgcgggcaggtctttcccattcagttcttgtgatagtgaataagtctcacaacatctgatggttttacaaagggggttcc

SEQ ID NO: 591975 - DNA, 646 bp, Homo sapiens
tcaagtaaacaatacagtaaaactgtggtcgctatacytacattagatcctcagaacttactcatcctgtaactgaaaatttgtattatttggtcaatatcctcagcccctgtcaactattattctgtctgcttatataaattcatatgttttatattccacatataagtgggatcacacagtatttgtctttctgtgtttagcttagttcacttagcataatgtcctctaggtttatccatgtcattgcaaatgacaggattttcttatttttcactactgaatatattccattgtgtataataaatatgatatttttaatccatttattcattcagcaacacttaatttccatatcttgcctattctaaataacatcacaacaaatatgaggattcatatatcgcatatctcatatatctcgctttaagacactgatttaatttcctttggatactcaatagtgaaattactaaatcatatggtaattctgtttttaagtttttgaggaaactctaaacctgattgtcataattgttgttctaatttacattcccatgaatagtgcacaagagttcccttttgtccataccctcagcaatatttgttatctcttgtctttttaataaccactaagtgtgaggta

SEQ ID NO: 591976 - DNA, 360 bp, Homo sapiens
tgaggtaatacttcattgtgagttttatttgcattttcttgataattagtgatgttgaacatttatttataaatatgctgcccttttttacatctgaggaatataaatttgataaagatggttgaccactatatagatttgtacaaaagcttaacattaattcctgtatttcctaattatgtatcctgacttttgamcttggtatcattttctggaagtatttatctataatttgtctatgttttaatttttgatactttatattcctctagagaatggaactagattcttatttgctttcacttatggaagaacccaatatttatcacaattgtttcctcaagggttttgggattttcc

SEQ ID NO: 591977 - DNA, 360 bp, Homo sapiens
tgaggtaatacttcattgtgagttttatttgcattttcttgataattagtgatgttgaacatttatttataaatatgctgcccttttttacatctgaggaatataaatttgataaagatggttgaccactatatagatttgtacaaaagcttaacattaattcctgtatttcctaattatgtatcctgacttttgaacttggtatcattttctgraagtatttatctataatttgtctatgttttaatttttgatactttatattcctctagagaatggaactagattcttatttgctttcacttatggaagaacccaatatttatcacaattgtttcctcaagggttttgggattttcc

SEQ ID NO: 591978 - DNA, 446 bp, Homo sapiens
ccttcttatgtgtagatttcctcttcctggagcacttttccctcccctcttggcccgcctaacttttactcatctgtcaggaagccatgttgattccacctcctccaggaagccttcttggatttagggtccctcctgttggctcccagaggtcccatatcccttgcatcatcacaattcctcctccagattgaagctggctgctttgccagtctcctctaggccatggtctcctgaggacagagccacacattggcctctgtctcccccagcttgatcagggcaggaggtgcccaagaaagcccagaaggaaggagtgggaaatggtcccgcacatgtattgagctcccgctccacagtgagccttttacttgcagcccagtagcctggayggctcggcctttctgacatggagttaggtcaccatctggtcacagcctgcagcc

SEQ ID NO: 591979 - DNA, 515 bp, Homo sapiens
aggtggccagatttggcccagggactrtaattttccaattcctgagatactagaaacagaagtgttttgttgttgttttaactaactctttattgaagtacagcaaacaaaagtatacacattatagcattgtatgaactatcacagagtgactacacgcatgtaaccaccaactgtgtgaagaaaacattgcctgcatcccagaaactatgtatgcacccttactagtcactaatctcacactcctccccaaaagtaactaaaactctgatttgtattgtcagtggtttctcctgttttggactttatataaatgaagtcatattgtatgtatttctactttctgtctaacttctttgtatgatattctcccagtggaattcatctgtattgtggtttgtaccaatggttcatttctttttattgttattataatattttattgcattactataatagtatttatttcattctactgtagatggacatttaacattgtttctagtttggggctg

SEQ ID NO: 591980 - DNA, 570 bp, Homo sapiens
agtgcaccaccatgcctggctattttttttaaatttaaatttaaatttttttatttagtggagacagggtctcactacattactcagactaaccttgctctcctgggctcaagtaatcctcctgcctcygcctctcaaagtgctgagattacaggtatgagctgccatgccctgcctccaattattttcttaatggcccctcagaactcatctgctgccacttggttgccagaagccatttgtcctgatatcttgattttttttttaatcaaaaatgtttctaaaattatcacaccatcctttgttagcattaaattagctagctttagatctttcaccttacttttgcttgaagtcatcatataataactttattttttttccaaatcctgttagagtctacagatgtgcctttcttatagcaatcctgcccccacataaaagttgcactttccagaggagataaaaatggtagttcacaaaaactgcaaggtttctccagctgatgaggtagctgcaatgatggctttgtgagtttccttttctttctttctttttttacagcggtcc

SEQ ID NO: 591981 - DNA, 602 bp, Homo sapiens
tggatgtctgactggaagagaggttggtttccctaacccccatttgttcaagggtmaattgtatatctattgctaccatcttcacctgtttttgattctacaattacagagcattgcagcttatggaataaccatttattcaactatatggcttttcctaaattattttgttataattcaactatgtaaccaaaattaagctgccatgctattattacacatagccacactgacacagttaaattttcattattcattagactagcagagcaggattctgagcaattaagggggtgaaaaatatacacagttgctcctggtatcttcagaggattagttccaggatccctatggttaccaaaatctgcagatgctcaagttccttacttaaattggtgtagtattttcagatagcctatacacatcctctagtatactttaaatcatctccagatatttataatacctaataaaatgtaaagtttatataaatagttgttatactatattttatttatattatttttattgttgcattatttttattgtatttttttccaaatatgttcagtcttcagtttgttgaatccacagatgtggaa

SEQ ID NO: 591982 - DNA, 585 bp, Homo sapiens
ccagggtagccatagaaaagcaactccagcaaggaattttccccattaagaatggcagaaaggtatcatgcatgaagagtgctcttctccttaaaggaaaaaatctccccagaatcatatccgataaacagcggtccaccatgccaaatcgacaccaattacaatcagacaggcgttgtttgtttggaaatcaggtactgcaaacatcttcagatctcagcaatgcaaatcacagaacaggagtatcatttactttttccaaaaaagtgcacctaaaattagaatcttcagcatcagttttcagtgagaacacagaagaaacccatgattrtaacaagtcacccatttataaaacaaaacaaactgcagataagtgcaagtgctgcaggtttgcaaataaagatacacaccttaccaaggaaaaagaggtaaatatctcaccaagccatctggaaagtgttttacacaataccatctccataaactctaaaattttgcaagacaaacacgactctattgatgagacactagaagattcaattggcattcatgcttcattctctaaatctaacattcatctttcag

SEQ ID NO: 591983 - DNA, 598 bp, Homo sapiens
tctcaaactcctgacctcagctgattcacccaccttggccacccaaagtgctgggattacaggcgtgagccaccgtgcctggcctctatgctaatatctattgattatctttttctttttctttcagtttcagatctccagggttgttggtataaygagtgattttcatagaaacttgggcatctttgtactatgttatgaggacctagatcttatttaaaccttctattttagctggctttttcaggcacttctccagcagagtggtggcagtagggagcaccattttggtgagagtagaaattcggtttcctcagttgacctctgttgacaacccagtttaagactcttcattattgttgggcaaggttaggatttcaagccctcatttggtgtctattgatacctttctgtgtgaaggggtaggactttctgtctggagggataggagtgactcccacacggcctccaatgacactatggctggggggtgatttgctcttcttactactgactgatgatgaaagtcatgactctccctccaccagcacctctgacaggaggggatgggggcctctttattgtccagtgaggatga

SEQ ID NO: 591984 - DNA, 493 bp, Homo sapiens
aggctggtctcaaactcctgacctcaggtgatctgcctgccttggcctcccaaagtgctgggattacaggcgtgagccactgcacccagcccctaatagcagaatttttttaaattgcagcccaagtcacaacatttggattttaaaatccactacaaggatgagaaaatccatttattgtactaaactcattgaaagcaagtacctttttagtaaccaaagaatgcacacccttggggaaggtaaattgcagcccatttcctactcaggtaattacattctctgctggttttaatttccttccaagcttctgtgccataygcaaggctctcccagattcggctttgaagctctagactctggagtccattaaagaatcgtccccactttttctgagcagctccttcccaaatcccaggcagaattattcttatgatgggtttgactatttattcatgtgtctgccatccagagctgagagcttcttcctggg

SEQ ID NO: 591985 - DNA, 521 bp, Homo sapiens
ccattgaatgagtgcttactatgtgccaggaactgtgctaaacacttttatgaaaattctcttatttattccttacaacaatttataacataacatagcaactattattggcccattttacagatgaggaayttatctatagttcagagaagtttgggaacttgcctatggttccaggccatgtctgtttgattcaaagacaatgttctttacctctaagttctacatccatcagaagaaaatacagaagaacagaagagatctctaaggctatggtttgtgtagggggcaaggggccaatgtttgagaaatttccaacattccccttggtttctgaggttttttgcctgtggggaggtccatccccaacgagcaatgtccccacccccgctccagggctatacatatgtaaaagaagccaataaaacaatccaagagagcctgctctcctaaatcttcaggggacaaaacctcctacttgtgatgcttcaaagctgtccagagctaccagtttaccccca

SEQ ID NO: 591986 - DNA, 521 bp, Homo sapiens
ccattgaatgagtgcttactatgtgccaggaactgtgctaaacacttttatgaaaattctcttatttattccttacaacaatttataacataacatagcaactattattggcccattttacagatgaggaacttatctatagttcagagaagtttgggaacttgcctatggttccaggccatgtctgtttgattcaaagacaatgttctttacctctaagttctacatccatcagaagaaaatacagaagaacagaagagatctctaaggctatggtttgtgtagggggcaaggggccaatgtttgagaaatttccaacattccccttggtttctgaggttttttgcctgtggggaggtccatccccaacgagcaatgtcyccacccccgctccagggctatacatatgtaaaagaagccaataaaacaatccaagagagcctgctctcctaaatcttcaggggacaaaacctcctacttgtgatgcttcaaagctgtccagagctaccagtttaccccca

SEQ ID NO: 591987 - DNA, 585 bp, Homo sapiens
gataataactttgtgttttaagcaacatttaagactccagaagtaatgagatttgctaatgaaactgaaaacacaacaagcttctctgggtcttattaatttctgcctaagtatttaattatcccactttgttgayggtacttcttctgttatttttaactctcccatcttaattttcataagaaatatccgagctgaaaactttacagtgtccttataaattaagagctgtggtttgaccttaaagttagggctagaaaaaggtcagcgggagggcaatacctcattttcattcctctaggatgaatagtctttgacatatgaataatgtttcagttactaagaaaaacaaacgtgggcccagcacagtggctcatgcctgtaatcccactactttgggaggctgacgcaagaggatcacttgagctcaggactttgagaccagcctgggcaacatagcaagacctcatctctacaaaaaataaaaacttttagccaggtgtggtggtgtgcacttgtagtcccagctactcaggaggctaaagtggaaggattgcttgagctcaggaggtcgaggctgcagtg

SEQ ID NO: 591988 - DNA, 585 bp, Homo sapiens
gataataactttgtgttttaagcaacatttaagactccagaagtaatgagatttgctaatgaaactgaaaacacaacaagcttctctgggtcttattaatttctgcctaagtatttaattatcccactttgttgatggtacttcttctgttatttttaactctcccatcttaattttcataagaaatatccgagctgaaaactttacagtgtccttataaattaagagctgtggtttgaccttaaagttagggctagaaaaaggtcagcgggagggcaatacctcattttcattcctctaggatgaatagtctttgacataygaataatgtttcagttactaagaaaaacaaacgtgggcccagcacagtggctcatgcctgtaatcccactactttgggaggctgacgcaagaggatcacttgagctcaggactttgagaccagcctgggcaacatagcaagacctcatctctacaaaaaataaaaacttttagccaggtgtggtggtgtgcacttgtagtcccagctactcaggaggctaaagtggaaggattgcttgagctcaggaggtcgaggctgcagtg

SEQ ID NO: 591989 - DNA, 427 bp, Homo sapiens
ttaccgtctagctgggagcaaaacaagatgtaaggtatatattaaaccaagaccattcaggaagtaaactgtgtagcagtgcctgtaagtgaagagatgagaagaaatccaaactaacatatttgaagaaatatcaccagaggtgggattggagttgggtcttggaaaataaatagtgtctgaaaacatgaaagaagaatacagttgatttcaaaagtgaggaataatgtgtggaaaaaaargagtattcaaataggaagacaggaagtcaaattgtctgtttccagatgacaagattgtataatttagaaaaccccatcgtctcagcccaaaatctccttaagctgataagcaataaaaaataaataatttttaaaataaataaattatctttcaaagcaaatttcttacccatagttaggataat

SEQ ID NO: 591990 - DNA, 587 bp, Homo sapiens
aaagatttcttaggacacagaaagcaaacatcataaaaataaataataaactagatactattaaaatttaaaactttggttcataatagagatagctttaagaaaatagaacaggcactgtgataaaacattcataaaatgtttatctgacatgacaaaaacagcaagaaaaaatygacaaaagaccaataagcattttgcatcacaaagacatgaatgacaaacacatgaaaagcattcaatatcattgttcatcattcaaataaaaacactaaaatgagatactactacacatccattagtaaagattcagtaaaaaagactggtattagctaatattgtggaggatgcagagctatcagaaccgccattttttttcttggaagtgttaaaatcttaaacagtttataaatattacctttaagaatttgcaataaaaaacaacaataacaacattttatgtcagcttgggaaatatgattgtattaaaaattgttaatttttttaagtatggtaaaaatcctgcagttatataagaaaatatccttatgttttggggacatatactgaagcgtataagaggagta

SEQ ID NO: 591991 - DNA, 587 bp, Homo sapiens
aaagatttcttaggacacagaaagcaaacatcataaaaataaataataaactagatactattaaaatttaaaactttggttcataatagagatagctttaagaaaatagaacaggcactgtgataaaacattcataaaatgtttatctgacatgacaaaaacagcaagaaaaaattgacaaaagaccaataagcattttgcatcacaaagacatgaatgacaaacacatgaaaagcattcaatatcrttgttcatcattcaaataaaaacactaaaatgagatactactacacatccattagtaaagattcagtaaaaaagactggtattagctaatattgtggaggatgcagagctatcagaaccgccattttttttcttggaagtgttaaaatcttaaacagtttataaatattacctttaagaatttgcaataaaaaacaacaataacaacattttatgtcagcttgggaaatatgattgtattaaaaattgttaatttttttaagtatggtaaaaatcctgcagttatataagaaaatatccttatgttttggggacatatactgaagcgtataagaggagta

SEQ ID NO: 591992 - DNA, 607 bp, Homo sapiens
atagtatagtatagtccctaagtattggaaagctatgtacctcaccatagtaaatacaagtattcccaaattccaattttcccttgtaaactcaaaattttatgaccagaatmaaatcctgtccgtttttatacttgaagtgacaggtaatttgttcatttttaaggaaaatattcttccaaataatcaactctgaataactatagtttgtcagatatgctttcaagtcaaaatgtgatttcataaataaaccagctagtttagctcacaacaaaaagaataatgtgagtacttttccataagagaagcattgaacttggtcttggtcaaagcaacttacaactttcaaggactagtgtggaggcaactccatcttggacgctaatttgccatggtgccttctgattaaccccagttccaggagtacctctaagatatctgttttatctactgttccttgtgtaagagcttgtatttaccataaatcgtgcccttacgtcaactagtagagaaatagattccacctgttgaagggagaagacaaaatcatactacaaaggggtatggattcaaggaactgtgtgattcattagggctcactaggtaa

SEQ ID NO: 591993 - DNA, 630 bp, Homo sapiens
aagttgcccttttcaggccattttctagatcttataggcatgcttgattccttttattttttcttttgtctcctatgaytgtgtgctttcaaatagtctgtcttaaagttcactaattctttcttatgcttgatcaattctgctatgaagagattctgatgcattcttgagcctgtcaatttttcagctccagaatttctacttgattccttttaataatttgaaacttggtgttaaatttatctggtaggattctgagtttcttctctttggtgtattaaattttgttaaactttcccaaaacagcaattttgaattctccatctcaatggtcacatttctgtctctccaagattggtcactggtgacttactgagtacatttggttaggtcatggtttcctggatggtcttgatgcttgtaaatgtttgtcagtgtctgggcactgaagagttatgtatgtattgtagtcttcacagtctgggcttgcttttacccagccttcctgggaaggctttccaggtatttgaagggacttgggcattgtgatctaaatctttggtcactatagctatatctgctttagggggcactccaagctcagtaatgctgtggctcttgcagactcac

SEQ ID NO: 591994 - DNA, 630 bp, Homo sapiens
aagttgcccttttcaggccattttctagatcttataggcatgcttgattccttttattttttcttttgtctcctatgactgtgtgctttcaaatagtctgtcttaaagttcactaattctttcttatgcttgatcaattctgctatgaagagattctgatgcattcttgagcctgtcaatttttcagctccagaatttctacttgattccttttaataatttgaaacttggtgttaaatttatctggtaggattctgagtttcttctctttggtgtattaaattttgttaaactttcccaaaacagcaattttgaattctccatctcaatggtcacatttctgtctctccaagattggtcactggtgacttactgagtacatttggttaggtcatggtttcctggatggtcttgatgcttgtaaatgtttgtcagtgtctgggcactgaagagttatgyatgtattgtagtcttcacagtctgggcttgcttttacccagccttcctgggaaggctttccaggtatttgaagggacttgggcattgtgatctaaatctttggtcactatagctatatctgctttagggggcactccaagctcagtaatgctgtggctcttgcagactcac

SEQ ID NO: 591995 - DNA, 630 bp, Homo sapiens
aagttgcccttttcaggccattttctagatcttataggcatgcttgattccttttattttttcttttgtctcctatgactgtgtgctttcaaatagtctgtcttaaagttcactaattctttcttatgcttgatcaattctgctatgaagagattctgatgcattcttgagcctgtcaatttttcagctccagaatttctacttgattccttttaataatttgaaacttggtgttaaatttatctggtaggattctgagtttcttctctttggtgtattaaattttgttaaactttcccaaaacagcaattttgaattctccatctcaatggtcacatttctgtctctccaagattggtcactggtgacttactgagtacatttggttaggtcatggtttcctggatggtcttgatgcttgtaaatgtttgtcagtgtctgggcactgaagagttatgtatgtattgtagtcttcacagtctgggcttgcttttacccagccttcctgggaaggctttccaggtatttgaagggacttgggcaytgtgatctaaatctttggtcactatagctatatctgctttagggggcactccaagctcagtaatgctgtggctcttgcagactcac

SEQ ID NO: 591996 - DNA, 606 bp, Homo sapiens
gtggcgttattacacttttgtagtcrtaatgcattcctcattaagagggagaaggaaactaagggtgaagaaaaggagcaaagagattaagaatgagcgactgggttgatacattgaaagcctttatatcatttagctactgatttattcattcaataatgcattcatattcaatgtggttaggaaagactggtggaacaatctattaggaacctctgcatcatgaatcactagaaactacagtctcactattctctttacattcttctctctgaagaatctcactctttccctagctaggctattgctatgacactgctattattgtttagctccttctcacggcagtaaataaaaacctgcaaatctgcatctagaccaataatatgttccatcacttctttcagtgggttccccagttagatagttttactaaaggaatatgtgtttaacaaactttgacatttaggtttagcgcatgaattagccattctgggcatagctttgatctacatagatgctagctcagcaccgagaggctgtgtggaatgtgattcaccaaggcagttctgggcagagcaaatgaactggaaaatttcttcttga

SEQ ID NO: 591997 - DNA, 606 bp, Homo sapiens
gtggcgttattacacttttgtagtcgtaatgcattcctcattaagagggagaaggaaactaagggtgaagaaaaggagcaaagagattaagaatgagcgactgggttgatacattgaaagcctttatatcatttagctactgatttattcattcaataatgcattcatattcaatgtggttaggaaagactggtggaacaatctattaggaacctctgcatcatgaatcactagaaactacagtctcactattctctttacattcttctctctgaagaatctcactctttccctagctaggctattgctatgacactgctattattgtttagctccttctcacggcagtaaataaaaacctgcaaatctgcatctagaccaataatatgttccatcacttctttcagtgggttccccagttagatagttttactaaaggaatatgtgtttaacaaactttgacatttaggtttagcgcatgaattagccattctgggcatagctttgatctacatagatgctagctcagcaccgagaggctgtgtggaatgtgattcaccaaggcagttctgggcagagcmaatgaactggaaaatttcttcttga

SEQ ID NO: 591998 - DNA, 553 bp, Homo sapiens
ccggtcactgtagcactggagtttgttttagatcaggggttggcactgccacaaactgcacagagcaaagggagcaaatatggcccacaacctgcttctgtaaatgaaattttattgtaacacagccatacccatttgtttatgttctcactgtggctattacaaggatagaggtaaattgtgacagagactattcagctccataaaacctaaaattgttacactctggcccttcagagaaaaagtttcccaatccctggtttagacaaattaaggcacatccttgaaactgggcttagggctatttcgttgctacataaggaaggagaggagggtccccaaaagaaaatstgggttttactaggaaagggggagaggatctttgaaagcactgaccaaactgtacttttttttaatgctttctttataaattatatctaaacaatatacttaatttaccactaatatagtcacaggtaaaatgtactcttcgacacatatgatggattctttttttttttttttttaactttaagttacaggatacatgtgc

SEQ ID NO: 591999 - DNA, 566 bp, Homo sapiens
aacagatgccctttattcatatttcttctgagtttgcaagtcatgggtgatgtttaatacaataatacacatctcaataacttaagatacaactttaataatatgcatatactcaacttattttttgagtggacaactgcccttctaggattcaaacccatatgaatattaccaataatgaaccctcaaaaaagtatacccaacaaataatactgtgtagaaaaattcaaattgactaaaattatgtaagtttacatgtaattaatttttactacattggaaacagatttgcttcacagatgaaatataaggaatatcacatgtatgcaaaaattaatggctatgtgctcaaaaatgaaaataagtccaaattacataaataagataaatttgtattctgttacgaataaattagagaaatcttagagggcccacagcccataatgtaaaagctgaaaagaatgccactaccayactaacaatgaacaaaagctggataaattacaaaatcacaacttttcttgaagcagcctgaaatccaaggagggacagcccttacagatggg

SEQ ID NO: 592000 - DNA, 539 bp, Homo sapiens
aatgaaaacataatgtccaaacttttgagatgtacccaaagcagtgcctagagggaaatttacagcattaaattattatatcagaaaataagtacgtctcaaatcaatagcataatatcccaccttaagaaactagaaaaagaaggccaaaataagtccaaagtaaacaggaggaaggaaataatgaaaattttaaaagggaaaaaaagtgaaattaaaaaccaaaaaaaaaaaaaaagagagagagaaatcagtaaggtcaaaagtycattctttgaaattatcaataaaattgaaaaacctggccaggcagggtggctcgcacccgtaatcccagcactttaggaggccaaggcaggcggatcacttgaggccaagagttggagaccagcctgactaacatggtgaaacccattctctactaaaaatacaaaaattagtcaggtgtggtggcacacacctgtaatcccagctagtcgggaggctgaggcacgagaatcacgtgaacccaggaggtgctggttgcagtgagccgagat

SEQ ID NO: 592001 - DNA, 583 bp, Homo sapiens
gcttggccagccttcagtaatacaaactagtgttccacaattgaatccatggtctcttcaagcaactactgaaaaatcacagagaattgaaaccgtgctacagcaacccgcaattctaccttctgggccagtagataggaaacacttagaaaatgccaccagtgatatacttgtatctcctggaaatgagcataaaatcgtgcctgaagctttgttgtgtcatcaggaaagttctcactatatcagtcttccaggtgttgtattttctccacaggtctctcaaacaaattctaatgtggagtcagtgctcagtggttcagctagcatggctcamaatctgcatgatgagtccctctccacaagccctcatggggctctccaccagcacgtgactgatattcagcttcatattcttaaaaataggatgtatggatgtgattctgtaaagcaaccaagaaatatagaggaacccagcaacatacctgtatcagagaaggtatagttctgtgtccaacttcttggtatcaggggacagatagtggccagtaactggatatcctgaatattttcaagctgtaatgtt

SEQ ID NO: 592002 - DNA, 371 bp, Homo sapiens
aagtcggccgggtgcagtggctcacacctgtaatcccagcactctgggaggctgaggcaggcggatcacttgacatcaagagttcaaaaccagcctgaccaacatggtgaaaccccatctctactaaaaaaaaaaaaaaaaaaaaatmcaaaattagtcgggcatggtggtgcacgcctgtagtcccagctacttgggaggctgaggcaggagaatcacttgaacctaggagatggaggttatagtgagccgagattgcaccattgcactccatcctgggtgacaagagtgaaacttcgtctcaaaaaaaaaaaaaaaaaaaaaaaaccacacaaaaaaacagaatacagcaaagtaaatacatgtacatt

SEQ ID NO: 592003 - DNA, 534 bp, Homo sapiens
atatttagggaagccctgaactaactaatkgtccctaccattttaagtggtgatcagcaataggagggttcacacaaaacacgaacaaaggttgcacttgcacacagtttgtacaatccacccctttctcccacttaagaaatcatattggaattctttttttttttaatttgagactgagtctcactctgtcacccaggctggagtgcagtggtgcaatctcagctcactacacttctacctcccgggttcaagtgattctcctgcctcaggctcccgagtagctgagattacagatgtgcatcaccatgccctgctaatttttgtatttttagtagagatggggtttcgccatgttggccaggctggcctcaaactcctgacctcaagtgatctgtctgccttggcctcccaatgcgctgggattacaggcatgagccaccatgcccagcctggaattcttgtaagagtattacggagattatcatgaattgactctaaatcgtttaaaaatacatctttcacaaacagcaa

SEQ ID NO: 592004 - DNA, 490 bp, Homo sapiens
cattcccttcatttctaattgtgtttatttggatcttctctctttagtagtctagccagcagcctatctatcttattaattttttcaaaaaccaactcctggattcattaatcttttgaatggttttttgtgccctgatttccttcagttcagctctaattttgttcatttcttgtcttctgctagctttggggctgaagtgttcttgcttctctgattctttcaattgtgatgttacgttcttaatttgagatctctctaactttttgatgtgggcatttagtgctatgaatttccctcttaacactgccttagctgtgtcccagagattctggtatattgtatctttgttctcattagaaatagtaaatttamcaataaattttaacatagcaagaattcaactccacaaacataattttaagaatgttataatacactaacatggcataacaatatccacattcataagtgtattgtttcttattca

SEQ ID NO: 592005 - DNA, 440 bp, Homo sapiens
gccgtgtgggtggtaggcattgctgcatgcctgtagacccgggagatggcagtggctgggaggcttgcagtctgatgtcaccccatcacaggccacagtgctggtgggtctataagccaggtcccttccaccaggggcatttccaccaccatcaactctgccaaggatcatgaaaaacataatacaaggtaacgggctagatcaggatttctcagcctcagaactgttgacatttggggctggatactctttgttttcggrggctgtcttgtgcattgcaggtgcattatagatgtttagcaggattcctggcctgtaccctactagaccccactagccaccacttccttacccagtaataataatgtccctagacattaattatcaatgataatcactaatcattattgatcaatattcatgattattaatcagcccca

SEQ ID NO: 592006 - DNA, 440 bp, Homo sapiens
gccgtgtgggtggtaggcattgctgcatgcctgtagacccgggagatggcagtggctgggaggcttgcagtctgatgtcaccccatcacaggccacagtgctggtgggtctataagccaggtcccttccaccaggggcatttccaccaccatcaactctgccaaggatcatgaaaaacataatacaaggtaacgggctagatcaggatttctcagcctcagaactgttgacatttggggctggatactctttgttttcggaggctgtcttgtgcattgyaggtgcattatagatgtttagcaggattcctggcctgtaccctactagaccccactagccaccacttccttacccagtaataataatgtccctagacattaattatcaatgataatcactaatcattattgatcaatattcatgattattaatcagcccca

SEQ ID NO: 592007 - DNA, 493 bp, Homo sapiens
caggtccctggcattttgttgactgtcacccagaggccaccctcagattctagaagcttcccatrgttctttgccctcagggcttcctcaacatggccgcggacttcatggcaccagcaaggagaatcttgctagggtatacaagcaagagggagtcatagatgatagaaaggtaaatagatagacagacagacatattaatagatatagatacagatagatctagatatatttacatgtagagatagatgatagatataaatagataatgataaattgatagacacatacatatctagatagataaatatagatagattatagaatgaataaatacatacatatatttatctaaatagatagagatggctggatggatagatggatgaatggatggatagatgattgatagacagatagatggtcctagccacactcaaagctaggagattctacagggtgtaacaccaggggacagagatcaaaagaattc

SEQ ID NO: 592008 - DNA, 574 bp, Homo sapiens
gtggtcacattctaatattctattaaccagaacagtttaatcccaattatgttttttwaaaaaaatctttaattaaataaaggaggagtctggaatcacaaaacaatctttgctttgttactcaaaattactgcctcagagttctctaattttatactagattagaataatcagaattctacagagtgccttttcggtcattcatcattcatgagtataatggaaaaaaatgtctgtaattataatcagttagatcattaaaatcctaaattttgatatcaaaagaacaacactttaaagaattctttatacaagatacaaaagtgtatttttgactacttattccatgtgtgatgaggctgatgagttagttttccttccaaatttcaatactgggatactaaaaaagagagaaaattgatggcccttagagattcactcagcaactactataactgctgtcaaatcgatcaaccaattaatcataactgtgaataaaatataagaaatgtactcaaaataattaagtatctctaaagttagttagagatatatatgtgtgacacacatatag

SEQ ID NO: 592009 - DNA, 507 bp, Homo sapiens
gccttcctttcttacctcgttctcatcagcctcaagaatagtcattgttcataggtataattcaacaaacattatatgttggtggtaaatatattgatataatttatgtgcattctagtagagtaactttctagcaatgagatctagttctgttgatatatgtatctttaattttgagacatattgccaaattttcttccaaatatttggcagcaattgtatttgaaactgtatatttccccaatccttcacaaactatgaatattaccaaacatttgcatgtttcactatctgataaattttttaaatcttctatttatttgcatttcttaaattataactgcgatggaaatttttctaatgtttgctgaatatttttaatttttttaattcaatttktctgtttctgtggcaggcaacttttttattgctttttatgaacacatagtaaattaaagaaattagctctttctcaatctttttattagtgagcagtttttggttttg

SEQ ID NO: 592010 - DNA, 527 bp, Homo sapiens
tgcagatttcttgggatttctgatctattcccaggaaagaaaactcttcttaggatcttattgcaaggaagggatttgattaatcaaagtgygcatgcttattaaaggaagcagggtcctctgccatctagatccactgggctttctagaatctgactttgacatgtagcaatagaagataactaaactgagagccagggaaggatgtggcaaaattaagataataaaatcaacacaaatgtgtctgatgagtgataccttgtttgtttagaaatgtcagtatgtatgttatttccaattatcttaacgcttcttgttatgccattcaatatattctacagaatattttaatctactcttcaatgtacaaaactctcttataacttcaagactttgcacctgaaattctctctttagaagctctgaccttactataacttccctcttctttgcgataaaactcattgatccagttgtccctgtcccctataaattaagcctaaaccctgcctattacacagtttcat

SEQ ID NO: 592011 - DNA, 512 bp, Homo sapiens
tgaattctttcttgcacgagatccaagaaccctctcttggggtctggatcgggacccctttcctgtaacaataacacagaaatacaagggatcaaaagagacratcataaacaattatattccaacaaattggataacccagtttatccagaagagatgaataaattcctagaaacataaaacctattaaaaccaatttataaagaaatgggaaatctgaatagacattagataacatgtaaggagattgaatcagtactcaaaaacttcccaacaaagaaacacctaggacctgatggcttcataggttaattctaccaaacatttgaagaagaattaactccaattattctcaagctctttcaaaaaattgaagaagagacaatacttccaaattcatttttcaaggccatcattaccctgacacccaaaccagacaaggacactactagaaaggataattacaggattatatcgctgatgaacacaaatgtaaaagtcctcaagtaagt

SEQ ID NO: 592012 - DNA, 552 bp, Homo sapiens
gggtggcagaatctgccccaacaccatggctaccagagcagcaacacttatacactggggatccctctatgtttttctctttaaaaagttacttctgatttttaaaaagttagaaattgaatgtgctagatggccatcatttctccgtttatttttcagatcctgtgactgcaataatgtttctgccacccccatgcctctattatgtgatactttcgcttttttgacccagaggaaaaagttaaacatacatgctgatctcactgaacccctttattgcacaaagctttgcttgcatcccccaaaggtgtaatgagacacagggataggaacgacctttcaggtctcagagtaagatggaccaggctgagagagtaggcaagttcttaattctcatctgagctttgtcatcctcccaaactgtcatctyaatgctgcctgccatgcttctgttccacatttcttttttaacagcttctccagtaactaggacatttttatattatcattcttggaatactaatgtgctttccatcaaaagctttagggtaa

SEQ ID NO: 592013 - DNA, 505 bp, Homo sapiens
aagagtcaactaggcttcggtgaaaagttttcctcacttgtaataccagaggcacaagasaaaatgtttccttttttggttgcttcaccacatctgcaagtggctttcaggtttggtgacattggagaggaacatcacctgcctgttagtaaggcagggcagagagacacaaaaggcctcttagagacctttagagacattgctccattgaccaactttggaccttatcccactgtctttaggcgagatgagactgtcattgtatatgctgctttagtggggttttctacagctcgtgattgaaaatataccctacgatcaaacatatctaccttggagaaaagtgcgttatcctccaaggatctacccaatgtagcagaacaattcaaagtggccagaatatcacatttccatcatcaaatcaagttctagtttaaaagcttcccccagtggatagtttctttgctacttttctgcatttcaaaacacctgtgcatattcctaa

SEQ ID NO: 592014 - DNA, 293 bp, Homo sapiens
actttctaagcagagcaggaatccttcaagctttcttgtggggatcattcacccctgccctaactcctccagcgagrccagctttacagccccatgctactgactctgctctggggcagccccttgcatcgccaggtgcaaggatgctacagtcctagtcctgagccgccttgcctttctccaaagccctgacactaacccgcaaagatagagcccactttaatcttggcttaagattgaccttgtcactgccaaggttagttagccataagatacccctaataccaacagaa

SEQ ID NO: 592015 - DNA, 586 bp, Homo sapiens
atggttctagaagattttgccatcaaagtaagtcataggaaagaaataaacagcatataaaatggaagagatgaaataaaacattcttgatttgcagacaacacgattgcctacatagaatatactaaggaattttacaatatcaacaacaatgaatctcccagaactaataagtgagttcagcaaggtcacaagatatgaggtaaacatgcaaaacacaattccatttttatatactgacaataaaaaaaatgaaaatgcatatcaaatgcaatactttctcaaaaaatgaaatactgaggtataaacaggataaaacatgtacaggatttgtgtgatgaaaattacaaaatgctgatgacagaaaccaaagacctaagtacttcatggaacacacaatgccccagagttggaagacttatcatacagaaagcaattctccttacattgatatatgtaggtttaacacaatttctatcaaaattmtagcaaggcactttgaggatatagacaagcatgctttaaaatttatatggaaagggaaacactctaaatatccagaacacagctaaaagaggtaaagtga

SEQ ID NO: 592016 - DNA, 578 bp, Homo sapiens
gtagacccacattagctcaagcacccacccccacttgacgcagtcacaagtcccaaattctcaagacagaattaacctagkttaactcttaacagccccgtccctttgatccagttgagtagcccactcttacttgtaataactcctcaggctattaaacttactaaagccattactggacaaaatgaatttttcttcatgtttcttccagttcatttactttttaaaagttcttctgcataaacctgcttttcagcctcattgagagctctggcctcaagacacctccactcttcctgtcacctctcccttttctgtacaacttttcctgcatattttggattttgttgtgtaatattttacttggtatgtgtattagtcagggttctgttagagggatagaactaataggggagtttattaagtactaacttacacgatcacaaggtcccacaataagctgtctgcaagctgaggagcaaggagagccagtatgagtcccaaacctgaagaacttggagtccgatgttcgagggcaggaagcatccagcatgggagagagatgtaggctgggaggc

SEQ ID NO: 592017 - DNA, 578 bp, Homo sapiens
gtagacccacattagctcaagcacccacccccacttgacgcagtcacaagtcccaaattctcaagacagaattaacctaggttaactcttaacagccccgtccctttgatccagttgagtagcccactcttacttgtaataactcctcaggctattaaacttactaaagccattactggacaaaatgaatttttcttcatgtttcttccagttcatttactttttaaaasttcttctgcataaacctgcttttcagcctcattgagagctctggcctcaagacacctccactcttcctgtcacctctcccttttctgtacaacttttcctgcatattttggattttgttgtgtaatattttacttggtatgtgtattagtcagggttctgttagagggatagaactaataggggagtttattaagtactaacttacacgatcacaaggtcccacaataagctgtctgcaagctgaggagcaaggagagccagtatgagtcccaaacctgaagaacttggagtccgatgttcgagggcaggaagcatccagcatgggagagagatgtaggctgggaggc

SEQ ID NO: 592018 - DNA, 578 bp, Homo sapiens
gtagacccacattagctcaagcacccacccccacttgacgcagtcacaagtcccaaattctcaagacagaattaacctaggttaactcttaacagccccgtccctttgatccagttgagtagcccactcttacttgtaataactcctcaggctattaaacttactaaagccattactggacaaaatgaatttttcttcatgtttcttccagttcatttactttttaaaagttcttctrcataaacctgcttttcagcctcattgagagctctggcctcaagacacctccactcttcctgtcacctctcccttttctgtacaacttttcctgcatattttggattttgttgtgtaatattttacttggtatgtgtattagtcagggttctgttagagggatagaactaataggggagtttattaagtactaacttacacgatcacaaggtcccacaataagctgtctgcaagctgaggagcaaggagagccagtatgagtcccaaacctgaagaacttggagtccgatgttcgagggcaggaagcatccagcatgggagagagatgtaggctgggaggc

SEQ ID NO: 592019 - DNA, 578 bp, Homo sapiens
gtagacccacattagctcaagcacccacccccacttgacgcagtcacaagtcccaaattctcaagacagaattaacctaggttaactcttaacagccccgtccctttgatccagttgagtagcccactcttacttgtaataactcctcaggctattaaacttactaaagccattactggacaaaatgaatttttcttcatgtttcttccagttcatttactttttaaaagttcttctgcataaacctgcttttcagcctcattgagagctctggcctcaagacacctccactcttcctgtcayctctcccttttctgtacaacttttcctgcatattttggattttgttgtgtaatattttacttggtatgtgtattagtcagggttctgttagagggatagaactaataggggagtttattaagtactaacttacacgatcacaaggtcccacaataagctgtctgcaagctgaggagcaaggagagccagtatgagtcccaaacctgaagaacttggagtccgatgttcgagggcaggaagcatccagcatgggagagagatgtaggctgggaggc

SEQ ID NO: 592020 - DNA, 668 bp, Homo sapiens
tcatataatcttttacttaccctcttttgatgccgtttgtttttctgagcaagtttaattgcagaatgacccagtgattatttttaaatacatcaaaagagaattttattcagtgagccagtttatgattctagttctttctctaattaactataatmatttcgtgtcacttttgctcttttatataatttgggcattgaaagagatgactcaattgcattctgtctttattataaaaatatatacattaaatacaattatgtatattaatatctagaaaacttacatattaaatatgattaacaatgctgtttgtaaattttaaaattcataaaagctaaatattccatggtgtaaattgcagattaccctcaaaattcttttgactttttttttttaactaagcaataaatgtaaaagtcttaattgcacaacttggtgaatatttacaaagattgaaagactatctcctacataacaaacccccagacaaagaaacagaacattatcaccaccagaaaatcctctcttgtgctggcatgtggttatttatcctaaaataataggttgaagaataaattaaaatatatttgaatatgtaaaataataaaagaaaatatgaaatcattttttaccaaaatagtaaatattatgatagattaataata

SEQ ID NO: 592021 - DNA, 389 bp, Homo sapiens
taaggggataccataacatggttctcaagacctctgggaagatctgagagcttccatattgtccctcaaatatctgacccaagatattcatacttcaaataccttgcataatgaaaatgcccttctgacagtcttctaagccataatcagtcaagaaatatttagtgtgtgtgaactgatattacaacagactttaaagagtagaaaaaaagaaytgaatttgatagttgggattaagggaatattgatagcatcaaaagtcactatgcactacatgttctacatttggcctaaaattgatgctggtcagtataactgaaatcctcacttagattaataaattcataatttatataactatccattagaagatacatacgatgcatatc

SEQ ID NO: 592022 - DNA, 614 bp, Homo sapiens
aattggtaattaggtacttgccagaaaagttgcagttatcaatactcatgatggctgagactagccatacactcactgccggaaaatgctttgatattaggaaaatttgatgaaaagtttttgcctttgaawttaatcaccaggattgtgggattttctatagaaaatttgagtctagtgcaaatctcaactccaatagtctttcttcagcttcataaccaatctccatttctagagattccattcctaaggaatatcttatactctggtctttcttcacataacttaggttatttttgtttctcatttaaacactctcatagtcacatgcagaacttacagagccagaatctactccaccatcaaaatctgtatttgtaaccccctttccccccaccaccattctgctcactagttcctagagtcacctcagtttttcagtttattcatattctacaattttttgatcttatggagaatttcaatacatattcttcaccattttgtcatcatttatttaactcaagtaggactttactttttcttccaaacaccactttggacttctccacatgaattgagtaggactttatttcctcatcatttattttgtg

SEQ ID NO: 592023 - DNA, 535 bp, Homo sapiens
tggtatctgatttgatccagtatctccatacatacacataatcataggctagtatttagctataactttttgatacatttcagttccatgtcacatcaaccatttcctagccttgatggctaattcaatgttcctttaacacatttttctggatggagttttatgcttatgtaggcttgaggattcartgtaaatggttggcacatgttatacgagaggacgaaaagatatattaaattcatctatgtttggatgtatattagagatagcaaatgatattatagaatgtttagttttacaactctactttatctgagtcataaacttcttaaaatttctttttcagtttaagctttctatgcttttattcaaccccaagataattttcttctaagattaaggaaaatctattcagctgttttaaagctaagtgaatgtgaaaattacatattttttatcatcataggaaaggcaatctattgtaatagctttctcagtaaaacgcaaaaaggcttcttttgaaaaagttccaatc

SEQ ID NO: 592024 - DNA, 458 bp, Homo sapiens
attgtctctggccaaagcaagtcgaggctagttcagatacaagagttagacaatgagaccatttatttgccaagtatggaaaaagttaagaggaagaatttgtggccattttgcaactcatcacactactatccagaaatgtattttatccatatgtttgttaaagatatatcacacatatagtacatatatgagaatatttaatgaaacataattatggaaacgaagaagaatttgaagtatttgtctttaaggaagcagctgtataaamtatttgaaatgcatgtcatgaaatgctgagtataatgcagttgctaggagtagtggatgaaatacacacataacaatattgagtttttaaaacagtgttgagtgaaaaacaaaagacaaaaacagaaagaaatgtatatcatgatagcatttacacatattcaaaatagatacatatgttatgcgaa

SEQ ID NO: 592025 - DNA, 383 bp, Homo sapiens
gtttgtgtgtccttggaaatgattatgtggaagagagacaaaagaagacagatgagagaaaaaacggtgactgagaatttaaatctttagaaggcaaatggagaagggaggcagaacacagaagttcttcctgtgttcagaggaataacaccttcattacagtaayagagatgaagaagaataatacagagacaggtataggaaggtgaaaactgtgcttatgttatttaattcataatgcatgaagtgaggtcattcattaaggaaggaaatggacactttgagattttgaggtcaaagctttatagcaatgagggtaatgagcaaggaagtgctaataataggaaatagcttgcagtcagcatgatgtttaaaactggtat

SEQ ID NO: 592026 - DNA, 383 bp, Homo sapiens
gtttgtgtgtccttggaaatgattatgtggaagagagacaaaagaagacagatgagagaaaaaacggtgactgagaatttaaatctttagaaggcaaatggagaagggaggcagaacacagaagttcttcctgtgttcagaggaataacaccttcattacagtaatagagatgaagaagaakaatacagagacaggtataggaaggtgaaaactgtgcttatgttatttaattcataatgcatgaagtgaggtcattcattaaggaaggaaatggacactttgagattttgaggtcaaagctttatagcaatgagggtaatgagcaaggaagtgctaataataggaaatagcttgcagtcagcatgatgtttaaaactggtat

SEQ ID NO: 592027 - DNA, 383 bp, Homo sapiens
gtttgtgtgtccttggaaatgattatgtggaagagagacaaaagaagacagatgagagaaaaaacggtgactgagaatttaaatctttagaaggcaaatggagaagggaggcagaacacagaagttcttcctgtgttcagaggaataacaccttcattacagtaatagagatgaagaagaataatacagagacaggtataggaaggtgaaractgtgcttatgttatttaattcataatgcatgaagtgaggtcattcattaaggaaggaaatggacactttgagattttgaggtcaaagctttatagcaatgagggtaatgagcaaggaagtgctaataataggaaatagcttgcagtcagcatgatgtttaaaactggtat

SEQ ID NO: 592028 - DNA, 623 bp, Homo sapiens
gcttgcagtcagcatgatgtttaaaactggtatttcagctgtgatgacttttccacttctgacatgattagggatatgttgttacarttgctctttggaaattttgttaagtaatgatataatataaagtaggaaaattgtcaagataactgaacaaggtacagtgtggctaaataaaccactagtttaatttactcaggtcctggactggactcacatactgtacttactgaagaaaagtttctaacatggccaatcttttgaataagtacattggaagtttaaaaatggtctacttttcagccttaggaactggccccctatcaaatccaagctgaattctttgtagaaagtgacaatttgatttcaaaattcaaatggaaattcaagggagccagaatagccagaacaatcttgataaataagaacaaagttgaaagactcacttcctgatttcaaaacttttcacaaaactacagtaaacaaaatggtgtggcactggcataaagctagatggatagatcagtggaataaaattgagagtctaaaatcaaaccctcacaattatagcagtcacctatagattacagtatgttgatctttaacaaagacaccaaaatcca

SEQ ID NO: 592029 - DNA, 623 bp, Homo sapiens
gcttgcagtcagcatgatgtttaaaactggtatttcagctgtgatgacttttccacttctgacatgattagggatatgttgttacaattgctctttggaaattttgttaagtaatgatataatrtaaagtaggaaaattgtcaagataactgaacaaggtacagtgtggctaaataaaccactagtttaatttactcaggtcctggactggactcacatactgtacttactgaagaaaagtttctaacatggccaatcttttgaataagtacattggaagtttaaaaatggtctacttttcagccttaggaactggccccctatcaaatccaagctgaattctttgtagaaagtgacaatttgatttcaaaattcaaatggaaattcaagggagccagaatagccagaacaatcttgataaataagaacaaagttgaaagactcacttcctgatttcaaaacttttcacaaaactacagtaaacaaaatggtgtggcactggcataaagctagatggatagatcagtggaataaaattgagagtctaaaatcaaaccctcacaattatagcagtcacctatagattacagtatgttgatctttaacaaagacaccaaaatcca

SEQ ID NO: 592030 - DNA, 623 bp, Homo sapiens
gcttgcagtcagcatgatgtttaaaactggtatttcagctgtgatgacttttccacttctgacatgattagggatatgttgttacaattgctctttggaaattttgttaagtaatgatataatataaagtaggaarattgtcaagataactgaacaaggtacagtgtggctaaataaaccactagtttaatttactcaggtcctggactggactcacatactgtacttactgaagaaaagtttctaacatggccaatcttttgaataagtacattggaagtttaaaaatggtctacttttcagccttaggaactggccccctatcaaatccaagctgaattctttgtagaaagtgacaatttgatttcaaaattcaaatggaaattcaagggagccagaatagccagaacaatcttgataaataagaacaaagttgaaagactcacttcctgatttcaaaacttttcacaaaactacagtaaacaaaatggtgtggcactggcataaagctagatggatagatcagtggaataaaattgagagtctaaaatcaaaccctcacaattatagcagtcacctatagattacagtatgttgatctttaacaaagacaccaaaatcca

SEQ ID NO: 592031 - DNA, 562 bp, Homo sapiens
tctttatgctattgatagttttctttactgagcagaagctctttaattaggcctgacttgtcaattttggttttcttacaactgcttttgaggacgtagacataaattatttgccaaggccaatgtccagagtggtgtttcctacattttcttctaagattcttacagtttgaggtcttacatttaaatatttaattcctcttgagttattctttgtatatgatgaaatgtaagggtccagtttcattcttctgcacatggctagccagctaaaccagcaccatttattgaatagagcatcctttctcccytgcttatttttatcaactttgtcaaagatcaggtagttataaatgtgtggctttattttagggttctctattcccttccgttggtctatttgtctgtttttgtaacagaaccatgctgttttggttactgtagccttatagtacaacatagtttgaagtcaagtaatgggatgcctccaactttgttttttttgcttagtattgttttggccatttgggaacgtctttggttccatatgaattttaaaatt

SEQ ID NO: 592032 - DNA, 607 bp, Homo sapiens
gtttatgtgggatttttttcatccttttttttttcaagaaaaaagagctagatacagagaatgctctaatgtgtgactgatatcaataaaagacatgaagtttcaagaaaktgatgtgacaaagattgcttcaaatcctcatgctctagtgcatcagttttctggagctccactgagaagacttcagaaagtgtatattttctactgcaaaaacaagtctatgggtcttcgctaacaacaaagctaaacaaagcttgttgaaccagctttccagccactagggcggtgttcactacagccattgcatagctctgtgctggcactagatagactggcatgcctacatttcttttgtcttctctttcagaaaaaatcagatgccttcagatgttatatgtgatgttttatcaactgatagaagaacaactcatgtgcctgtgacactatcatcaagtcctggccactgtgaaactcttggaatgcctttacaccccaaactccccaaactgatgtttatgtttgtgcctttttgagtgaggataggatagagagacagcatattttaaaagtatctttccactgaaaaaccttttgtttttcacccttg

SEQ ID NO: 592033 - DNA, 523 bp, Homo sapiens
gacccataggctgccattgttatcacagcttccaggtatgacatccaagcaggaagcagctccacgtgtggtaagctcttggcagctcaggtgcctagaaggtatctcagcacacattctgcccaatgtacatgatttatactacttagtaacaatctttttggaaaccaaaattatcagatgcatacagaaggcaggtcacaaaatgaagtagttactttcagttttctcagaagcattctctgtattctcattgtkaattctgggacccaggggatgatcttgaagttcatgagataatttttagttctcttacaacctcttgtgtcattcatatttctagcccagtctcataagtctagatttgggctaatttagaacatacatcaaccattatagtatcatatagagtagtttcaatgggcattttacttttggagatgctaagctatttgaatttatatattctagaaggtctgcattctatcaacgagctttacagtgctttagaagagaaaaaaaa

SEQ ID NO: 592034 - DNA, 379 bp, Homo sapiens
tctgctatgctggtctccagaaatctagtcagattcaaatctgctccatgtgtttcatcattctggaacctgggacctggaagtgctcttcttatgaagatcacaggaaagcagatgagtaaaccaaactgtgcaagcacatttaagccctgtgctgcatcatgtttgctaatactcaattcaatattattgaaaatgaataaggaaacaagatgacagaataagatttgaatgtttggaatcttgggatctgaccraaatgctttaacaaaattagctattttactgaagtggtgataatttttgtcagatatatgcaaatattttctcaaaggttttttttaatagtttttaactatcattcataacattttagctt

SEQ ID NO: 592035 - DNA, 413 bp, Homo sapiens
ggaagataacctcattatgagtcttaaactatccttaaaaatattaatgtgtaatgtccaggacttcaattaaaataatcaagtatgtaaamagaaaagtgactgaaaataaagggaaaaaacatataaaaataagctcactgaagctgtagatattggagttatgaaacactgacttcagagtgtttgtaataaatgtttccaataaattagataaaagatggtgaattgtagcaaaaactgtaaactataaatagaccttctagaatgcaaaacatgactaatactaaaaactcaatagaaaggctttagaaaattgattcaacaaactaaaaataaaatattaacattgaagcaaagataatgatataatatatgtatatgtatacatatgtgtatattatatatgtata

SEQ ID NO: 592036 - DNA, 496 bp, Homo sapiens
aattttaactggaacatattaagagaaatggagattctttttaaaagttttccaggaataaattttctctctctctctctctctctcwcacacacacatatacacacagagcactgcatacaaatggtttaactgaacaatttttccaaaaatttatgaaaccataaaatttatcttatatacaaattatttcagagcttacaaaaatgaaaaaaaaaataactgattttatggaattatttccctttcacaaataaaataattgaattattcaataaatagaaacagatatttaaactttgtgacttctctgaggctttcatttgttcatcttccccaggaagggcttcccaagctatttgattacaggccattttgtttgggaggcattgattatttcctagcatagtgggagaaacattgctatttcagatgagtccttaagagtacataagagtattcaagtatactattaaaataatacagctaacagaag

SEQ ID NO: 592037 - DNA, 500 bp, Homo sapiens
cttaattttaactggaacatattaagagaaatggagattctttttaaaagttttccaggaataaattttctctctctctctctctctctctcacacacacatatacacacagagcactgcatacaaatggtttractgaacaatttttccaaaaatttatgaaaccataaaatttatcttatatacaaattatttcagagcttacaaaaatgaaaaaaaaaataactgattttatggaattatttccctttcacaaataaaataattgaattattcaataaatagaaacagatatttaaactttgtgacttctctgaggctttcatttgttcatcttccccaggaagggcttcccaagctatttgattacaggccattttgtttgggaggcattgattatttcctagcatagtgggagaaacattgctatttcagatgagtccttaagagtacataagagtattcaagtatactattaaaataatacagctaacagaagt

SEQ ID NO: 592038 - DNA, 482 bp, Homo sapiens
gaacatattaagagaaatggagattctttttaaaagttttccaggaataaattttctctctctctctctctctctctcacacacacatatacacacagagcactgcatacaaatggtttaactgaacaatttttccaaaaatttatgaaaccataaaatttatcttatatacaaattatttcagagcttacaaaaatgaaaaaaaaaataactgattttatggaattatttccctttcacaaataaaataattgaattattcaataaatagaaacagatatttaaactttgtgacttctctgaggctttcatttgttcatcttccccaggaagggcttcccaagctatttgattacaggccattttgtttgggaggcattgattatttcctagcatagygggagaaacattgctatttcagatgagtccttaagagtacataagagtattcaagtatactattaaaataatacagctaacag

SEQ ID NO: 592039 - DNA, 542 bp, Homo sapiens
ctaattctacctctttcactcagtctttagggacccagagtgacttcatcaacagttcaatttgtagtatataatcttccaagaagtaaataatattcatttcactttttaaaacataggtgcagtacagtgtttacatacatgtgaccttaacaaatgctagtaacaacccactgaccttcaagaaggtaagtctactaatgtataattcattatgacgttttttcaggaaattgtacaaaatttctcataggtcaaaatattatgctacaaagacactccctttatgctactctgtcctgacaactattttatcttttattgttttkgtttttttaagtttgtattaaatatattacaatgctagcaaatgagatttgaagtgcatccataattctattcaacaattatttaagaacaccttaatcatgaaaaacttgaatagtataccatactcactgtgatatcttggctgtccatatatacacatgacaatgatactagttatgagtcagtagcacgttacattcaagggactgtac

SEQ ID NO: 592040 - DNA, 513 bp, Homo sapiens
gttgacaatttttatatgactaataagtattggtgctggagtttaaaatcaagtctactgaactttaaggtctgwttttcccccctgtgctttagcaggtccccgcttcttagcagaaaaaccttgtaaggtggtaagaaggcagcatgaaagcatctgatgcctggaaggcgtgcatacagttgaacttaatctacttcatacttttgctatgtttgtactgttattcacatgtagtactcattatttaaaaaacaaacaaacaaacagtttttattggccaagcacgatggctcacgcctgtaatctcagcactttgggaggtgagggcaggcggatcacctgaggtcaggagttcgagaccagtctggccaacatggtgaaaccccgtctctgctaaaaatacaaaaattagtcgggcgtggtagcatgcgcctgtagtcccagctactagggaggctgacgcaggagaatcgcttgaacccaggaggtagaggctgcagtaagcagaga

SEQ ID NO: 592041 - DNA, 513 bp, Homo sapiens
gttgacaatttttatatgactaataagtattggtgctggagtttaaaatcaagtctactgaactttaaggtctgattttcccccctgtgctttagcaggtcccygcttcttagcagaaaaaccttgtaaggtggtaagaaggcagcatgaaagcatctgatgcctggaaggcgtgcatacagttgaacttaatctacttcatacttttgctatgtttgtactgttattcacatgtagtactcattatttaaaaaacaaacaaacaaacagtttttattggccaagcacgatggctcacgcctgtaatctcagcactttgggaggtgagggcaggcggatcacctgaggtcaggagttcgagaccagtctggccaacatggtgaaaccccgtctctgctaaaaatacaaaaattagtcgggcgtggtagcatgcgcctgtagtcccagctactagggaggctgacgcaggagaatcgcttgaacccaggaggtagaggctgcagtaagcagaga

SEQ ID NO: 592042 - DNA, 513 bp, Homo sapiens
gttgacaatttttatatgactaataagtattggtgctggagtttaaaatcaagtctactgaactttaaggtctgattttcccccctgtgctttagcaggtccccgcttcttagcagaaaaaccttgtaaggtggtaagaaggcagcatgaaagcatctgatgcctggaaggcgtgsatacagttgaacttaatctacttcatacttttgctatgtttgtactgttattcacatgtagtactcattatttaaaaaacaaacaaacaaacagtttttattggccaagcacgatggctcacgcctgtaatctcagcactttgggaggtgagggcaggcggatcacctgaggtcaggagttcgagaccagtctggccaacatggtgaaaccccgtctctgctaaaaatacaaaaattagtcgggcgtggtagcatgcgcctgtagtcccagctactagggaggctgacgcaggagaatcgcttgaacccaggaggtagaggctgcagtaagcagaga

SEQ ID NO: 592043 - DNA, 513 bp, Homo sapiens
gttgacaatttttatatgactaataagtattggtgctggagtttaaaatcaagtctactgaactttaaggtctgattttcccccctgtgctttagcaggtccccgcttcttagcagaaaaaccttgtaaggtggtaagaaggcagcatgaaagcatctgatgcctggaaggcgtgcatacagttgaacttaatctacttcatacttttgctatgtttgtactgttattcacatgtagtactcattatttaaaaaacaaacaaacaaacagtttttattggccaagcacgatggctcacgcctgtaatctcagcactttgggaggtgagggcaggcggatcacctgaggtcaggagttcgagaccagtctggccaacatggtgaaaccccgtctctgctraaaatacaaaaattagtcgggcgtggtagcatgcgcctgtagtcccagctactagggaggctgacgcaggagaatcgcttgaacccaggaggtagaggctgcagtaagcagaga

SEQ ID NO: 592044 - DNA, 559 bp, Homo sapiens
tagaatttttcttgaacttcatctttgttctaaataggtaatattgtgagtaagctaaactctcagaagtgatatgttgcttaatgaattgacttygactactttgacaaagcaaatttgataaatgtgcttttctttaaaaatattgaataaagaaaaaatccatagtataagctgtaaatgaatgtcgatatccatcttttaaaaaaagctttttagtcttttaagaggtaattcaccctatcttatttttattattaataacttttgaattataaaatgaatagtttcattctaggtattttagaaaacatgggaacttgaaaggagaaaataagaggcacctataatgccatcacccagagaaaatcattactagcattttcttgaattccatcaattgctttttttttttttttttttttttcttttttgagacagcgtctcactccattacccagtctggagtgcagtggtgtgatcttggctcactgcaacctccacctcctgagttcaagtgattcccatgcctcagcctcctgagtaggtgaaattacag

SEQ ID NO: 592045 - DNA, 459 bp, Homo sapiens
tatacctggcatacagattcatttttagaaataaatgaacaaagaatatctgcaagctcatgatgacttaatttctcttgtttggtacctgaaaatatattcagttcaggatgaggataatttcaattatgaaagacatactattatcggaacattttgttattaracaatccttgaactaatttaaaattcccaaccagagaaaaccaaagaaaacctaaaattgccatttcagtatttttcagacgtgctgacaaaaatcccattttgttatcataagtaaattaagaaaataattttagggaattaagagacttgtttgtctcatctgaaaaagtagtattatgaaaaatcattcagagacttcttaaaatgaattcaggcccatgctgggaatcatgccccaaatttagtcccatcagagagtgccctggtactttccaaaatgcacttataatg

SEQ ID NO: 592046 - DNA, 459 bp, Homo sapiens
tatacctggcatacagattcatttttagaaataaatgaacaaagaatatctgcaagctcatgatgacttaatttctcttgtttggtacctgaaaatatattcagttcaggatgaggataatttcaattatgaaagacatactattatcggaacattttgttattagacaatmcttgaactaatttaaaattcccaaccagagaaaaccaaagaaaacctaaaattgccatttcagtatttttcagacgtgctgacaaaaatcccattttgttatcataagtaaattaagaaaataattttagggaattaagagacttgtttgtctcatctgaaaaagtagtattatgaaaaatcattcagagacttcttaaaatgaattcaggcccatgctgggaatcatgccccaaatttagtcccatcagagagtgccctggtactttccaaaatgcacttataatg

SEQ ID NO: 592047 - DNA, 548 bp, Homo sapiens
gatcttggctcactgcaacctccacctcctgagttcaagtgattcccatgcctcagcctcctgagtaggtgaaattacaggtgagtgctaccatgaccagctaatttttgtgtttttagtagaggtggcatttcaccatgttggccaggctggtctggaactcctgacctctagtgatctgcccatctcggcctcccgaagtgctgggattacaggcatgagccaccgcgcctggctcctcaattacttttatgagtaataagtcaatccctcatttaatttccatagtaatgttataaggcaggtgcagctactatgtcaatttcayggaagaaaaatggaagcattggtaagttaaataatttatatattgtatgtcatgtaaccaataaccaaatggtggagtcaagattcaaacctagtccatttgattcagactccactctcagtcaatatttaattaattttaatgtattaaaaaattgcaaaaataatactggttataccacttaacatgtttctttttaaaaccattaataccttatcat

SEQ ID NO: 592048 - DNA, 625 bp, Homo sapiens
atattgactagtgtatgacttcaagggcagaagacagccagtccacctgctctgtttgtttggtgtcctaagatagctgttacttgaaagctctgcttccctaagatgtcagatggtaataagaagacagagcaaagggggaaggaactgaagggttaaaagaaaaaaaaaaataagtcttctcctcagagttctctcaccttcctattttcagcccatttctactccttatcaggctgctgcttatccctccatgtatcacccaggcttcattagcaaggtccagaacctgggtccctggctgtggcaggaaaggcaggaaactcattcttatggaggagttttggccatctcatgtttgaaccctgagtggcagaagcttaaactcccctgtatgagttccacagcagatattatctgactatattttaacagtcttctggagagctctcttgagagcccagtgaaagatttggatgtccctcaataaagtttaaatagtctctgttccattagggataaatcactttggcatcagggactgaatacaacataytggccagccagctagggatacaaactccagctaataataataataacaagcacaataacaacgacagcc

SEQ ID NO: 592049 - DNA, 570 bp, Homo sapiens
taccatgaactatactagttactttacatatattatccatttgatcttcgcacaaccttggtaagtagatactgtataaaccttattttacagatgaggaaattgagtcacagaaaggctaagtasgttgctcaaaggttccccactgtcatttcaagagccagtggtgaacccaagtaatgtggctctattagctcaataatctaataaccactctcccctaagaaaaacaaaaccctcaacactccccataaaaatagccgccttcagacctactgtcaccctctgtcattgaatgatttggtttaatttccatctgtttgggatcttatttataaaaacataatcatcaggctatccttgaaatacctccttcccatttttctctggttataaagcctagcacattttattgtttaacaataagaaaaggaaaacagggatttctataaagatttttgcttacaatatataataaagcagaggttcccaaaacagtatggtactggtaccaaaacagaggtagagaccaatggaacagaacagagccctcagaaataataccacaca

SEQ ID NO: 592050 - DNA, 615 bp, Homo sapiens
gtttcctaaggatgggatacaactttaaaccttctatatagaagagctaggaatttattttcttaaatttcaattatagccaattgcttttttcatatccaaatactgactataacatgaggctaggcagaaaagatcaaactataatgctcaagaaaaagaaatcctgattgactaagtaattgactaaattatattagctgtaaatyacattatcacatcttctagaggcagcatcattattgttaccttgtaggaaaacatgacatgatgacattggtcattttttttttgtacaaattgtcaaaatattgtctaaatttcccattttctctgctccatttggtttcttctacatgtaacttctatctagttcatagtacactattcaaaggaaaatgagatgaaactagtctaaacatactccaggtctgaaaaatatattaaaggcaaacagaatgcaaatattttacctgttttcccagtgttatgaatgaatgtgttttccaatgatgttttatcccaaccctgaaatttaagtttcttaagattcacatttacttgtgtaagatcttcatcaatattgataggagattgttttgggctattacatgt

SEQ ID NO: 592051 - DNA, 563 bp, Homo sapiens
cacctactagatcatagtgaggcaggataggcagtcaaggaagtgaccatgttcttgggatggggcaaccatggtgatcatacagtcagcacaataaacctcagtatttgcattgtaattgagctcattcaagcaaagctatcttcaatagggcctttcccttctagagagcatgcatattttgattttacctgtccccaaactgaccctatgctcattataatagtaaaaaccacacccctgggtggagttttaagatgctaatgaracatgcaacatatgaacaagcatgtacagttactgcacatgtgcaccagaagaccacccagaacatgcttactagtaacacctcttcccacctccttatgaatcatcttttaaaactcccaaaaagggagtcttatgcttattcattatttcaacatccaagcactgaagaaaaaacgaatgacacatagtaggtgtctgatatggtttggctgtgtccccacctaaaactccctaaaagggtgtctccctagtgccagtttttgctgtctcacccttacaagcagcctgtcctg

SEQ ID NO: 592052 - DNA, 555 bp, Homo sapiens
cccagaacatgcttactagtaacacctcttcccacctccttatgaatcatcttttaaaactcccaaaaagggagtcttatgcttattcattatttcaacatccaagcactgaagaaaaaacgaatgacacatagtaggtgtctgatatggtttggctgtgtccccacctaaaactccctaaaagggtgtctccctagtgccagtttttgctgtctcacccttacaagcagcctgtcctgacttctttctctctcagggtatactgtttattctgcacctaactttcaaaatatctttatccattgtaataaaytactctatgctacacctcctttgctgtgtagctcttgtttaaactattttaaaccaagaagaactgaggtatcacttcagctgtcaacaatagtacttagtaccttgtgggctcaacatgctttcttaattttcatgattaaaaagcaaaataaaagaggccaaaataaaacttaaaaaatgattttttttttagtggaaaaaccaacaaacagaaaaataaacagaagttgaaaaaataag

SEQ ID NO: 592053 - DNA, 599 bp, Homo sapiens
tttatcactatctggcatcaggtttctattccatgctctgtcaaatcaagtatgttgaattctgattatcctgtcttctgatgataacttgtccatcaaagaatttcaggattgggaaaaaccacattagttcctgacatggtttgtctgtgtccccacccaagtctcatcttgaattcccatgtgttgtggaagagacctggtggcaggtaatttaatcatgggggcaagtctttcctatgctgttctagtgatagtgaataagtctcatgagacctgatggttttaaaagcaggcattctcctgcacaagctctctcattttttgcctgccaccatccatgtaagatgtgacttggtcatccttgccttccgccataattgtgaggcttccccagccatgtggaactgtaagtccaattaaacctctttcgtttgtaaattgcttagtckcgggtatgtctttatcagcagcatgaaaatgggctaatacagttcaattacccattattgcttgaattcactataggacactctcaataacaggtttttctacttatatttaaatacctttgatattggagtctctatctctcccag

SEQ ID NO: 592054 - DNA, 578 bp, Homo sapiens
tcagcctgagcttcttaaggacaagaatattttcctatataatcacaatatactcttcaaaataaggaaattaacattgataacattagtaccatggagtccttatgcttcgttcagatattgccaatataataacctttagggaataagtttccattcagtaacacatgttgcctttacttgtcctctctcgttcaatctgacacagttcctccatctcttctcgactttcgtaatctcaatccttttgaagactacagttattttatagaatgtccctcaatttgagtttgtctgatgtctcttcaggttatscatttttattagaaacgtcacaaaaaatatgctcttttcttctcactgtatcttagtcagtggtacaggatctctgtaaaggtaatttttgctgacgtttactttgatcacttgattaaagtatctgtcaggctttccactgcaatattattctctgtcttgtaattagaaagtattttgaggggaggtattttgaagttatagcaatatctcattcttcattaaatttatttttttcaattctcaatttatattaatttgaa

SEQ ID NO: 592055 - DNA, 556 bp, Homo sapiens
acaacaaatgcaggctctaccattcattatgagattttcaaataaatcctctgctagagtaatgggaactgacagataacatttttttggacaactattaaaactttcaaacatactccccagggttacagactaaatttcaagmaaaatggagcccaatgacaaaaaatgtaatctgggccgggtatggtggcttgcgctgtaattccagcgctaaaggaggccgaatcaggtggattacctgaggtcaggagtgagaaaccagcctggccaacatgttgaaaccccgtctctactaaaaatataaaaattagctggacatggtggtgcctgcctgtagtcccagctactcgggaggctgaggcaggagaattgcttgaacctgaaaggcagaggttgcagtgagctgagatcaccccactgcactccagcctgggagacagagcaagacaagactgtctttaaaaaaaaaatgtaatctgtaagtatggcactaaaataatttgtcctgtggggtttacattattgacttgaaaagtgacaattacatgagttg

SEQ ID NO: 592056 - DNA, 556 bp, Homo sapiens
acaacaaatgcaggctctaccattcattatgagattttcaaataaatcctctgctagagtaatgggaactgacagataacatttttttggacaactattaaaactttcaaacatactccccagggttacagactaaatttcaagaaaaatggagcccaatgacaaaaaatgtaatctgggccgggtatggtggcttgcgctgtaattccagcgctaaaggaggccraatcaggtggattacctgaggtcaggagtgagaaaccagcctggccaacatgttgaaaccccgtctctactaaaaatataaaaattagctggacatggtggtgcctgcctgtagtcccagctactcgggaggctgaggcaggagaattgcttgaacctgaaaggcagaggttgcagtgagctgagatcaccccactgcactccagcctgggagacagagcaagacaagactgtctttaaaaaaaaaatgtaatctgtaagtatggcactaaaataatttgtcctgtggggtttacattattgacttgaaaagtgacaattacatgagttg

SEQ ID NO: 592057 - DNA, 589 bp, Homo sapiens
acacccaaacctcgatgtgtttctactttaacgtaacttttgagtgaatctgatgtgattttgcacatactgaacctccacaacctgtgtaaaagccgtggctgcaacagtgtgcagcagcagygctcccggctataggcctcagtctatagtcctcagtcaggcttcggaataaaactaactttaattctttaaaagtttgatatttttattctttagttgtcacatggtattcacagataacaggataaacagccatatatacattcctcctaagggataaaggaaataaaatccctaagtcaaaatgtgtctcactatatttcaaaataatttttgtgattctgtgcctcagtcattaaaatatgcttcacttaataaaaatttgtctgaataatagaaatgatttttctatctttttgctccttgataatgattttttatctttttgctccttgaaaattcttggtttaaagagtcagaattaccatacagaaaacaaaggaaattgaaactaaataagccttccactaggcccttactgatacatgaaattggagggcaacacaggtcaacataaaattattat

SEQ ID NO: 592058 - DNA, 589 bp, Homo sapiens
acacccaaacctcgatgtgtttctactttaacgtaacttttgagtgaatctgatgtgattttgcacatactgaacctccacaacctgtgtaaaagccgtggctgcaacagtgtgcagcagcagcgctcccggctataggcctcagtctatagtcctcagtcaggcttcggaataaaactaactttaattctttaawagtttgatatttttattctttagttgtcacatggtattcacagataacaggataaacagccatatatacattcctcctaagggataaaggaaataaaatccctaagtcaaaatgtgtctcactatatttcaaaataatttttgtgattctgtgcctcagtcattaaaatatgcttcacttaataaaaatttgtctgaataatagaaatgatttttctatctttttgctccttgataatgattttttatctttttgctccttgaaaattcttggtttaaagagtcagaattaccatacagaaaacaaaggaaattgaaactaaataagccttccactaggcccttactgatacatgaaattggagggcaacacaggtcaacataaaattattat

SEQ ID NO: 592059 - DNA, 589 bp, Homo sapiens
acacccaaacctcgatgtgtttctactttaacgtaacttttgagtgaatctgatgtgattttgcacatactgaacctccacaacctgtgtaaaagccgtggctgcaacagtgtgcagcagcagcgctcccggctataggcctcagtctatagtcctcagtcaggcttcggaataaaactaactttaattctttaaaagtttgatatttttattctttagttgtcacatggtattcacagataacaggataaacagccatatayacattcctcctaagggataaaggaaataaaatccctaagtcaaaatgtgtctcactatatttcaaaataatttttgtgattctgtgcctcagtcattaaaatatgcttcacttaataaaaatttgtctgaataatagaaatgatttttctatctttttgctccttgataatgattttttatctttttgctccttgaaaattcttggtttaaagagtcagaattaccatacagaaaacaaaggaaattgaaactaaataagccttccactaggcccttactgatacatgaaattggagggcaacacaggtcaacataaaattattat

SEQ ID NO: 592060 - DNA, 476 bp, Homo sapiens
acacccaaacctcgatgtgtttctactttaacgtaacttttgagtgaatctgatgtgattttgcacatactgaacctccacaacctgtgtaaaagccgtggctgcaacagtgtgcagcagcagcgctcccggctataggcctcagtctatagtcctcagtcaggcttcggaataaaactaactttaattctttaaaagtttgatatttttattctttagttgtcacatggtattcacagataacaggataaacagccatatatacattcctcctaagggataaaggaaataaaatccctaagtcaaaatgtgtctcactatatttcaaaataatttttgtgaktctgtgcctcagtcattaaaatatgcttcacttaataaaaatttgtctgaataatagaaatgatttttctatctttttgctccttgataatgattttttatctttttgctccttgaaaattcttggtttaaag

SEQ ID NO: 592061 - DNA, 589 bp, Homo sapiens
acacccaaacctcgatgtgtttctactttaacgtaacttttgagtgaatctgatgtgattttgcacatactgaacctccacaacctgtgtaaaagccgtggctgcaacagtgtgcagcagcagcgctcccggctataggcctcagtctatagtcctcagtcaggcttcggaataaaactaactttaattctttaaaagtttgatatttttattctttagttgtcacatggtattcacagataacaggataaacagccatatatacattcctcctaagggataaaggaaataaaatccctaagtcaaaatgtgtctcactatatttcaaaataatttttgtgattctgtgcctcagtcattaaaatatgcttcacttaataaaaatttgtctgaataatagaaatgatttttctatctttttgctccttgataatgattttttatctttttgctccttgaaaattcttggtttaaagagtcagaattaccatacagaaaacaaaggaaattgaaactaaataagccttccactaggcccttactgatrcatgaaattggagggcaacacaggtcaacataaaattattat

SEQ ID NO: 592062 - DNA, 531 bp, Homo sapiens
cgaacaaacaaaaaccacagagattgaagtaaaggaggcccagcaaggggaagaagcacaatgcgtcctacacaaagcccagacagttccagctcagacagaagaagaaggggccaagtttcctcattctgagctgctaggacttgcccatcccattgaagcttctactagatgctaccagcaatgatacttgtgaagctggactcagkaaagaatctatgcaattttaactttttttttaataggggagacacattagcatttagttttactagcagagaaaataaacaatgattatctaattgcgatgctattctgtagccacatcttaatttttttaagtccatactacataagagttgcgaccaaataaaattgttaagcatatttatttatcttttgatcaacaaacacacattgtatatatttattgtatacacatgtggttgtgaaatatggatacacggtggaatgactaaattgagctaattcaaatatacgttacctcacatccttatctgttttgtgtgt

SEQ ID NO: 592063 - DNA, 619 bp, Homo sapiens
cctatttcaaataaattagaaaaaatacaggtaggcaaaaatactttaaaaatcacttgtaatcctatgccctacaaataactgctattaacagttttgcccatgcatgtatgtttctctagatgttatatatttatatataataaatttggactttacttaaattcaatgacactgtttggtaacctatttctttacatgataatgaatcactgacatattctcaatttaataaatattattttacagcatcataacagttcacttaaagcattctctactttttgggtgctaaaattaaaagttgacaatgtcagaagatttatttcttgagcttaaacratatgcatgaggatagcttctattaaactagctttacttgagcttcaggtataaaataaaatctgtggatgaagtaccacatttttttcctgtcaaccttctataatttcaacaaaacactaagcacaaactcattgttattgtactacaatcattatagttacctagttttatgtctataacagtgaatttgttccatcataagagaaaaacccaatgttgactgctcagtgataataggaacagagacaaaaatatcaacgtatatacaaataac

SEQ ID NO: 592064 - DNA, 592 bp, Homo sapiens
gttgacacatagtaggcaagttaagtacttcagctaccaagataatgaaaaacaagaaccatagcaaaacaggaaacgcaacaaactcacagatcatcttattggccatgatgatcagatgcactgggtctgcattttgtgggtaaaccttgaaatagtcttattttaatttttatcttatttctaaaacagcacattttgcttagataaaattaaacccaaatgtcactgtctatccattaagcaggacaatctggcagctttatgtgttaacaacctgttctaaaataggtgcgggtcatgttaagttgctgtcaggatgctgactgattcactgtgcacttatgtctggacaaggcagagtttcttgactcctttcccagtatattgactgaaaattcatttttggcatgaattcctttttttgttttttttagcyggtctagaaataagaaacctttattcccaagaagcacatttactataataaattgataatttttcaatggatcttcaatgatttaagacattttcaatttgccagtatcttttataagccacttgctattgctcattaaaactacttaagctt

SEQ ID NO: 592065 - DNA, 622 bp, Homo sapiens
aggaaaactctacaaaagcttttattgttgtcattagctaagttattgtatcattcttatttttattcgatgtctagaacttctgtggctttaaatagcatttaataatttaacwttattttccatgactatgaatgccattcacttctaataacatatactagaatcttgacattccttattttcaggtatttcctgcttataaaacagatgaaacattggttttagaaataatcatatttttcattataatgccaaatttatgttcaagcctatttcaaattcattcacttctctccatttatcgtgcctctacccaaactcaaaccaccaccatcttatgaaataatgcatttgcctcctaacttgtgtcccttgttttgtcccaccttctcttttttcttcccttccttttttagtcttttctttcttcatttagttaattgataccttcaactaatatatactgattacatactgtatgccaagcaccatttaatagcttactgaaatactgaatagctcattaaaataaaaagtgttccatatatatgtttcatatatatatatataggcacttgagatgcactggtggaccccccagccatccaaaccacaaaca

SEQ ID NO: 592066 - DNA, 627 bp, Homo sapiens
ggagttgacaacaggtgacctgttgtataacctgaccatataaggtaactatgtggtcaggttatagttaactaaccatcactaatacatttcactggcaccttgaagagaaattattctacagacaaatgattaacccttcttaatataaaacatggtatcctcttcctctatatttatttggcaacacttgacacatttggttagagcttagtatgttcaaaattaaaatcattggttcaattttcacatcagccaaacaacttcttccattctctactcagagtctgaatatctaaatttgattattattttgcagttggatagctatatttgcaagtgtatcagtttaagctaagagcatatagccttcaaatggtggctaagttttattttcatttgaaaaaatagtaacttttagaaataatcaaggtaattcagaatctcattaaattacacatttgaaaaagaaaggtgtttgatatttttaattagcttttattaattttatttgtgaagtttatttatttgtgaaacttatacatkgaaaagctactgtagatataaaataaattagatcctaaatatattaatttacataatttcaaaacaccctgagtttaggcc

SEQ ID NO: 592067 - DNA, 627 bp, Homo sapiens
ggagttgacaacaggtgacctgttgtataacctgaccatataaggtaactatgtggtcaggttatagttaactaaccatcactaatacatttcactggcaccttgaagagaaattattctacagacaaatgattaacccttcttaatataaaacatggtatcctcttcctctatatttatttggcaacacttgacacatttggttagagcttagtatgttcaaaattaaaatcattggttcaattttcacatcagccaaacaacttcttccattctctactcagagtctgaatatctaaatttgattattattttgcagttggatagctatatttgcaagtgtatcagtttaagctaagagcatatagccttcaaatggtggctaagttttattttcatttgaaaaaatagtaacttttagaaataatcaaggtaattcagaatctcattaaattacacatttgaaaaagaaaggtgtttgatatttttaattagcttttattaattttatttgtgaagtttatttatttgtgaaacttatacattgaaaagctamtgtagatataaaataaattagatcctaaatatattaatttacataatttcaaaacaccctgagtttaggcc

SEQ ID NO: 592068 - DNA, 631 bp, Homo sapiens
tgccacatttaattcattttgaacataagtaagttatttattagggtgtgtagttcttcaggaaaactaacatggattttaacaaatgtgccaatcagtttattttctagacttgtcactacatatttaataaaagcagcataatattactccagttattcaattaatgtgatatttgtaagcaaaaaacataatttaacttattcttttttatcatgcattagtcacattattaattattgatgaaattgaactctatgaatagtgtttattttgataataacaaatagagataaaatattcacacataagagacttgtttttaattccaatatcacattgtagaattaaaaccgaggaatcttgttctgtgaaaaatctatctgcaaayataatatataagtataccattacatcactgtcatctttaaaatgtaataacttactattccatatgtgtactgaatacaactcaagtttatttcacaaaattatggatcataaacttcattttaaaaatagtgtgagcaaaacctgaccatttattattttaattgatactaggaaacgaagaataagcaagccactgtccacatgatgtcaagccagtgaatgtctttaacatctttga

SEQ ID NO: 592069 - DNA, 459 bp, Homo sapiens
tgcttaaaatttcattcaaaagttagcaacagaaccctggcttttctttcaatttgtttgataaactaataattttgaacaattcaaagtggaaaaatctagtgctttamcaacagtagaagcctgcaataaaatgcatctctcccattttttcattgtacaaataatgaacatgacaacagctttttaagtgaataaatgatactgtagttgatacagtctaactagagaatttctagcaaattcatacctgccagaaaaaaatatgcatttttatcaaatgagataaattcattttaaaaatcacaatgttacatggtacctaactataataacacagttgcccaaccttaattaagtgatgctatcataattggtattgctctagtactaagtgcaacagcagtattctatgcaagcaacggactggacagtcttgttctcctctatattcccagc

SEQ ID NO: 592070 - DNA, 578 bp, Homo sapiens
caacagcagtattctatgcaagcaacggactggacagycttgttctcctctatattcccagcagtcagcccagtgcatgacatgtaaatgttccatattaaacaaatatatagaactttcaaaataggaaatttgtggtagacagctgttatctctgtttattttttttttctttctcctacatcaaaaagtaaatctgctgatttttcaacattacactgcatggctatggaatcttgaagaaatacagaaagcagtattataaggttttgcttcattgtaggcatgaaggcagatattatcaataaacattgatcaataaactaaacaaagaaattaatacactatcttcttgacactggattgtaataggtaaaagaaagttcaggaactcaaacaactcagcagtaaaaataatagtaataataatcatttgattaaaaaacagacaaagatctgaatagatatttctcaaaagaagacatacaaatggcagataggtaagtgaaaaaaatgctaacatgactacttatcagagaaatacaaatcaaaaccacaatgagatttcatctcatctc

SEQ ID NO: 592071 - DNA, 578 bp, Homo sapiens
caacagcagtattctatgcaagcaacggactggacagtcttgttctcctctatattcccagcagtcagcccagtgcatgacatgtaaatgttccatattaaacaaatatatagaactttcaaaataggaaatttgtggtagacagctgttatctctgtttattttttttttctttctcctacatcaaaaagtaaatctgctgatttttcaacattacactgcatggctatggaatcttgaagaaatacagaaagcagtattataaggttttgcttcattgtaggcatgaaggcagatattatcaataaacattgatcaataaastaaacaaagaaattaatacactatcttcttgacactggattgtaataggtaaaagaaagttcaggaactcaaacaactcagcagtaaaaataatagtaataataatcatttgattaaaaaacagacaaagatctgaatagatatttctcaaaagaagacatacaaatggcagataggtaagtgaaaaaaatgctaacatgactacttatcagagaaatacaaatcaaaaccacaatgagatttcatctcatctc

SEQ ID NO: 592072 - DNA, 424 bp, Homo sapiens
cataaacatattctggcttcaggtacgtccttatggtcctatgtcattctcctactgcaaagatttagagccaggcaggaagaggcgtctgaataaattgggcagcatgacttacccttatctatatcctagagatgaaccactatatcaaagctgtttgttggtgggttccccctacaaacagatacagagactctcaagatctctttgccaattgtacatcatttacatrtcatgtggtaagttagtctctggtgctgaggacttcatggagtagaatgggaagagaaatgtataaacaattaccatagaatgggttctaaaccatcaatgggatccaatccaataaatagaagaggcacatcaaaacagcgtgatttcacaaaaggagtgaccttcctgggacagacagaaaggtatcaga

SEQ ID NO: 592073 - DNA, 377 bp, Homo sapiens
tgatgatggaagcacaggtcacagagggagattcgaatatgctttgcttctggctttgaagatgcagttaggagccatgagccaaagaatagcagtggctttagcaactgggaaaggcaagggaacatattctctccagaacctccagaagggatgcagtcctgctggcaccttgactttagccttaatagacctattttggacttctggcccccagacctcttagttagtagatttgtggtgtattaagccactcaatgtagggtagtttgtaacagcggcaagaagaaatgaacatgaagccagaattggtggcccacacctataattccagctatttaggaggytgaggcaggatggtttctttggcccagcag

SEQ ID NO: 592074 - DNA, 526 bp, Homo sapiens
ttaaggttcatctatgttgtagcatatgacgggttttcttccgtttttcaagggtgattaatattttattgatacatataccaaattttctgtgtccattcatccattaatggacatttaggttgtttccatctctcagctattgtgaataatgctgtagtatctaaagtaggcaaactcttagacacagaaaatagaatggtagcttccaaggctggtggagagggaaaaatgagaagttgttcaatggatatagagtttcagttatacaagattaagacattctagttagatcctgtacaacgtgcatataattaacaattctatactgtacacttaaaaatttaagaaggtagatttcaagttatgtgtttttatcacaataaaattttaaaacatctacwctatatcaattacagaatcattgctgttaatgtgttcctttttaaaaatgtacatatgtccttatgaaggttggaaattcaaagtccagcataaattacgttgatcagataatcagtgaata

SEQ ID NO: 592075 - DNA, 602 bp, Homo sapiens
atatgacgggttttcttccgtttttcaagggtgattaatattttattgatacatataccaaattttctgtgtccattcatccattaatggacatttaggttgtttccatctctcagctattgtgaataatgctgtagtatctaaagtaggcaaactcttagacacagaaaatagaatggtagcttccaaggctggtggagagggaaaaatgagaagttgttcaatggatatagagtttcagttatacaagattaagacattctagttagatcctgtacaacgtgcatataattaacaattctatactgtacacttaaaaatttaagaaggtagatttcaagttatgtgtttttatcacaataaaattttaaaacatctactctatatcaattacagaatcattgctgttaatgygttcctttttaaaaatgtacatatgtccttatgaaggttggaaattcaaagtccagcataaattacgttgatcagataatcagtgaatatatctataaatgaatactcatagaaatggatatttgattgggaaaataggcagaatgactagggagcctggtaacacttggcgagaaggaggacccaga

SEQ ID NO: 592076 - DNA, 620 bp, Homo sapiens
ggcatggaagtgcgtgcctgtagtcccagctaaacaggaggctgaggtgggaggatcacttgagcccgggaggtggaggttgtggtgagccaagattatgccactgcactccagcctgagtgacagaggcagatcccttctcaaataataaaaaaaagcacaatttaaacaaaagatttgtacaaaaagcagttcacaaaagaaatggaaacaataataaataccaatgtaaatgttcaaccatattattcatcaaataaatgtcaactaatgtattagttagtgrtgtattagagtggtgtttctgttcttttggtatgttaagcatttaatgctgggaagggttttggcaaaggggtccttccgtatactgctgacaggagcaccaactggcacctgcttttcagagtgcagtttgacaatgtgaatcaacagtcttagaaatatgcctaactttgtggcagaacttatccttcgaaaaattttttctaaaaaatgattagatagtaggagttaaggacttggaattcagacatagatctgagtctcatgtcaatcaaccatttactagccctgtgcacacgatcgggttgttcaacactttctcatttaacctatta

SEQ ID NO: 592077 - DNA, 554 bp, Homo sapiens
gagcatttggggcttgatggacacttcatgagtagagattttggcttttattctgagttaaacaagaaattggagagtgacataatctgacttacatttgaacaaaatcaccctggctgatttgtatggtraagtagggagaccagctgggaagccagtgaaataacccaagaagacatgatgcaagtgtggataggtggtagcagtggatggagatcatgaaaaaatgtaacccaggagcaatactgacatttgcaatggaagattatgtgtaggctgtaagagagatggaagaattaaaagtggctccaaggtttttgtcctaaacaactgagtgcagttgttatttattgggataaagaagacagtggaagtaggagttgggatgggaggaagatcaggagatcaagtttgaacatgtcaagtttgagaactgtgttacatatctaaatggatagttgaatatatgacactggggttcaggtacaacttctggtctagaaagacaaatttgggagttatcaatgtagagaatacagggatgagatagtcat

SEQ ID NO: 592078 - DNA, 554 bp, Homo sapiens
gagcatttggggcttgatggacacttcatgagtagagattttggcttttattctgagttaaacaagaaattggagagtgacataatctgacttacatttgaacaaaatcaccctggctgatttgtatggtgaagtagggagaccagctgggaagccagtgaaataacccaagaagacatgatgcaagtgtggataggtggtagcartggatggagatcatgaaaaaatgtaacccaggagcaatactgacatttgcaatggaagattatgtgtaggctgtaagagagatggaagaattaaaagtggctccaaggtttttgtcctaaacaactgagtgcagttgttatttattgggataaagaagacagtggaagtaggagttgggatgggaggaagatcaggagatcaagtttgaacatgtcaagtttgagaactgtgttacatatctaaatggatagttgaatatatgacactggggttcaggtacaacttctggtctagaaagacaaatttgggagttatcaatgtagagaatacagggatgagatagtcat

SEQ ID NO: 592079 - DNA, 550 bp, Homo sapiens
ttgaacatgtcaagtttgagaactgtgttacatatctaaatggatagttgaatatatgacactggggttcaggtacaacttctggtctagaaagacaaatttgggagttatcaatgtagagaatacagggatgagatagtcatgcaaatagtgtagatgcaaaacagaagtagcccaaggaagaactctmaggactacaatgtttagaagttggggggatgagaaggaactagaaaaagagattgaggaagacagtggagtacaatgtatgtggctagtgagatggcaggaaagccagacaagtatggcatcccggaagtcaggtgaacaaagcatctccagaatgacacaatgataacaattgaaagctcttggtaggtccataaagtgaggaccaagaacactgaatattggatgtaccaacgtcaaaggcactggtgagactgataaggtatttttttttgttttggaatggtgggagcagaaccctttttaaactgagttcaggagcaaaggacacgagagaaaatagatagtgactatagaaaac

SEQ ID NO: 592080 - DNA, 592 bp, Homo sapiens
gtaataaaataatggattttaagcttttaataacatagctaatattctatcaaacatcactatttcaacaagtagtctgttttttagtgtctcttaattaacrtctgagcactgtaattactttcctcagatgtgttgttttctcttaattatgtatttcttaaattataacaattacattttgtcctggcatattaaaacaaacatttcaaaataatttcttaaatcacctattattcaatattagtcaaattcaccctaagttaaaaataatggctattctttcagtgtaagcaatcacatattttggtggatccattatcctaattctaattctgacagggataagtgttttctgaattcgattttcctattgtttttcacagaactgggcagttacagaagtttgtgtaaataatttccatttgtctattagtctcataactatttcagccatcttttattgaacataacactacctttgatagtattcccctaaacgtttgccccatcttgatagacttttatttttcacaatctatttttttcacagtcccttactgttttacatgtcttactggggagtcttcat

SEQ ID NO: 592081 - DNA, 570 bp, Homo sapiens
attagaccaaatattgctgcttttagctattatgtaataaaataatggattttaagcttttaataacatagctaatattctatcaaacatcactatttcaacaagtagtctgttttttagtgtctcttaattaacatctgagcactgtaattactttcctcagatgtgttgttttctcttaattatgtatttcttaaattataacaattacattttgtcctggcatattaaaacaaacatttcaaaataatttcttaaatcacctattattcaatattagtcaaattcaccctaagttaaaaataatggctattctttcagtgtaagcaatcacatattttggtggatccattatcctaattctaattctgacagggataagtgttttctgaattcgattttcctattgtttttcacagaactgggcagttacagaagtttgtgtaaataatttccatttgtctattagtctcataastatttcagccatcttttattgaacataacactacctttgatagtattcccctaaacgtttgccccatcttgatagacttttatttttcacaa

SEQ ID NO: 592082 - DNA, 548 bp, Homo sapiens
taagaaccacttaaaaggtataacgctattagttactaagctaattattcagttaatgtaaaattttcttgaatcaggcagtgagttaaaagagatagaattaagaaaaaactttaaaagtgaaaacatgragttattttattaatttaattattttggactgcttaataatattcaaaatgattttatagttatgaaaaccatgaatttgtatatgttgtcagtaatttatattataaattgtctattttttcttattttgttagatgttagcctgataatttctatcagttaacactaaaattaacattgagttaacactatagcatgcgtaacctctagcctgtcaaaataataaaaaataatttgatgttttagacatgtaattatttatattattccaccctacttagtactgcctcacactgctttcttattcaatgtagctatgatttagatttcttttagaattaaataaattggcttctattatttttaaattagtaaaaacatatcatacctctctttcttttgatttcttaaagctt

SEQ ID NO: 592083 - DNA, 566 bp, Homo sapiens
aaagcttcagttaccaagaatttgctgataaaaaaaaactggaatccatctgttctctctcttagatgagtggatctgaatactaaaattgaattagtcagtcaagcttaagaaacactagacaaaggtgtaattctaccttcacacttatagaaggatcttgcktagaagcttttataattagataagaaaacagaaatgatttgtcacatgtaagtcattagtcctagtaaatgtccttcaaaccccttgatgttatcctgcacagccaacctcctttcataagtagactagtaccttttattgacagtcaggtattttggtaatttcttttattaattggtctgcaagtaagtgagactaacattcattttgctttctgatttttacacgaaaacatgcatattcaggtgatcaagagggaatctttgagaactgaacaagtgaaataaggagatgcccttgaatcaccactcttttgacactcaaaacaggggagtttggatctcctggactaggtctgattttgtattattttatttgttaaaaataaaccatgttggact

SEQ ID NO: 592084 - DNA, 572 bp, Homo sapiens
aatctcactttccatctaaaccttcaagctacaaggcatttatcctaatgagttttaatgtaacatttgttcttayatagtgacacacctaaatctttatttttttctagtaaattagttcctttagataaaattcttgaatggcttctcgctgcaattagaattacattcagttatgttagcaagggctttaagacctttttaatccctgacctggcccccaacctacttcagtagcttcctttcctgcaactctctccctcacccaccaggatccagcccacactggtcctctccttcacctctgaagaagccctgtcagtagcttttcagggccttgactcttgccattccccctggcttcctgcctccttcccatcacttttgcattggcccaaatgccgctccctctgagttttcccctgatcatgacagctaagtgtcaggctatctcactaagtcactactctttgcctttttgtttgctctgtggcacatcactatttgaaatactattatgtttttatttgttttatatgtttataattggtctcttcttatcagaatataag

SEQ ID NO: 592085 - DNA, 603 bp, Homo sapiens
atatatataattatatatawaattatatatatatataaatcccaaagttttgggattacaggcatgagccaccatgcctcgctggctacaatcttaaagatgatctagtgaacctacccaaatggtaaacaggagaaaccaagtcctaggtgggtaattgacatgcccaaggccatatagcaaatgccgggcagaactaggaaagagatctggattttctcactttgaatttgttctgtcttttggctaaaatctgcttcctctgaaagtttatacaaaaaataaggggaatatcttgagttaggtaaattaggtgaaatagcagatttattataaaactttgagattaatttctcattaaaataggttagaaacatacttaaatattttcttctaagaattttatagttcttacactgatgtctatggtccctatgagttcatttttgtgtatagtgttagaaaaaggtttaatttgactttttgtatgtgaatattcaattgtcctagcaccatctgttggaaggactattctttgcccattgaaaagtctttggatccttgtctaaaatccactgatcgtaaacataagatttctgggtt

SEQ ID NO: 592086 - DNA, 576 bp, Homo sapiens
ttgccttatctatagtattttaaagaacacatcctgtaaattgttctgcattctagaaatacaccataaaatcttaagtttcagagctagtctgcatgcatttgataaagggatatattcaattattggataagacagattacatatgattttatagatacagttttaaaaataggccagaattttcccctaatcttgtttgatcttatttacttcactaattatgttacttgataatgttggatgtcatattcatattgttttatcctaattagtgggagaacacactcttgataattaaataaaactaattagtgcactgaagagaaacttgctaagctttagtcaayaattttaggtttagcatctcattatatatatccttctataatagcatagtctagcaagaacgtatcaatgtcactacctggtaagacagatagatggattcctgatattttcttttaacataaatctaatgaaaactaaaaagcagctactataattgagaacagataacagttcatatatatgacagcactaatgactatagtgacctatggattcattattcat

SEQ ID NO: 592087 - DNA, 427 bp, Homo sapiens
agttaaaaagaaatcccttgaactaataaatgagtttatcagggtcacaggatctgatatggtttgggtgcatcyttatccaaatctcatgctcaattgtaatcctcagtgttagaggtggggcctggtgggaggtgattggatcatgggggtggagttctcataaatggcctagcaccatcccccacttggtactgtatggtgagtgagctctcatgagatctggatgtttaaaagtatgtggcactacccccttctctctctcttcctcctactccagccacgtaagacacctgctcccactttgccttccaccatgagtaaaagtttcttgaagcctccccagaagcctgtactgcttggttttcacactgttattaaaaaatgtctgagactgggtagtttataattggctcatggttctgca

SEQ ID NO: 592088 - DNA, 427 bp, Homo sapiens
agttaaaaagaaatcccttgaactaataaatgagtttatcagggtcacaggatctgatatggtttgggtgcatccttatccaaatctcatgctcaattgtaatcctcagtgttagaggtggggcctggtgggaggtgattggatcatgggggtggagttctcataaatggcctagcaccatcccccacttggtactgtatggtgagtgagctctcatgagatctggatgtttaaaagtatgtggcactacccccttctctctctcttcctcctactccagccacgtaagacacctgctcccactttgcyttccaccatgagtaaaagtttcttgaagcctccccagaagcctgtactgcttggttttcacactgttattaaaaaatgtctgagactgggtagtttataattggctcatggttctgca

SEQ ID NO: 592089 - DNA, 427 bp, Homo sapiens
agttaaaaagaaatcccttgaactaataaatgagtttatcagggtcacaggatctgatatggtttgggtgcatccttatccaaatctcatgctcaattgtaatcctcagtgttagaggtggggcctggtgggaggtgattggatcatgggggtggagttctcataaatggcctagcaccatcccccacttggtactgtatggtgagtgagctctcatgagatctggatgtttaaaagtatgtggcactacccccttctctctctcttcctcctactccagccacgtaagacacctgctcccactttgccttccaccatgagtaaaagtttcttgaagcctccccagaagcytgtactgcttggttttcacactgttattaaaaaatgtctgagactgggtagtttataattggctcatggttctgca

SEQ ID NO: 592090 - DNA, 459 bp, Homo sapiens
tcaacatttccatattcacaagtctttgaactctgctacgtacagcttactcgaaaaattccagcctcatagcctcattagctgtaggtcaccagtgcccaggcttcagttaatcacagccaggtgctccagccaacacattaaactatgaatcctctgtgagcaactctatctataaatgtggccagatatcatcttatgtttcatctaacacacttagaagcattgcctttgtatgctccctagacccctaccaatacaaggggacaagatgtctcaactcattcagtatgttttttatytcctctcagagccagcctcacactctccctttgggctttgctggtatttaactcttaccgtgggtctggaggtaaatgagggttggcgaggctgtgttggggaggattgattccccttgtgagagaactgctctaggttaagtcaacaaaagaaatt

SEQ ID NO: 592091 - DNA, 597 bp, Homo sapiens
ttgccattcacttctactgcatcccaaaccaatgataacctgagtaattataatattgctgcatactacagagtacactagaggatactgtgtgctgcattcagtagaggtcagcctcctggaccaaatgcatggcagaaaaagaccaaacacatggcagaaaagaatggaaatgaggcagggaggccaagggagaataaccggcctactggtctttctcttgtgcaaggatgtatgcacaataaattcatagaagtggactttttggatgaaagggtagatgcatttgtaatttttatagaattttcaaacttccccccgtaagggttctattatagcaggttatacttcctccaatcctgtgtgtgactgccttctgccccacagcttgtccaccgtgtgttaccaaatrttctggacttttatcaatatgagaagtgaaaaatgttatctgtgtagtttcagcttgcatttcttttttctatgatggggtatgacagctttcatataaatccagttacaagtggtagaaaatgcagctcaattggtttaagaatagaaataaatattcagataaaataaagtcagtaggtgcat

SEQ ID NO: 592092 - DNA, 568 bp, Homo sapiens
tgtcttggccctgtccttagacaggctcctttccccttcattctcgcagctccaatctcwgcagagagatcttgcttgccctgagtctctctgacctgaattgaacaggatgcagtgttctgactggccaggcctgagtcatacaaccacttctggagccggggatagagccaaaatcactcaaactaggtgaattgagagatgtgagaggcatggattccaggtgtccaacagaagatcaaagtgacattaaatgtagaaagacaactaagcgctggcttggctaacaacagaggttttagctgtaattcacaccttcaacaacacactgtctcttctactctcacataacccttcaaaaacgccagtgcctacctaatgaagccataattagataccatggaaagtgcactttcctcttctcagagggagaccacacaaagacttatctagttatagctccaagtccaggatttctgggtgattcttcttagtcaggccctggtgtggtggttccttctggctcagcaaactatggctccaatataaccacaaatgcaatacatga

SEQ ID NO: 592093 - DNA, 568 bp, Homo sapiens
tgtcttggccctgtccttagacaggctcctttccccttcattctcgcagctccaatctctgcagagagatcttgcttgccctgagtctctctgacctgaattgaacaggatgcagtgttctgactggccaggcctgagtcatacaaccacttctggagccggggatagagccaaaatcactcaaactaggtgaattgagagatgtgagaggcatggattccaggtgtccaacagaagatcaaagtgacattaaatgtagaaagacaactaagcgctggcttggctaacaacagaggttttagctgtaattcacaccttcaacaacacactgtcycttctactctcacataacccttcaaaaacgccagtgcctacctaatgaagccataattagataccatggaaagtgcactttcctcttctcagagggagaccacacaaagacttatctagttatagctccaagtccaggatttctgggtgattcttcttagtcaggccctggtgtggtggttccttctggctcagcaaactatggctccaatataaccacaaatgcaatacatga

SEQ ID NO: 592094 - DNA, 568 bp, Homo sapiens
tgtcttggccctgtccttagacaggctcctttccccttcattctcgcagctccaatctctgcagagagatcttgcttgccctgagtctctctgacctgaattgaacaggatgcagtgttctgactggccaggcctgagtcatacaaccacttctggagccggggatagagccaaaatcactcaaactaggtgaattgagagatgtgagaggcatggattccaggtgtccaacagaagatcaaagtgacattaaatgtagaaagacaactaagcgctggcttggctaacaacagaggttttagctgtaattcacaccttcaacaacacactgtctcttctactctcacatawcccttcaaaaacgccagtgcctacctaatgaagccataattagataccatggaaagtgcactttcctcttctcagagggagaccacacaaagacttatctagttatagctccaagtccaggatttctgggtgattcttcttagtcaggccctggtgtggtggttccttctggctcagcaaactatggctccaatataaccacaaatgcaatacatga

SEQ ID NO: 592095 - DNA, 489 bp, Homo sapiens
tctcccacccctttaagcataaattacagcaagttcttcatattctttccctgtatttttctaaacagctatatattatagagaactttccattatcagtttctaaaattttttttattccttttaatggattcagagttttccaccatgtaaatgaaatcacttctccagtgatgaacgwttgatgcttattgtttattctttggaacaatgctgaatagccttgtacatgcctcatttcacaggattgagtatatatctgtgggacaaattacacaaaagcataattgctgggtcgaaagatacatatatttgcatcttaacaaatatgtttaatttgcctgcttcaggagttgttaaactgctcatcagtaaaatatgagaaggcctatttctccacagcttggccaatataatgtgttatcaattttaatttaactttttgccgatataataggtagaaaatgtcatctcatttttaatttctac

SEQ ID NO: 592096 - DNA, 488 bp, Homo sapiens
tagtttgaaaatcatcggcatgtaaatgctaactgaaaccagaagtagatgagattggtcaaggtgaatgtgcagagcaggaaataagagtctagactctgcaatggtcttccaccaagcaatccttaaggctattattgtgaaccctgrttggatgctagaatcacggggagcttttcaagaatagtcatgccaggaccccatcacaaactaatgacatcagaactctgggattgagacccaggcatcagtattttttccaaagctcccaggtgatcatggttaagctctgacttaaggagtaaagacaaaagagagtttggataaaaatccaggtaatggctgggtacaatggctcacgcctgtaatcacagcactttgggaggctgaggtgggtggatcacttgaggtcagaagttcgagaccagcctggaaccaacatcgtgaaacctcatctctactcaaaataccaaaattagccaggtgtg

SEQ ID NO: 592097 - DNA, 482 bp, Homo sapiens
tgggcatcacccaaaccaatctgcctgttacctgctaattttcccctatctctatgcaatgttttccgcctttgctaggcctagaaataatctggagtagttgttaaagacagattttagctacttccagagattcctgctcaatagatttgggggtgaagttcacttgtatgtgattttaaaaacagtctaaatgatcccartgcagttggtccatagatggcactttgagaaataactgttctcaatcaggcatctttgcaatgaaacatcccatcacctctgctattttatttgggatacctggaattcctctttgcgctcattgtttactttaaatcacagtttaatactaatttcttccaagaatccttagctattaattttactccatatttattagagaatgaagaatggagcacacttcttcagcatttttatagagatgcctgtatgattatatgcatggtgttatcctgtgc

SEQ ID NO: 592098 - DNA, 660 bp, Homo sapiens
tgttatgtcacataacattatttctattttccagtcctccatcactactttagactgtgatccctctaaattcaggaatcctatctctgaccagcatggtgtttaaccctgaaagttaccctgaaactatatgctgagcgaatagataggtgaacaaatatgagagtgcatggagaatcaagaaacagaaaaattgatgggaatactaaaagcaagcagtgtagtggaaaacaaagatgtgataaaaagaataaagtaaaataaaaaaacaggatttcacgggaagagaatcattagagcctagaggacaatgtgggtgatttaatcacaaatagttttaagaaacatgagaaaaagagtctgcaggcaatttgaaatagactcttaagtacctgacaaacctgagaaaaayaggtagggaagaaatcagtgcattgaaacccaacaaaacttcaatgtaccatcccttttcaatcacttggaaggaaaatgatgtgtttagtacatcctccttcttcatgtttggatctttaaatagggtatttggattcacagactgtagcctcctcagattgtctctcctcccagcacactgccgtgctttttaaatgacaccagacttccaagcaagattgattgtaaatttgaaaaggttatatg

SEQ ID NO: 592099 - DNA, 444 bp, Homo sapiens
tggtgaatttttgtaaatgatgtgcgtgtgtttaaaaagaatgtgtattctttaactcttgggtatgggattcttctataagtaaattagatcaaactcattaatttttctgaaatatatttcaaatatttactatttttgtttgctttattcattaattatggaaataattatattaaagacttacaatataatcgaggatttgtcartatttcattgtaatttaatcaattttttattattttaggtttattattattattattaatatcttgaggcagagtgttaccctgttgcccaggctggagtacagtggcgtgatcttggctcactgcaacccccacctctaaagttcaagtgattctcatgcctcgcttggccccctgagtagctgggattacaggtgtgggccaacatgcccagctatttaggtttattgttttt

SEQ ID NO: 592100 - DNA, 444 bp, Homo sapiens
tggtgaatttttgtaaatgatgtgcgtgtgtttaaaaagaatgtgtattctttaactcttgggtatgggattcttctataagtaaattagatcaaactcattaatttttctgaaatatatttcaaatatttactatttttgtttgctttattcattaattatggaaataattatattaaagacttacaatataatcgaggatttgtcaatatttcattgtaatttaatcaaktttttattattttaggtttattattattattattaatatcttgaggcagagtgttaccctgttgcccaggctggagtacagtggcgtgatcttggctcactgcaacccccacctctaaagttcaagtgattctcatgcctcgcttggccccctgagtagctgggattacaggtgtgggccaacatgcccagctatttaggtttattgttttt

SEQ ID NO: 592101 - DNA, 641 bp, Homo sapiens
tttgagtgtatttttataagcagcagagctgatattttaaaaattcgtttgaatatgttcttttaattcgtgagtttagwtcatttacatttattatgattatgaatatatttggattgatttctaccatcttattctttctatttagcatacttttttccttcttcttaggattctatttaattgacagttttttaatccatcagctgtctgtggtttaaaagttatatattctatttctcttcctttagtagtgttttgaacttttaacgtgaattgtcaatataacaatgcctaaactaaatcaatattttaccttttttctcacaattaaaaggattttaaaatgctttaactccaaacttgatttttttaactttctattcttttctagtgttttcattccatcctgtttttatattttcaaatctgtctattgtcattgcaatgcttagttagataccaatgtttataaatgtggttgctcatcactgcttcctttatcccactccttcatgaattttattaccttttttatggagcacatcatttactagttctctttagcaagggtctttgagtaaaaaagtttttagtcattgtttcaaacaggttcttaaataacaatttagctgagtata

SEQ ID NO: 592102 - DNA, 641 bp, Homo sapiens
tttgagtgtatttttataagcagcagagctgatattttaaaaattcgtttgaatatgttcttttaattcgtgagtttagatcatttacatttattatgattatgaatatatttggatwgatttctaccatcttattctttctatttagcatacttttttccttcttcttaggattctatttaattgacagttttttaatccatcagctgtctgtggtttaaaagttatatattctatttctcttcctttagtagtgttttgaacttttaacgtgaattgtcaatataacaatgcctaaactaaatcaatattttaccttttttctcacaattaaaaggattttaaaatgctttaactccaaacttgatttttttaactttctattcttttctagtgttttcattccatcctgtttttatattttcaaatctgtctattgtcattgcaatgcttagttagataccaatgtttataaatgtggttgctcatcactgcttcctttatcccactccttcatgaattttattaccttttttatggagcacatcatttactagttctctttagcaagggtctttgagtaaaaaagtttttagtcattgtttcaaacaggttcttaaataacaatttagctgagtata

SEQ ID NO: 592103 - DNA, 641 bp, Homo sapiens
tttgagtgtatttttataagcagcagagctgatattttaaaaattcgtttgaatatgttcttttaattcgtgagtttagatcatttacatttattatgattatgaatatatttggattgatttctaccatcttattctttctatttagcatacttttttccttcttcttaggattctatttaattgacagttttttaatccatcagctgtctgtggtttaaaagttatatatyctatttctcttcctttagtagtgttttgaacttttaacgtgaattgtcaatataacaatgcctaaactaaatcaatattttaccttttttctcacaattaaaaggattttaaaatgctttaactccaaacttgatttttttaactttctattcttttctagtgttttcattccatcctgtttttatattttcaaatctgtctattgtcattgcaatgcttagttagataccaatgtttataaatgtggttgctcatcactgcttcctttatcccactccttcatgaattttattaccttttttatggagcacatcatttactagttctctttagcaagggtctttgagtaaaaaagtttttagtcattgtttcaaacaggttcttaaataacaatttagctgagtata

SEQ ID NO: 592104 - DNA, 641 bp, Homo sapiens
tttgagtgtatttttataagcagcagagctgatattttaaaaattcgtttgaatatgttcttttaattcgtgagtttagatcatttacatttattatgattatgaatatatttggattgatttctaccatcttattctttctatttagcatacttttttccttcttcttaggattctatttaattgacagttttttaatccatcagctgtctgtggtttaaaagttatatattctatttctcttcctttagtagtgttttraacttttaacgtgaattgtcaatataacaatgcctaaactaaatcaatattttaccttttttctcacaattaaaaggattttaaaatgctttaactccaaacttgatttttttaactttctattcttttctagtgttttcattccatcctgtttttatattttcaaatctgtctattgtcattgcaatgcttagttagataccaatgtttataaatgtggttgctcatcactgcttcctttatcccactccttcatgaattttattaccttttttatggagcacatcatttactagttctctttagcaagggtctttgagtaaaaaagtttttagtcattgtttcaaacaggttcttaaataacaatttagctgagtata

SEQ ID NO: 592105 - DNA, 389 bp, Homo sapiens
cttccttgtatggtttgtaatttttgccatgagctctcttctttagcctgtttccttctattcaaattccttctggcctgcatgtgagagtgtccctccagagtgtttggtttcagtcaggagcttggggtattattggcctagggattaatrtaacaactttatgttaatttctcaacctgggattgaaggtttaacctacttgagtagactaaattcaagctctaaacctatttgaggcacagttctgtggtattagattatcgggggtaactctttgctttgatttcttcacccagaaccctggcagaaacaaataaatgtatctgttgtctttcttggctagggatcaaatttatttcgtagtgcactcttagattaaaagtgca

SEQ ID NO: 592106 - DNA, 389 bp, Homo sapiens
cttccttgtatggtttgtaatttttgccatgagctctcttctttagcctgtttccttctattcaaattccttctggcctgcatgtgagagtgtccctccagagtgtttggtttcagtcaggagcttggggtattattggcctagggattaatataacaactttatrttaatttctcaacctgggattgaaggtttaacctacttgagtagactaaattcaagctctaaacctatttgaggcacagttctgtggtattagattatcgggggtaactctttgctttgatttcttcacccagaaccctggcagaaacaaataaatgtatctgttgtctttcttggctagggatcaaatttatttcgtagtgcactcttagattaaaagtgca

SEQ ID NO: 592107 - DNA, 389 bp, Homo sapiens
cttccttgtatggtttgtaatttttgccatgagctctcttctttagcctgtttccttctattcaaattccttctggcctgcatgtgagagtgtccctccagagtgtttggtttcagtcaggagcttggggtattattggcctagggattaatataacaactttatgttaatttctcaacctgggattgaaggtttaacctacttgagtagactaaattcaagctctaaacctatttgaggcacagwtctgtggtattagattatcgggggtaactctttgctttgatttcttcacccagaaccctggcagaaacaaataaatgtatctgttgtctttcttggctagggatcaaatttatttcgtagtgcactcttagattaaaagtgca

SEQ ID NO: 592108 - DNA, 590 bp, Homo sapiens
cagttcaaactgaagccagacctcccttcagaaacatgtaatgcttgatattaaggatttatttacaaaattcaatctgggaaagaagatgataccaaacattagggttagcttattaaagctcccgggcattcttcctgctagtatttaaggagtgtaagtacctaggaataatattcaggcaactgatatggccataataactgctacaatatggaacgactaccactccatacactaaccaatttccagtcttagctctaatgtaactcatctgagttgaccacaacttgcaatggtttgattcgctgtacagtttggtttggygtttcagaccctagtgttttatatccagacttcaccctgatcctgaaaagcaaatggactgagtattcaagtgcctggccactcagatcctttttggtatccccacactataaccagagtaagttctcataagatagtgagatatcattgattaaattttttgcatattgtcctagcctaagcctacaggcccaaatcaaaccaaggcctccagattccaacttctagtgtttccaatatatgtatctcaacaatctgatttt

SEQ ID NO: 592109 - DNA, 594 bp, Homo sapiens
ctcagtcattattacttcaaatatttattctgcttggttcttattttcttttccttctggtattccagttatgcatgtatcatgccttttgaagttgtctcacatttcttggatgagttgttctggttttttttwaattattgttattttttctctttgcctttctgcttgggaagttgtattggcatatcttcaagttcactgattcttttcttggccatatccagtctactggtgagctcataacaggcattctgtatttctgttgcagtgttttttaaatttatttattgcatttccatttgattcttttttagattacctgtctctgcttatattatctatttactcttaaattttgtctttcttccattagattcattcatatattaatcatagtgatattaaattctctgataattctaaaatctgtgacatatctgagtccggtcttatgcttactttgtttcttcagattatgtttgtttctggccattaagcattacttgcaagttaaaaaaaaatccagacaagatgtatcaattaataggaactaaggtaaaaaggcctttgttatgagagtttatgctaatc

SEQ ID NO: 592110 - DNA, 594 bp, Homo sapiens
ctcagtcattattacttcaaatatttattctgcttggttcttattttcttttccttctggtattccagttatgcatgtatcatgccttttgaagttgtctcacatttcttggatgagttgttctggttttttttaaattattgttattttttctctttgcctttctgcttgggaagttgtattggcatatcttcaagttcactgattcttttcttggccatatccagtctactggtgagctcataacaggcattctgtatttctgttgcagtgttttttaaatttatttattgcatttccatttgattcttttttagattacctgtctctgcttatattatctatttactcttaaattttgtctttcttccattagattcattcatatattaatcatagtgatattaaattctctgataattctaaawtctgtgacatatctgagtccggtcttatgcttactttgtttcttcagattatgtttgtttctggccattaagcattacttgcaagttaaaaaaaaatccagacaagatgtatcaattaataggaactaaggtaaaaaggcctttgttatgagagtttatgctaatc

SEQ ID NO: 592111 - DNA, 551 bp, Homo sapiens
cccagcactttgggaggacaaagcaagagaattgcttgaattcaggaattgcagaccagcttgggaaaggaagtgttatgctagctccacaaaaaatttttaaaaattagcccrgctctgtagtatgtgcctgtagtcctatttacttggaagtcagagatgggaggatttttttagcccgggtgtttgaggctgcagtgggctatgattgtgccactggattccagcctgggtgacaaagtgagacattgtctcttaaaaaaataaaaaagaacttcacctcactggggcaaccaatccaaaagtattacattataaatccttccccatcttaattcttgaaagacctgttctaaaactaggcaggtcctaaaacaatactaatgtcgttttctgacttctcagatctgagatactgcaaagatcctgccatgttctctcctactgcagttaagtgtggtggaattggtggttggtacttataagtgaaaaatttgatgcataaaggattaagaatggaccccacactgcatagttagaaaatggcagag

SEQ ID NO: 592112 - DNA, 530 bp, Homo sapiens
aaagtttatacagtaaaaatttatagcaagctgttaaggtattattgaagaamgaaaattttaatataaatttagatttgcataagtgagtgtgtataaagtgtacagcagtggacagtaatgttctaaaccttcacactctctcatcactcactgacatccagagcaactttcagtcctgcaaactaaatttatggtaagtgccctatgtagatgtatcctgttttttatcttatataccatatgtttactgtatcattgctgtttagattatttagatacacaaacactttccactgtgttacaattgtccacagtattcagtacagtaatattctgtattggtttatagctaggaacaataggctgtaccacatagccaagtgtgaagtcggctgtactatcgaggtttttgtaagtacactctgtgatgtctacacaatgacagaatcatctaccaatacatttgtcataacatatccccatcactaaacaatgtagactggacagccattatggaaaattataag

SEQ ID NO: 592113 - DNA, 530 bp, Homo sapiens
aaagtttatacagtaaaaatttatagcaagctgttaaggtattattgaagaaagaaaattttaatataaatttagattkgcataagtgagtgtgtataaagtgtacagcagtggacagtaatgttctaaaccttcacactctctcatcactcactgacatccagagcaactttcagtcctgcaaactaaatttatggtaagtgccctatgtagatgtatcctgttttttatcttatataccatatgtttactgtatcattgctgtttagattatttagatacacaaacactttccactgtgttacaattgtccacagtattcagtacagtaatattctgtattggtttatagctaggaacaataggctgtaccacatagccaagtgtgaagtcggctgtactatcgaggtttttgtaagtacactctgtgatgtctacacaatgacagaatcatctaccaatacatttgtcataacatatccccatcactaaacaatgtagactggacagccattatggaaaattataag

SEQ ID NO: 592114 - DNA, 530 bp, Homo sapiens
aaagtttatacagtaaaaatttatagcaagctgttaaggtattattgaagaaagaaaattttaatataaatttagatttgcataagtgagtgtgtataaagtgtacagcagtggacagtaatgttctaaaccttcacactctctcatcactcactgacatccagagcaactttcagtcctgcaaactaaatttatggtaagtgccctatgtagatgtatcctgttttttatcttatataccatatgtttactgtatyattgctgtttagattatttagatacacaaacactttccactgtgttacaattgtccacagtattcagtacagtaatattctgtattggtttatagctaggaacaataggctgtaccacatagccaagtgtgaagtcggctgtactatcgaggtttttgtaagtacactctgtgatgtctacacaatgacagaatcatctaccaatacatttgtcataacatatccccatcactaaacaatgtagactggacagccattatggaaaattataag

SEQ ID NO: 592115 - DNA, 530 bp, Homo sapiens
aaagtttatacagtaaaaatttatagcaagctgttaaggtattattgaagaaagaaaattttaatataaatttagatttgcataagtgagtgtgtataaagtgtacagcagtggacagtaatgttctaaaccttcacactctctcatcactcactgacatccagagcaactttcagtcctgcaaactaaatttatggtaagtgccctatgtagatgtatcctgttttttatcttatataccatatgtttactgtatcattgctgtttagattatttagatacacaaacactttccactgtgttacaattgtccacagtattcagtacagtaatattctgtattggtttatagctaggaacaataggctgtaccacatagccaagtgtgaagtcggctgtactatcgaggtttttgtaagtacactctgtgatgtctrcacaatgacagaatcatctaccaatacatttgtcataacatatccccatcactaaacaatgtagactggacagccattatggaaaattataag

SEQ ID NO: 592116 - DNA, 643 bp, Homo sapiens
attttttaaattttaattgagtttgttccagtttcgttttttaattcatttggtctttgacttttgagggttgagttttctttttcactcagatttctgatcttataaggctgtaagttaataatgtaagaatagattatagagtaattttctgcccagtgatgtaggtctattttaccaacagactctcccaaaaataaagtgacctatttggaaattgaggtatatggggatgtgttaataaccagcaggcttatcttcaagatgcatgaggaagaggcaggctgaagaaactcaaatacaaaaaggtctttactctgggatgccaacatscatatatggtgctctgtctttccccttatatatttctatttttattttcttaatgttaagagataggatagtatagtggctagggtcatgggctttaaagctgccctaccttaattctagccctagctgtgggacttactaagcatatggttggttaactctctgagttttagtttcctcttctgtaaatagggataatatacacttgggatcctgtaaatttatttgataatttatttgtgtctggatatattaagctcagagcattagttatgaagacaaaacaatgaatgactaaataatgcagtgg

SEQ ID NO: 592117 - DNA, 643 bp, Homo sapiens
attttttaaattttaattgagtttgttccagtttcgttttttaattcatttggtctttgacttttgagggttgagttttctttttcactcagatttctgatcttataaggctgtaagttaataatgtaagaatagattatagagtaattttctgcccagtgatgtaggtctattttaccaacagactctcccaaaaataaagtgacctatttggaaattgaggtatatggggatgtgttaataaccagcaggcttatcttcaagatgcatgaggaagaggcaggctgaagaaactcaaatacaaaaaggtctttactctgggatgccaacatccatatatggtgctctgtctttccccttatatatttstatttttattttcttaatgttaagagataggatagtatagtggctagggtcatgggctttaaagctgccctaccttaattctagccctagctgtgggacttactaagcatatggttggttaactctctgagttttagtttcctcttctgtaaatagggataatatacacttgggatcctgtaaatttatttgataatttatttgtgtctggatatattaagctcagagcattagttatgaagacaaaacaatgaatgactaaataatgcagtgg

SEQ ID NO: 592118 - DNA, 608 bp, Homo sapiens
tgacctggggaaacttgccaccctgaagggggaagggctctgggcaaggcctagtgctgtgctggcctcacatctgactaagcatagtcccactggtgggggaaacagggttgcttgcatcatcacatccccagttccaggcagctcagcacagaaagaaaactctgtattattattattgttatttttattgttattttggaaaaagtaagagaaaagaacatgagtctcttccagatcttttccaagaccaccaaaataatacctctacaagtctgcaaaaaccacagcattattgggcttgtggcctaagtccctctgaatacctggaaaaccttcctgagaagaacgrggacaaacaagcccagactatgaagactacaataaatatctaagtcttcaattctcagatgctgatgagcatctacaagcattaacactatccaggaaaacatgaccttaccacataaactgaataaggcaccagggacaagtcctggagaaacagagatatatgacatttcagacagagacttcagagtagttttgaggaaacacaaagaaggaattcagaatctatccaataaatttaataaagaaattgaaat

SEQ ID NO: 592119 - DNA, 518 bp, Homo sapiens
agtgggtgggtctggagtagatatcactcaatcttttaaaaattcaagtacagcaattcatatactcacaaagatgggtaaaaattatactgtactactaatatctcacatccattggaattgattgatttatagtctgcctcatttgaaatttgatgtaagaaaatggttgtcattctggtaaggatcatctctttttctaaccctcaagttataattaaaagtatttgcgaataaaagtatttgtgaaaatgagaatataattccagtataacaacattatttttgttaatcataacaaaggttggcatctactatgcaacctgttggtttttctaaactaaaattgtataaatatataattgtttatcatgtacattatggtattaattttctaatatcgtttgggaagaagtattcaccagaagtaagcaagtatacakgtgttttgtctttattttaaaaaaataaatattttagccatattagaaagtatgtagagtaagaaacatgcatat

SEQ ID NO: 592120 - DNA, 651 bp, Homo sapiens
aaacaaaattggaggtaaaaaaaaagaagctttacaactgataccacagaaattcaaaggattattagcagctwctatgagcaactatctgataactaattggaaaatctagaagacatggataaactcctagacacatagaaactgccaagattgaaccagaaagaaatgtaaaacttgaacatgccaatagcaagtaatgaaattgaagccataataaaaagtgtcccatgaaagaaaagcctgggacctggtggcatcacgactgaattttaccaaacatttttagaagcactaatattgattgtattcaaactagtccaaataatagaagaggagagaactcctccaggctcattctatgaggccagtattgtactgatactgacaccagacagacacattaaaaaaagaaaactgcactccaatatccctgataaaccttgatgcaaaaatcctcaacaaaacactagaaaatggaatgtaacaacatactaaaaagatcaatcatcatgaccaactgggatttatcccagtaatgcaaggatggttcaacatatgcaaatcaattaatgtgatacatcatctcaacagaatgaaggataaaaaccatacgatcatttcaattagtgctcaaaaagcatttaataa

SEQ ID NO: 592121 - DNA, 651 bp, Homo sapiens
aaacaaaattggaggtaaaaaaaaagaagctttacaactgataccacagaaattcaaaggattattagcagctactatgagcaactatctgataactaattggaaaatctagaagacatggataaactcctagacacatagaaactgccaagattgaaccagaaagaaatgtaaaacttgaacatgccaatagcaagtaatgaaattgaagccataataaaaagtgtcccatgaaagaaaagcctgggacctggtggcatcacgactgaattttaccaaacatttttagaagcactaatattgattgtattcaaactagtccaaataatagaagaggagagaactcctccagrctcattctatgaggccagtattgtactgatactgacaccagacagacacattaaaaaaagaaaactgcactccaatatccctgataaaccttgatgcaaaaatcctcaacaaaacactagaaaatggaatgtaacaacatactaaaaagatcaatcatcatgaccaactgggatttatcccagtaatgcaaggatggttcaacatatgcaaatcaattaatgtgatacatcatctcaacagaatgaaggataaaaaccatacgatcatttcaattagtgctcaaaaagcatttaataa

SEQ ID NO: 592122 - DNA, 634 bp, Homo sapiens
gtgatataaacaatgaagttcaggatgagatggtctcagatggagatgaggaacttgttgaaaactggagtaaaggtcagtttgctatgcaaagaggctggctgcatttttcccctgccctagagatctgtggaactttgaaccagagagagatgatttagggtatctggaagaagaaatttctaagtggcaaagcattcaagaggaagcagggcataaaagtgtggacaatttgcgacctgacagtgtgatagaaagaaaaacaaattttctgatgagaaattcaaactagctgcagaaatttgcataagttacaaggayctgaatgttaattaccgagagaatgaagaaaatgtctctaaggaatcccggagaccttaccaatagttcctcccatcacaggtctggaggcctagaaagaaataatgttttcatggaccaggctcagggcccacctgctttgtgcagcccccagacatggtgccctgagtcccagctgcttcagctccagctgtggctaaaagaagccaagatacagctcaggccattgcttcagaggttcatgaaagccccaggctttggcagcttccatgtggtgttggtcctgtgggtatgcagaagacaagaattgagg

SEQ ID NO: 592123 - DNA, 509 bp, Homo sapiens
ttttataaaaagtgagagaaatcatcttgttacatataagtcaactttgacagacttccaggagatttatcagcagaaaacttagggtgaggagagaattagacaaaaattccaagcactaaaaggaaaaaaaaataaaaamaatactgtcagctaagaatactatgcccagcagagttatcctttgttactgaaggagaaataaattcccagatgagcaaatgttgaagaattaataaccactagactggatctacaagaaattcttaaggaatactacacctgaaagcaaaagaatgatatatatcattataaaaacacacaaaactatacaactcactggtagagcaaacacacaaatgaggaagacaaagtattcaaatgttatcactccaaaaaccccaccaaacatcaatgattaacaatacaaaagaaaaagaaaatattcaagtaaacaacaatatgacaggaacaaaatcttacatattaataataattttgaatataaa

SEQ ID NO: 592124 - DNA, 577 bp, Homo sapiens
agtaaccattctaactgggataagataatatctcattgtggttttgatttggatttccctgatgattagtgaagttgaacattttttcatacacttgttggccatgtgtatgtcttcttttgatgaatttctgttcagaaacttagctcactttttaatgtgattatttgtttttctgctgttgagttgtttgtgttccttttacactgtggatattagtcccttgtcagatgcatggtttgcaaatatttccgccattgaacacattgtcacttaactctattgattacttcctttgctctgcaaaagatttttagtttagtaaagtctcggttgtttaatatttttgttgttgcctgtgcttttgaggtcttaggcaaaaaatcattgcctagatcaatgtcctgcactgttttcctggtttacttctagtagttttatagttttgggtcttacatgtaagtcttcaatccatttggagttawtttttgtggatggtgagagatagaaatctatttttattcttctgcatatggacatctagttttcccagcatcattttttttaaagagggtgt

SEQ ID NO: 592125 - DNA, 649 bp, Homo sapiens
gttattggaagtcccagccagaacaatcaggcaagaggaaggagtaaaatgtatctagattggaaaagaggaagtcaggtttcctctcttttcagatgatataatcttatatttaggaaaacctaaataaataaataaatgcccccttagttatgataagcaaagttaatgaagttgcagaatacaaaatcaatatacaataatcagtagcatttctatacaccaaaaataaactaggtgaaagataaatcaagaaagaatccaatttaaaacagaaacaaaaataataaaatacttagtaataaatataaccaagaaggtgaaagaactctataagaaaaactgcaaaacattgatgaaagaaattgaaggagatacaaacaagtggaaagatatctggatcaaaagaattaatatcgttaaaatggkcttacttctgcccgggtgcagtggctcacacctgtaatcccagcactttgggagaccgaagtgggcggatcacaaggtcaggagattgagaccatcctggctaacaccgtgaaaccccgtctctactaaaaatacaaaaaattagccaggcatggtggtgggcacctgtagtcccagctactcaggaggctgaggcaggagaaaggtgtgaacccgggag

SEQ ID NO: 592126 - DNA, 365 bp, Homo sapiens
ccagaaaatagaaaaagaggaaacacttatgaggctattagcccataggtaaatttgatttcaaaacctgaaaagaatattctaaaaaggaaaaaaaaaaaacagataattctttcaaaaaggtagatgamaatactcaagaaatattagcaaatgagtatccttcaaatataaaaaaaaaaaatcatgaataagtgggctttactccagataggcaagaatagattagcattagaaaatcaatgcaatttacatataaataatataaagaaaaaatatgattatttgatcaatgctgataagtatttcaaaaaacgcaatggtaaatcattaaaaaattataagaaaactcaaaataaaaggga

SEQ ID NO: 592127 - DNA, 536 bp, Homo sapiens
ataaaattgagagtccagaaataaaccctcacatttactgtcaattcattttatgcaaggttgtcaagacaatttaatggaaataatggtttttcaataaatggtgctgggacaattcacatggaaagaatggaataaactcctactttacaccatataaaaaattaactcgactactctgggcatgctgcttatgggttagccgtgatctgcaagaagcagtttaaaaaatttactcaaaatgtcctaaatgtaagcgctaaaacaataaatctcttaggagaaaacctaggtataaatyttcatcaccttacattaggtaatgtttttgtagaaagcacatcaaaagcacaagcgaaaaaaaaaagattggacttcatcaaaattagccttcatcaaaattaaagacttttgtatttgaaagaacacaagtgaaaatgcaacccacagaatgtgagaaaatattttcaaatcatgtatctgattaaggacttgtgttcagatatataaagaactcttaactcaataataatata

SEQ ID NO: 592128 - DNA, 488 bp, Homo sapiens
tacagtgagccgagatgatgccattgtgctccagcctgggcaacaagagcaaaactccatctcaaaaaaaaaaaagtgcatatatgtgtgcatgcaacagaatacagaatatttatttccagaggaaccctgacttctccagcctcctcggtttgtccttctttgtgggcatgaattacgcagctgcctatagatgtcaccagaggaaggcacatcagagggaataaaaatcccagggtgagaaccacagcaccgtggcagagggcacaagcatgagtggaaaggccctgtgtcaaacacagaagagggctttgttttaaatcaagacatcttggcaaggcctaatggctcacacctgtaatcccagcattttgggagtctgaggtaggcttgagcccaggagttagagaccagcytaggcaacatagcgagaccctgtctctaccaaaaaaaaaaaaaaaaaaaaaaatagttgggcgtggcggcat

SEQ ID NO: 592129 - DNA, 398 bp, Homo sapiens
ggtttttttttctaattatgtgaagaatatcaatgggaatttaatgggaatagcattgcgtctataattgctttgggcagtatggccattttcaaaagatagtttcttttgctgtgcagaaactctttactttaaatagctcccatttgtcaacttctgcttttgttgcaattgcttttggtgtcttcattttgaaatyttttcctgtgcctatatccttaatggtatttccttgattttactctagggtttttatagtttagggttttacttttaagtctttaatcagtcttgagttgaattttgtgtgtggtgtaaggaatgggtccagtttcaattttctgcatatggctagccagttctcccagcacaggacattagatagagaatcctttcct

SEQ ID NO: 592130 - DNA, 628 bp, Homo sapiens
tggctttccttctactcttttttcttctccttgatttacttttttaaaaaaattatggtcgtcttattgactaaatcttcaaatagatagatttcattatacactcttcttggacaatcttatctgcattaatatctgttttatatatattatatatacagataccatatatatatatatatatatctgtatctcatatatacagatagttcttgctttgcctggtgccgtgttaactgaaacaggtgcatattggaaccatgtgtttgttttgtgcggtttaccataaaaccatgcaaagtaaggacacatttcctacatgtacaatatttrgttaataagataccatgaaaaatgaggactatcttcattaattatatactccatctttattctgatccctacacctgaatacatagttttctaccagttatctccactggttttccaaaggtctttttcaaatttatatgtccaaatataactttttcagcctccatcgccagtcctcctggccatattctctatcacaagtaattagttaatcaacagaaaattattagtgtatattattcccaggcactatgctagatactactgatataatggtgatggtattttaacaaca

SEQ ID NO: 592131 - DNA, 648 bp, Homo sapiens
tcttccctacttgcacgtctgtttataggctctctccaagaagaaacatatggctccattttgcctgaccttgcaggcagtcagaccttatggttgttttcccttgttccctgaaaaytgctgttaatctgttctttttcgaggtgtactgatatcatattgttcaaacacacatgttttacatcaatttgtacagtaaacacaattgtaacagtggtcctgaggtgacgtagatcctcagcttaagaagataacaggattaagagattaaaggaagacaggcataagaaattatgaaagtattatttaggaactggtaaatgtccatgaaatcttcacaatttatgttcctctgccttgggtccagccggtccctccgtttggggtccctgactttccacaacattctgtcttccaacagtcctattttttctcactcaggcttattatgaacatgttatctgcagtgaaaattatatgtaaaaggtatgataaattgtggagctattttatattgacttcttaaatagattagtggaagccatttcttaattgtgtttggataaaaacacatcttttgccttatgcttgacttggttatatgcattcaaatttgacgttggttttcttatcttagattttgttttt

SEQ ID NO: 592132 - DNA, 607 bp, Homo sapiens
taattatcaacaataatatttatgaaaatgttttagtacttgatttgtttataggttgaaacatttccaaagtctgtagattttagcatagcaggaaaatgaaataagtataaaattgttaaaattaactgcttccaagacttccccgtattttcaagtatctagtttatttccagttattcaatgtaccaataactatcaaattcaaaccacagtcacagtataattttgaaaattataaagttccaaataactatgaaatacaaaaatcttaatgatggaattaaaatgaaaataaattgccctgatcacctctggcagagctcttcatgcatttctgacatttgttttccttcccttaaataatgaatagtctaggtctttaaagtaggagtgctcactaagaatgggtgaaaatcccatttgctttctaattggcctctgtgttttacaatagaatttaatttgctcttttattaatagtaattccttttgatgtctaacagagtggtgcttaatatttttaatttctccatacaattttacattttatctatttttctaccggtcatttgatgaraagttgggggatgtcatattggttaat

SEQ ID NO: 592133 - DNA, 589 bp, Homo sapiens
aagttaaaactttaatgaggtaacctctataacactcaccagaatgaatgcaatttaaaaattctgaggaatgccaagtggtgatgagaatgtatagcattgggagctcacataaactactagtatgtgagaaaaattgagaactatatactgcagttgaagctgcacagattttaagaaccaaaatcatacacctagatatatacccaacagtaattcatgcacatgtgcactaagagatgtgtaacagaatgtcccataacagcaatacaggcataaattgaattttcaattgacactaaatgaataaacagattgtgtttctttgtagaagtaaaaaaatattcagcagtgaaagtgaataatcaagtattgctacaggaaataacacagttaaatctcataaagccaatgttgaaccaaaaaagccagaccaaaaagacaaatgcttatatgattctaaatatttaaagttcaaaataaggagaaacacaagtatagtattcttactacaytatagtgtagtagttttgataccctatatagtatttatatatagtatttatatgcacatttagttggtgtctaa

SEQ ID NO: 592134 - DNA, 473 bp, Homo sapiens
catggaagcagagtatggaatcatagacaatggggacttggagaagttgggggttgggagggtggataatgagaggttgcttggtgggtacaatgtatgttgctccagtgatgaatatactgaaggccctggcrtcatcaaaatgcaatatatcaatgtagcaaaattgcacttgtactccattaataatacacaagttaaaatgaaataaatacctttcatcttaaaaaaacctctgcattttgaaatgtttcattgatcattacactcagccttaactaaaatttattatagggtcgatagctgggaaaggcattctgttccttcctaaaaatctgtgtgtgtgcctgtgtgttacacagggaacacacagggaacacaaagggaagctttctggtagctacttttatttaagaggatcttccagatataatcccacaagacaactgatcatctatgtggctatcgtcaag

SEQ ID NO: 592135 - DNA, 575 bp, Homo sapiens
taacatttgatgcttgaaaatgacttcaaaattcattttgctaggtggacaataatctcctttgataagtattatcctgtcagcttatgaaatcagttaattgtaatactgaagttatagagtggcatgaatttgaaggaaaacaacacaattctgcctggctcccttcagtgttctatttcttaaaactttcacaagtagaaaacgcctgacaatccatgcaaagtgaatgatggggggaagaattattggaagaatttgtgaaaatagttgctccacttacaaaaagcaacaggttttctccatgttcttaggaaaacaaaccatcacatccatagtaatctggtggtgatttcaaggattacctaactgaaactatgagttccatggtttttgagtaccttgatacttaaaaatatcaatcagaatattttgaaagcttctaattttttaacccaattaacatatagagttgattaagtgaagtaaatagtaaccttgtttatgtattgrgggacttggatttttacctgtgtaaaaatcctagcagtaaggacaagctttgggaaatgagt

SEQ ID NO: 592136 - DNA, 574 bp, Homo sapiens
ttgttccattgcgagacgttttggaaaaaggcttagaggaaggtgcaggcagcagtggatcaaagaaatgcatttcaaggaatccaatagggtctgtccctgaaacctcagcccccataccataaaaccagcttaaagaaggaaactggcttagaaaaggggaagaacttcgagggtttgagataataacctgtgtaggattgcactggtttagctgacagttagtgaagggctgtccctctggtaaaataaatgtatggttttaggaaattacaaaaaccggttggggcagtccattcttgctctttagtggtccacagaatgtaggacaactacggcataaaagctccacctcggayggggcaagactcctggctgacactggggtctttattgaaatcttcccagattaaatggtcccaattcactaatgcccagtctgaggagagtcaggaggaacaaaggtacttttctgaagtagagagctgtctttgacttggcaagtccccacagggtataacaaggcaagcattaaatgcaatagtttgaggcaaaattgacttggttatgttaa

SEQ ID NO: 592137 - DNA, 532 bp, Homo sapiens
tggaatccactagctaaatgagcacattatcaaagcaacctaccgctgaattctgacttcccagaatgtttcttttccaaagaattaatagaaactaatcagattgtgaagtgctcggccataaggactatttaaatggttcttagagaaaaagaagaaataaaataggcatccactgagtaatattcattgatgcaacattgattattgacttattacattttcaaagagattgaggttataataccttacacmaagcttaatatttcaaagaataaatcaactaataaaaagcttatgaggtttggtatatgtgcatttcatacaacgttcatgaaaatgaacccgagatcaattagctcccgttctgtaccagaaagagaaatatgtttactttgtaagtaataaaacattaaataggcttttctgaccatttgcttgaaaactcagaacttaacatttctatcactggacttaaatctgctaaagttttcgtctaaattttacattaaaaacaaaactctatagtgaa

SEQ ID NO: 592138 - DNA, 589 bp, Homo sapiens
tgaagcctacttgatcatagtggattcgcattttgatgtgctactgaatttggcttgcaagtactttgttgagaatttttgcattgatgttcttcaaggatattggcctgcagttttctttttttgttatgtcttttagcctcatagaatgagttggraaggagtccctcctcctcaattttttggaatactttctgtaggaattgtaccatctcttatttgtaccatctcttatttgtacatcaggtagaatttggttgtgaatccatcagatacaaggctttttttggttggtaggccatttattacagattcgattttggagcttgttattgttctgttcagggaatcattttcttcctggctcagtcctggaagcatgtatgtgtccatgaacttattcatctcttctagggtttctaatttgtgtgcctagaggtattcatagtagtttctgatggttgtttttatttctgtgggattagcagtaacattcccttcatcatttctaattgtgtttatttggatcttctcttttcttctttattagtctagctagtggcctattttattaatttttttaaaaaac

SEQ ID NO: 592139 - DNA, 628 bp, Homo sapiens
tattatagccattgtgtatgttctcaagatatttataggaataaaaaaaaagaaagaaaaaatcaaagaaaaaaggatctggcagctgtgggcattttaatgggggataatttgggctttatttccaaaaacaggaagacaaggaaaaataaccttatgtctatatttcttttacccaagctagtaaaacccatcaatgtatattttttcctccaaagatacatttcattgaggtaagttgcgattccatttcattaacttaaaaatgctataaggatgttatcataaaccctgtgttaattacctttcttggctattgttggtaaatattcgagattctgttttccaatttcacctctaaagttcacagttatctttacttcactttctaccatctgaaaatgtccctgacatctacaagttcattttcttatgtaaggggagggaggacagcagccagaataaaagggggggatatgggtttgtgtgcaaatttcttacagaaagaaaatggaatatcgacaaattatgcataaacttattaatgaaaacatatttattgaattctgaccatgtgccagacaatgygcacaggtttgccaggaggactgagaggcaggcattgctt

SEQ ID NO: 592140 - DNA, 525 bp, Homo sapiens
gaagacagaaaaagagaagaaggtgacatttggcagagtctcgtggggcaggcctgtaaatgttgtacttgacttccacccacttttccttgcaaggaaggagactgcaaggaagcctggaactgactgtgtgtccaaggggaaaaagaaatagatttggtgaatacttcctcagtctttgccttggtctactttctcagtctgtgggtgatatgaaaaatctagatatatggcacacctgcctgcagkctataattcagtggaacaggaggtaaatgaagccattagagaataatgatgtgctgagtgatacagtactgactggaagcactaggggagatgtgaacaaagagatcaaagtaggaaagatctttctggggaaggtaataccggacatcttatgtgacacttgaatttatccttaaagacttgcaagtatcagatacacataaaggaggggaagggtatttgtattcacttcccaggataacacaaaatttattctgatgatttcattaattttgt

SEQ ID NO: 592141 - DNA, 525 bp, Homo sapiens
gaagacagaaaaagagaagaaggtgacatttggcagagtctcgtggggcaggcctgtaaatgttgtacttgacttccacccacttttccttgcaaggaaggagactgcaaggaagcctggaactgactgtgtgtccaaggggaaaaagaaatagatttggtgaatacttcctcagtctttgccttggtctactttctcagtctgtgggtgatatgaaaaatctagatatatggcacacctgcctgcagtytataattcagtggaacaggaggtaaatgaagccattagagaataatgatgtgctgagtgatacagtactgactggaagcactaggggagatgtgaacaaagagatcaaagtaggaaagatctttctggggaaggtaataccggacatcttatgtgacacttgaatttatccttaaagacttgcaagtatcagatacacataaaggaggggaagggtatttgtattcacttcccaggataacacaaaatttattctgatgatttcattaattttgt

SEQ ID NO: 592142 - DNA, 537 bp, Homo sapiens
gggtgtggtcaggtcaactcaggacgtggggatggtgccagagagctgaccctgttccaggagcagggtccatgtccctttctcctgagccctagaaagctgggactgcagcactgctcacaggaaagcctcctcctccattctgtggcagttatacacaacacaaaccatttctaggtatttgtstttctttcttgatcttgtgaatcttttctcactaaattcagctcacgtctatcttttcgacttccctatgtgtaagataaaagttatcttggaaagcagtctgcacattttaataaaagtaaccttttgtttttgatacccaagtcttaatttttctggtaaaccttcttaccttgttatggaaatgacagcaggagagagatgaatggccctgtaattagttcaaggaattcagataggataaagctttcccttgccttttggtgccccccagcagagctctgctgaaaagatgcatttagattgctcccagaactctgcttttaaaataaatgtggggatatgcatgta

SEQ ID NO: 592143 - DNA, 537 bp, Homo sapiens
gggtgtggtcaggtcaactcaggacgtggggatggtgccagagagctgaccctgttccaggagcagggtccatgtccctttctcctgagccctagaaagctgggactgcagcactgctcacaggaaagcctcctcctccattctgtggcagttatacacaacacaaaccatttctaggtatttgtctttctttcttgatcttgtgaatcttttctcactaaattcagctcacgtctatcttttcgacttccctatgtgtaagataaaagttatcttggaaagcagtctgcacattttaataaaagtaaccttttgtttttgatacccaagtcttaatttttctggtaaaccttcttaccttgttatggaaatgacagcaggagagagatgaatggccctgtaattagttcaaggaattcagataggataaagctttcccttgccttttggtgccccccagcagagctctgctgaaaagatgcrtttagattgctcccagaactctgcttttaaaataaatgtggggatatgcatgta

SEQ ID NO: 592144 - DNA, 526 bp, Homo sapiens
acccatcttgattcaaatcctctcactctctgtgtaagcctgggcaaattccatttcagattctgcatgatcccrtatgttgcacggaaaacaatgcctacttaggaattgttgggatgattaatatgcttggcattgctggagtggatgtttaacagctgaaatttcctgccactatcctgtgcttgcctctctgccatggtctcttcagcttcactcaattctctgttctggtccactttgcatagctatggcagcactcctcctcacaggcccagcacacctgagtgttcctatcagccatagggactcaccatgagatgtgattttctgctcagggatgttggcaggggaggataaaggagagaaagctacaagccccaatttctaaatgaacatcgatgttcattatagatgattctgatacacacttcttagaggaaatgacaggagttcctataccaatagaggtggttttttttttttttttttttttttttttttttttttttttggacaggctttg

SEQ ID NO: 592145 - DNA, 526 bp, Homo sapiens
acccatcttgattcaaatcctctcactctctgtgtaagcctgggcaaattccatttcagattctgcatgatcccatatgttgcacggaaaacaatgcctacttaggaattgttgggatgattaatatgcttggcattgctggagtggatgtttaacagctgaaatttcctgccactatcctgtgcttgcctctctgccatggtytcttcagcttcactcaattctctgttctggtccactttgcatagctatggcagcactcctcctcacaggcccagcacacctgagtgttcctatcagccatagggactcaccatgagatgtgattttctgctcagggatgttggcaggggaggataaaggagagaaagctacaagccccaatttctaaatgaacatcgatgttcattatagatgattctgatacacacttcttagaggaaatgacaggagttcctataccaatagaggtggttttttttttttttttttttttttttttttttttttttttggacaggctttg

SEQ ID NO: 592146 - DNA, 526 bp, Homo sapiens
acccatcttgattcaaatcctctcactctctgtgtaagcctgggcaaattccatttcagattctgcatgatcccatatgttgcacggaaaacaatgcctacttaggaattgttgggatgattaatatgcttggcattgctggagtggatgtttaacagctgaaatttcctgccactatcctgtgcttgcctctctgccatggtctcttcagcttcactcaattytctgttctggtccactttgcatagctatggcagcactcctcctcacaggcccagcacacctgagtgttcctatcagccatagggactcaccatgagatgtgattttctgctcagggatgttggcaggggaggataaaggagagaaagctacaagccccaatttctaaatgaacatcgatgttcattatagatgattctgatacacacttcttagaggaaatgacaggagttcctataccaatagaggtggttttttttttttttttttttttttttttttttttttttttggacaggctttg

SEQ ID NO: 592147 - DNA, 526 bp, Homo sapiens
acccatcttgattcaaatcctctcactctctgtgtaagcctgggcaaattccatttcagattctgcatgatcccatatgttgcacggaaaacaatgcctacttaggaattgttgggatgattaatatgcttggcattgctggagtggatgtttaacagctgaaatttcctgccactatcctgtgcttgcctctctgccatggtctcttcagcttcactcaattctctgttctggtccactttgcatagctatggcagcactcctcctcacaggcccagcacacctgagtgttcctatcagccatagggactcaccatgagatgtgattttytgctcagggatgttggcaggggaggataaaggagagaaagctacaagccccaatttctaaatgaacatcgatgttcattatagatgattctgatacacacttcttagaggaaatgacaggagttcctataccaatagaggtggttttttttttttttttttttttttttttttttttttttttggacaggctttg

SEQ ID NO: 592148 - DNA, 399 bp, Homo sapiens
agccatcttgccatgaaaagacatgtaggaaagttaaatgtatattaataaataaaagaagccaataagaaaaagctacatactgcgtgatttyaactatatgacattctggaaaaggcaaaactatggagacagtaaaaagatcagtggttgtcggggattagagggaagggaggaatgaatagacagagcacagagggattttatagcagtgaaactgtatgataccataatggtgaatatacatcactacacatttgtccaaaccccatagaatgtgcaacaccaacagtgaaccctaatcttaactaaggaatttaggtgatagtgatgtgtcaatgtagattcattgattggaacaaattaccactgtagtatgggatgttgatagttggggag

SEQ ID NO: 592149 - DNA, 399 bp, Homo sapiens
agccatcttgccatgaaaagacatgtaggaaagttaaatgtatattaataaataaaagaagccaataagaaaaagctacatactgcgtgattttaactatatgacattctggaaaaggcaaaactatggagacagtaaaaagatcagtggttgtcggggattagagggaagggaggaatgaatagacagagcacagagggattttatagcagtgaaactgtatgataccataatggtgaatatacatcactacacatttgtccaaaccccatagaatgtgcaacaccaacastgaaccctaatcttaactaaggaatttaggtgatagtgatgtgtcaatgtagattcattgattggaacaaattaccactgtagtatgggatgttgatagttggggag

SEQ ID NO: 592150 - DNA, 392 bp, Homo sapiens
gaattcaagtgtttcaaagatatcttattttwaaataccaaaataggaatagaatatgaagggctggttatgagtaatatgatacacttttatgagaggatgagattacaataacaatacctcctctcatagaataaccagcaagtctccactaaataacagtgccttgattttatagatgtttaatcttggatattgagttaatgtgaaccatttgtagacacaggagtttattaaagagttatataatatctttcaagtatttagaatagtgttgaaattaagcctgcatccccacgattttcagcggtgctgatgcctaataaactcaaccccttgcatgccaaaattggcttaaagcccacccgttacccaagctacacttcaagcat

SEQ ID NO: 592151 - DNA, 415 bp, Homo sapiens
gaattcaagtgtttcaaagatatcttatttttaaataccaaaataggaatagaatatgaagggctggttatgagtaatatgatacacttttatgagaggatgagattacaataacaatacctcctctcatagaatarccagcaagtctccactaaataacagtgccttgattttatagatgtttaatcttggatattgagttaatgtgaaccatttgtagacacaggagtttattaaagagttatataatatctttcaagtatttagaatagtgttgaaattaagcctgcatccccacgattttcagcggtgctgatgcctaataaactcaaccccttgcatgccaaaattggcttaaagcccacccgttacccaagctacacttcaagcatcaaggctcaaaaatgtaatttta

SEQ ID NO: 592152 - DNA, 416 bp, Homo sapiens
gaattcaagtgtttcaaagatatcttatttttaaataccaaaataggaatagaatatgaagggctggttatgagtaatatgatacacttttatgagaggatgagattacaataacaatacctcctctcatagaataaccagcaagtctccactaaataacagtgccttgattttatagatgtttaatcwtggatattgagttaatgtgaaccatttgtagacacaggagtttattaaagagttatataatatctttcaagtatttagaatagtgttgaaattaagcctgcatccccacgattttcagcggtgctgatgcctaataaactcaaccccttgcatgccaaaattggcttaaagcccacccgttacccaagctacacttcaagcatcaaggctcaaaaatgtaattttaa

SEQ ID NO: 592153 - DNA, 415 bp, Homo sapiens
gaattcaagtgtttcaaagatatcttatttttaaataccaaaataggaatagaatatgaagggctggttatgagtaatatgatacacttttatgagaggatgagattacaataacaatacctcctctcatagaataaccagcaagtctccactaaataacagtgccttgattttatagatgtttaatcttggatattgagttaatgtgaaccatttgtagacacaggagtttattaaagarttatataatatctttcaagtatttagaatagtgttgaaattaagcctgcatccccacgattttcagcggtgctgatgcctaataaactcaaccccttgcatgccaaaattggcttaaagcccacccgttacccaagctacacttcaagcatcaaggctcaaaaatgtaatttta

SEQ ID NO: 592154 - DNA, 415 bp, Homo sapiens
gaattcaagtgtttcaaagatatcttatttttaaataccaaaataggaatagaatatgaagggctggttatgagtaatatgatacacttttatgagaggatgagattacaataacaatacctcctctcatagaataaccagcaagtctccactaaataacagtgccttgattttatagatgtttaatcttggatattgagttaatgtgaaccatttgtagacacaggagtttattaaagagttatataatatctttcaagtatttagaatagtgttgaaattaagcctgcatccccacgattttcagcggtgctgatgcctaataaactcaaccccttgcatgccaaaattggcttaaagcccayccgttacccaagctacacttcaagcatcaaggctcaaaaatgtaatttta

SEQ ID NO: 592155 - DNA, 415 bp, Homo sapiens
gaattcaagtgtttcaaagatatcttatttttaaataccaaaataggaatagaatatgaagggctggttatgagtaatatgatacacttttatgagaggatgagattacaataacaatacctcctctcatagaataaccagcaagtctccactaaataacagtgccttgattttatagatgtttaatcttggatattgagttaatgtgaaccatttgtagacacaggagtttattaaagagttatataatatctttcaagtatttagaatagtgttgaaattaagcctgcatccccacgattttcagcggtgctgatgcctaataaactcaaccccttgcatgccaaaattggcttaaagcccacccgttacscaagctacacttcaagcatcaaggctcaaaaatgtaatttta

SEQ ID NO: 592156 - DNA, 479 bp, Homo sapiens
atggaactaagcaagatcggggacttgatctggggtcatagacaatgttttcttgcacttatttccrtcccaaactccctcagaccaggcccatggaacagtctgtcaggataactaacatatggttaatagttcctgatgcttaattcttgaggactttgtggggattgggtttccatacataatatatattaatttgttcccacagcagagtgggcttcatttagggtaagaagcagtgctttcagtgctttgcagtttgcttagtgattaaactttcttatcttcacatcatcaactaagatgattttattaccaggtcagtcttctttttaaataggcaaaataatttattctctttttacaaggcatactatactaatttctttccacacttaaaagcatagggatgtaaaatctcagttaagagtttcacctaaggtcatttaacagtagaattctatgctgctctcaagtaa

SEQ ID NO: 592157 - DNA, 584 bp, Homo sapiens
ttgtaaggataatatatcctcctgtacatcccaaagtcccgtcctgtgcacagccactgactacgtacctctgcatccaaagcagactcagctttcagctggccttgctgagagtgagcccagcatatcatggaaaatgaattcaccacactgtggcacaaaccccgtatcatccaacagcttcttcaaccagagcagctcagtcttggtccttatccgtgaatgatggttgcagaaccacgctggctttacagggatctgggtaggatccattgcccccaccctgaatgtattcatagtgatgtgctatatggtttaggagccttggtaaataagtcaaggtagaactgtctcaactcagaactttcttcaggtaagaagtatgcttccaacagaagttcctaacaggaagcagctatcaacatcaaaggggagtatagaaatcaatccaagactaaccccacrgtctactcttttcttccctatcatctgtgcccctaaagaagtcaggggagttccctggccagacctaactcagtacttaaatatctttgataggcctgggaaacagaacacaggaagaa

SEQ ID NO: 592158 - DNA, 617 bp, Homo sapiens
aagttaaatacaatttgaaattcaattttttcagtttgcactagccatattccatcaagtgaccaatagccacatgtcactaatggctgctctattaaacaatgcagatatggaaaaatcttcttcacctcagaaagttctattagacagtgctggcttcaaagaaaaggaagttgttaaatcagtargcaacagtatctgttatattccctatgtagcaggcaataatctttatgcatattatttcctttaacttcccaaccgctctatgaggcaactattattataatgtactagtctggactctaggttgctagctaaaaatgggaaaacataattaggagaaccttgaactatctcacatatctacaagaaaagcctggttaaggtcctcatcaccatcagaactctttccatctgccacctttattctgttgcacaagtcagtattattcttccaggtcagcttcccccttgtggtggaaacttcccagcctcatatctcacagcctcaaactactgcctcccaccccctgagagagaatgatcctcctcctttcactcccattttagatattactcggaaggactctgataatttagctttagtgaagagc

SEQ ID NO: 592159 - DNA, 475 bp, Homo sapiens
acgattgcacagtcatagctcacagcaacctcaaactcctggggactccagcctggacaacagcgaaactgtccctaaaaaaaattaaaaaccagattgttcttcttttttgatgtagccatttattgctgtatacttatctcttagaactgcttttgttgcataccataggttttggtatatgttttgattcttgcttgtgaagcgtgtttcttctaggcaatgtatacttagattttgtgttttaatctattcaaccaatgtataccttttttttytttctttctttgagacagggtgtctctctgttgcccaggctgtagtgtaccttttaattgaagaacttaatccatttatattcaagatttttttctacttcttcttcttcttcttcttttttttttttttttgtttctttgagacagggtctcactccgtcacctaggctggaatgcactggtgtgatctcaactca

SEQ ID NO: 592160 - DNA, 544 bp, Homo sapiens
gggctgtgaacttgattgagtcaggagcttgtggagcttttgttcatgggttggaagatgagatgtatggtaagtatgactgtataatagcaatagcactctttaagtgactgctgtgtgtcaggcattrtactgggtgatacacatgtatcgtttcatttagtcctcacagtaactctgggaagtacttactatgctttttattttacacacagaagagactgaggccccagtagtatgagacaatggtaaagagcaagagatttgggttcagtcaatctatatttaaattccagcatttttataaaacagggataataataactatctttctgagttgtgagaattaaatgaggttctgtatacataaagcacttggcataatacatgtgcctatttataataagcacttaataattggtaattaaaattgatattaataaaaataataacttgatattacttacccagctagtaagagacagagcaagatttaaacctaggtatgtctgactgccaaacctttatatgactgatgaatatt

SEQ ID NO: 592161 - DNA, 544 bp, Homo sapiens
gggctgtgaacttgattgagtcaggagcttgtggagcttttgttcatgggttggaagatgagatgtatggtaagtatgactgtataatagcaatagcactctttaagtgactgctgtgtgtcaggcattgtactgggtgatacacatgtatcgtttcatttagtcctcacagtaactctgggaagtacttactatgctttttattttacacacagaagagactgaggccccagtagtatgagacaatggtaaagagcaagagatttgggttcagtcaatctrtatttaaattccagcatttttataaaacagggataataataactatctttctgagttgtgagaattaaatgaggttctgtatacataaagcacttggcataatacatgtgcctatttataataagcacttaataattggtaattaaaattgatattaataaaaataataacttgatattacttacccagctagtaagagacagagcaagatttaaacctaggtatgtctgactgccaaacctttatatgactgatgaatatt

SEQ ID NO: 592162 - DNA, 544 bp, Homo sapiens
gggctgtgaacttgattgagtcaggagcttgtggagcttttgttcatgggttggaagatgagatgtatggtaagtatgactgtataatagcaatagcactctttaagtgactgctgtgtgtcaggcattgtactgggtgatacacatgtatcgtttcatttagtcctcacagtaactctgggaagtacttactatgctttttattttacacacagaagagactgaggccccagtagtatgagacaatggtaaagagcaagagatttgggttcagtcaatctatatttaaattccagcatttttataaaacagggataataataactatctttctgagttgtgagaattaaatgaggttctgtatacataaagcacttggcataatacaygtgcctatttataataagcacttaataattggtaattaaaattgatattaataaaaataataacttgatattacttacccagctagtaagagacagagcaagatttaaacctaggtatgtctgactgccaaacctttatatgactgatgaatatt

SEQ ID NO: 592163 - DNA, 544 bp, Homo sapiens
gggctgtgaacttgattgagtcaggagcttgtggagcttttgttcatgggttggaagatgagatgtatggtaagtatgactgtataatagcaatagcactctttaagtgactgctgtgtgtcaggcattgtactgggtgatacacatgtatcgtttcatttagtcctcacagtaactctgggaagtacttactatgctttttattttacacacagaagagactgaggccccagtagtatgagacaatggtaaagagcaagagatttgggttcagtcaatctatatttaaattccagcatttttataaaacagggataataataactatctttctgagttgtgagaattaaatgaggttctgtatacataaagcacttggcataatacatgtgcctatttataataagcacttaataattggtaattaaaattgatattaataaaaataataacttgatattacttacccagctartaagagacagagcaagatttaaacctaggtatgtctgactgccaaacctttatatgactgatgaatatt

SEQ ID NO: 592164 - DNA, 459 bp, Homo sapiens
taccaaaacaacaacaacaactagctgggcatggtggcgtgaacctgtagtcccagctactcaggaggctgaggcaggaggatcccttgaacccaggaagtcaacgctgcagtgaggtatgatcgctccactgcactccagcctgggtgacagagtrcaaccctgctcttaaaaaaatagaaagttcatttataaacagaagtgaacaggaatctgactcttgtactttggtgggagtttgggttatcttttacttgaggctgaggctatgtcaaaactagggatgtaacaacaagcaccatgtaccgagtgctgcttctgtgccacaggctctcctacatgcttgccacacattcgtctatttcatcctcccaatagtcctactccatgtccagcaaggagtgaaaaggctgaggcgagccacagggagaagagggccccagtgaacagacgaaatga

SEQ ID NO: 592165 - DNA, 438 bp, Homo sapiens
gggcatggtggcgtgaacctgtagtcccagctactcaggaggctgaggcaggaggatcccttgaacccaggaagtcaacgctgcagtgaggtatgatcgctccactgcactccagcctgggtgacagagtgcaaccctgctcttaaaaaaatagaaagttcatttataaacagaagtgaacaggaatctgactcttgtactttggtgggagtttgggttatcttttacttgaggctgaggctatgtcaaaactagggatrtaacaacaagcaccatgtaccgagtgctgcttctgtgccacaggctctcctacatgcttgccacacattcgtctatttcatcctcccaatagtcctactccatgtccagcaaggagtgaaaaggctgaggcgagccacagggagaagagggccccagtgaacagacgaaatgaggaag

SEQ ID NO: 592166 - DNA, 454 bp, Homo sapiens
ccaaaacaacaacaacaactagctgggcatggtggcgtgaacctgtagtcccagctactcaggaggctgaggcaggaggatcccttgaacccaggaagtcaacgctgcagtgaggtatgatcgctccactgcactccagcctgggtgacagagtgcaaccctgctcttaaaaaaatagaaagttcatttataaacagaagtgaacaggaatctgactcttgtactttggtgggagtttgggttatcttttacttgaggctgaggctatgtcaaaactagggatgtaacaacaagcaccatgtaccgagtgctgcttctgtgccacaggctctcctacatgcttgccacacattcgtctatttcatcctcccaatagtcctactccatgtccagcaaggagtgaaaaggctgaggcgagycacagggagaagagggccccagtgaacagacgaaa

SEQ ID NO: 592167 - DNA, 417 bp, Homo sapiens
ctaaacagcaaataaaaatttctatcaccagaattatgttttttttgtggtggggaactaccaatagctataaatagaagagattwttatggaagtatcatagataaaaagagtgctcgcttcaggagcgcatataataatacagaaagaaatttaaagataataaaatatttaggataaaaagaattgtctcttaaaaatgaaaagaaaattatctttatgtatatataacaactataactctcatcaaaaaactacaggaacagcatgttttcaaaagtacaacaatttccaaactatttgaaataaatctatgaataattcaatggccaacatttccaaacaaaccaataaaatgcagagtgtgcatgaagctatctgttacaatctgtggcactgatatttcacaaaagaatt

SEQ ID NO: 592168 - DNA, 417 bp, Homo sapiens
ctaaacagcaaataaaaatttctatcaccagaattatgttttttttgtggtggggaactaccaatagctataaatagaagagatttttatggaagtatcatagataaaaagagtgctcgcttcaggagcrcatataataatacagaaagaaatttaaagataataaaatatttaggataaaaagaattgtctcttaaaaatgaaaagaaaattatctttatgtatatataacaactataactctcatcaaaaaactacaggaacagcatgttttcaaaagtacaacaatttccaaactatttgaaataaatctatgaataattcaatggccaacatttccaaacaaaccaataaaatgcagagtgtgcatgaagctatctgttacaatctgtggcactgatatttcacaaaagaatt

SEQ ID NO: 592169 - DNA, 518 bp, Homo sapiens
tgtgattcatgagaacaggtcaaaaatcaacattaacagaaatctggaagaagttaattccaaccctcatagattactttgaggggttttagatttcagtggagaaagtccctgcagatgttgtggaaatagcaggagaactagaattagaagtaaagcctgcctgggaggggaaggacacgcaccggagcctgttaggggatgggaagtaataggagggagagtattaggaccaatacctaatgcatgcggggcttaaaacctagatgacaggttaataggtgcaggaaaccatcatggcacatgtatacttatgtaaacaatcccacactttctgcgcatgtatccaggaacttaaagtaaaattaaaacaaamaaaaaaagaagtaaagcctgaagatgtgactgaatcactacagtctcatgataaaactttagcaaataaggagttgcttcttatggatgagcaaagaaataagtttattgaaatggaatctattcctggtgaagatgctgtg

SEQ ID NO: 592170 - DNA, 589 bp, Homo sapiens
ggtgtctgtccacaaaatatcacatggattgtgacatggcattataacaagcataatgttgtgttggcaaaatattgtatcagttttataatttagtgctttgaggtccaccaaatgtagtttttaatttattgaacaagcatatttgagctctgaaatagttaagatcaactccctaaaattattggtgctacttaggaggccagaggtataaattgttactgttgtcaatgttccacacaaatcacttaggatatgtgaatgtctgctggacagaattcgacttcttttgtggggaactatcttttgtagggaaatgggctcatctttgaagacactgtacaaccaaaatcaaatcatagcaagagacccactttattaatttgtccaatttgattactaagaatttaaccagtattagcttctttaaacatgcaatatgaaataatattttaattgcctggtataagcaatacaccaattaggagatttgctgaatgtcctagcatttgtgcatctttataaacrcttcatggatagttccaataagaatccattccatgctgactgctgtgctagggctactcac

SEQ ID NO: 592171 - DNA, 363 bp, Homo sapiens
gctagggctactcacccagagacgtgataggggctactcccctaagaccaattcctcctggcaggccactcacaatctcacagcaggaggcagctaaacacaaaatcaatattaatataaaatcaactgctatatttttaaagagtagtgtttggattacataagcaatcataaaactcccgttggctttagcaagaggtttagtcctgtaaactccaaaggttttctgtgtgtgctgagcagacaagcatcctaayagaataagccagaactttcctagccatcctagcatgtttgtgccttgtaagatattcccagttacatcctttaatttgccaaagggcagaaaaagaatttggtaag

SEQ ID NO: 592172 - DNA, 582 bp, Homo sapiens
ttgagggctttactcacatttccagcatgccacagtcaccatacagataggagtatagtcaccccttcctgtgagccttgacccccagcttttcaccaagcagggtccctggatgaatattcagccacacccagctgaacattcccgttagcaggatccttgtatttctttgaggtgaagctccaagaggcaactgaaaactcctctgccactgtaactgcagtggtacttcctttgctgccttcagactgggaaaggaacaaagaccatgagtgctttaaccacacctccaataaaccatggctgccctaaagagaagaggccagtctgtctccccaggtcccctggtccccactgcttgtcattgggcagggactcctggcttgaatccacaacacagctgccccacccagggctgatwgtaccaactggtagtggctctgcatatctctgcagtggagccccaagaaacaagtgaaagtcctgctgccacaaccattgccaaggtcccatctcttgcttcctccaagctggggagggaacataaagcctgagcttaccccagggctgcagtgtggatcc

SEQ ID NO: 592173 - DNA, 598 bp, Homo sapiens
atattagtttagcccactgaggcagaataaaacctccaacccagttcccggttagggactaagatgacccttggttgtgtgttctcctttcacagtgacagaagaagcagatgtcaycgtgggggccactgatcttcctggacaggagtggtgaccatgaagtagagcagtgggctttgccttctgacacctcagtggtgctgctgggcgtaggcctggctgtggtggtgtccctgactctgactgctgttatcctggttctcaccaggaggtgtcgcactgcctcccaccctgtgtctgcttccgaataaaagaagaaagcaatatctggtcgtggtgtggtggtcaggtggaaggtcagaattagtactgactgtgtcgggtggggacgactgtataccacccgccccgtgcactcacatagcatagtccagcaagcactactgtgtctctactgtaaacagggcagggttcatgtccttagacaactataatctatcacctccatgggaaccaacatggaaactcttagatgaaggtcagtctggctggacccaccttacttctaggctagcaaagaatcttatatctctggccc

SEQ ID NO: 592174 - DNA, 604 bp, Homo sapiens
cccacacaaaaaagacaacatattagtttagcccactgaggcagaataaaacctccaacccagttcccggttagggactaagatgacccttggttgtgtgttctcctttcacagtgacagaagaagcagatgtcaccgtgggggccactgatcttcctggacaggagkggtgaccatgaagtagagcagtgggctttgccttctgacacctcagtggtgctgctgggcgtaggcctggctgtggtggtgtccctgactctgactgctgttatcctggttctcaccaggaggtgtcgcactgcctcccaccctgtgtctgcttccgaataaaagaagaaagcaatatctggtcgtggtgtggtggtcaggtggaaggtcagaattagtactgactgtgtcgggtggggacgactgtataccacccgccccgtgcactcacatagcatagtccagcaagcactactgtgtctctactgtaaacagggcagggttcatgtccttagacaactataatctatcacctccatgggaaccaacatggaaactcttagatgaaggtcagtctggctggacccaccttacttctaggctagcaaagaatctt

SEQ ID NO: 592175 - DNA, 359 bp, Homo sapiens
ccggttagggactaagatgacccttggttgtgtgttctcctttcacagtgacagaagaagcagatgtcaccgtgggggccactgatcttcctggacaggagtggtgaccatgaagtagagcagtgggctttgccttctgacacctcagtggtgctgctgggcgtasgcctggctgtggtggtgtccctgactctgactgctgttatcctggttctcaccaggaggtgtcgcactgcctcccaccctgtgtctgcttccgaataaaagaagaaagcaatatctggtcgtggtgtggtggtcaggtggaaggtcagaattagtactgactgtgtcgggtggggacgactgtataccacccg

SEQ ID NO: 592176 - DNA, 603 bp, Homo sapiens
acacaaaaaagacaacatattagtttagcccactgaggcagaataaaacctccaacccagttcccggttagggactaagatgacccttggttgtgtgttctcctttcacagtgacagaagaagcagatgtcaccgtgggggccactgatcttcctggacaggagtggtgaccatgaagtagagcagtgggctttgccttctgacacctcagtggtgctgctgggcgtaggcctggctgtggtggtgtccctgactctgactgctgttatcctggttctcaccaggaggtgtcgcactgcctcccaccctgtgtctgcttccgaataaaagaagaaagcaatatctggtcgtggtgtggtggtcagrtggaaggtcagaattagtactgactgtgtcgggtggggacgactgtataccacccgccccgtgcactcacatagcatagtccagcaagcactactgtgtctctactgtaaacagggcagggttcatgtccttagacaactataatctatcacctccatgggaaccaacatggaaactcttagatgaaggtcagtctggctggacccaccttacttctaggctagcaaagaatcttat

SEQ ID NO: 592177 - DNA, 406 bp, Homo sapiens
cttaatcctcctctttccctaaagtttccagaagcttcctattgcattggaaagcctctgtaaaccaacactttgggtgtgggtttattttttgagatggggtctcactctgttgcccaggctggattgcagtggcaccaccataactcactgcaacctcgacttctctggttcaaaccatcctcccacctcagcctcccaagtagctgggattacaggggcatgccaccatgcccagctaattttattttatttttttagtacagacggggtttcaccatgttggccaggctggtcttgaactcctgacctcaagtgctcctcctgcctcggcctaccaaaatgttgggattacaggcatgagccaccgcrcccagccaattctcattcttcactggagattgta

SEQ ID NO: 592178 - DNA, 403 bp, Homo sapiens
aatcctcctctttccctaaagtttccagaagcttcctattgcattggaaagcctctgtaaaccaacactttgggtgtgggtttattttttgagatggggtctcactctgttgcccaggctggattgcagtggcaccaccataactcactgcaacctcgacttctctggttcaaaccatcctcccacctcagcctcccaagtagctgggattacaggggcatgccaccatgcccagctaattttattttatttttttagtacagacggggtttcaccatgttggccaggctggtcttgaactcctgacctcaagtgctcctcctgcctcggcctaccaaaatgttgggattacaggcatgagccaccgcacccagccarttctcattcttcactggagattgta

SEQ ID NO: 592179 - DNA, 575 bp, Homo sapiens
agttaagtcatttaatgtggatttgttcctttctcctggtattgggcctcgttggtctttcctaaaccatttccgtttctcccagtatttctctggggtccccgtccctggcctgagggccccagaagtgctgatgtgggtcctaccggtgtgggccaggcaagttacagaaaagaaggtggatgggccagtctgtcttcccttggtgctggggtgggcatgctgtggcttgccccacgttgtaagtcaggagggaaccaggccagcaggctctgttagtggaaacagcctcaaaggggcctgcctcctggggtaggtgtaggtgcatcctgattcctttggttttcttggagctgggagaggtgtaattcacctgcacgagcctatctaygcgctgaaaaacaggcttttcccctgcctgattcgtagtgaggccccctgcagttaaccctcctctgatggatgtagagccagatggggcttagtaaatacctgacctcttaacctagcaggcggcaaggttctcacagccaagtgcatgtcaacagcatcaggtgaaagttaccttggatgtg

SEQ ID NO: 592180 - DNA, 609 bp, Homo sapiens
gagctgggattctggagttaagtcatttaatgtggatttgttcctttctcctggtattgggcctcgttggtctttcctaaaccatttccgtttctcccagtatttctctggggtccccgtccctggcctgagggccccagaagtgctgatgtgggtcctaccggtgtgggccaggcaagttacagaaaagaaggtggatgggccagtctgtcttcccttggtgctggggtgggcatgctgtggcttgccccacgttgtaagtcaggagggaaccaggccagcaggctctgttagtggaaacagcctcaaaggggcctgcctcctggggtaggtgtaggtgcatcctgattcctttggttttcttggagctgggagaggtgtaattcacctgcacgagcctatctatgcgctgaaaaacaggcttttcccctgcctgattygtagtgaggccccctgcagttaaccctcctctgatggatgtagagccagatggggcttagtaaatacctgacctcttaacctagcaggcggcaaggttctcacagccaagtgcatgtcaacagcatcaggtgaaagttaccttggatgtgaggaggcaggcagggcagg

SEQ ID NO: 592181 - DNA, 609 bp, Homo sapiens
gagctgggattctggagttaagtcatttaatgtggatttgttcctttctcctggtattgggcctcgttggtctttcctaaaccatttccgtttctcccagtatttctctggggtccccgtccctggcctgagggccccagaagtgctgatgtgggtcctaccggtgtgggccaggcaagttacagaaaagaaggtggatgggccagtctgtcttcccttggtgctggggtgggcatgctgtggcttgccccacgttgtaagtcaggagggaaccaggccagcaggctctgttagtggaaacagcctcaaaggggcctgcctcctggggtaggtgtaggtgcatcctgattcctttggttttcttggagctgggagaggtgtaattcacctgcacgagcctatctatgcgctgaaaaacaggcttttcccctgcctgattcgtagtgaggccccctgcagttaaccctcctctgayggatgtagagccagatggggcttagtaaatacctgacctcttaacctagcaggcggcaaggttctcacagccaagtgcatgtcaacagcatcaggtgaaagttaccttggatgtgaggaggcaggcagggcagg

SEQ ID NO: 592182 - DNA, 573 bp, Homo sapiens
ttgattacatttaaagacacgaagacaaaacagatgtttttaatgagtttctataaaattgaaaagatttgaaggaaaagatgatcgtctttttacattgtcaacgtaagacatgtcaatataaaagaaaattaagtggaatataaataaaaacacacttctctttaaaaacaaarttatcctctcagtgtggctcatgttcaagaagtaattaaaacatttttctacaatgcaattaaaaataacttttgaacttggatgaagtaaaccaaggcagcaaaccttcatatcctacagctaaataatatagaactttctatttagaaagcctttgctctgtgatagcaagtaatttatatgattttacttaatcaatgacttcacactaaaaccttctctttaaagggaaaattggtagtgattcaagaaacatggtatttcctaacctacctcatttttaaattagagcacgtttttcttccctttgccaggaagttcatcaaatttttagacagtatgcttactctgctttatgaaatgagatgaaacaagtacatttaagtgtgtgtgatt

SEQ ID NO: 592183 - DNA, 600 bp, Homo sapiens
cacatatctcataaggaacttgtctctagactatataaagaaatgttatgactcaataataaaaagacaaattacccaattttttaaaatgggaaaatgatatggatagtcatttctccaaagaagtcccacaaatagccaagaagcacatgaaaagatgtgtaacatcattagtcataaaggaaatgcaaatcaaaaccaaaagagaacacgacttcatacccacaagcatggctgtaatcagaaagtcagataacaagagagtgaggatcaggagaatgtggaagaggtgagaatgtggagaaattggaatcttcatacatcactggtgggaatgtaaaattgtgcagtcactttggaaaacagtctagcagttcctcatatggtgaaacataatcaaatgatccagcaatgacattcctacgtatttacccaaaaaaggaaaacatgtctactcaaaaagtagtacatgcatgtttgtagcagcattatttataataggcaaaaagtggaaacaactcaacrtcaactgataaatggataaacaaaatgcagtatttccatacaagaggatattatttggccctaaaaagggatgaa

SEQ ID NO: 592184 - DNA, 567 bp, Homo sapiens
  misc_feature 534, 535, 536, 537, 538, 539, 540, 541, 542, 543, 544, 545,546, 547, 548, 549, 550, 551, 552, 553, 554, 555, 556, 557,558, 559, 560, 561, 562, 563, 564, 565, 566, 567: n = A,T,C or G
tgaacaagcatggaaaataacccgtgtactcaacacccagctcattaagtctaagcagtttgtcatttttgctccagattttttaagtgaaaatatttcagatacagctgtagccctttatatacccttccagtgatgaacctacaggctgcttccaatttttyctactacaaataaggttacaattaacacaaatacagatgagagctcccctggagtctatactgtaaagttaaatttctttgtcctagggaatgcacatttttaaattcactggatatcatcacattgctgtcctgtttataaaaacttacatttgtgtttgacagtggttgatagttatcatttctctacatcttcaccaatagctggtattatcagactttattgccagactggtgggtgtgagatggtatcagattgtttgattagctgtgaggctgagcatgctttaaatgtttaaatgtcttctgtgtcttgcctgttcatatcctttgcccaattttttattgggttgtctgcacattccttatnnnnnnnnnnnnnnnnnnnnnnnnnnnnnnnnnn

SEQ ID NO: 592185 - DNA, 567 bp, Homo sapiens
  misc_feature 534, 535, 536, 537, 538, 539, 540, 541, 542, 543, 544, 545,546, 547, 548, 549, 550, 551, 552, 553, 554, 555, 556, 557,558, 559, 560, 561, 562, 563, 564, 565, 566, 567: n = A,T,C or G
tgaacaagcatggaaaataacccgtgtactcaacacccagctcattaagtctaagcagtttgtcatttttgctccagattttttaagtgaaaatatttcagatacagctgtagccctttatatacccttccagtgatgaacctacaggctgcttccaatttttcctactacaaataaggttacaattaacacaaatacagatgagagctcccctggagtctatactgtaaagttaaatttctttgtcctagggaatgcacatttttaaattcactggatatcatcacattgctgtcctgtttataaaaacttacatttgtgtttgacagtggttgatagttatcatttctctacatcttcaccaatagctggtattatcagactttattgccagactggtgggtgtgagatggtatcagattgtttgattagctgtgaggctgagcatgctttaaatgtttaaatgtcttctgtgtcttgcctgttcatatcctttgcccaattttttattgkgttgtctgcacattccttatnnnnnnnnnnnnnnnnnnnnnnnnnnnnnnnnnn

SEQ ID NO: 592186 - DNA, 588 bp, Homo sapiens
agagggactgggcggagtgagaaaggcctggcataatcatggaatgcccagggtggggttctacttctcttgcaggcacaagagaagtagaagagtggccgctttccttctgggcacgcacttgggaaaaggcttggtgagagcagcgagaagaataggtctaatttcttgagccagtgtgcggaggtgcttcccagcccaggctaagcaggatcactcagccagccgctgcgtcctttacagatgtacggctccccgtgagcaatcaacaygcctggctctcaggataagctgcctcacttcccttctgcacagcactccaggacttgcctgctaccagacccatcctactttctctgtcaggaaaaatgagagttcttcctggtctcttgaggccaatcccttccaccgcctgtgccctggatccctttctccaggaagcttctcttccctgtgtagttagcctccccgctcttcccaggtcaccttctctctgtttagggacagagccaagccttttccctcccatccccacctccagcattcccggttcctgcttctcccccacttcctgctgtactgcccact

SEQ ID NO: 592187 - DNA, 597 bp, Homo sapiens
cagatcagtttcactgtctggtgacttaaagagtcttaatgctgttggactctgttatgttattccattcactgaggtaggcatggaatccctacagcctccctctctgattcacaaatcacaaagtatttagcaatatatggtagatttataatgttcataacagttagtcaatgtgagacattcagcagccagagttcactttccttaggaggtcagcagaggagacttcttggtgatgtcatcacacttgtcttgaaagacctttgagggccagccactattactaaagaaaaaagtataaggtgataaatagagtaatagtgagataaatatatcactctattctcaggagagtaggaagtcagatgatcttacctaactatttgacctgacactattttttgaaaaaaaattctaatcttaattgtagttctcatttaaagacctgaagagttttttgtttgttcatttgtttttgttttttatrtttgtgcttaagctatttcaaagcttatgaatggaaattattttataaatcttttgattcatagaagtttcaacccataacactgaaggaaaatattggcatgcaag

SEQ ID NO: 592188 - DNA, 597 bp, Homo sapiens
cagatcagtttcactgtctggtgacttaaagagtcttaatgctgttggactctgttatgttattccattcactgaggtaggcatggaatccctacagcctccctctctgattcacaaatcacaaagtatttagcaatatatggtagatttataatgttcataacagttagtcaatgtgagacattcagcagccagagttcactttccttaggaggtcagcagaggagacttcttggtgatgtcatcacacttgtcttgaaagacctttgagggccagccactattactaaagaaaaaagtataaggtgataaatagagtaatagtgagataaatatatcactctattctcaggagagtaggaagtcagatgatcttacctaactatttgacctgacactattttttgaaaaaaaattctaatcttaattgtagttctcatttaaagacctgaagagttttttgtttgttcatttgtttttgttttttatatttgtgcttaagctatttcaaagctyatgaatggaaattattttataaatcttttgattcatagaagtttcaacccataacactgaaggaaaatattggcatgcaag

SEQ ID NO: 592189 - DNA, 597 bp, Homo sapiens
cagatcagtttcactgtctggtgacttaaagagtcttaatgctgttggactctgttatgttattccattcactgaggtaggcatggaatccctacagcctccctctctgattcacaaatcacaaagtatttagcaatatatggtagatttataatgttcataacagttagtcaatgtgagacattcagcagccagagttcactttccttaggaggtcagcagaggagacttcttggtgatgtcatcacacttgtcttgaaagacctttgagggccagccactattactaaagaaaaaagtataaggtgataaatagagtaatagtgagataaatatatcactctattctcaggagagtaggaagtcagatgatcttacctaactatttgacctgacactattttttgaaaaaaaattctaatcttaattgtagttctcatttaaagacctgaagagttttttgtttgttcatttgtttttgttttttatatttgtgcttaagctatttcaaagcttatgaatggaaattattttataaatcttttgattcatagaagtttcaacccataacactraaggaaaatattggcatgcaag

SEQ ID NO: 592190 - DNA, 504 bp, Homo sapiens
caatataacaaaaattttaactttcttgaaaaggatactcttctcctctaacagtactcttctttagtctgtttttagctgtcastactttgtgtagaaaaatttcctctgatatttgtttataattccaactgagtttatgtctgaatttgaactttttaaacttttccatgaattagactgtgagtttcctaggtagtaagcttttgagcacttatcgtgatgcctgacaaattacagatcctcaataagtagttgtggaatgaatgaatgaattcttgaacgggcctccttccacaattttagtactcagtctattacccaggcttgtgatctctgaaatattttgtagcttttgaatgttatctaacaaaacaatttttaaaacaatcaaaatatttaagtgacttttgttacagtaggaatgatataaagtctatgaattaaatttcacctaaatataaatattacaaagttgtaagggagctcttctagaacaaaacc

SEQ ID NO: 592191 - DNA, 504 bp, Homo sapiens
caatataacaaaaattttaactttcttgaaaaggatactcttctcctctaacagtactcttctttagtctgtttttagctgtcagtactttgtgtagaaaaatttcctctgatatttgtttataattccaactgagtttatgwctgaatttgaactttttaaacttttccatgaattagactgtgagtttcctaggtagtaagcttttgagcacttatcgtgatgcctgacaaattacagatcctcaataagtagttgtggaatgaatgaatgaattcttgaacgggcctccttccacaattttagtactcagtctattacccaggcttgtgatctctgaaatattttgtagcttttgaatgttatctaacaaaacaatttttaaaacaatcaaaatatttaagtgacttttgttacagtaggaatgatataaagtctatgaattaaatttcacctaaatataaatattacaaagttgtaagggagctcttctagaacaaaacc

SEQ ID NO: 592192 - DNA, 504 bp, Homo sapiens
caatataacaaaaattttaactttcttgaaaaggatactcttctcctctaacagtactcttctttagtctgtttttagctgtcagtactttgtgtagaaaaatttcctctgatatttgtttataattccaactgagtttatgtctgaatttgaactttttaaacttttccatgaattagactgtgagtttcctaggtagtaagcttttgagcacttatcgtgatgcctgacaaattacagatcctcaataagtagttgtggaatgaatgaatgaattcttgaamgggcctccttccacaattttagtactcagtctattacccaggcttgtgatctctgaaatattttgtagcttttgaatgttatctaacaaaacaatttttaaaacaatcaaaatatttaagtgacttttgttacagtaggaatgatataaagtctatgaattaaatttcacctaaatataaatattacaaagttgtaagggagctcttctagaacaaaacc

SEQ ID NO: 592193 - DNA, 515 bp, Homo sapiens
tgtttttatgttatttgtctaaatatatttccatgatatattttaataaaacattccttaggtatttatagttataggattgatggaacagatataatataaagtaagtaaaaaatcttcatttcaaataaagtatccaaaacawaaatttgattattgagctttaataacattttttaggtttaggggaggcttaatttggggaactggctattagaaaaaaattatttgaaattgcaatagataatgagctttaaaggtaaaaggttggtgcaaaagtaattacagtttcagtctgtgaatttaaaatcatgtataactaggctcaaacacatctttattaattaaaataggaaccattacaatcaacacattattgccaaggagaagtaaatttattcctgtagcgtaaaaagccatgcttcaggatttgatgaattcttggaaagcattttctacatcttgctggttccaacaactcaaaaactgcaattactttttcactcacctaatat

SEQ ID NO: 592194 - DNA, 515 bp, Homo sapiens
tgtttttatgttatttgtctaaatatatttccatgatatattttaataaaacattccttaggtatttatagttataggattgatggaacagatataatataaagtaagtaaaaaatcttcatttcaaataaagtatccaaaacaaaaatttgattattgagctttaataacattttttaggtttaggggaggcttaatttggggaactggctattagaaaaaaattatttgaaattgcaatagataatgagctttaaaggtaaaaggttggtgcaaaagtaattacagtttcagtctgtgaatttaaaatcatgtataactaggctcaaacacatctttattaattaaaataggaaccattacaatcaacacattattgccaaggagaagtaaatttattcctgtagcrtaaaaagccatgcttcaggatttgatgaattcttggaaagcattttctacatcttgctggttccaacaactcaaaaactgcaattactttttcactcacctaatat

SEQ ID NO: 592195 - DNA, 442 bp, Homo sapiens
ttcttcttttgaaatatcaaatctgtcttttatttatttattgcccctaccaccacattggtgttgaccttcaattacttgttgctaatcttcttgctcccagtatgatttcccattaccctggatctcattaatatggcttttattgttatttcttaacaacaagaacaacaacaacaatacatgctatattattttgtctctaatcagacagaacctgttaaaagatttatgatttttttcaacataactactttctsccagtcagacttgtgtctttattcctattccttgtgtattcctgaacacccttggttcatgtttcccgagaatctacaatcttagttcaaaaattcattttaccaataagcgcatcaaatctttttgtgagagacatacaggggaaaggaaaagtattttttttaagtcctagagaggctac

SEQ ID NO: 592196 - DNA, 566 bp, Homo sapiens
tacacaatggaatactgttcagccataaaaatgaaggaaatcgtgtcatttaycacaaatcgaatcaatctggaggacagtatgtttagtgacataagctaggcacacaaagaaaaatgtcacatgatctcactcatatgtagaatcaaaaaacaaatgatctcatagaagtagagaatagaatggtggttaacagaggctggagtggtttggagggaagaatgtggagatgttctcaaatgaaacataattacagctaaataggaggagagatctattgtatagtatggcaaccatagataataatcatgttgtattcttaaaaaacacaaagagagttgatattaagtgttctcaccacaaaaataactgtgaagtaatgtatttgttcaccaaaaacatccacaatgagaaaagttatatttaagattaataaattatcttaatactcataaagtaactagtttccattaacacccatgtgtgtgagagttttaaatcaccacagatatgtaaaactgccattttacaattgagtatttgaaatgatcctacaatcactagtt

SEQ ID NO: 592197 - DNA, 522 bp, Homo sapiens
agaccacagtggaataaaatttgaaatcaactccaaaagaaactctcaaaaccatgcaagtacctggaaattaaataacctgatcctcaatgatcattgggtcaacaatgaaatccagaaggaaattaaaaatttctttgaactgaatgataatagtgacacaacgtatcaaaacctctgagatacagcaaaggcagtgacaagagggaaattcatagcattatatgcctacatcagaaagtctgaaagacacaaatagactgtctaaggtcacacctcaaggaggctagagaaacaagaacaaaccaaacccaaactcagcagaagaaaagaaataatccagatcagagcagaactaaatgaaatcaaaacaaacaaaaaatacaaaagataaatgawacaaaaagctggttctttgaaaagataaataaaatttctagactattagtgagattaaccaaaaaaagaagagaaaagatccaaataagctcagttagaaataaaacaactgctaccacagaa

SEQ ID NO: 592198 - DNA, 621 bp, Homo sapiens
atttacaacaacttgtgaatttcatgttctggctattaaatctctcttagaggcagtgatttgtatatatgcttagaatagggtttattattataattaagatagcatatatgtatctcacaaagcttgatgttaaggaaagttaaaatcaatataataaaatgttaaacctatggttctacttttagagttcttgtcttataaattgtacaaatacataccaaaatttagaacttttttaacatattgtaagtcatccacaatgttaattttagaataaacatccctgaagttttaataactgaaaattttccactaggtgcactgttttttctagctaaaacaatatttcagatggtctaagaggtagtgaagcaaagcatttctgcaaagtaccagacagtaaatattttaggctttgcaggtcacatgctcctcwgtcccatattattattcttcctttttttaaaaaatacacttgtgaaatgtaaaaattattcatagctcacaaactttaaaagaacaggcgtggacaagatttgtcccatgggctacagtttgccagcccatggactaagagtctttgaaattaaatctttcttgcaagttagacaggatgca

SEQ ID NO: 592199 - DNA, 509 bp, Homo sapiens
ctataaatatagctagccagcaatctacaagtgctactctgcatatgtcctgctctgtctatggagcagccgtttttccctactctgttactctaataaacttgctttgcttgcactttattctgttggtgtactcttgagttctttcctgtatgaagccaataactctcctggctaagccccaatttgggagtttgcctgtatcaagagcatcctgtgttttttttttttttttcccctcttcactcaattgtgattacttcattatgtttttgattaactccctaactgattcagaagtatgtaagtcagctgtgaggtttcagaccayacctctttggtccctgtgtatctgatgaccacagtgttcagtggtcaataaatgtgcttaagtaaatgaatataaatgtgcatttccaaattcccatctatctacatttcataggtcttgttatttctggatgtacaaaaaccagttctattaccattggtagttaaaaaccatatat

SEQ ID NO: 592200 - DNA, 506 bp, Homo sapiens
tatctgcaacaggagcttgatgtacagaaactagaaggcaacaaaggtcacactgacctattatttaattagaaagaacaaaagttttctcaatgaccctaacagttctttaaactgaattgaagatgctggtagactgtaactttcagcagatcgtcgtcagttctaaggttatttcgtcagttctgttaccattacagccaagacatcatacgacagactacttcaaatctcacctctacttgccaaatccgggatgagaacaggacaggtgacacagcagacrgtggcttctccacgctcatggttggctgaagttgccttctagatgggctttcctttttataaaactaaacagcatatcacactggaaattgtttttgccttgtagatatatctggtaacaaattctgacatattggattttataaattctatttaagccttacaggagattttaagtttcctaaaattcttgctgtgttcattcccaattatagactagt

SEQ ID NO: 592201 - DNA, 594 bp, Homo sapiens
cttttattgtcatgtacctaactcagaccagatggttcaaacgacctcatgactgttacatcttcagggtggaatgttaaatatacccttcctgaaagaaaaatacagtctcaactaatcagatcattgtaaatatgcatccagccttgtacagaaagatgttgaaattctttttagcttccttaaactttgtctctataaacaaccctaagcttctaccatcagaacactgacttttagtctttgtaacctgtgcttcctgagtggctgtcttcaaactttgtgcttgaataaactcttattaaactagattctaaccctttttaattatttyaggttggcattatttataattacaacatattcaacaccatctctcttacacgtgcatttttttaataaaataaaagtaagagcaagagccaatggaagtttccagggcaggtgtcaggtactttactaccaacctttgcagccttgtcccagccactttttataaaccaaaataaaccacataatttcaggcaagtgcccctgtgagaaaagcttgtgagaaaagcactacccatagcaaggtttcctcttcttaacaga

SEQ ID NO: 592202 - DNA, 548 bp, Homo sapiens
ctaatgggtgaataatattcaactgtattgttttaccataaattttgcaataaaatccctgtcattatcatttaagttcctctttacttactaacatttctctaaacagtcttgcataaaattgatttgtgtaattttctaagcactgtggatatggatatgtttccatggcaaaattttaatgttggtcgttctgggtgatgtgttcataggctattttatttkaatgataaaatttgttcaattcgggactcgcagccaagatggccaaataggaacagctccggtctacagctcccagcatgaacgacgcagaagacgggtgatttctgcatttccatctgaggtaccaggttcatctcactagggagtgccagacagtgggtgcaggacagtgggtgcagcgcaccgtgcacgagccgaagcagggcgaggcattgcctcactcgggaagcacaaggggtcagggagttccctttcctagtcaaagaaaggggtgacagaaggcatctggaaaatcgggtcactcccaccctaatactgtgctt

SEQ ID NO: 592203 - DNA, 574 bp, Homo sapiens
aagaaaaatgtagttactttatatcaaaaatgatgacttctgtgtttcaaaatataccatccaagaattaaaatgcaaaccaagagtggagaaaaatatttatcccaacatatatgcaataaaatacaatacaggtgattaaygaaggtaataaataaaagaaaatgaacccaatataatattgggaaaatatttgaacaggaacttcataaaattggaggcatgaatatctggacaaatatgaaaaagggattacttttattagtcctcagaataataaaaattaatccataagttgaactacaggcctccataaaaattagcaaaatttaaagacacataatattgtgtgttgtgaaagataaagaatcaatgaaagtaattcatgcctggagggatgtaagctgaaatactttttggcgaactgactatgagcattccttatgggctagatattctaattctaaaatatattcctcagactgcctatgtgtatttcaagataaacacaatgttgatcattgcagcaatttttatagtagctcaaattggagacaaaataaatattcaacaa

SEQ ID NO: 592204 - DNA, 574 bp, Homo sapiens
aagaaaaatgtagttactttatatcaaaaatgatgacttctgtgtttcaaaatataccatccaagaattaaaatgcaaaccaagagtggagaaaaatatttatcccaacatatatgcaataaaatacaatacaggtgattaacgaaggtaataaataaaagaaaatgaacccaatataatattgggaaaatatttgaacaggaacttcataaaattggaggcatgaatatctggacaaatatgaaaaagggattacttttattagtcctcagaataataaaaattaatccataagttgaactacaggcctccataaaaattagcaaaatttaaagacacrtaatattgtgtgttgtgaaagataaagaatcaatgaaagtaattcatgcctggagggatgtaagctgaaatactttttggcgaactgactatgagcattccttatgggctagatattctaattctaaaatatattcctcagactgcctatgtgtatttcaagataaacacaatgttgatcattgcagcaatttttatagtagctcaaattggagacaaaataaatattcaacaa

SEQ ID NO: 592205 - DNA, 574 bp, Homo sapiens
aagaaaaatgtagttactttatatcaaaaatgatgacttctgtgtttcaaaatataccatccaagaattaaaatgcaaaccaagagtggagaaaaatatttatcccaacatatatgcaataaaatacaatacaggtgattaacgaaggtaataaataaaagaaaatgaacccaatataatattgggaaaatatttgaacaggaacttcataaaattggaggcatgaatatctggacaaatatgaaaaagggattacttttattagtcctcagaataataaaaattaatccataagttgaactacaggcctccataaaaattagcaaaatttaaagacacataatattgtgtgttgtgaaagataaagaatcaatgaaagtaattcatgcctgsagggatgtaagctgaaatactttttggcgaactgactatgagcattccttatgggctagatattctaattctaaaatatattcctcagactgcctatgtgtatttcaagataaacacaatgttgatcattgcagcaatttttatagtagctcaaattggagacaaaataaatattcaacaa

SEQ ID NO: 592206 - DNA, 631 bp, Homo sapiens
tgctcagagagagtggtcagagtatggagtagggaggtttggtactaaagactaatttaaaaacttaatactgcaaaaaattatctgtgaaccaccataaattccaatgactctcatgtaggttgtctgatatcaaagggtgtatattgaagaaatgatgaataataacctttattcgggtgttttaggaagtcatataatcaataaaagaggttgaagaaaagaatgaatttggcttctagtattgttaagacacaataaaaataaatgaaagaaagggattaatgattgatttcatggttctgagaagtaggaagacatgagtttatgtatatagcttattggtaggctatatcagtcagtctaggctcagtggctcaagttmgtaatccctatgatttgggactgttacatcaggaaagggttttaaagacgaatttcccttgaatgatgatttgtttttcaatcctgtgattaaatatttggtattagaaagctcagttgtattttcctctttaaaggagtgagtcagagcagtggcacatgccccagtgtgtgagctcagagctcacagctcaacccatcagtcgctaatggacagatttcatgacttccaggtgagtgtcaacct

SEQ ID NO: 592207 - DNA, 572 bp, Homo sapiens
aatttttaaaaaattcattttttgtagacacagaggtctcactgttacccaggctggtctcaaactcctgggcttaaaggatcctccagccttagcctcccaaagtgctggcattacaggtgaaagccatcatgcctggtccactatcaccatttctattaaacatagtattataggtcttatccwgtacaataagacaggaaaataaaaagaaatattaaaattggaaaagaagaaatcaaactgtcattattcacagatgacatgatttatatataatgtcaagggctaaactgagttggagagatggagttgacctctcaggtttagagtagtccattaaagcaaaaagccaaaaataaaagaaacagtaaagcttttaatcatttacttaaatacttataagcaagagttcaaaaccatagaaaccaccaactcccttttgttctatttttttccctgtggaccagtgcaccagctaagggtcagatggatcactacaaacacaggcataatatcactgctgagggagccccaaacaaaacattgcctgcatccctcatatgaaaccc

SEQ ID NO: 592208 - DNA, 529 bp, Homo sapiens
caccagggcctgttgtagggtggggggaggggggagggatagcattaggagacatacctaatgctaaatgatgagttaaggggtgcagcacaccaacatggcacatgtatacatatataactaacctgcacgttgtgcacatgtaccctaaaacttaaagtataataaaaaaatgaaggtagagctcaagtttctcaccatagcaataaaaatgattaactatataaggtgakgagcatgttaattatgttgattatggtgattattacccaatgtgtaatatataaatcatcaagtagtacacctcgaatataaaaattttttgtcaaatatacctcagtaaagtataaggagggaaagaaaaacaacagcatttggagtcaagtcctttaaactggctgccattaatttcatgccctcagtgctctagatctcaagcaaccaataacatttttccaaaaatggtttcatattagatgaaaacacagcagctctttctgtagcatgagttgacagggaaactacatgt

SEQ ID NO: 592209 - DNA, 544 bp, Homo sapiens
ttaaactcaactgtgaaaggtttatctgtggcattgcagatggcatctgaactcactcccagaagatgataaacgttaacttcagaacaaatcaagaaaactttatttgartgcaaataaagcaatgttcttccctaaaaagtcatcagtttatcacacagtttcagtcaggttagctgaaggtgtattagtaagggagtggggaaagagaaaacaaatgtaggattattctacttatctctaagtgctcatggaatgtacaccacaatagaaaatacactgggccacagtacaagatgcaatacatttcaaaggactaaaccatacagaacacatatctgataatagtaagcttcaactaaaaatttataacaaaagtataactaaacatcccccaattatttacaaatcaagcaacacaattctaaattattcatatattaaagaagtgccaatgaaaaatttttaatgaattttaacttaaaggtggtaaaaacaaacaaaaaaaaatactagatgcagctaaagaattgctcagagagaa

SEQ ID NO: 592210 - DNA, 430 bp, Homo sapiens
tccatgtttcacaattcactatgagactagctgtggatctcccatatatagcttttattatgttgaggtttgttccttctatccccggctttttcagggctttatcatgaagggatgttgaattttatcaaatactttttcagcatcagtttaaatgatcatatggtttttacccttcactctgttgatatgatgtatcacactgattgatgtacatatgttgaaatctcagggataaatcccacttggtcatgatgaatgatgttttaaatgtattgktgaattcagtttgctagtattttgttgagggtttttgctttaatattcatcagagatattggtctgtagttttgttttttgttgttgttgttgatatatctttgtctggtttcagtatcagggtaatagtggcctcagaattagtttgaaa

SEQ ID NO: 592211 - DNA, 608 bp, Homo sapiens
taaaggacacaaatgttctaacaataccccctttcttattctgcctttaaaataagaaaacagcttctcttgaatcatagtgtttagagaggataccgagaacattaaaggatctatcattatacctaaggctttgtcctcccagggattaattatctctgtttttaaaagatttttccttagaaacagaaatttgggagtatttgcctattaacaacccatcttcacmtgattagttattttccctgcattttaacctattaacatcctacatccctggcctggaatattatgcaacaaagcactccttttataagcccttaggtgtcatgaaggattctaaacacttgtggataacaaaatggggtttcattcaggttgaatatttctgaggaagtttcctcactgtctgaggtaacagaggaggctgagtttctgaatcaatctctcaactgtactataaacacatcaggacacattccatccatagaaatgaaccttggaacttgatgcactttcaggcagagtgatatctggagttgggaggcaaattgaagctgaaatcctagtgtcaacttttccagtgtaaaaatccaaaaaaatagatt

SEQ ID NO: 592212 - DNA, 608 bp, Homo sapiens
taaaggacacaaatgttctaacaataccccctttcttattctgcctttaaaataagaaaacagcttctcttgaatcatagtgtttagagaggataccgagaacattaaaggatctatcattatacctaaggctttgtcctcccagggattaattatctctgtttttaaaagatttttccttagaaacagaaatttgggagtatttgcctattaacaacccatcttcacctgattagttattttccctgcattttaacctattaacatcctacatccctggcctggaatattatgcaacaaagcactccttttataagcccttaggtgtcatgaaggattctaaacacttgtggataacaaaatggggtttcattcaggttgaatatttytgaggaagtttcctcactgtctgaggtaacagaggaggctgagtttctgaatcaatctctcaactgtactataaacacatcaggacacattccatccatagaaatgaaccttggaacttgatgcactttcaggcagagtgatatctggagttgggaggcaaattgaagctgaaatcctagtgtcaacttttccagtgtaaaaatccaaaaaaatagatt

SEQ ID NO: 592213 - DNA, 397 bp, Homo sapiens
gggcatgtgcagcagcacggactcacttctggaaggaaaaacctgcagttacaacatctacagccataaaataaataaaaatcactatttctatttaaaagacagttcatgagaatcctgtgaatccacaaatttgattattcaaaaattattccttcctttttggaattaatttttatttacagtttccaaattttaaagcatagtgggagagcctgagtcagaattcagtctgatctttctttttttctgccccacatgtgtaaggttmcttagccttatggccttgagaatatttggaaatgaaattctgagttccacttcttggcagactcccctgacctctttgtctgaaatagcggggttttggggagactgctgcatctgctgcttcctt

SEQ ID NO: 592214 - DNA, 550 bp, Homo sapiens
ttcttttgagaggtgtttattctcattctttgtccatttttttatttttttgctattgagttgtatgtgctccttttatattttggatattaactcctaatcatatacatggattgcaaatattttctctcattccatagattgccttttcactttgttgattgtttcctttgctgtgaagaaacttttcatttgatacaatactactcatttatttttgcttttgtgacctgtgcttttggtatcagattmaaatataattgcccagaccaaaatcaagattttctttctcctgttttcttctactaactttgtagtttcaggtattgcatttaagttgtcaatccattttcatttgctttttgtatatggtgtgagataagggtccaatttcattcttctgtttgtggatatccagtttttctaacaccatgtattgaaaagactcttcttcctcctactgtgtgttcttgacacctttgtcagagatgagttaatagatgtgtgggtttatttctatgctactatagtattagaatagtctgtcttt

SEQ ID NO: 592215 - DNA, 555 bp, Homo sapiens
cctgtattattctttatatacttacttatcttataatgtttaaactttttctytttgttctggggtatttagtaatctggtatttcctttctttttctctgtatcctaacctgctatttactgcctcaacttcatttgagaaatttgctagttttcaccaacattaaaaattaattcatggtccaatagttttttttcaccaaatctcaataaaatgttaagcctttctctagttttctcctgtttcttcaagtaaatctgctttataaggggggatttgttcattttctccttgaactcccatcttacgatgtggctaggatttttatctctttgctctttttaataaaagtaagaggagctctttgattgtctgatattggagattgtgcaggatcatatcaagcttgcgtgttaggagctggtaaaggaaaaaaaagttttattttgttggaatttgtacaaagccagagagcttgtttagagactattatttttaggaatgtagtgcctttcctaggaggcctaatttctccacatcctcgccagcatttg

SEQ ID NO: 592216 - DNA, 591 bp, Homo sapiens
attgaacatttttaatatcataatctgtaactctagaaatcataatcttcttctccccaggatttgytgttgctacttgtaggttgtagttgtttagtgactcttctaaattctttttataagactgttttctctgttatgtgtagtcaccaaagttccagttctgttaacttactggtcagctggtgatttaacagaggttttcttaaatgcctaaacccaatgtaacaaaaaatacttcaagtctttgtggactggctacgtgtttgagcattcctttaatgcttagctaggccatttacatttgcttaatgtccactttcagcttcacgggagcctaaagacaggagccagagatgaaagttcatggtgttctccagtcttttctgagcatgtctagtcctgggcatttgtgtggacttccaggttatccaattatgtggaatctattaaaatacttattctcacatttatattctttccctgacttttcctaacctttctagtctgtctgctgcttttgctatctgttataaccttccccaggcagcagcagtgagtatgtttgccttaaatgatttctttaaatgc

SEQ ID NO: 592217 - DNA, 591 bp, Homo sapiens
attgaacatttttaatatcataatctgtaactctagaaatcataatcttcttctccccaggatttgctgttgctacttgtaggttgtagttgtttagtgactcttctaaattctttttataagactgttttctctgttatgtgtagtcaccaaagttccagttctgttaacttactggtcagctggtgatttaacagagrttttcttaaatgcctaaacccaatgtaacaaaaaatacttcaagtctttgtggactggctacgtgtttgagcattcctttaatgcttagctaggccatttacatttgcttaatgtccactttcagcttcacgggagcctaaagacaggagccagagatgaaagttcatggtgttctccagtcttttctgagcatgtctagtcctgggcatttgtgtggacttccaggttatccaattatgtggaatctattaaaatacttattctcacatttatattctttccctgacttttcctaacctttctagtctgtctgctgcttttgctatctgttataaccttccccaggcagcagcagtgagtatgtttgccttaaatgatttctttaaatgc

SEQ ID NO: 592218 - DNA, 574 bp, Homo sapiens
gggattttttataagagtatattaaacctgtaggtcaatttgggcagaaatgacatctttggtatattgaatctcttaacccatgctcctggtatgtttctatatttattaaattttctttaacatcttttatcagtattttgtaactttcgacatacaggtcctatacttgttttgctaaacctctagttagttcccttctctctctctcttttttcttgagcgacagtaaatgatatttgctttttaattttggtttcctcatgtttgttgtttgtatatacacatgcaattaatttttgtgtgatgatctttattctacaaacttactgaacttgcttattagttctagagggtttttgggtgattccttgggatcttctyggtagacaagtcatgtgaaaatagggacaattttatgttttccttttttgatttgtatgccttttatttccttttcttgccctattgctaggacttccagtcggatgttgaataagagcagtgagagtgggtatgcctggatttttgccactcttgagggaaaaacattcactctttcaccattgtttat

SEQ ID NO: 592219 - DNA, 558 bp, Homo sapiens
tgaattactctcaaagtcagtgacttaaaagaacaaatatttattatttcacatagtttaggagtttcaggaatctagragaagcttctctgggtggtgttggttcagggtatcatgaggttgtagtccaactgcaatccaatggggctgcagtcagcttaaggcttggttgggtccagaggacccacttccaagatggcttagtcatatggctattgacaagaggacttagttatttaccacgtgggccactccatgaagccactcgtgatatgctgatgtcttccccacagtaagtcatttgagacagagagagcaagcaagatagaagccatagtgactttttgtgacctagtctccaaagtcacaatttttcaattccattactctattcattaaaagcaggtccagcccatactctaggggaggggaattgggctacacatcttgaaggaaggaatatcaatcaattaactattaagagaataatattataatttccagttacaactgtggatttgtttatttcatcctttatttctattggattttgcttca

SEQ ID NO: 592220 - DNA, 599 bp, Homo sapiens
ctaaaggctggatgttaataaaacaaaaaccaagatgaaagagatcacacaatgtgcagaaagaccaagtcagaactgcaaggcaaaacaaacttcccaataaccccaaaatatggcaggtaaactgaaatccacaaagagatctgtcattgctcagatttcaagcactgctggagtgaaatatctgatcccattctcagagtgtttgaaaccactggtgaactcaaactgaaagtgcaatgaaatgcagacacagctgaattaaataacagagtcagcccccaaaacaacctgctctccacaataaggagcaaactcttctatgaaataactattattaacttaattaagtcacgtggtcaagagaataaagagtcaatataagaagattcacagatgtcctgaaggttggaattayccagaagatactttaaaataacattggtaaatatgttcatgcatatagtgcaaaataaggacaatattcatgagcacatagaggacatagcaaaggtaagaaggtagaaaaaatatacccaatgaaaaagagaaaaattaaaacaaaatgtataattttattaattttaaactataaaata

SEQ ID NO: 592221 - DNA, 602 bp, Homo sapiens
taacctggctgattccgaaagcattcagtcatatgcattcacaaagagattatctgaaactgaaacttttatttaaaaggaagcagaacataaaagcttagaaaattttgcagcctgaccattaggtaaaaaagaaaaactcattttctggggagaaattcaagccagccrcagaaatttgtgtaagtaaggaggagccaaatgttaatagccaagacaatggggagaatgtctccagggcatgtaagagatcttcagggcatcaaaggcccagggccccgctgctctgtgcagcctcaggacttgatgccctgcttcccagccactccagctccagctgctaaaaggggccaaggtacagattgagctgttgcttcagagggtgcaaaccccaagccttggcagcttccacatggtgttgggcctgcaggtgcacagaagagacaattgttgagctttggaaacctccacctagatttcagaggatatatggaaatgcctgaatgtctaggcagaagtctgctgcaagggtggagctcttatggagaacctccactagggcaatgcagaggggaaatgtgaggttggagcccccacacaga

SEQ ID NO: 592222 - DNA, 637 bp, Homo sapiens
acaaaatgcttcctaggcagcatttatttctaggaatccgaaaatgcaaaagactcattattgctgaggaaaaaatagagaggagtaagaatttttcctttgtcttgcagatattactaaacgggttgaaaaatactaaatggaagcccacaacataaaaagttaagagacccattaactaggactgaagtggaaaacaatggcataaaagttcagataatgaaacataaaattgcttatagatgtggaaggaaattaaaccgtgaaataaattaataagtacaagtctcaacttgaaaaagaacagcaaaaatgtaaggctttacaaatagaacttctataaaaatatgtgattgggtctaaattttacagtgtgcttcagtaacagcaaarcacaaactaagattggctgcaagggcgtttattcaagtatttgaatatggatacaatgtcctatcacaggtgcaacaagctgattaaaatccctgtgcagagatacctcctttattgtcagcagaataaatctgatactgttgatagcaaaaatggaggttactgacatccataatgaaaacacaaagatatatcccaaccagttgaaacctaaatctttttctcttagaacagtagcaaaatg

SEQ ID NO: 592223 - DNA, 612 bp, Homo sapiens
gccagcccatgtggaccatcatagaataataaaagttgtagaaggaaagaacaagaaaaaaaaggtgggttrggggagaattataagaaaataatgcaagataattttctagatatgaaggacacaactcctcagaagagagtacccacttaaaattcaagtacaacatgaattttaaaaggcctacacctagacatatcaggaattgcaaaataccaagaaaaaaaaaaaagagtaaatcctaaaagccagaagaaaaaagcagatgacctacaaaggacaaaaatgaatgtctgaagagagtggagcatcaccttccaaattcagagggaagatttgtaatctagagtcccagataaactagaattaagatggcaagcaattaaaatggatagtaattgcttctcctcaccacagtctttaaaggtgtgccttttctataactttcaacatgatgaattgtgaagactattataaaaaacagttaggaaagtggtacaaaatgtcaattttaaacagtgtctcatgtagagtaggtggccaaaaatagcaccttttaaatgtgttttctccttttctaatgtggatgcatacactcactacttctctcct

SEQ ID NO: 592224 - DNA, 569 bp, Homo sapiens
ttcctctttctgacaattagaaaataagatatcacttacaactgtaacaaaaatattaacaagtctccctacataaatcaacaataaataaatgtaaaattatattaaaggttacaaataaggccaatataaatggaggggtacaccacgttctcatgcagaagtgggaagaaaatasttttttataaatctagcaatatgaaaaaattttaaaacatgatgttgatcctggctaacacagtgaaaccccatctctactataaacacagaatatcagctgggtgtggtggcaggtgcctgtggtcccagctactcaggaggctgaggcaggagaatggcgtgaacccaggaggcagagcttgcagtgagctgagatcgtgccactgcactccagcctgggcgacagagcgagactccatctcaaagacaaacaaacaaaaaaacaaaaccaaaaaaacccatgatgttgaatgaaataataaacagaaacaaagtatataatgtgtgtaaaatttaaaacaaacacaaaaaacaattgtttttaggttttgtgtgtgtgtatatgtgca

SEQ ID NO: 592225 - DNA, 548 bp, Homo sapiens
gcaatttatgcatcattagtaacatctgtgaccacaaaaagatcagttaaagcaaggaaggacaaagagagagagagagagagaggtaagagagaatagagaaaaaagttttgattaattcagtttcttaactgcacctctagtttttttgtgttgttttctagtaacacgaagtcataaaggaatctagagtaggctagatatgtgcaaatgtttccactacatatccacatgagtgtactaaatacaatcatatttacgcccccttcagtgaggtagagaaagatagcacttctttggatgatttgttcggttacaggacaagcttgaacatgatcacttagtgcctcactcctgtttgtcaggctttatataagagctacttatgctaagraactatatcatgttcatcagatataaattatgtttgtattgcaacatttctattaaaatagataatattttcaatgtttatgttgtttatattaggcaaatcattgtagttcttcataagcaataaatggaatggattatcctgcaagttaaag

SEQ ID NO: 592226 - DNA, 529 bp, Homo sapiens
gcagtcaaaaaaataaacaatgtaggtttattaattgtaacaaatgtgtcactctggtggaggacgttgataatggatgaggctgtgcataaggcagtatacatatgggaaatgtctgtactgtaacttccactcaattttgctgtgaacctaaaactgctctaacaaaataaagtctattttaaaaatcaaactaactraaggactgaatgcctaaccatgagactattagatggtcaaactccctttgctcatgaagtatgggttatctgatgcatctacccacaaggcctggtatgaacattaatggaagtctaatagatgaaatttgctccaagacagttctggaagcatatataatttgcatgagctggtgactcacattcccagtgggccaattcttattccagttctaccattctctcaacttattatcacaaatgacctcctagggaatttcttaccatcagttgactaaagagaaaaatattttaatctgttttagggctccatgccatatgcatatagc

SEQ ID NO: 592227 - DNA, 470 bp, Homo sapiens
ccatattactgatggatcttacctacatctactttagcaattgaatctcacctcatgctttccctgcttactcttttgaagtttttttttttaactattttctgcaatatcatctttataaaatacttctaggggtttgtgccaaccrttcttccagtatttattacctctctcctcttcactgtttggtaaacagttttcctttaagaaatcaggtcaaacgtaacctatctgaaatatccctaaacaatttcctattaaaatttcctctatggtatcatagaattagctttatatgtccagcaattcaaagggcatgaacaatagaatgtatttaaccaatgattattgaattaacaaatctattaatcttgtaaatttatttcaaaaatgtagaaacaaatgtcagctttatgcctctatgttgtttttgtgattttaaaaaattatctgtgaagatggaaaatagt

SEQ ID NO: 592228 - DNA, 508 bp, Homo sapiens
ttcagtactctttctagaattttgctaataaagatataaaggaaagaaggttgaatgccaataaatctatgttggcaaaatgttcatagagrtttaatgtcaaatataaatcttttacttccaattttattaaagagccccataactatgcatcatttagagatcagtgcataattccaacatccaaggttattgtaacctgaggaaaaaccattcttagtgattaaaacttctaacttatcaaatattcggttggtttatttttcagggaaattatactagcaagtatctctgtgtgatgcaatatttatatgttcttcttgacaattttggacaggaagctgtcaactgaggaacaaaatctaaaacatatcacaaaagagtgtattttgcaaaaacatgagcctttcaatcagaggctattcaagggagcatatgagatctctttgagaaaacacagtatctgcaatacagggagaaaaattaaactaatgatgtaaaagcgcta

SEQ ID NO: 592229 - DNA, 431 bp, Homo sapiens
ggtgttatgtccagagattgttcattcagatgtgtccgtagtttcttccttctggcaggttcatggtcttgctcacttcaagaatgaaggttcagacattagtggtgagtgttacagcacttaaaagtgttatgtccagtgattgttcattcagatgtgtccgtagtttcttccttctggcaggttcaaggccttgctcacttaaagaatgaagctgcagaccttagtggagagtgtttcagcacttaaaggtgttatstccagagtttgttccttcagatgtgtccagagtttcttccttctggcaggttcatggtcttgttcacttcaagaatgaagctgctgacctttacggtgagtgttacagcacttaaaggtgttatgtctagagtttgttccttcagatgtgtccagagtttcttccttctgga

SEQ ID NO: 592230 - DNA, 431 bp, Homo sapiens
ggtgttatgtccagagattgttcattcagatgtgtccgtagtttcttccttctggcaggttcatggtcttgctcacttcaagaatgaaggttcagacattagtggtgagtgttacagcacttaaaagtgttatgtccagtgattgttcattcagatgtgtccgtagtttcttccttctggcaggttcaaggccttgctcacttaaagaatgaagctgcagaccttagtggagagtgtttcagcacttaaaggtgttatgtccagagtttgttccttcagatgtgtccagagtttcttccttctggcaggttcatggtcttgytcacttcaagaatgaagctgctgacctttacggtgagtgttacagcacttaaaggtgttatgtctagagtttgttccttcagatgtgtccagagtttcttccttctgga

SEQ ID NO: 592231 - DNA, 431 bp, Homo sapiens
ggtgttatgtccagagattgttcattcagatgtgtccgtagtttcttccttctggcaggttcatggtcttgctcacttcaagaatgaaggttcagacattagtggtgagtgttacagcacttaaaagtgttatgtccagtgattgttcattcagatgtgtccgtagtttcttccttctggcaggttcaaggccttgctcacttaaagaatgaagctgcagaccttagtggagagtgtttcagcacttaaaggtgttatgtccagagtttgttccttcagatgtgtccagagtttcttccttctggcaggttcatggtcttgttcacttcaagaatgaagctgctgacctttacsgtgagtgttacagcacttaaaggtgttatgtctagagtttgttccttcagatgtgtccagagtttcttccttctgga

SEQ ID NO: 592232 - DNA, 610 bp, Homo sapiens
atgtgggtcccctctccctcccccactccaaacaacttgagccttgtgtaagcagctgccagacctgccccggggcaaggaagagcatgcagcaggtcaggacggtatatgacatgctggcacaaacacccgttgtcccacctccrccctttccaccctccgtgcgtcagctcccctgcagcacatgccgtgagcaactgtgctgctgacagtgttatttcctgtcacgaaatgaaatgtgtaaatgaaagtacaaaagaatggagggatgactggtggccctgtcacactggtgacacctagggcctagctgtaggaaacatgtctggctggctgccccgcctcctcacgccagtgcttttcccagcctgagcatctccatctctcagtgatatgctgtccaggcttggaacattctgctcctttggccactccaggtgtgggcatctcttgcctcctgttttacattggtttttcagtctgtcacagttgaatccctttagctgttcacactgtactgagattatgggcccatggatctctgtgctggaagggatgtcattggcaccagcacccacccaacaaatagtggaatgtccttgtcactatt

SEQ ID NO: 592233 - DNA, 595 bp, Homo sapiens
atctggtctgagaaacagaaagaagcaaatgaaaaaacagaaaattatgggccaccatgaaacacatgaacatctaaatgttggcagttccggtaggagagaagagaaggaatgcttgaggaaataattgccaagaattcccaaattcaatgaaaacttttaatttacacatcaaaaaaccctgaaataatagcaagtagaataaactcaaagatttttcacacctagaaacatcataatcgaaatgtcaaaaacccaaattaaagaaaaaatcttgaaaggaggaagagagaaatggcttgtcatgtccaaggaatcctcaataaaattaacagcaggtttctcacaagaaatcatggcaggcagaagggagtggatgacatgtttacagtgcttaaagaagatgactgtcaacaaagaactcaataccsagcacaattttgcttcaaaaatgaagcagaaattaagacttccctaggtaaacagaaactgaggggatttatctctagcagatttggtttatcagaaatactaaagagagttctttaggttgaaatgaaaggactctagacagtaattcaaacccatatgaaaa

SEQ ID NO: 592234 - DNA, 577 bp, Homo sapiens
tgtggacctacatctttaatgcattcaggtaaatacttgagtgctgtgcttggttgtatggtatgagtatacttaaatttgtaagaaactgccaaacctcttcaaatatggttgcaccttattgtaatcccaccagcaatgaataagaggtttttkttgtttccaatccttgtcagaattcgtgttcagtattttggcttttagccattctaatagttgtgtagtgatatcttgtttaatttgcaatttcctaagaacatataatgttgaacaactttttatatgctttttttatttatacacctttttggtgaggattatattaagatcttttgcccactttttcataggtttgtttgtttttctactgctgaatgttgagtcctttgtacattttgcatacaagtcctttagataggagttttgcaaatatttctccccatctgtgccttataatttcattctcttaagactgtctttcacagagttaaaggttttaattttaataaagtccactatattaatgttttattctttcacaaattgtgcttttggtgtcgtatctaaaaaattattg

SEQ ID NO: 592235 - DNA, 359 bp, Homo sapiens
gatagtgcatgcctgtaatcccagatactcgggaggctgaggtaggagaatcacttgaagctgatcctgggagggggaggttgcagtgagccgaaatcatgccattgcactccagcctgggcgacagagcaagacttcatctcaaaagaaaaaaaaatagattaacaaaaatattttgaagttggtacagagaattccaatataaccaacatgtgtttyccctggtagcaaaattatacattattagggtacatttgttataattaagaaccaatattgatgcaccattaaataaagcccacactgtattcagctcaccctagttgttctctaatatcccatttctgttccagcatccc

SEQ ID NO: 592236 - DNA, 588 bp, Homo sapiens
gtgtttgtgtcctgtccttaaaaaaaaagtgttcttttgtttacatttatttcactctattcttccttccctcttcactgtgtttggtaccaagaaaaatctggagaaggcttctaatgtctcaaactccaaaccaaaggcaccattcattcctttttggggtgttctctttttttatggtgtttcaagtgtaacggcatgaaagctttggtttcctgcattgcattacctgacctctttggcttttcaggggactagagattaccgagtaccatgagaggatttgactttggtgtgtgttacgatggatgagagagctamaaaattaggggtgactgaagacagtttgcaggaagtggtcttatctatttttttttccttctaggaagttgtttggatcctaattctactttggaggtgcattttagagtcttctctattgctctttcttccaaaattaatctcaattggcttgcctgcacatttgtgtgaggaactgaactgtcattttcataattaaatgagacactgagtttcctcagctctgaagaggaagggcatttcactccccccagccaaaaggtgccc

SEQ ID NO: 592237 - DNA, 529 bp, Homo sapiens
atgctccattctcctatcttctgagctctcccccctctataattctccggaataggtaatgtttggagaagaaagaagaaaagatggagagctagttggacagacagttaagcatgtggataaataaagagatactaaatagataactagctggatgaagatacaaagttggaaagatagataaggtgttcatatgtagcatatagaataatgataattgcaaacttcataaaattcagaactgagtgattgcaagaaagagtttgggtatatcatcaattaattttttcatctaacaagatatttattgctcatttattttttttttaagacagaatctcacactgttgcccaggctggagtgctgtggcaccgtcatagytcactgcagcctcgacctcccaagctcgagggatcctcctgcctcagcttcctcagtagctgggatttataagtgtgcacgattacacctggataatttttaaaattattgtagagatggggtggggtctctctatattgtgcagtc

SEQ ID NO: 592238 - DNA, 529 bp, Homo sapiens
atgctccattctcctatcttctgagctctcccccctctataattctccggaataggtaatgtttggagaagaaagaagaaaagatggagagctagttggacagacagttaagcatgtggataaataaagagatactaaatagataactagctggatgaagatacaaagttggaaagatagataaggtgttcatatgtagcatatagaataatgataattgcaaacttcataaaattcagaactgagtgattgcaagaaagagtttgggtatatcatcaattaattttttcatctaacaagatatttattgctcatttattttttttttaagacagaatctcacactgttgcccaggctggagtgctgtggcaccgtcatagttcactgcagcctcgacctcccaagctcgagggatcctcctgcctcagcttcctsagtagctgggatttataagtgtgcacgattacacctggataatttttaaaattattgtagagatggggtggggtctctctatattgtgcagtc

SEQ ID NO: 592239 - DNA, 529 bp, Homo sapiens
atgctccattctcctatcttctgagctctcccccctctataattctccggaataggtaatgtttggagaagaaagaagaaaagatggagagctagttggacagacagttaagcatgtggataaataaagagatactaaatagataactagctggatgaagatacaaagttggaaagatagataaggtgttcatatgtagcatatagaataatgataattgcaaacttcataaaattcagaactgagtgattgcaagaaagagtttgggtatatcatcaattaattttttcatctaacaagatatttattgctcatttattttttttttaagacagaatctcacactgttgcccaggctggagtgctgtggcaccgtcatagttcactgcagcctcgacctcccaagctcgagggatcctcctgcctcagcttcctcagtagctgggatttataagtgtgcacrattacacctggataatttttaaaattattgtagagatggggtggggtctctctatattgtgcagtc

SEQ ID NO: 592240 - DNA, 537 bp, Homo sapiens
tttcagcctcctgagtagctgggactacaggcacgcaccaccacttctggctaatttttgtatttttagcagagataattttgtcacgttggccaggctggtgttgaactcctgccctcaagtgatctgcccaccttggcctcccaaagtgttggaattacaggcatgagtcaccatgcccagcatctattttaacaatataaaaatgaaggataaaaatgaatgatataattttttattaacacattttatttattctgcattgctcaatgctaggagtctagcattgagcctcctcacacttatttaccattcttcatgtgattagccactggagtttaagatgtaaaacttggaaacccatattaattaaagacstttagaagctagagtgtttattttgtttgctaaaggctactttctgtggccacaaatactaggtcacttgtaatatcacaagcaaataatcctatagtaagaactttaaaatatttcaaataaatccacgtacctatttgttattacagactacaatgt

SEQ ID NO: 592241 - DNA, 559 bp, Homo sapiens
tttacattttattcacaaagataattgattactcatagatttataataattttttaatgatttttaaacatactgtattgtactcctattatgcaattttaagcaattatgatgtagacagtcatatacatgtaaaatttttagtttaaaataayttatcaggagtaattttaaatcaactaattcacatgtattttaatagaaaataaatacaattttagaataatcctgttattttgtatatagtcaaaggaaatggaatcatcatgtcaaggagatatctgcactctgatgtttattgcagtgctatttgcaatagccatgatatagaatcaacctaagtatccaacattggatgaatggataaaataaatgtagtatatagacacatttttatacatttagaataatcctattactgagtgtatagtcaatggaaatagaatcattatgtcaaagatatctctgcagtctgctgtttattgcagtgttatttatgatagaatacggaatcaaactaagtgtccaataatagatgagtggataaagaaaacgtggt

SEQ ID NO: 592242 - DNA, 544 bp, Homo sapiens
agaggcttttgaaggttctcaccaggttatgggttcactctaccttgattgtatcagtatacaacacagatatgtattgaaatatcagattttagcccataaacgtagaattacaaggtatcaattaaaaattaaataaataagctataaaataaaaaataaatgcaatggtttatatatgccttaggtcctgatgtaactgtaatcttgctttactaacagccatttaaaccaagtaatattttgtaaatattgtttatgaaaaacataattaacattaaggtcactctgtgacctataaacagtttatatataattgaaattatacttttgttttctggtgtgtttcaggggcttcctttgaaggataaggtacatgtatgtatgtatgtatgtgtatccatatgtctatacaatacgcacacatatagatacatatacatacatatacacacrcatatacgtatatgttttgtatgagaggaaaagagtaagacacattctcactcatttttgcattttatactgtccttcatacattagc

SEQ ID NO: 592243 - DNA, 585 bp, Homo sapiens
tgtggtaatataaggacataaatatagttcaaagctagacttttaagattctattttcaaacaatatctagagaattattgttatatgtcatgtagaataagatactattgtagaggcagtttcagacattgttcctgtcccatcaatgcttgtgactttactatgtttttttttctgtattccgcaaatcacctaaaattaactgtagacatgaaatgcaactaagaaccatttgaagcaaatggtgactgtattttaataatcatggcatttcactaaaagtctttctaataaataaaagcctagtgtttgatagtgggaatgtaaaggtttaagtcgtaaaactcaaaggataaaccattaccgatactatgagataggaatgattatcattccattttagagatgaggaagatgaggctcagaggttgaataatgagcccaagttcataaaccaaggaattggtgaaggaggaaaatatccagagccagtattttaattcctatgctatcttcccattagatgaaagagtagcttttatcatttattygatatttccatttggcagtagatatttgattgt

SEQ ID NO: 592244 - DNA, 487 bp, Homo sapiens
aaacatatccactgttataccaagataaggtgtgttatagctccartgactgtctctcaacaggtgatacattgggacaactgcaagaattgggaaaatcacagaaatctcactaggtacccagaattcctgggaaagatggaggaccaggggacgtgggtggagggagtaacaaaacaactaaaattttatttagaagtaatcagaaacaaatagctgaaaatcctactttcacttccccaggaaaagttaaaccaaactttcagcagacactgcaagtccttgtcctaatattgaaacttaaactggagcaggtgattctgggtaagtttttgtatggacccagaagttgccctgaagtagggattaagtacctcaatcacttgttaataacaaaatcgtgtttatatcattcacaaggtaattcatgtctttagaggagaaagaatttaaaaaaaaaattagaaagttttttataaaagagatt

SEQ ID NO: 592245 - DNA, 487 bp, Homo sapiens
aaacatatccactgttataccaagataaggtgtgttatagctccaatgactgtctctcaacaggtgatacattgggacaactgcaagaattgggaaaatcacagaaatctcactaggtacccagaattcctgggaaagatggaggaccaggggacrtgggtggagggagtaacaaaacaactaaaattttatttagaagtaatcagaaacaaatagctgaaaatcctactttcacttccccaggaaaagttaaaccaaactttcagcagacactgcaagtccttgtcctaatattgaaacttaaactggagcaggtgattctgggtaagtttttgtatggacccagaagttgccctgaagtagggattaagtacctcaatcacttgttaataacaaaatcgtgtttatatcattcacaaggtaattcatgtctttagaggagaaagaatttaaaaaaaaaattagaaagttttttataaaagagatt

SEQ ID NO: 592246 - DNA, 487 bp, Homo sapiens
aaacatatccactgttataccaagataaggtgtgttatagctccaatgactgtctctcaacaggtgatacattgggacaactgcaagaattgggaaaatcacagaaatctcactaggtacccagaattcctgggaaagatggaggaccaggggacgtgggtggagggagtaacaaaacaactaaaattttatttagaagtaatcagaaacaaatagctgaaaatcctactttcacttccccaggaaaagttaaaccaaastttcagcagacactgcaagtccttgtcctaatattgaaacttaaactggagcaggtgattctgggtaagtttttgtatggacccagaagttgccctgaagtagggattaagtacctcaatcacttgttaataacaaaatcgtgtttatatcattcacaaggtaattcatgtctttagaggagaaagaatttaaaaaaaaaattagaaagttttttataaaagagatt

SEQ ID NO: 592247 - DNA, 487 bp, Homo sapiens
aaacatatccactgttataccaagataaggtgtgttatagctccaatgactgtctctcaacaggtgatacattgggacaactgcaagaattgggaaaatcacagaaatctcactaggtacccagaattcctgggaaagatggaggaccaggggacgtgggtggagggagtaacaaaacaactaaaattttatttagaagtaatcagaaacaaatagctgaaaatcctactttcacttccccaggaaaagttaaaccaaactttcagcagacactgcaagtccttgtcctaatattgaaacttaaactggagcaggtgattctgggtaagtttttgtatggacccagaagttgccctgaagtagggattaagtacctcaatcacttgttaataacaaaatcgtgtttatatcattcacaaggyaattcatgtctttagaggagaaagaatttaaaaaaaaaattagaaagttttttataaaagagatt

SEQ ID NO: 592248 - DNA, 625 bp, Homo sapiens
taacaaaatcgtgtttatatcattcacaaggtaattcatgtctttagaggagaaagaatttaaaaaaaaaattagaaagttttttataaaagagattttgggtatcatgggcttatgtcctaaagactctataatactttctaactttctgacctcatctcctaaaatcctagccctctctgagcaacgctttaaacatgaaactctcctaggcttttgcatttgcagtttcctctcttgggaatgctcttctctcatatctacagggctcactcctttgtctccttcaggtccctactataaagccaccatacgagttaggtcttcctcacccactttatgtaaaaaagttccatcaatgtcagtctgtatttttctcttgctttttctttatggtgcatatcatcacttagcatattattcacttttacaaaaatatactgtatcatcaatsaaagtagggactatacctgttttgttgatgactaaatctgtagtgctgacaacagtgcctttcacactgtatatgctcagtatatatgctgaatgaatgaactggtcgagaacattatgttggagaattagagtaatgtatattttgataaaacattttcgataattatac

SEQ ID NO: 592249 - DNA, 497 bp, Homo sapiens
tttcatatttatttttaaaagaatacagtaagaacacttcacatgtatgttttccccccgagacaagttcacagatgaattaaaaggaaaattgtgcaaagtattttttctgtcatattaaaacaaatataaactgatcacatttaaaaatattcttacagcactcacttgctgcacttccaaattctggccattaggttctttaacatcactagaggggcatcatttcaagtccatagagctttgtatcttttttaccacactcatgccactgggaagatgtatctatatccactattattaattcattattatagataaaatttggtgaaatcytgatgcttggttcatctttaaacatccacatctacatagtacttcactatatatcacatcacattttgatcatttttttttcttttttgttaggaatagaaaattattgtactctcattcctgagatgataatcactccacaccattttttcatgcctatt

SEQ ID NO: 592250 - DNA, 634 bp, Homo sapiens
atatctgtggtgtttacttttgttctagagaaatagaaataaagaattcacttaaaaataatgcacttaggtcagaaatcaagtgtaatagtttctctgaagacttttcctgttttctatggctcagatgaaattttttttcagactgtccrgaaggctgcattttggatctgtattttagtaaactgaaacatgttacagagctgcttcttatctgtagcaagtcatttatgtagtttaaaaaaacaactaacctttgaatttatataccatctgggagtacaaacctgattttgtgtgtctgtatggagcaaataatggctaatatgatggccggggctagttgatgaatgggggtgactggcattgcttcctgtgcccatggaaaaggtacatctttacccattagaaaaacgctttcatacgtggttctcctagcgtcctaggctccctactttgttattttggccattagcttttcagcatggataattattttgtttacatttttggaattcagatgcctggatttaaaagtgatacttacctctgttcaactacttctaccttcattttatgaatttctaacttttaaaaaatcattttaattagttgctgttattgtagttatcat

SEQ ID NO: 592251 - DNA, 600 bp, Homo sapiens
tgctgctgatatttgtgtatatatgtgtatttaaaaaaaaagtacatccatgacaagggagcaaacttatcattgttaagcgctagacttgctgttcctgtctataagagatatttgcttgtaggtcttcaataattttcattaaaaatattttgttagacttttatttaattcaagtccttctttttaagaggaatttcattttaaagttgactttaatcaactgaattaaacastatcctaaatttatgaattagccttaagtacttatttctttttggagctcattttccccttcaattctatactagtttcattgtaatgatggtagtgttgaatttcatgaaatttgttcctcataaaatttaacacatatattgaaggttggtgacagtgtttcggcttggtgaggcatacatttattttaatcaatggccagttagctcacttagctacccatattgttaatgaagtggaggtcatggaggtcatggatttcatcccagtgcaggccagcaagcttctctttgttatgtggcacaggatacacccctcaccccagccagctggctggcaaatgtgtgcagttggtgacaagga

SEQ ID NO: 592252 - DNA, 621 bp, Homo sapiens
tacacagaaattagtgaaatagacacatttgtttgggcccaaggcaaatactactccagttttcctaactgttagtaaaacagctgtctgattttaaaagctgaaaggcatgctaattattttctttaatttttaattattayttttagttgcaatggtaccctcactagtctgaagtgacttttgaaacctgttttatttacagaataaatttctaattgaactaaattatacacattggttagtactccatggtatatagaatttgaaaacaaaattgggtatttcatacagaacattgagaacactaactggtatcactattttaaaatcccctgattgatatatatggcttttttaaaaaaaccaaacagaacaaatgtcaccatacttaaaattcattatctgaaatagagtgccattttgaaactatagatcattttaggtagtttataatcactgtgccaaatggccctataaccatttaacatttaatatgtcaaaccctccagttttggagggctgcgttgatcatagtcagagccttaaccatgggtgttatcctgaagaagggtggcagaacaagtggttgtaaaatacctctgccatttttgaaaatta

SEQ ID NO: 592253 - DNA, 551 bp, Homo sapiens
tcaaaactactgtcaggtggataagtttatgagcagactataaaatgtcattttggcctggaagttgattcagtcaaagtgtaaaccataaaggtgaagaaggggaaaagattccttaaaatggtgtagttagctaatgarggaatgaacgtatctttctttaggttaggaagaaaaaaatgagacctagaaaataaaatataaagaagttctccagtgaaagaaatagagaaatgaaaattacctgatggatcattatttctgattactacagttagtagttataggccatcaacacctactggcatttgtttaaataatgaattatttttaaacacatttgatgttcatattagggaaatcatcctcctgggcatgctgttagattttttgtttgtttttaaacaaccctggagatatcaatttatctgtcttgtcttctttttgtatgtctatttatctatctccatttatttaatcaatcataagattgttcccaaacatactatgtatgtttttgctacatgtcagacactacatgataatactca

SEQ ID NO: 592254 - DNA, 551 bp, Homo sapiens
tcaaaactactgtcaggtggataagtttatgagcagactataaaatgtcattttggcctggaagttgattcagtcaaagtgtaaaccataaaggtgaagaaggggaaaagattccttaaaatggtgtagttagctaatgagggaatgaacgtatctttctttargttaggaagaaaaaaatgagacctagaaaataaaatataaagaagttctccagtgaaagaaatagagaaatgaaaattacctgatggatcattatttctgattactacagttagtagttataggccatcaacacctactggcatttgtttaaataatgaattatttttaaacacatttgatgttcatattagggaaatcatcctcctgggcatgctgttagattttttgtttgtttttaaacaaccctggagatatcaatttatctgtcttgtcttctttttgtatgtctatttatctatctccatttatttaatcaatcataagattgttcccaaacatactatgtatgtttttgctacatgtcagacactacatgataatactca

SEQ ID NO: 592255 - DNA, 534 bp, Homo sapiens
tagtagttataggccatcaacacctactggcatttgtttaaataatgaattatttttaaacacatttgatgttcatattagggaaatcatcctcctgggcatgctgttagattttttgtttgtttttaaacaaccctggagatatcaatttatctgtcttgtcttctttttgtatgtctatttatctatctccatttatttaatcaatcataagattgttcccaaacatactatrtatgtttttgctacatgtcagacactacatgataatactcactctttgggggcaactgaaaaataaagacgatgtcttactgagttagaaaacattgcatttaggcatattttataccattctaacggtcagcctcatccttgcttattaatatcttggctgctgctaaatatatgatagttctgaggatcctgacattacttgattttaagaagaagaaaataaaggatacatcaattttaaaatgatatagttcagagtatgtggtatgcgattattcagtgctaagtaataattta

SEQ ID NO: 592256 - DNA, 534 bp, Homo sapiens
tagtagttataggccatcaacacctactggcatttgtttaaataatgaattatttttaaacacatttgatgttcatattagggaaatcatcctcctgggcatgctgttagattttttgtttgtttttaaacaaccctggagatatcaatttatctgtcttgtcttctttttgtatgtctatttatctatctccatttatttaatcaatcataagattgttcccaaacatactatgtatgtttttgctacatgtcagacactacatgataatactcactctttgggggcaactgaaaaataaagacgatgtcttactgagttagaaaacattgcatttaggcatattttataccattctaacggtcagcctcatccttgcttattaatatcttggctgctgctaaatatatgatagttctgaggatcctgacattacttgattttawgaagaagaaaataaaggatacatcaattttaaaatgatatagttcagagtatgtggtatgcgattattcagtgctaagtaataattta

SEQ ID NO: 592257 - DNA, 464 bp, Homo sapiens
ctttgtttccttctgcaaagtattggagattagtgcagacaggatcttaaaatcaactttatttttatattgttttcctatcttaagtgttttgtgtgtgtkctgctttcacgtctgctgtgtttctgctaagaaggcatgccatattattgaactgacattttatttcaatattagtaacaagatagctaatgagtttgtaaaggaaagaaataaaattcacttttgttgaacacctcttatatgccaactattctttaatttgcaaacaaaatcttgtgaattggtggttttttaccctcacagatgaaaaaactggctttgtgagaatcagaatcatacctaaaatttcatttttccattgaggtagcatgaaaatctagatattttgacctgaaggccaatagacatgctgaaaaagaaaaaaaaaaacaaggagtttgacatttaaaattcaactttca

SEQ ID NO: 592258 - DNA, 567 bp, Homo sapiens
gcattgttttgcttatctggagttgttctcataaaatgttcattagattactggttatttatgatgtaaaatgaaagmatgttaaataagcatattccttatctcaaataggaatactcctttttatttatttatttatttttttgagataaggcctcttttggcagtggtactgtcagggctaactacagcctggtcctcctgggctcagccagtcctcctgcctcagcctcctaagtagctggaactagaggcacatgccaccatgtccagctaattttttttttttttttttgtagtagcgataaggttttgccatgttgcacaggctggactcaaactcctgggctcaagtgatcctcctgcctcagcctcccaaagtactggtattacaggcatgagccaccgcacctggccaacaacttaatacttctgttttaaggtagatgatacatcttggagatgctattgtaacatttgctacaataaatatagaataaaaataaataaaaaatcttttaaaaagataaatatatgtagggacattgtatttgatgtaaaagatat

SEQ ID NO: 592259 - DNA, 536 bp, Homo sapiens
ttttaaacccatttaaaagcatatgctataaaaggtctattaatatcaaagtaaagttcaaaaatgaagggcaaagagagaaaacctactctataaaatattaacatgtactaaaaagcccagtacagctgcaggcacatagagttcatatatacatatatataacagctcatacatacatgagagtgttatatataataacatcacaaagtaaaagaaaatactggtgttggcttactgtatagagcaaaaactgatctaagaatcgggcagaaagtaaagtgggcaccttatcacaccatatagaaatttgaattyctgagagattaaagaagttattaagaaaaaaaattaggcaaatatttttgagacacacatgtaacaactttctgaaacatggcctaaaaagcataaatgataagacataaaattaattgattttgctaaaaaaatgaaaattttcagttaaggataccatagataatttcataggtaaactgagagaacacctaaaaccaatgaggaattaatactgg

SEQ ID NO: 592260 - DNA, 531 bp, Homo sapiens
ctgtcactactgggttcagaattgtgcttggaagtgcatgaatattatccttcattcgatgctggcctagggacctaggatgacactcagcttgcctccaatctctgtgatagatagagctgtgaaaaaaaaaaaaaaaaaaaaaaaaaagaggctcctatacagattaacaaatgacaacagaagagggggctatcggaggaaaagtttgtggaaaaaaagggagccctggagaagatcatctacacatgaataaaayaataaaacttcagatagcaatcttgacaaaatggacttgtatgggcaatgaaaacactgatataagatatctgtcatgccatgataggaaaaagtttgcagtttttttgtggggctaaaggattgtcttatggacagtggtgagaggttgatgtggagtctatgaagaaaacctatcccatttgataggaattagttacttctccaaagcccaatctcattacagacagggtaagaaatcctcttcttgcccattatctagtgggttgaaga

SEQ ID NO: 592261 - DNA, 491 bp, Homo sapiens
ggaattcgagaccagcctcgtcaacatggcgaaacccatctctactaaaaatacaaaagttagctgggcatggtggttcgtgcctgtagtcccagctactaaggaggctgagggaggatgatgggttgggtctgggaggcagaggctgcagtgagccaagatcatgccactgcactccagcctgggcgacagagctagactctatctgggaaaaaaaaccaaaaaaacaaaaaacaaactacagctctttcagtaacctctgtaataatatattcttagtaaaagcaagtgctataaatgactggaaaatttatgttatatttggccttagatgtctaaatatatatgtgtatattattatatattatatataatacaaacatttatawatataaaaataatggcaaatttcaacttcatataaattttataatttattaaaagcattctttagaaacagcattcacgtttcagttatagctttacaaact

SEQ ID NO: 592262 - DNA, 601 bp, Homo sapiens
catatcttgtaagcagaggtactatctaatcttttcagaatgtatttttaagagtgtatagcaaacagttttggaagatagagatacagcttttatttgcagcagagagcaggtttgttcactttttgttataataaagacaatgtatccttctgagataaagattagacaagtgtatctcccattataaaatacactggtttcctaagataagtgatcctctttgtgtgcagttgtcacttggctctcttctcgtcactctgtggaaactgaagctcaggaaactggtttcttgttatctataatgttagaccctttctcagtttttgacaatcaccrtacgaagtgtggcttcctgtaccgctataccagtgcaccagttcatagcaggtgctgtaagtctggcatgcagtggtagcttctgcatcggaaacatagaactctgaattgtgtgtccagtttatgatggtgggtccacagccatgactggtatgatgatggatagaggtagcaatagtggtagtctggctgggacaggcttgatcagcatcttaattctaattgatcttgtcagagaacaggctttaggcacctttaggaa

SEQ ID NO: 592263 - DNA, 613 bp, Homo sapiens
acatttacaagaaaaaataatgctttttcagaattcactttcccattaggatgaacctttggcattatgcatattcattatttacaccaatatgtggttagtgtttgtttaaaaatatttaaaaactgccactataagcacataactaccaaaagtctaagtagcacattccaaaatcagtttgaggactaacttcaagtgcaattatattctcttctaggaattctctacttttaaaaaatagtttctttcatgattccatgattcattctttcctggttcattgttagatcattcctgcttattataaatctaaactccatctgctatgatacaaataaacatcctgttactcaaaagtaataacttatatatcaaaaggctatataaagatagagtatattggtataaccattatctatggcaaacatacaaataatgtccccactcaccacaaaaaagactgagtgttagcagayatgtgttctatctctaattgtttattactagctataaaatcacaacaagctacataactttttccagatcattttaattacttgtctttgtttctccacttatcaaagaataataatgtcaaccttacttacat

SEQ ID NO: 592264 - DNA, 528 bp, Homo sapiens
attttgttgaagatttttgcaatttgtgttcctgagagagattagtctgtagatttcttttcttgtaatrtctttggttttggtattagggtaatgctggcttcatcaaatgaggaaggaagtatttctcccacttctatcctctgaaagaaattgtagagtattggtataatttcttccttaaaagtttggtagaattcaccagcaaaccaacaggggcctggtgctttctattttgggaggtaattaattattgactcaatttctttaatagacataggcctattctggttatttatttcttcttatatgagttttggcagcttgtgtctttcaaactttcatccattagggtattaaatttctgggcatagagttgtttggcagtttgtgtctttcagactttcatccattagggtattaagtttctgggcatagaattgttgataatatttctttattattattctcacatccatggtatctgtagtgatttctctcctctgtagtgatttctgatattagtaa

SEQ ID NO: 592265 - DNA, 568 bp, Homo sapiens
catataccagggacctgtaagctgagtcactagtacagttcatacaggattgagaaatttataagttaaaacaaaccaaaatggagacgtgtcattgaatacttggggcattcaataaagacccagaaatgtcacatgatagaaacagagataaactaaccttagtgtgaaagttactctagattttcccttaaaatgcttaaatataaatggaaaagattaaacttatcttcaastaaattaattgactaccagaacaaaattcaactctcttcaaagaaagacaacatttagacactcaacaatataacctataagattatccaacatataataaaaaattactagatttgtaaagaagcaggaaaacgtgacaaataactaagagagaaaccaaaaatagaaacacacagagaaattgcaaggataacagaactagtaaacagattctttaaaatagctattataaaaatgttcaaggatacaaagaaaaaaatgaacttaaaagaagggaagtgggattttaaaaatgaaccaaaggaaacttctagagatcaatacaatatct

SEQ ID NO: 592266 - DNA, 592 bp, Homo sapiens
tctaacttaatgtctcattgacatttyaaattcactgaatccaaaattaagtttctctttccccaaaaccagttgactctcccgacattactgcacatcataagtagcactggcttcacattcatcaagatttaaaaggttaaagtttccaaataataggtaaattggaaatgtccttatcatgattccaaagcaatgccgacaccagagagtggtgggtgaaagcctagctgtgactgccatgacctagtaagaatgtagggcaaagagagagagccaaagccaacatctggaggtacagtcagaccagagccaacatctgggtgtgaggagagagcaagaaacctatcctgaggatagagaaataattcccagagaaaagaaacaggaaatgtcatgccacagaagcccagaatcaagtgctactgaaaaagcaagacaagaagggatcataggcaatcagatttgatgattaagaaattcctgggaccttgatgagaccaagtttgtaatagtggagctgaaaagaaaacatcatttttcattcgatcattcaaccaatatttattgggcatctacagattgtgaattc

SEQ ID NO: 592267 - DNA, 445 bp, Homo sapiens
caagcagctattagacacctgaggtctctgtcctgttagtaccatggggcagaaaggtatgataccttttttcacccataagggtgacagccaacactcctaacaaaatacaggcgtgcaagagaaaagcattaacaaatttacttaattatttgaggcaaggtctcactctgtctcccaggctggaacgcagtggtgggatcacagctcgctgcagcctcaatctcccaaactcagtcaatcctcccacctcagcctcccaggcagctgggaccagaggcatgcaccaccatgcctggccaattttttgcatttctggtagagacgtgggtcccaccatgttgcctaggctggtcttgaactcctggcctcaagtaatccttctgcctcagcctcccmaaatgccaggactacaggcatgagccaccgcgcccagcctaaaagc

SEQ ID NO: 592268 - DNA, 596 bp, Homo sapiens
aactatacatgaagagaagtttctgtttatcctccaagataatagtcattttcagagatcaatggctaaactatctgactctcatgcatctttactgaaaaaagatttttaaaattatatttccagttatcatcagatgaatcaaaaggctaaagaataagtaagctgtgagaaaaaaagaccatcaatgaatggcctagagttaagactayatactcattataaatataattacaatattgagtgcaaacactacaattcgatattaaaaagaaagttaaatgattagcaaaacccacaaataatatgtgtgttcatacaggggagtaggtgtgcaggggtgtcaagttcaagggagaagtagagggacaattgaagtgtattagatcactgtgtaccacaggagtagtcaaaagttattgtttcatcttgactttggtaattagataaatgcctgttaaagtatgtttttaaaaacatgccaatagccactaattagaatacacaacagaatgtgtatgtacctttcgaataccttcagattatacaagtaaacatagttcacagagcaaaagacagaaatactgagtacagtg

SEQ ID NO: 592269 - DNA, 548 bp, Homo sapiens
  misc_feature 530, 531, 532, 533, 534, 535, 536, 537, 538, 539, 540, 541,542, 543, 544, 545, 546, 547, 548: n = A,T,C or G
ctcaatgtagaaaactctgtgtcctcctctccccttcccttctcttcccttccccttattctgatctctttttcaggaaacatttactaagcacctcctaggtgctagacacagttagacactgggatccaacattaaagaagcctgacttgtggccttcaggggattcacagttggttggggagagagctggatctctaacaaggtgagcatgcygacagctcagctctgtaagcagaggaggggaaggtggggcacaggattgctcagagaggtcagggagggccctgcagaggcagtgacatttgagctgaatcctaagaaagagcaagctctctgtgatgacatgacagttagggaagagggtgttccaagagtggggacaggaggtacaaagtattgaggctggaaagaacataatgtgttcagagacatgcaaagaattcaggctcagctgtgaaagggtgacacggtcagggtgcagggtccagggcaggtaggtcttatgagccacagtaacactttgaacnnnnnnnnnnnnnnnnnnn

SEQ ID NO: 592270 - DNA, 605 bp, Homo sapiens
gtcagtcaaaacaaactttaagagtagttaaaaaagacaaagtaggacattatataatgataaaagcccttgtgcaacaggaaaatatcacagtcccaaatatatatgcacttaacacgggagttcccaaatttgtaaaacaattactactagacttaagtaatgagatagagagcaacacagtaatagtgggggacttcartactgcactgacagcactagacaggtcatcaagataggaagtcagcaaagaaacaatggatttaagctatactccagaacaaatggacttaacagatatttacataatattccttaatagagatggggtttcaccatgttggccaggctggtctcaaactcctgaactcaggtgatctacctgccttggtgctgggattacaggcgggagccaccacgcctggccatttacagaacattctacccaacaacttcagaatatacattttattcatcagtgcatggaactttctccaaaatagaccatatgataggccacaaaacaagtctgaataaatttaagaaaactgaaattatatcaagtactctctcagaccatagtggaaaaaattcttcaaactgaa

SEQ ID NO: 592271 - DNA, 446 bp, Homo sapiens
accaccctggccaatatggcatgaccccatcttttaaaaataacattaaattaaaaataaaatacaaagasaaagatgatgctgacgttggaagagaggcaaagaagagcagcagtacttgctgggtccctggttgaattatcatactgattataatgtgacatccaaatgcttacaagtgacttctatttttggtgggaaaataatggcctcaaaaaaaatgtcctccaagtctctttccaaagtctccatcatcccaagcactgctccccttagagccatgtctcttcctaatacgtcctcaccatctttgcttccagtctcatccctacaggtattgctgctaggtgttaggaagaaagcaatcaaatcgtcattaaggatccaggagagcagttcagcacagtggctgagggcctgaatcccagggcagacccatagagagt

SEQ ID NO: 592272 - DNA, 587 bp, Homo sapiens
aaaggtgatgacttgatctccttcctctgcttttattatctttctctcattcaatcagtataaatggagtagccttttatgttcttctcaagctcyagtgaattgaattgtaaccattattgattcaaccaatatttacttgagcatctattacatgccaggcaccgtgctagataatgtgttcacagaagtagataagacagacatgatccctgcttcattcagattagaatctagtgagggtggagaaaaagcagcaaatatgtaaataaataaacgagcaaaatttctgacagttagacatgctatcaagaaaatacaaggagaggccgggcacagtgcctcatgcctgtaatcccagcactttgggaggctgaggcgggtggatgacctgaggtcaggagttcaagaccagcctggccaacatggtgaaaccccatctctactaaaaatacaaaaattagccaggcataatggcaggtgcctgtaatcccagctagtcaggaggctgaggcaggagaatcacttgaacccgggaggcggaggttgcagtgagctgtgattgtgtctctgcactccagcctgga

SEQ ID NO: 592273 - DNA, 630 bp, Homo sapiens
aacacctaaattaatagcaattaaaggtgctaagttcaagaaagggaaagaacaggaccagctatataatctgcagaacccagtgaaaaatgaaaatggaggacccctggttcaaaaagtattaagaacttcaggatggtgacagcagagcattaaaccaagcatggagtccttctaagtgcagaatgactgtacatattgcatgtccatgaatctggctctgggaaagaccagatgaccacagaaagaacagcaaggaccctagtttagattgagctgggggaagagggtgttaggaaggcctctctgaggaggtaatatttaaacaaggacctgaagggtggataggagtacccaggtaaagagttgaggaatgcagcttcctagaagaagaatagcactctcccatcttctccatcctccaggttggttaagagacttagcattagcctgtcttcatcagctgtgaggaaacaagataaaggtaacagatcttttcctgtttgtgccagctcaggcctatttcccaacccttttttgtattctagatcttggcacttgggtacactacccrtataatctgatcctccccctttaatactgtagatagtcaggactacccaagagggg

SEQ ID NO: 592274 - DNA, 592 bp, Homo sapiens
tcagtagaatttcctgctgcctgagtttaaagagcaaagggcacaggtgatgggtcagagagcaggaagaagtacatgtattttagacccctcttctgccacctgggtggcccagtacctctactgggaagttcttattagattctacccaggggtgaggggtcactcccctgccccagagcctacaggaatgtcarggatttcacaaaaagaggtgtctctgggactctgcagagagtagggtgctttttaattaaacgggggtagggtggtctttgcgggaaatgttggctagagggtaggctttagaatttaagcttgccccttgggctgccggtcagtacattatggccctgccctttctcctacccgccaccagggtgaccaagctggggtcctccctcagggtgtttggcaggatttggaaggcaaccaaattctgatctcaaagaaaaccaaaatcttgagatggtgatttcttgtaccatctatgcccccacatcaagccactggactcggctgatgcagtcatctttgtgctggcaaaacttttggttcaagtgtatcttgtttctttgatgcacactggcct

SEQ ID NO: 592275 - DNA, 592 bp, Homo sapiens
tcagtagaatttcctgctgcctgagtttaaagagcaaagggcacaggtgatgggtcagagagcaggaagaagtacatgtattttagacccctcttctgccacctgggtggcccagtacctctactgggaagttcttattagattctacccaggggtgaggggtcactcccctgccccagagcctacaggaatgtcaaggatttcacaaaaagaggtgtctctgggactctgcagagagtagggtgctttttaattaaacgggggtagggtggtctttgcgggaaatgttggctagagggtaggctttagaatttaagcttgccccttgggctgccggtcagtacattatggccctgccctttctcctacccgccaccagggtgaccaagctggggtcctccctcagggtgtttggcaggatttggaaggcaaccaaattctgatctcaaagaamaccaaaatcttgagatggtgatttcttgtaccatctatgcccccacatcaagccactggactcggctgatgcagtcatctttgtgctggcaaaacttttggttcaagtgtatcttgtttctttgatgcacactggcct

SEQ ID NO: 592276 - DNA, 592 bp, Homo sapiens
tcagtagaatttcctgctgcctgagtttaaagagcaaagggcacaggtgatgggtcagagagcaggaagaagtacatgtattttagacccctcttctgccacctgggtggcccagtacctctactgggaagttcttattagattctacccaggggtgaggggtcactcccctgccccagagcctacaggaatgtcaaggatttcacaaaaagaggtgtctctgggactctgcagagagtagggtgctttttaattaaacgggggtagggtggtctttgcgggaaatgttggctagagggtaggctttagaatttaagcttgccccttgggctgccggtcagtacattatggccctgccctttctcctacccgccaccagggtgaccaagctggggtcctccctcagggtgtttggcaggatttggaaggcaaccaaattctgatctcaaagaaaaccaaaatcttgagatggtgatttcttgtaccatctrtgcccccacatcaagccactggactcggctgatgcagtcatctttgtgctggcaaaacttttggttcaagtgtatcttgtttctttgatgcacactggcct

SEQ ID NO: 592277 - DNA, 496 bp, Homo sapiens
agctgacaggtttaattttaacacaatccttgaaagagcttagggagtccaggataaacggttgtgctataaatctgtgatacaacaggacaggatgggtgtgtgccccctaataaatattgatactggttcccagactttcatataatgactattttcaaagggagagtcttttacctcaatgcttagactgacaggcaatgatgtggaagctctttcatcaacaaaatgggtggagaaacactagcataattaactcctgtagctgctttttttttttagacttgtgatcccacaactcacaattcactrattctctctctgaagtaacttacatttcccaggtgatcagacaaggtctaccaacttcaaggtcaaaccaccaaccagtgagagatttgaagtcaggctccatctgagattgtggctggggcagagggaagcacagggtttagcaagtttgactcattgcagggccaatgaagatccaaaggag

SEQ ID NO: 592278 - DNA, 436 bp, Homo sapiens
ttaaactgtccagagacaattgtgtgtctgccaatttgtcttcatattttaacattatatttattatatatgatactatgttattctctacacaaatatttatgatcatgattatatactttaattgtgattgggttctttaacagtgtatggtttttattttggattggggtcgcctgatgtattttgatgcatttctttaagtttasgtgggtttaaatgtttcctttgtatatagcatataagtgggtttcttgctcattttttaaaagccaatctgaaagtaattgttaagagattaacttgtttatgttaatagttaatattctagttattcgactgagtattctgttttgaaattttcttttatttctgtgttgtttcctttgattttgatcttttatgctactaactttttaaagctttttaaatatta

SEQ ID NO: 592279 - DNA, 577 bp, Homo sapiens
tccaccaatttaaacattaatctcagagagagggtagagcgagatggctgaatagaagcctycaccattctccccgccaccccacatgaacaccaatttaacaacgatctatacaaaaaagccccttcattagatccaaaaatcaggtgagcaatcacatcacctggttttaacttcatatcactgaaagaggcactatggagggtaggaaagacagtcttgactccccagtgccaccctccccacatcccccatcagtggctgtgtggtgcggataatctgtgcagtaggggaagggagagcacagtgattgtgggagcctgcattgaactcagtgctgccctgccacggcagaaagcaaaactgggctaaactcagctgatgcccgcccatggaggaagcatgtagaccagcctttcccagaggggaatcaccactcctagtggtcagaacctgagttttcgcaagcctctccactgtgaactaaagtgctctggggtgtcaaataaacttgaaaggcaatttaggccataaggactgcaattcctaggcaaatcctagtgctgtgctgagccca

SEQ ID NO: 592280 - DNA, 411 bp, Homo sapiens
gaaggaaggaaggaagggaaagaaagaaagagaaagaaagaaagaacgaaagaacaaaagaacgaaagaacgaaagaamgaaagaaagaaagaaagaaagaaagaaagaaagaaaggaaggaagaaagggagagagagagaaagaaagaaagaaagaaagagaaagaaagagaaaagagaagaaaagaaaagaaagaaagaaaaggaaggaaagaaggaaggaaggaaggaaggaaggaaggtaggggcattaatgagcaataagaaatcatctgaaggtacaaaactccctggtaacagcaaagacacagaaaaacactaaaacactgaatattataacactgtaattaatctgtgtaaactactgttagaaagactaaaagatgaaccaatcaaaaataataactacaa

SEQ ID NO: 592281 - DNA, 605 bp, Homo sapiens
tccaaaacctgaacagcccaataamaagtaatgagactgaagccataataaaaagtgtcccagcaaataaatgcctgggacctgacaacttcactatttaattctaccaaacatttaaagaaaaactgataccaatcctattcaaactacttcaaaagatagagtgaatacttccaaactcattctacaaagtcagtattaccctgataccaaaatcagacaaatacacatttttaaaaaaatccacaaaactacaggccaatatccctgatgaatattgatgcaaaaaacctcaacaaaatacttgcaaacaaaattcaacaaaatactaaaaaaatcgttcatcatgaccaagtgggatttatcccagggatgcaaggataattccacatacacaaatcaatcaatgtgatatatcgtgtcaacaaaatggagaaaaaaatctatgtgattatccccattgaagctgaaaaagcatttgataaaattcaacatcccttcataataaaaactctcaaaaaactgggtatagagagaacatacttcaccataatacaagccatacacaacagacccacacctagtataatactgaatggggaaaa

SEQ ID NO: 592282 - DNA, 605 bp, Homo sapiens
tccaaaacctgaacagcccaataaaaagtaatgagactgaagccataataaaaagtgtcccagcaaataaatgcctgggacctgacaacttcactatttaattctaccaaacatttaaagaaaaactgataccaatcctattcaaactacttcaaaagatagagtgaatacttccaaactcattctacaaagtcagtattaccctgataccaaaatcagacaaatacacatttttaaaaaaayccacaaaactacaggccaatatccctgatgaatattgatgcaaaaaacctcaacaaaatacttgcaaacaaaattcaacaaaatactaaaaaaatcgttcatcatgaccaagtgggatttatcccagggatgcaaggataattccacatacacaaatcaatcaatgtgatatatcgtgtcaacaaaatggagaaaaaaatctatgtgattatccccattgaagctgaaaaagcatttgataaaattcaacatcccttcataataaaaactctcaaaaaactgggtatagagagaacatacttcaccataatacaagccatacacaacagacccacacctagtataatactgaatggggaaaa

SEQ ID NO: 592283 - DNA, 605 bp, Homo sapiens
tccaaaacctgaacagcccaataaaaagtaatgagactgaagccataataaaaagtgtcccagcaaataaatgcctgggacctgacaacttcactatttaattctaccaaacatttaaagaaaaactgataccaatcctattcaaactacttcaaaagatagagtgaatacttccaaactcattctacaaagtcagtattaccctgataccaaaatcagacaaatacacatttttaaaaaaatccacaaaactacaggccaatatccctgatgaatattgatgcaaaaaacctcaacaaaatacttgcaaacaaaattcaacaaaatactaaaaaaatcgttcatcatgaccaagtgggatttatcccagggatgcaaggataattccacatacacaaatcaatcaatgtgatatatcgkgtcaacaaaatggagaaaaaaatctatgtgattatccccattgaagctgaaaaagcatttgataaaattcaacatcccttcataataaaaactctcaaaaaactgggtatagagagaacatacttcaccataatacaagccatacacaacagacccacacctagtataatactgaatggggaaaa

SEQ ID NO: 592284 - DNA, 605 bp, Homo sapiens
tccaaaacctgaacagcccaataaaaagtaatgagactgaagccataataaaaagtgtcccagcaaataaatgcctgggacctgacaacttcactatttaattctaccaaacatttaaagaaaaactgataccaatcctattcaaactacttcaaaagatagagtgaatacttccaaactcattctacaaagtcagtattaccctgataccaaaatcagacaaatacacatttttaaaaaaatccacaaaactacaggccaatatccctgatgaatattgatgcaaaaaacctcaacaaaatacttgcaaacaaaattcaacaaaatactaaaaaaatcgttcatcatgaccaagtgggatttatcccagggatgcaaggataattccacatacacaaatcaatcaatgtgatatatcgtgtcaacaaaatggagaaaaaaatctatgtgattatccccattgaagctgaaaaagcatttgataaaattcaacatcccttcataataaaaactctmaaaaaactgggtatagagagaacatacttcaccataatacaagccatacacaacagacccacacctagtataatactgaatggggaaaa

SEQ ID NO: 592285 - DNA, 584 bp, Homo sapiens
tgtgtgttcagcttcaacatcttggcaaagagatgatgtcatcagagtcataagggaagtggcagaccacctgttaagtgtctagtcacaagttaaatccaggagccccgagtttgtattcctctttattttttttttattttttattttttgagacagggtctcactttctcactcaggctggaatgcagtggtgcaatgacagctcactgcagccttgacctcctggctcaagtgatcctcccacctcaggtccctgaagtagctgggactgcaggtgtacaccaccaggcctggctaatttttttggaattttttgtagagattgggttttaccatgttgcccagamcctttaattctcataattcccatttgaagctctatgcttttcaatgaaaagctttttattaccaaagctccagaagacttgatgttttagtccctacctacaattctgaatttatcatggtgcaaacttctgaaaattggcagccttgcaacccacagacaattcaaacactaaaaattccttagcatgaatgagctttataaatattctaaatgtaagatagactggcacaca

SEQ ID NO: 592286 - DNA, 584 bp, Homo sapiens
tgtgtgttcagcttcaacatcttggcaaagagatgatgtcatcagagtcataagggaagtggcagaccacctgttaagtgtctagtcacaagttaaatccaggagccccgagtttgtattcctctttattttttttttattttttattttttgagacagggtctcactttctcactcaggctggaatgcagtggtgcaatgacagctcactgcagccttgacctcctggctcaagtgatcctcccacctcaggtccctgaagtagctgggactgcaggtgtacaccaccaggcctggctaatttttttggaattttttgtagagattgggttttaccatgttgcccagaccctttaattctcataattcccatttgaagctctatgcttttcaatgaaaagctttttattaccaaagctccagaagacttgatgttttagtccctacctacaattctgaatttatcatggtgcaaacttctgaaaattggcagccttgcaacccacagacaattcaaacmctaaaaattccttagcatgaatgagctttataaatattctaaatgtaagatagactggcacaca

SEQ ID NO: 592287 - DNA, 606 bp, Homo sapiens
aacaatatctcattgtgatactaatttgcatctccccaattactaatgaggccaagcatcctctcatagctctattcaccatttttccttttgtgtaaaatgatttttagtgtgttttttacttttttctcaatggtttgtagaaatacatacatacacatataatattactttgttaattaaatgtgtttcatatttctggatatacgacttgtgtttccactttatattgtttatgaataaatttttaattttaatgtagacactatttttgtgctttatctaaaaaattcttttctatactgaggtcaaaaagataatgttagatatgttcttctaaactttttattgttgtgcttttcatacatatataaattcaataattggtttttgtacgtggtgtgaagtaggatttattttcactatttttctgcaaaaaacattctgctaccatttattgaatgaaatgctctgtcctttccccaacaatctaaaacactcccccatcatatatcaaagctcgacgtgtatgtgggtctatttctgcactccctcrtctgtccaattactcagtttgtctattcctgtatcaatactataatgttg

SEQ ID NO: 592288 - DNA, 563 bp, Homo sapiens
agtcccagctactcaagaggctgaggcaggagaatcacttgaacccaggagacggaggttgcagtgagccaagatcacaccattgcactccagcctgggcgacaagagtgaaactccatctcaaaaaaaaaacaaattaacaataacaataagaagaagtctttcttacttagaagtagaagatgttaagtaaaggatactgaaacttcaattctgagttatgaagatgataggcaagagggcaggtagaaggtaagtaaagcatattaatgttctttggggatagtgttgcaaacattattacattctggttgttcaaagaaaaagttaaattctaatatgctcaatgcaaaactaaaatcaaattagcaaactgtagcctcagggctagctggctgtttttataaataaagtcttattggaaccagggctaggactaggatgacgcaagtgaggcagggtrtgaaacatcctgtgataggaatcctgtgtttacttatttttacttatttttcatatattgttcattatggattttttgcattgattttgtttttttatat

SEQ ID NO: 592289 - DNA, 414 bp, Homo sapiens
cagtgaaggagttggcttgcattggggagctctattgcatgaaatatacatgtcttaaaaaaaaataacagaaacatgtgctgcatggagtaaatgaaatttaatttgtgtatgctaaatgggcatatgatatgactccactgtatttctttttatgtatattttgttttttaatcmaatttattcaaaagtagtttatagtttctgtagccattatgaatgagctcttatttttgttcctttcaattttttcctggttctatctagcagatgggaagctattgattctcatgtgttttttttgtactccaacaatgtaataacttctgttagctttattaatagttttaaaacagatactcttgtactttgtaggtataaaattatacaatcatatcagcagtaaataatagt

SEQ ID NO: 592290 - DNA, 551 bp, Homo sapiens
gttgtatggtaagaacaagaaccgttgggcattttcaaaggagcagaaccttactatggaaagaatgctgcttattaatgaagggttccaggggtaccagaccgccaggattgcgaaaggagaaatgggaggggctaggaaactctgggccaaacagcaccacattttgacttcagcacgcaaaccaggattcgctgaaatagacttggaagttgacgacacccatttctaaaataaacgcatggtataattgcacctgattaccatactaaaattgttgtttattttcaccttacacttagataactgctaaagatcaagctaattggatttgacagttttcacaaataaaatcctccaaataactttatcaatactattactgtttttcaggttgcagataaaaatatctcacttaattttttcattataaacctacattggagaaacaaatttagccycctgtgtctttcagcttaaaaagaactgttctttttggaatgttacaacttttaaaagaagtaactgtaaaagaaataaaataaaaatta

SEQ ID NO: 592291 - DNA, 565 bp, Homo sapiens
cattattttaaaatgttcaatttgatttaagtgtttgatttttatatgtcaaaattggctcccatttcttctttgggttttctagtacaaaactgacaaakcaagttagaaaatcttcatgtgaataacagctaagcattaaaaaaaaaaaaaaaaagctctgatcacagagtcacacaaactacagtgagaattgctataaaactacaatgcatagctagcttgtcatttgtgtgtgtgtgtgtgtgtgtatgtatgtgtatactcacatgtgctgtgtttcaatgaatttgggtcgttgcatagcttgtcattagtgtatgtacatttgtgtgtgtacatctgtgtgtgtgcactcacatagactatgtttcaatctggttcagcaaaaacaatatcagaagattatttgaacacctttttaggtaaaagctacattcttttgaaaagcatagaagttaaaaacactgtaagaaatgagtataaaagagaaaaaaatcaaaatctagaaaaagaatgagcagaatatattcaatactgaaatactaaactttaaaatacaagg

SEQ ID NO: 592292 - DNA, 478 bp, Homo sapiens
caatgtgctttgtatatttgagggagacacaaggaagccaatgtggcatggctgccacaaggaatgacaattattctttcagtgaccctctgacccaccatttgtttaaccttcaccaaatgtagctagaacatatgcaaagacatgacaacactgagccacgattaaataaacagattgtaaaactttctttgacttaggcttatgactaaatcttcaagaagtgcccatcatctggggttgcccgcaaggctggagagtctgatgaggccrctcagacactcctggttgagcatttaaccactgcaagatttcgctccttgcttatcttaccgctgccaattttataacaactctgagttttcagccaattgttttattcatcattttgttttctagactttctcagttacctataaagtgtagagagggtaatagactcagagtcttgcttggaattttgtgagagaaaacagca

SEQ ID NO: 592293 - DNA, 681 bp, Homo sapiens
ctgaaataataaaaatataacatgtcagatcttgggggatacatgtagagtcactattcaaaagtaatctatagccttaaatgcatgttttaagaaataagaaagactgaaaataagtaagtgaaatattagtctcaaaaaagtatagaataagagcaaattaaaccaaaagaagaaaggaaacatgttaaataagaacagatactaatgaaataaaaaaatagagttaatcagcaaggtcaaaagttggttctttgaaaaayctaataaaatttataagcccctagtaacattgagttttttaaaaagagaaaaggcacaaattaccaatactagaaataaaaaggaatcacattacggattcaacagacttcaataaataaataggatattatgaataactttctgtcaataaatttgaatatttaagtgaagtgacaaactgctagaaaaacaaaatttactaaaattaacacaagaaatagaaaatctgaaaagatctgtattgattatagaaactgaatctatgaaaaataattctgatatgaaatctcagatcaagaaagacattttggtaaattctgctaaatatttaaggaagaaataacaccaatatattaaaaacaattcgagaaaacagcaaaaagaaaagtgcttcataacccattttataagacaagc

SEQ ID NO: 592294 - DNA, 572 bp, Homo sapiens
ttattcttgcatatatagtatagtttcaagaattttggctttaatatttaaataattgacattgctgtttcctcaaattgctcttctttattgctttttcttggttgctttcatccatttttcttccaaccaaacctaagaaatacttaagttccaagctgagattttgaatatcattgtgttcaatcaatrtcgtcatatagccgactacagtattgaatagtctcattcagaaatataatctctctaacttatagatcttttatgtttttgttcgtttgtttttcagaagcagggtctggctccgtcacccagactggagtgcagtggtacagtcatggttcattgcagcctcgaacccctgagctcaggaaatcctcccacctcagcctccagagtggctgggagtacaggtgtgtgctaccacacttggctaatttatgttttgtagagatggagccttgctatgttgcccaagctggtctcaagctcctggcctcaagtgatcctctcaccttggccccctaaagtgctgggattacaggcacttgagctacagtgcttgatctgat

SEQ ID NO: 592295 - DNA, 558 bp, Homo sapiens
ctagttacacagaattatcaaagaggaaaataacttttcttcatcccagggttttttttctccttggatcactttgtttagtttttttcttaggttaagttcccaggctctcctctgcaaaggcaggaagaaattagcaggtgttgggggcccagttctccccgggaacatactggagccctactggtgtcagaccagaaatgatgtaatcaagtcactggcaacagaatgaagacaaggaaaactccagggtttataycttgggtgtggagattgagatataatatatggccaggagggggaataaggcgggcctccttgcaaagaacagtttttgagtttgcataatttttcccacttctaggctggttgaccttaagcaagttacttgaccactttaaggtttggttttttgatctgtaaaaaaggaaatcacggtacctaccgatgatgtatctatccacttgactgggctaaggcatgcccaaatagctggcagcacattatttctgggtgtgtctgttaggatatttctggaagagatcagcatttacatca

SEQ ID NO: 592296 - DNA, 518 bp, Homo sapiens
aaaaacatgtcttggctaccttggctatatcttctctcatctgtctatgaaaataccttcaagaaacctccaacacaactctacatgcatagcttttaatttgcagttaataaaagaaataggatacagaggtcctttctctgtctactataaaatttctrctgtctgtttcaatgtctcttaaaacagaaccaatgtaacaattcacattacaggtaaactaaaaatcatatttcttactttataaaattttatatttcattttattagagtaggatgtgactattgcattttgcttttgttcatttccaagaagctcactattaagtttgtagctcaaataatattggctttcttcacttattattctccatttatcatgtttttaattcctactcttttattttctttatattattagattctattttataagataacaaatctcagtctttcatagaatatatttgagggcaaggaagggtagagaaaaagattttcacgtatcttattttttt

SEQ ID NO: 592297 - DNA, 635 bp, Homo sapiens
ttggctttcttcacttattattctccatttatcatgtttttaattcctactcttttattttctttatattattagattctattttataagataacaaatctcagtctttcatagaatatatytgagggcaaggaagggtagagaaaaagattttcacgtatcttatttttttgtgggggtaataataatattgttaattataaatataattctcatttaagcttcagagaagttaagtagcttgcccatatgcacatttaaagtggactgctgggccaagcttggaatctatgtatttctgaccctaagtctcatatctcatgctagtctactccccagtgcctcctaggtaggaggacttgaagaggctgaattgaatgtataagtcttcaaattcaaaataaggccaggtgcagtggctcatgcctataatcccagcactttgggaggccgaggcaggagaatcacttgagcccaggagtttgagaccagccctgggcaacataaggaggctgcatctctacaaaaataaaaaagtaaaaattagcagggcatgctggcacatgcctgtggtcccagcttctcaggaggctagaggtagggaggatcgcttaaacacaggaggttgaggctgc

SEQ ID NO: 592298 - DNA, 558 bp, Homo sapiens
ctagttacacagaattatcaaagaggaaaataacttttcttcatcccagggttttttttctccttggatcactttgtttagtttttttcttaggttaagttcccaggctctcctctgcaaaggcaggaagaaattagcaggtgttgggggcccagttctccccgggaacatactggagccctactggtgtcagaccagaaatgatgtaatcaagtcactggcaacagaatgaagacaaggaaaactccagggtttataccttgggtgtggagattgagatataatatatggccaggagggggaataaggcgggcctccttgcaaagaacagtttttgagtttgcataatttttcccacttctaggctggttgaccttaagcaagttacttgaccactttaaggtttggttttttgatctgtaaaaaaggaaatcacrgtacctaccgatgatgtatctatccacttgactgggctaaggcatgcccaaatagctggcagcacattatttctgggtgtgtctgttaggatatttctggaagagatcagcatttacatca

SEQ ID NO: 592299 - DNA, 576 bp, Homo sapiens
acatatggcttctgttcaccaattgtctttgctaaactccttgaacaacaatctgattgactcttcagcgtctatccagattcaataatctctatttggcagaggtgcttgtcaggtcagctggaagatgaacaatcttggtcttcagggctgaatgaggctgaatgtagctcacccatcmactccaggtaccttgcttgtatacccaggtgcacagcttaccatcgcattccactctgaatacattacaaacttcagaaggaggtcatgttctagatatttctataggagacctgagagacaactttgttcagctcaaagacagaaataataaaatggtttataatggctcagagaaagatataagtgaaagaacaagtctactttttatgataatgaggcctcataagccatggtaagaccaagtggtgttcaaaagtctcatctgcccaaatcattcagactaatagaattaatgcctgaagtggtatgattgaaggctacttggaagactacttggaagtggccttattggagactactaatcccacatatctatagtttggctatatgata

SEQ ID NO: 592300 - DNA, 576 bp, Homo sapiens
acatatggcttctgttcaccaattgtctttgctaaactccttgaacaacaatctgattgactcttcagcgtctatccagattcaataatctctatttggcagaggtgcttgtcaggtcagctggaagatgaacaatcttggtcttcagggctgaatgaggctgaatgtagctcacccatccactccargtaccttgcttgtatacccaggtgcacagcttaccatcgcattccactctgaatacattacaaacttcagaaggaggtcatgttctagatatttctataggagacctgagagacaactttgttcagctcaaagacagaaataataaaatggtttataatggctcagagaaagatataagtgaaagaacaagtctactttttatgataatgaggcctcataagccatggtaagaccaagtggtgttcaaaagtctcatctgcccaaatcattcagactaatagaattaatgcctgaagtggtatgattgaaggctacttggaagactacttggaagtggccttattggagactactaatcccacatatctatagtttggctatatgata

SEQ ID NO: 592301 - DNA, 475 bp, Homo sapiens
tgtcttttatccaccttcctcctggggagtagagtgggcatttcctctcctctgaggaaacagttgcagggaggtcccaagttaacaagtatttcctcccaacaagtccagctgtggctyttgctccaaggggctgttgcagagtggagcagagtagaattggagtgggggcaagcaaacccttagtcatagctacgatgccaggccctcggagaaactttttgatttgacgtatgtaaccacccagtacatgggtaaagaactaacattcaaggaaacaagtgaattgccaaatgaagtcgatggatggtaaaacccggatttgaacctaagcccatttgattgtgcctttgtcagaagatagaactgaccccaaggttatgctcacatcctcaacccagtggcagccagcaacagctcagcatgcgctctggaagccctggccctcagtctcacgcacttggcactatagcct

SEQ ID NO: 592302 - DNA, 475 bp, Homo sapiens
tgtcttttatccaccttcctcctggggagtagagtgggcatttcctctcctctgaggaaacagttgcagggaggtcccaagttaacaagtatttcctcccaacaagtccagctgtggcttttgctccaaggggctgttgcagagtggagcagagtagaattggagtgggggcaagcaaacccttagtcatagctaygatgccaggccctcggagaaactttttgatttgacgtatgtaaccacccagtacatgggtaaagaactaacattcaaggaaacaagtgaattgccaaatgaagtcgatggatggtaaaacccggatttgaacctaagcccatttgattgtgcctttgtcagaagatagaactgaccccaaggttatgctcacatcctcaacccagtggcagccagcaacagctcagcatgcgctctggaagccctggccctcagtctcacgcacttggcactatagcct

SEQ ID NO: 592303 - DNA, 465 bp, Homo sapiens
ctgaaaaacaatgcaaagaaatcagaaataactgttcaaattatgaatgaaaaatctaccaaagagacagatgccataaaaaacaaccaaacagaaattctagaaytgaagaatttattgaatgaaatacaaaacacatttgagatcttcaacaattgactagatcaagaagaaagaatctcagaacttcaagacagatattttgaaaaaataaagaaaatgaataaaaaagaataagcaatgcctccatgacatatgagacaccacaaagtgaccaaattttttaatcactcaggtcctggaaggtaaagagagaatgaaaggattagaaaatctatttaatgaaatgatagatgaaagcattccaaatccagaagagatttagacttccagatacaggaggcgctgagattcccaaatggatacaatgcaaaaagatcttctccatggcacattttagtcaaa

SEQ ID NO: 592304 - DNA, 214 bp, Homo sapiens
tgaaaaaataaagaaaatgaataaaaaagaataagcaatgcctccatgacataygagacaccacaaagtgaccaaattttttaatcactcaggtcctggaaggtaaagagagaatgaaaggattagaaaatctatttaatgaaatgatagatgaaagcattccaaatccagaagagatttagacttccagatacaggaggcgctgagattccca

SEQ ID NO: 592305 - DNA, 587 bp, Homo sapiens
tccaattcaacatagcactggtcctagacagagcaatcaggcaagagaaagaaataaaattcacccaaattggaaaaaaataaatcaaatcatctctttttgcagatgacatgatcttataacttaaaaagccaaaagacttcctcaaaaaaactcttagagttgataggcacatttggtaaagttataggatataaaattaacataaaaaattagtagcatttctatacaccaataatgaaatagccaaaaaagaaatgtaaaaagcaatcccatttacaatagttagaaaaaatacatagtaataagtttaatcaaggaggggaaagagctytacaaagaaaactacaaaacactgatgaaagaaatttaagaggacacaaacaaatggaaagacattccatgatcatggaatggaagaattaatatcatgaaaaggaccccactgcccacagcaatatacagattcaatgcaatccctatcaaaacaccaacgcaactttttacagaaataggaaaaacatcctaaaattcatatgtaaatagaagaaccagggtagccacagcaatgctgagcaaaaagaaca

SEQ ID NO: 592306 - DNA, 503 bp, Homo sapiens
tctgtaatggcctttggaatagaagatggccacataaagctgggaagttgggtgcttttcacagtgagaagagtatgtcaagtacrgggctgcaaaaaaccaccagagttaatgctttaactaggctgagtgggagaaaaggccaaaagtacagcttaaggccaagacaacaagtttggatttgatgctgaatgcaatggaaagccattgaaatattttggtgacagtataacaaaatctgaactgtgctggaaaaagattaatctgaaagtcacagggtgaccagttggaagaaggaagcaatttgagttgaaaaaagatgcctcataacccagtacaacagagtaggggataaagacaaagattcagaaaagacagagagagaagaggtgaaatcactgggacctgacagatgactttgctatgggaggcagggaaaagaagaagaactgagagacaactgggaggttctgattttgttgtctgggaggatgggacgatgg

SEQ ID NO: 592307 - DNA, 297 bp, Homo sapiens
gggtgcttttcacagtgagaagagtatgtcaagtacggggctgcaaaaaaccaccagagttaatgctttaactaggctgagtgggagaaaaggccaaaagtacagcttaaggccaagacaacaagtttggatttgatgctgaatgcaatggaaagccattgaaatattttggtgacagtataacaaaatctgaactgtgctggaaaaagattaatctgaaagtcacagggtgaccagttggaagaaggaagcaatktgagttgaaaaaagatgcctcataacccagtacaacagagt

SEQ ID NO: 592308 - DNA, 503 bp, Homo sapiens
tctgtaatggcctttggaatagaagatggccacataaagctgggaagttgggtgcttttcacagtgagaagagtatgtcaagtacggggctgcaaaaaaccaccagagttaatgctttaactaggctgagtgggagaaaaggccaaaagtacagcttaaggccaagacaacaagtttggatttgatgctgaatgcaatggaaagccattgaaatattttggtgacagtataacaaaatctgaactgtgctggaaaaagattaatctgaaagtcacagggtgaccagttggaagaaggaagcaatttgagttgaaaaaagatgcctcataacccagtacaacagagtaggggataaagacaaagattcagaaaagacagagagagaagaggtgaaatcactgggacctgacagatgactttgctatgggaggcagggaaaagaagaagaactgagagacaactgggaggttcygattttgttgtctgggaggatgggacgatgg

SEQ ID NO: 592309 - DNA, 567 bp, Homo sapiens
atgcacacaacacacctaacaagtgtttctagtgaaactcttcctggggactgatatttgatgatcaatatgatgcatcacagcactttgatgctggctgagtactaaaacatattaatctagagtacaggagagactctcactgatacataagaaataatttctttctctctcttcataaaaggggaaaacatgagaaatatttccatagtgctagccccaatcgtccttggtctacaaggctgactaaatagcatttactgctaccaagtgactgtttaaaaaattgtgtgcacttttcagagaatagggaagtggtataatagacattggtaaatgatgatattatttctttctcagagataatttgctcctattaaaaataatctcatttaaagaaaagttttaaatgrtggagatatttttctggacctctgagtgggtcaggaaggcaagaatttgattagagttagagatcagggaagcaaaattccatggttaaataaatgaggacaaagcagcacaatccaagtgccatgacatcaacgacaatcaaactaacaattc

SEQ ID NO: 592310 - DNA, 623 bp, Homo sapiens
ggtaatttatgacatgctatcatcatgaagactcaaattatcattatcccctaactattcccctaagaagacttggatgatgctttaccaaggaacttagaaatgtattggtaaggggagcaccagcacccttgaaagcccctgaggcagtgatgttatgcaggaggcggtggtggaagttggcattgagtttctggattttgatggaaataatgggatctcagggtggtagaaagcagatggtagtgcttaatcatcacatggaattaccctagaagccaggaaagggatcagaaaagataagtagagacaggttgccttcacgtgcaagggaaaactacctacattataagggctctgttcactccctggccctctgtcacaatacagtccaagatgatcttgattgccttgatatcccgcagaatatgacactggtccatttcatcattgacattgtgctagttggatctggaaracagatagtagtgagagttccagatgtcagtggtctgggagaatggcagcgtgtcatcgcttcaaaagtatgagacaaatattttaccttgactcactttccacaaagaggagtaaggtttgggggccctctttggattctagga

SEQ ID NO: 592311 - DNA, 522 bp, Homo sapiens
atggcagcgtgtcatcgcttcaaaagtatgagacaaatattttaccttgactcactttccacaaagaggagtaaggtttgggggccctctttggattctaggaacataagtgtgctgctctgacccaagttctgggtcaactgtgaggctgccasttttgatctaaaaaggctctgcagcagagatagaccaccattcaaactgcctagccaccagtcatatccaactgaactggaagcgtttgttgcagagatgctgaatggaggctctggctagccacagtaggagaagcacagaacgcttcccttgggattcactgtatggctgtgccaatttctgccaactaaaattgtccattaaaaaggctgatccagatttgatttgctactaagcctagtaaggactaaaaacctgaccattgaacaccaagtgctgcctatcatgaactagatgtagtttgattgaccaaattataaaattggatgtgcacagcagcatctcattgtcaaatggaactggtat

SEQ ID NO: 592312 - DNA, 546 bp, Homo sapiens
tgccaactaaaattgtccattaaaaaggctgatccagatttgatttgctactaagcctagtaaggactaaaaacctgaccattgaacaccaagtgctgcctatcatgaactagatgtagtttgattgaccaaattataaaattggatgtgcacagcagcatctcattgtcaaatggaactggtatgcataagacttgacctgagcaagcctagaagggacaagtgaacagcatagacaggtggctcagcctcccatagcacctgctcctcctgctgcattccctctttcccagtcccaaccatggcatgttggagagctctctattactagttagtgggggaagagaaagcatgggctgggctacttgtgagttttccagtctactggcaccagacagaagtcaaagctgattatattacagcctatttaggtgtacccctgaaagacagtggggaagaaaaatcctcccagtgatttatattgkgggaaatacatctagctgtccactttatgagcaagaaaagatgacctcatgtataaatcta

SEQ ID NO: 592313 - DNA, 421 bp, Homo sapiens
acaaggaaataaactttcaatgtatggagttaaaatagccactatgaagcaactccctcccactcagctccttagacatatcagaacttaagaattatttgtagctaagcatatactttgatgaccatctctcagcaytgcaaaagcaaggaggtcatcagtagctagaattttgtagtttcccacaaaaatttccagtcaccttggattgttccgtcatgccattttccagaaaaggctcactgcttgcttattccttcttgcaatgaaaggtgttatgctctctgcaaaattctatttttattttaaatgctcagttgggaactttaaactttgttttgctaagtcatttgtaactgaagctgaacaaataacatatgatccaaattctataaatttttctcctagcttcaaagacttc

SEQ ID NO: 592314 - DNA, 330 bp, Homo sapiens
tgacatccataggcccaaagtaaagggatagagaataaaatctacaaagcaaacagaaaacagaaaaaaatcagggcttgctatttctaatttcagacaaaacagaatttaaaccaacaactagcaaaaaagataaagaagggtattacatgatggtaaagtgttctcttctataagaagaattaaatattctaaatattaatatatatakagagagatgtgccaaatacaggggcatgtggatttataaaacaagttcttggagacctataaagacacttagataaccacacactatcagtgggagacttcaacacctgactgacatta

SEQ ID NO: 592315 - DNA, 590 bp, Homo sapiens
acctaacagccatctacagaactctccacctaaaaacaacagaatatacatacttctcatctacacatggcacatactctaaaatcgacccacacgatcagccataaaacaattccccacaaattccaaaaagccaaaatcttaccaactayactcttgaaccacagcacaataaaaatagaaatcaatactaagaagatcacccaaaacaatacaattacatggaaattaaacaaccttctcctgaataacttttgggcaacaatgaaattaaggtagaaatcaagaaattctttgaaactaaccagaacaaagatacaacataccagaatctctaggacacagctaaagcagtgttaagaagaaagtttatagcactaaacacccacatcaaaaagttagaaagatctcaaattaacaacctaacattacacctggagaaactaataaaacaagagcaaaccaactccaaagctagcagaagacaagaaataaccaatatcagagcttaactaaataaaattgagacacagaaaaacatgcaaaagatcaacgattccaggagttgactatttgaaagaataaataag

SEQ ID NO: 592316 - DNA, 575 bp, Homo sapiens
aatcctgtagtccttagctaatatctgccattctttccatccctacctctcatccctaggcaaccacttccttaggattttttttttttttttttttttgagatggagtcttgctctgttgtccaggctggagtgcagtggcgcgatctyggctcactgcaagctccgcctccctcctgagttcatgccattctcttgcctcagcctcccaagtagctgggtctacaggcgcccaccaccatgcccggctaattttttgtatttttagtagagacagggtttcactgtgttagccaggatggtgtcgatctcctgatctcgtgatccgcccacctcggcctcccaaagtgccgggattccttaggatttttaactcatgtctccaagtgtggcactctcctatctgcttcgtctcttgatcttgtgaagccacatacccttttccttcagtgcatccaaacaatttgcagctcctcagaatgctgcagttccaacaccaggatgttccgacctggcactgttcttgctcttcacacattcttgtcctctgacagatttactagtgcaacctgact

SEQ ID NO: 592317 - DNA, 604 bp, Homo sapiens
caaatggatctacctgtggtcagtgggatctaactgacatcttgaacctttgaaattatctggcttgaagctgtcgagtactgaccagtgatctagtgaaaacaagacaggatggggattttwaaatgcctgctaagaatctcttttaagaaaagagtgatatttcatctgctcactatgttcaaaattaaacctgtttcatgctttatatttaagtcttaaaatagatacagaaagtttggacaatagaacagtcaagatgcaatagcaatgctgatttttaaaataaatggttaaaataatctttgtaagaataatagaattacagtgttttgaatttttccaaggcagagatcaggacagatgtttcatttgtatgcctgtatcacttcattgccttagttcagattaattttgcttataatttggaagttgataaactaatccacttagttgaaggttgacttcagatcacaactgccagttaaaacaccatgaacacactggacttttcaactgttttgaatgaaatgtgcaagtgaagccagcagaaatatcactgtaagtcactatttactgactgcctcgcatgtgcctgacactg

SEQ ID NO: 592318 - DNA, 614 bp, Homo sapiens
tgcctgacactggtttaagcacattaaacacattatcatttaccatcttcccagcaagagacaaggctgctaaggctttgagagctaccatgttctgttcaaggtcacgtggctgatacatgtcaaagccaaagcctaatctcaggtttatctgaatccaaaggtcaaattggattaattcactgctattgaactgaatagcagtgacttaatgagactgactccactgagggaacctcacagatttggaggaagattttgactgtatatgtgcttatttgactgttttccattcgaggaactgagacacgaaaagagttcactcaaggataagttgtgagtcttatgtcaaccagaaattatctctagttattatttctgaaagtgataaaataacattatgttccaagtccttgatggagagcttgatccctggatttgagctctttgagagcttactggccctgggaaaagtataactggtacttgagccttttagcttatacttctcagtcagattttttgaaacttctgttcctcataaactcaagccaaagcatgactatgcatagaasatgcaacagctcttcaggaagggaaattgctgcccagga

SEQ ID NO: 592319 - DNA, 555 bp, Homo sapiens
  misc_feature 528: n = A,T,C or G
cattaaatgtaaataaattaaatagttcaattaaaaatcaaagattgaattggataacaatctgcatactgtttataagaaacatacctaaaacatttgtattataatgttgaaattaaaaagtggaaaaatataaatattaacaaaaattaatgttatctatattaatattagacaaagtagactttaaggcaaaaagcattatcataatgataaaaagtttaactcatgagaaagtacaatgattataaaacttgtacacataatatagcttcaaaaatataaaactaagattgacaaaactgcaagaagtgaacagatacatgagtaaggatatagattatttaaacacgattagcaaacttgacttagtggacatgtatagactgytacatccaacaattatagaactcatgttctccaaatatgactctccaccttccaagcaaatgataggattgagattctgcacctcattttatgttgtataccatatgactcgctttggccaataaaatatggataganatattaccagtgtattagtaacatgtc

SEQ ID NO: 592320 - DNA, 578 bp, Homo sapiens
tattatttattaatataccgtcaattctcactttcagattcctgacaaagaatgggtctagtccaataacttcctttgggcgccttgctctgctgtgctcaaatgactgaccccacgtttctttaggtgcacacgagctgtctgtcacctgtctgccatgttgtgagctgcgtgagtgagttaaagggactgctgctccttagtggggagaatgggcggctgtgaggctgtggggcgggggctgggccgctgggagcaaaggcgcggaaatcacaccagccaatctcgatcgaggctttcttgagtcatggtgatgtgygaggtgctgtgtgggtattttgggacacacaaaatgttgagattcaattggtaaggacctggtctcactctcaagacagtggggagaaaaagtaaaacatgatgtaaaggagggcttggggaagtactatccagaaagtcacaaggtgggggctgcacttgatttctgtcagtgtgacacagaaacatgacactgcctcttctgtttccttcatggatgcctcaccttctacaccagtctcgaacatttcacctgcctg

SEQ ID NO: 592321 - DNA, 578 bp, Homo sapiens
tattatttattaatataccgtcaattctcactttcagattcctgacaaagaatgggtctagtccaataacttcctttgggcgccttgctctgctgtgctcaaatgactgaccccacgtttctttaggtgcacacgagctgtctgtcacctgtctgccatgttgtgagctgcgtgagtgagttaaagggactgctgctccttagtggggagaatgggcggctgtgaggctgtggggcgggggctgggccgctgggagcaaaggcgcggaaatcacaccagccaatctcgatcgaggctttcttgagtcatggtgatgtgtgaggtgctgtgtgggtattttggracacacaaaatgttgagattcaattggtaaggacctggtctcactctcaagacagtggggagaaaaagtaaaacatgatgtaaaggagggcttggggaagtactatccagaaagtcacaaggtgggggctgcacttgatttctgtcagtgtgacacagaaacatgacactgcctcttctgtttccttcatggatgcctcaccttctacaccagtctcgaacatttcacctgcctg

SEQ ID NO: 592322 - DNA, 472 bp, Homo sapiens
gccccttcctggtgttcctgcttttgctctgcataatgaacagctgggttctaggagccccttcctggtgttcctgcctttgctctgcataatgaacagctgggttctaggggccccttcctggtgttcctgtctttgctctgcataatgaacggctgggttctaggggccccttcctggtgctcctgcctttgctctgcataatgagctgctgggttctaggagccccttcctagtgttcctacctttgctctgcagaatgagcgctggattctgggagccccttcctggtgttcccgcctttgctctgcatgtctrtagtctacacagaagtcatattggtgactttaaaatgtgactcagatcttgtcattcttttgcttaaaagactttagttgctttctatggcatttccaatctgagctcccagccattttctgtgtggctctgagctcccttctcccacttctgc

SEQ ID NO: 592323 - DNA, 590 bp, Homo sapiens
gtggattggataaagatatgtggtccatacacagcacagatattatgcagccataaaaattttatgttctttgcagcaacgtgcattatcctaagtgaattaacacagaaacagaaaactaaatactgcatgttctcatgtaagtgggagctaaacatcaggtacttatagacataaagacagcwacaatagaagctgggcgcactactagatggaggagggaaggaaggaagaaagggttgaaaaacgaattattgggtcctatgctcagtccctgggcggcaggatcattcataccccaaacttcagcatcctgcaatgtatcctggttgcaaacctgccacatgtaccccctgaatctaaaataaaagttgaaaaaaaagtaaaaaaatataaaaacaaataaacaacaaaacatctttaataaatgtagttatctctcatattgtttttctgtacccttcaaaagtttacaaaacgttttagctatatgttgaggcaactttagttcacagaactgacgagcatattgggttggtatggaagattcagagttggcctagagatcaacagctgtgtttccattctac

SEQ ID NO: 592324 - DNA, 571 bp, Homo sapiens
ggcattaggcttttgtaatattaagaaaggttcattttgcccaattttctcccttcaggattttcctgttggaagtcacttggtccaaagatcttgactattgttttctggaggtctatgttagtccattttgtgttgctataacagaatacctgagcctgggtattctgtataaagaaaagaggcgtatttggctcatgattctggtgattggaaagtccaagattgggcagctgtgtctggtgagggtctcatgttgcttccactcatagtgaaaagaggagggggagtaggcgtgtrcagaggaatctcatggccagagaggaagcaagagagagaaacggaggaagtgaaactctttaacaaccagcttttatggaaattaatcaattcctgtgaaagccagaacttactcctgagggaagacattaatctgttcatgagggatccacccccatgaccaaaacactgcccactcggccccacctccaacaatgccacactggggatcaaatttcaacatgcgttctggcagggacaaaccacatccaaactatagcaaggtgggatt

SEQ ID NO: 592325 - DNA, 571 bp, Homo sapiens
ggcattaggcttttgtaatattaagaaaggttcattttgcccaattttctcccttcaggattttcctgttggaagtcacttggtccaaagatcttgactattgttttctggaggtctatgttagtccattttgtgttgctataacagaatacctgagcctgggtattctgtataaagaaaagaggcgtatttggctcatgattctggtgattggaaagtccaagattgggcagctgtgtctggtgagggtctcatgttgcttccactcatagtgaaaagaggagggggagtaggcgtgtacagaggaatctcatggccagagaggaagcaagagagagaaacggaggaagtgaaactckttaacaaccagcttttatggaaattaatcaattcctgtgaaagccagaacttactcctgagggaagacattaatctgttcatgagggatccacccccatgaccaaaacactgcccactcggccccacctccaacaatgccacactggggatcaaatttcaacatgcgttctggcagggacaaaccacatccaaactatagcaaggtgggatt

SEQ ID NO: 592326 - DNA, 581 bp, Homo sapiens
gtgtgtcctgcctgctctgtccatggacaaattgcactgtgcttaaatcatcactttcctctgagcttgagcgcctccatagttctaggtcagtttcgtctgcatgagtcgaggtggaggacagagatgtgccctgtgctttctcccaccccagaggcccagcactccacaggccaataacaagccctcgggaaatgtcaacatttaacagtgcttttggtaaacactcacaagagcattaaagatgctaactctcttggaaggtgtgggtttttatttttyttcaggcgaattagtggaaatggtattattctgggcacaaaaagatgatttttggccccgatgggtttgctgtgtcctggtcttgctcgataccacagtcatggccaattggcagctcaggaagcagatggagcctctgatgagccggggtcaggatagcgctgtaggatgcaggggtcagggtagtgctgtaggatgcaggggtcaggatagtgctgagtgtgcccagtgttcttggctgaactcatgggtattagggaatcagggacaatggaacaatttgtggcctcagtggaccc

SEQ ID NO: 592327 - DNA, 581 bp, Homo sapiens
gtgtgtcctgcctgctctgtccatggacaaattgcactgtgcttaaatcatcactttcctctgagcttgagcgcctccatagttctaggtcagtttcgtctgcatgagtcgaggtggaggacagagatgtgccctgtgctttctcccaccccagaggcccagcactccacaggccaataacaagccctcgggaaatgtcaacatttaacagtgcttttggtaaacactcacaagagcattaaagatgctaactctcttggaaggtgtgggtttttattttttttcaggcgaattagtggaaatggtrttattctgggcacaaaaagatgatttttggccccgatgggtttgctgtgtcctggtcttgctcgataccacagtcatggccaattggcagctcaggaagcagatggagcctctgatgagccggggtcaggatagcgctgtaggatgcaggggtcagggtagtgctgtaggatgcaggggtcaggatagtgctgagtgtgcccagtgttcttggctgaactcatgggtattagggaatcagggacaatggaacaatttgtggcctcagtggaccc

SEQ ID NO: 592328 - DNA, 495 bp, Homo sapiens
gagactagcctggacaacatggtaaaaacctgtyttcataaaacctttaaaaattagcccagtgtggtggcggacacctgaagtcctagtacttgggaggccgaggtgacaggatcgcttaagcccaggaggtagaggttgcagtgagctgagatggcactactgcatttctgcctgggtggcagagtgaaaccctgtctcaaaaaacttttttttttaaaggaaacaaaagattttttaaaatgcaagttataaaactgtgttctaggatttatcatgcatgtagacacaatatatatgaaagcaatagcacatgtgaagattgaactatagtgttgcattattaccgtattttacattaagtgatacaatattacctgtacgtagatataagaaattatagatgtatattgtaatttctaaggcaaccactaaattaaaaaaatgtatatatagctaaaaagtcaatataagaattaaacaggaatgtcaaat

SEQ ID NO: 592329 - DNA, 428 bp, Homo sapiens
agactctgtctcaaaaaaaaataataataaaatacatacatacataaaccagtagcatagtcatttgttatcattatcaaatattatgtactatatatcattgtatgtgctagacttctttttttttttttttaagacagggtctygttctgttgcccaggctggagtacagtggtgcagtcacagctcactgcagcctcaatctcctgggctcaagtgttcctcttgcctcagcctcccaaagtgctgggattacatgtgtgagtcactgcacttggccttgcttatttttaaactttaaataaagtttaaagttagcaaaagtctctagaagttgccttttcactggacatgacacaatcaggcatcacttaatgacagagatacattttctgagaaatatgttcttaggtgattttattgttgtg

SEQ ID NO: 592330 - DNA, 428 bp, Homo sapiens
agactctgtctcaaaaaaaaataataataaaatacatacatacataaaccagtagcatagtcatttgttatcattatcaaatattatgtactatatatcattgtatgtgctagacttctttttttttttttttaagacagggtctcgttctgttgcccaggctggagtacagtggtgcagtcacagctcactgcagcctcaatctcctgggctcaagtgttcctcttgcctcagcctcccaaagtgctgggattacatgtgtgagtcactgcacttggccttgyttatttttaaactttaaataaagtttaaagttagcaaaagtctctagaagttgccttttcactggacatgacacaatcaggcatcacttaatgacagagatacattttctgagaaatatgttcttaggtgattttattgttgtg

SEQ ID NO: 592331 - DNA, 395 bp, Homo sapiens
cataggtgaaaccccgtctctactaaaaatacaaaaaattagctgggcatggtggcaggagcctgtaatcccagctactcaggaggctaaggcaggagaattgcttgaacccaggaggcagaggtttcagtgagccaaaatcacgccattgcactccagcctaagcaacaagagcgaaactccatctcaaaaaaaagaaaaaaagaagaagaagaaaacatttgtgtgtatttaataaggaaaactctagattatttaggatactttaygttggagtccttttgatagcagcgtgacacaatcaacatgtatatatggaatttctctttgctagtgatattatttagctctgtgtctccaccaaaatctcatcttgaattgtaatccccatgtgt

SEQ ID NO: 592332 - DNA, 395 bp, Homo sapiens
cataggtgaaaccccgtctctactaaaaatacaaaaaattagctgggcatggtggcaggagcctgtaatcccagctactcaggaggctaaggcaggagaattgcttgaacccaggaggcagaggtttcagtgagccaaaatcacgccattgcactccagcctaagcaacaagagcgaaactccatctcaaaaaaaagaaaaaaagaagaagaagaaaacatttgtgtgtatttaataaggaaaactctagattatttaggatactttacgytggagtccttttgatagcagcgtgacacaatcaacatgtatatatggaatttctctttgctagtgatattatttagctctgtgtctccaccaaaatctcatcttgaattgtaatccccatgtgt

SEQ ID NO: 592333 - DNA, 395 bp, Homo sapiens
cataggtgaaaccccgtctctactaaaaatacaaaaaattagctgggcatggtggcaggagcctgtaatcccagctactcaggaggctaaggcaggagaattgcttgaacccaggaggcagaggtttcagtgagccaaaatcacgccattgcactccagcctaagcaacaagagcgaaactccatctcaaaaaaaagaaaaaaagaagaagaagaaaacatttgtgtgtatttaataaggaaaactctagattatttaggatactttacgttggagtccttttgatagcagcgtgacacaatcaacatgtatatatggaatttctctttgctagtgatattatttagctctgtgtctccaccmaaatctcatcttgaattgtaatccccatgtgt

SEQ ID NO: 592334 - DNA, 586 bp, Homo sapiens
aataaaaaaccttttcaaaaattaatactgtaactttccttcataaaagactgtttggcaagtccacagataaggtaaacatttagtcttttacttagaagccaacattaggcccagatgctaccacaggtcaaatctcaaaatggcaaattggagtctgyccaaattttctgttgtattgaatattttcgcaatatttggaccatcagccaggacttgaacatttttgtcatacagggatttgttttaacagaatttgacacaccgttaatttgcttagtcctcccaggattcatggtgcattaaaagggatattcagtcttcctggagctggtacctgaagagttctgatgtcacttagatccccttccttttgaacagaagtttacaaaacgctcacccatagtcacaaagcagtctgggtcagttatcagcttcacacataatcacctttcaaaacacgaagtaatacaagggtaatgtttatttatctgataactccggttataagaaacactcagacagggcttaacttctactggtattgccagtgacattccaatactagtctgcatgtgcccaaggc

SEQ ID NO: 592335 - DNA, 586 bp, Homo sapiens
aataaaaaaccttttcaaaaattaatactgtaactttccttcataaaagactgtttggcaagtccacagataaggtaaacatttagtcttttacttagaagccaacattaggcccagatgctaccacaggtcaaatctcaaaatggcaaattggagtctgtccaaattttctgttgtattgaatattttcgcaatatttggaccatcagccaggacttgaacatttttgtcatacagggatttgttktaacagaatttgacacaccgttaatttgcttagtcctcccaggattcatggtgcattaaaagggatattcagtcttcctggagctggtacctgaagagttctgatgtcacttagatccccttccttttgaacagaagtttacaaaacgctcacccatagtcacaaagcagtctgggtcagttatcagcttcacacataatcacctttcaaaacacgaagtaatacaagggtaatgtttatttatctgataactccggttataagaaacactcagacagggcttaacttctactggtattgccagtgacattccaatactagtctgcatgtgcccaaggc

SEQ ID NO: 592336 - DNA, 586 bp, Homo sapiens
aataaaaaaccttttcaaaaattaatactgtaactttccttcataaaagactgtttggcaagtccacagataaggtaaacatttagtcttttacttagaagccaacattaggcccagatgctaccacaggtcaaatctcaaaatggcaaattggagtctgtccaaattttctgttgtattgaatattttcgcaatatttggaccatcagccaggacttgaacatttttgtcatacagggatttgttttaacagaatttgacacacygttaatttgcttagtcctcccaggattcatggtgcattaaaagggatattcagtcttcctggagctggtacctgaagagttctgatgtcacttagatccccttccttttgaacagaagtttacaaaacgctcacccatagtcacaaagcagtctgggtcagttatcagcttcacacataatcacctttcaaaacacgaagtaatacaagggtaatgtttatttatctgataactccggttataagaaacactcagacagggcttaacttctactggtattgccagtgacattccaatactagtctgcatgtgcccaaggc

SEQ ID NO: 592337 - DNA, 586 bp, Homo sapiens
aataaaaaaccttttcaaaaattaatactgtaactttccttcataaaagactgtttggcaagtccacagataaggtaaacatttagtcttttacttagaagccaacattaggcccagatgctaccacaggtcaaatctcaaaatggcaaattggagtctgtccaaattttctgttgtattgaatattttcgcaatatttggaccatcagccaggacttgaacatttttgtcatacagggatttgttttaacagaatttgacacaccgttaatttgcttagtcctcccaggattcatggtgcattaaaagggatattcagtcttcctggagctggtacctgaagagttctgatgtcacttagatccccttccttttgaacagaagtttacaaaacgctcacccatagtcacaaagcagtctgggtcagttatcagcttcacacataatcacctttcaaaacacgaagtaatacaagggtaatgtttatttatctgataactccggttataagaaacactcagacarggcttaacttctactggtattgccagtgacattccaatactagtctgcatgtgcccaaggc

SEQ ID NO: 592338 - DNA, 518 bp, Homo sapiens
aaattcctgggccccaccccaggtatacccaaccacaacctggagatggggtccagcaattggcatttgaatgagccttccaaggccaggcgccatggctcacgcctgtaatcccagcactttgggaggctggggcgggaggatcacctgaggacaggagttggagaccagcctagccaacatggtgaaacccccggtctactaaaaatacaaaattagccargtgtggtggcaggcgcctgtaatgccagctcccagagacacagaatcatttgaacctgggaggcagaggttgaagtgagctgagatcccaccactgcactccagcctggggaagacagagcaaaattccatctccaaaaaaaaaaaaagacaaaagaatgagccttccaggtgatgatgacatgtgctcaagctagagaaccaccggattagtgtgaagagggagagagcagggaatcagaggtttgagaaaatacaagaagaaatagtttctctagctcatggaggagtgggat

SEQ ID NO: 592339 - DNA, 512 bp, Homo sapiens
ctgaggcaggagaattgcttgaacccaggaaactgaggtttcagtgagccgagatcatgccattgcactccagcctgggtgacagagcaagactccatctcaaaaaaaaaaaaaaaaaaagaaragaaattaattaccactaacatatctattgctaaaatactcaagggaggcctcttccacacccaccctgggcccaaaattcacaaggagaccaaatagatttcctgctctttacttttgccagtaggtagatatttttccagtttatcatttcattttgagattgtagctttgagagtttccaccttaccctggctcaaatcattgcctctgttcacttacaggctattgtactatcatctgctctctttcttctattgtacatatgggactttcctcttatccatattttatagtccagacttggaagttttacattccattcttattcttttggtggtggtgttatccttaaattttaatatgcatacttaacaatatcgaaaact

SEQ ID NO: 592340 - DNA, 534 bp, Homo sapiens
ttgagtattaatattctcccctccaaatattctatgtatttcttgtattttgagaattcaatataattttatttaaataatgggaaagttatattttagttataaagtatttcttgagaacacagcataactcatctgcaatttatactgcctaaaataaagacattttgcgggccwtttgtatccctacctacccaaattacagaagagcacctctaggagcaactccagagatctgaaaacatatgatacaaatctctaaattaaagtttaataggaatttaattcaagctgccaatagcagtcataatctacaatggctaatgtgacatcagtgtcccacgtaaatgaatggcttgtgtaaaggaaggatttgagaaggaaaaatatattttatctgtgacctgttcggtgattcaatcaggagtctttagcactgaattagcttttctgcctcagttcccctatttccttagcacttaattattttcctacagtcttcactaaattagggttccaaaaaaactgttttaa

SEQ ID NO: 592341 - DNA, 608 bp, Homo sapiens
tttagttataaagtatttcttgagaacacagcataactcatctgcaatttatactgcctaaaataaagacattttgcgggccttttgtatccctacctacccaaattacagaagagcacctctaggagcaactccagagatctgaaaacatatgatacaaatctctaaattaaagtttaataggaatttaattcaagctgccaatagcagtcataatctacaatggctaatgtgacatcagtgtcccacgtaaatgaatggcttgtgtaaaggaaggatttgagaaggaaaaatatattttatctgtgacctgttcggtgattcaatcaggagtctttagcactgaattagcttttctgcctcagttccmctatttccttagcacttaattattttcctacagtcttcactaaattagggttccaaaaaaactgttttaaaaacacacaatgcataaatgcaattttgatttaatcaaattcagtcataaaatatttatgacaatttcatcatttattaattgctttaagaaaatctttgcccctcgtctagaaacttttgtgtaataaaaatacactataactttaaaaaattttaggaatgacaac

SEQ ID NO: 592342 - DNA, 593 bp, Homo sapiens
aacagttccagttagtattgataccagttcttttttttttttttttctttttttgagatggagtcttgctctgtcacccaggctggagtgcagtagcctaatctcagctcactacaacctccacctcctgggttcaagtgatcctcctgtctcagcatctaagtagctggcattacaggtgcacgccaccacacctggctaactttttgtattttagtagagatggggtttcaccatgttgcccaggctagttctgaactcctgagcccaggcaatccacctgcctcagcctcccaaagtgctaggattacaggcgtgagccaccgagcccagcctggtacgagttcttctttgtatgtttggtagaatgcagctgtgaatccatctggtcctgatctttttyctagggggagatattttattactgactcaatctcactactcattattggtctgttcaaaatttctgtttcttcctggttcaatcttgaaaggttttgtgtccaggaatttatccattttctctagattttctagtttatgagcacagagatgtttatagtagcctctgatcttttgtatttctgtggtat

SEQ ID NO: 592343 - DNA, 378 bp, Homo sapiens
agacaactataaatgaaattgtctaagttctaaattctcaatgttgagaataagtcttttagaaaaccttttacaaggtagagataaaagttaaggtagtctctgtctccttgtaataataaaaattgctctattgcttcctaatatttatattaataactaagatattttcataaagatracaattagataggagtcagacctggaggcaacatgtgaacatgctctgcattatcctaaaaaaaaagttttatgcatgtttagcaacaactactgtaatttatagtatatgatttcaaaaaagcttttgcaatttttcctctgtatgatctctgttgagtaattatttacttacattaaaatggtcaggataacaca

SEQ ID NO: 592344 - DNA, 578 bp, Homo sapiens
gcacaggtctcggggctgaactcgcgccaggaacacgcccgaggcaaaccacttgacaaccagcttaggttctcagcagaaaggccgacaggcgggggccggggaggaaggggaggcgagacacacgccctcccgcacactcggcccctccgcctcctcggcccgcggctcaggtgggagcaacgcacgcggctgcacttccgcagcgggcggccggagcccagcgcagacgccggggcccttccggaaagggccgcgacccccgggccagctcgcgggcaagggacgggtgcgcacgccctgcccggcgcctttctcgccgcctcccgcccgccgrccggtggcgatccggggcgggaggtcgcggggtcgaggctccgtgatgctagggaaccggccgcggcccgcgcgcccttccccggccgccgcccctccccccgggccgcccgccgggggcaggagccgagcgccagcgtcccgggggaccagcccgcccgccggcccggggacccggacaactttcccctgcgcggccgcgggcgcccccgacggggcgggggtggggaacggggacaggc

SEQ ID NO: 592345 - DNA, 624 bp, Homo sapiens
ggattacaggcgcacgccaggtcgcccagctaatttttgtatttttagtagaggcagggtttcagcatgttggccaggctggtctcgaactcctgacctcaggtgatccgcccacctcagcctcccaaagtgctgggatgacaggcgtgagccactgcacccagcctaaaaataygctatttgttaacatacagtaagtgtattgacaactacacgtttttaatttctgacaaagcaagtaccaattgatataaactgcattaaaaggctctttgggctcctaaataattttttagagtctgtcctaagagcaaaatgtttaagaatcagtgtttataccattaccaaattccttaatacaggctatttgggtaaacagaaatgtcactcagtactcattttatgttctttccgtcacacacttaagagcaaataacttcactgtcaatattctagcttaatcaaccttttttgaaacacgcttctcaccatcccctttgagaatatgagtaaggtaccaattctccagaaaactcttgcacactgcagaattcatgcaagttctgagtccaaggactctgtcctttggtctattccactagacactggtataaaatcctggta

SEQ ID NO: 592346 - DNA, 376 bp, Homo sapiens
ttgaatattattccatcattcatgctttgttctatttccatgtgttcttgatttctaatctccaattttcacttctattttgggccccactctcaccctttgggctaataagagatatagcttcttttctttttaccattttttaatatcttttgtaagacattattttccaccaatttcctacctctactggcttcagataaatttgggtaattgtcctatccatttgggcacagttgtwctcctccactgaaactgacctgttggtttcctaaggaaggattacaatttatccatttgcatgctagaactctaataccaattttggctttgtttagcattcccagatgggccctaggcacatgggaggaattga

SEQ ID NO: 592347 - DNA, 376 bp, Homo sapiens
ttgaatattattccatcattcatgctttgttctatttccatgtgttcttgatttctaatctccaattttcacttctattttgggccccactctcaccctttgggctaataagagatatagcttcttttctttttaccattttttaatatcttttgtaagacattattttccaccaatttcctacctctactggcttcagataaatttgggtaattgtcctatccatttgggcacagttgttctcctccactgaaactgacctgttggtttcctaaggaaggattacaatttayccatttgcatgctagaactctaataccaattttggctttgtttagcattcccagatgggccctaggcacatgggaggaattga

SEQ ID NO: 592348 - DNA, 582 bp, Homo sapiens
ggtagtgtgtgtctgtaatcccagctactcgggatgctgaggcagaattgcttgaacccagaaggcagaggttgcagtgagctgagatggcatcattgcactccaccctgcctgggcaacacagctagactctgtcttaaacaaagaaacaaaaaaaaaaaaaagaaagaaaaattgaatgcaaaatctttattttgtgtacctatatcaataaattcaacctgatccacctttgtattttttccatcatgtgtatagtacatcagcttatgaatcayattttgtaccttatcctctagggtctgctgggacttctacttataggtctcgaagtgaaaaatagcatgggtaaatcctatgagaatcaacaatgcttcgcaaagcaactaccacaggagttggttcttcaggcaaagcagaggtaacctcctcaggcaggagtgaaaaggctcattctattggcaagaagatttagcaaaatttatagatttgatgtcccccatcgggatcttcctatatttctccattccaactttcatgatctcatttcttcctaataaatgccctcaatttagtggaaga

SEQ ID NO: 592349 - DNA, 544 bp, Homo sapiens
ctcagccagtctcatcatttcacattttcttccygctttttagattctagccatgctgacagctgatcagatggtgcccaaccagattaagcgtcggtccgcctttcccagcccactgacccaaatgttaatctcctttagcaacactctcacagacacacccaggatcaatacttttcatccttcaatccaatcaagttggcagtcagtattaaccatcacaacatgacaaataattggaaggatatttgccaatgtaatcattttaaagaggatgtgatggtccaagctagtagacttccagcagttctcaaacaccaacctgtaactattttcttaagaaacactgctcatatcataatataaataagactaacgtgggaccaaaacttcaatattttttcacctcttatcattatagtatatgcatagaaaatatactcatttggaagaaatgggggcatttttctcacactactttcaagtgttgtaaggacataactatacctctgagttgcccatgagaaatagagcctaaagctct

SEQ ID NO: 592350 - DNA, 605 bp, Homo sapiens
taaatcatatgttaagaatgtgtataattttataagaaactgccagttttccacaggarcgtgatagcttaccttcttactagcagagtatgagcattctggttgctgcttatactttcctgcacttggaattatccattttgttgtggtttgtgtgtgtctgtgtttggacattctagtaagttagtggtggcatgtaattgtgtttttaatgttcatttttctaatgactaatgatgctgagaatcatatgtaattatttgtcattcatacactgttttcttgtgaagtgtctacacaaatattttgtccatattttaaaactgccttatttgttctttccaagctaggttacttgtaaatagcttattccaatctatactctgtctttcaatcctcttagcaatctttttcaaaaggcagagatctttattttgatgaagaccaatttatcacctttttttcttttatggatcataatctataggtagtagctaaaaaaactttgtctaagatgagatttaaaaatttccttttatgttttcctccagaggttttatatctacaattagctttatgatctgttttgagttgttttttgcata

SEQ ID NO: 592351 - DNA, 605 bp, Homo sapiens
taaatcatatgttaagaatgtgtataattttataagaaactgccagttttccacaggaacgtgatagcttaccttcttactagcagagtatgagcattctggttgctgcttatactttcctgcacttggaattatccattttgttgtggtttgtgtgtgtctgtgtttggacattctagtaagttagtggtggcatgtaattgtgtttttaatgttcatttttctaatgactaatgatgctgagaatcatatgtaattatttgtcattcatacactgttttcttgtgaagtgtctacacaaatattttgtccatattttaaaactgccttatttgttctttccaagctaggttacttgtaaatagcttattccaatctatactctgtctttcaatcctcttagcaatctttttcaaaaggcagagatctttattttgatgaagaccaatttatcacctttttttcttttatggatcataatctataggtagtagctaaaaaaactttgtctaagatgagatttaaaaatktccttttatgttttcctccagaggttttatatctacaattagctttatgatctgttttgagttgttttttgcata

SEQ ID NO: 592352 - DNA, 617 bp, Homo sapiens
ttccaacactccccagtgagatgaaccyggtacctcagttggaaatgcagaaatcaccggtcttctgcgtcgctcatgctgggagctgtagcctggagctgttcctattcggccatcttctattttttattcttaagcaagtatagatagttgaaagtatgatatgtttaaatattgacagaacttgagtataaataccatgataattgataacatcatttatttaaaaacatatgaatgaactgttactttgagttggacattttatatcattcattctgtcttcatgaatttctattcccattccaatttagcaacattaatttgtcctaatgtaatatgattttatgctcgaaggccttatattgaatatcttatcatacttctctacaaatatttattttaaaatttgagtccctgttaccataaatctctatgtatcttctaggtaagtttttattacaattgttaatagtacataatttatttaaaacagcaaaatatattataaattctaatgaatacaattttagaaaggaaaatgtatttgaaatactttttaaatagcatttaaaatagcattaaaaatagcatttaaaaatgctatttaaaagtaa

SEQ ID NO: 592353 - DNA, 400 bp, Homo sapiens
cctagtttgcaattaatttttcttactctataggttatctgtttactctgttgatagtttctttttctctgcagaaactcttcagtttacttaggtcacatttgtcaattttttttgttgttgttgcagttgtttttggcaccttcatcatgtgagctttgactgtttctatgtccataatggcatttcctaggtaatcttccagggtttttataatttaaggtattatatttaagtctttaaatccatcctgagttgattttttgtacgtggtataaggaaaggattgaggttcaattgtctgcatatggctagccagttatcccagcaccatttatggaatagaaagtcctttccccattgyttgtttttgttaacttcttcaaaggtaaggtggttt

SEQ ID NO: 592354 - DNA, 608 bp, Homo sapiens
aatatattttactagttttatagtaattgccataaaagagaaatttactaaatcactgccctatttagacacttttttttgctaaggtgctattaaaaacaattatttcccctttttagtcacatgaatgttattcccactgtgtgtgttattgaatgactagactactgattcatattgataaattgctgtctagaaatttattccaattttctacccatcttgtatatgcataaaagtattattttaatatatattcatgagagacatagattttgctttcatttctacattttgctggctttttagtaaaaaaaaagttttcttttattgtatttatgtatattcctcctactttttccactaatctgtcacattgcattcatcaaatactaaagwcttctttgtaataaggtctaattctgtgttttctattgtctcattgatctatatagaccataattgtctatattatggatcctctatttttagattatttttcatttaaatagtgataattgtagttgaagtttcttgagctcttagtatatgttagtaattcggctaagcatacaaatctaacgttactagttacatacattagagtg

SEQ ID NO: 592355 - DNA, 506 bp, Homo sapiens
attcctatttcattatcatgaagtatatcttttaaatttctctcaaatccattctcttcccatttcttctcgtattaaaatatatatttttgttatatttctttattcaggaacatataatcaccttttttggactggtgcaatagcctgtttactgatttcaagcctctagtcatgttaagttctcaatttaatatgagtattataaggaatttttaaagcatgcaaagcacattgacatttctctgcaygtccaacgtatgaaacaagacaaaaaaatagtaggttagataaggaataaaactgtcattatttaaagatagattgatattatgtggaggaaatcccaagaatttacagataaactacataagaattgaaaactaaattcagaaacttcaaaaactgttaaaaacacagaaaaatataaatataaatagtaatttcatgaaatttacacagaaaactgcatttttttttccctaaaatagggatggaaggaacag

SEQ ID NO: 592356 - DNA, 506 bp, Homo sapiens
attcctatttcattatcatgaagtatatcttttaaatttctctcaaatccattctcttcccatttcttctcgtattaaaatatatatttttgttatatttctttattcaggaacatataatcaccttttttggactggtgcaatagcctgtttactgatttcaagcctctagtcatgttaagttctcaatttaatatgagtattataaggaatttttaaagcatgcaaagcacattgacatttctctgcatgtccaacgtatgaaacaagacaaaaaaatagtaggttagataaggaataaaactgtcattatttaaagatagattgatattatgtggaggaaatcccaagaatttacagataaactacataagaattgaaaactaaattcagaaacttcaaaaactgttaaaaacacagaaaaatataaatataaatagtaatttcatgamatttacacagaaaactgcatttttttttccctaaaatagggatggaaggaacag

SEQ ID NO: 592357 - DNA, 376 bp, Homo sapiens
ttgaatattattccatcattcatgstttgttctatttccatgtgttcttgatttctaatctccaattttcacttctattttgggccccactctcaccctttgggctaataagagatatagcttcttttctttttaccattttttaatatcttttgtaagacattattttccaccaatttcctacctctactggcttcagataaatttgggtaattgtcctatccatttgggcacagttgttctcctccactgaaactgacctgttggtttcctaaggaaggattacaatttatccatttgcatgctagaactctaataccaattttggctttgtttagcattcccagatgggccctaggcacatgggaggaattga

SEQ ID NO: 592358 - DNA, 589 bp, Homo sapiens
gatgactgtatatccagaattgtgattgctggatcatatggtagttctattttaatgttttgagtaacctcagtactgttttccataatggctgcacgatttttacagtcctacccacagtgcacaaaggtttcgatgtctctgcatccttgccaacacttgttattttctgtttcttttggtagtggccaacataatgggtgtgaggtgctatctcattgtggttttgatttgcattaacaatgttgagtatccttcatgtttattcaccccaaatattttacttttgaatttattgaaaatcatgcattttaattatgtaaaactcaataccatgcatcatttgttaaatgggaaaaggagaatttgtccttatgactattataaaatattctaataaggtgaaccttttttttttttttctttgagacaaggtctcgctgtgtcatccaggctggaatgcagtggcgcagtcttggcttactgcagyctctgcctcctgggttcaagtgattctcctgcctcagcctcctgagtagttggtattacaggtatgcaccaccacacctggctaatttttgcattttta

SEQ ID NO: 592359 - DNA, 464 bp, Homo sapiens
ggtgaattcatctcctcaatagggatagaagagccactggagccattaggctataagcagggcatcatcttccttgggcaagtctgtaatgggctttgctagcatttgccagtgattcttactttaaattgtttccactgctggtatagctatttctgtttgatgtatttttttcttcaggcaatccartaacctcaatcgggttgcattccattttttagctgcctaggaagccctcttctctctttaagttggcaccatgtagctccagtgagatctactatgtttcaattctgctgcagagggcaatctgatgtccctaaggaacaatagggcatcattattcttaggtattcatgctgtagcacttgaatgtgctgtaattaaaagtctatatttgatataaattcttcttttcgttcccattttgatcaaagtgatacatactcaaatggttcaacaag

SEQ ID NO: 592360 - DNA, 464 bp, Homo sapiens
ggtgaattcatctcctcaatagggatagaagagccactggagccattaggctataagcagggcatcatcttccttgggcaagtctgtaatgggctttgctagcatttgccagtgattcttactttaaattgtttccactgctggtatagctatttctgtttgatgtatttttttcttcaggcaatccaataacctcaatcgggttgcattccattttttagctgcctaggaagccctcttctctctttaagttggcaccatgtagctccagtgagatctactatgtttcaattctgctgcagagggcaatctgatgtccctaaggaacaatagggcatcattattcttaggtattcatgctgtagcacttgaatgtgctgtaattaaaagtctatatttgatataaattcttcttttcrttcccattttgatcaaagtgatacatactcaaatggttcaacaag

SEQ ID NO: 592361 - DNA, 637 bp, Homo sapiens
tcgtggtgtataaatcaatcagaagtcttatacacattttcctttaattcctatatattatcggtaatatttggctcacgagtcttcttttttctttttttcgtccttttacccagtaaggtctttcaataactccccctttatattattgcctgagggatatttctgaaatgctaattgatcacattattatcctactaaaagcctcaagtgtgtcatcggggctgtaagaacaaagcttagggtagtgcttgtacttccttatggatagcttctgctttcttttctattgtaatttgttctcatctacactttcttcagatcatgctgagaaagaaagggagaaaaagagagaacttttttcctttataacttctactaytagagcatttaataacattgagggattgattaaaggcattagatttaggaaactgacctttgtcagaattttcctcaagttacttcagttatgatggggaaataccatggcaccagcatttccaggaaacgtgtttgatagaaaccatcagcaaaatttcaggtgctataagaatgagaaaataaaactcagaattatataattctaataatttataattatattataaatataatattgataatgatatataag

SEQ ID NO: 592362 - DNA, 590 bp, Homo sapiens
acaaaaaaattaacaaaaattagccaagcatcatggcacacgcctgtagtctcagctacttgggaggctgaggtaggaggattgcttgaacctaagaagtcaaggctgcagtgagccgtgattgtatcactgcattccagcctggggtaataaagtgagaccctctcaaaaatgaaaagaaaaggaaaggaaaggaaaggaaagaaaagagagagagagaaagagagaaagaaagaaagagaaagaaagaaagaaagaaagaaagaaagaaagagaaagaaagaaagaraaagaaagaaagaaaggaagaaaggaggaaaggagatgcatgcacttgcatgtttatggcagcagtattcacaacagcaaagacatggaatcaccctaagtgcccatcgatggtggattggatgaagaaaatgttgtgcatatacaccatggaatactatgcagccataataaggaatgaaataatgtcctttgcagggacatgggtgtacctggaggccattatccaaagcaaattaatgcaggaaacagaaaaccaaataccatgtgttctcactaataactaggatctaaacaatggg

SEQ ID NO: 592363 - DNA, 590 bp, Homo sapiens
acaaaaaaattaacaaaaattagccaagcatcatggcacacgcctgtagtctcagctacttgggaggctgaggtaggaggattgcttgaacctaagaagtcaaggctgcagtgagccgtgattgtatcactgcattccagcctggggtaataaagtgagaccctctcaaaaatgaaaagaaaaggaaaggaaaggaaaggaaagaaaagagagagagagaaagagagaaagaaagaaagagaaagaaagaaagaaagaaagaaagaaagaaagagaaagaaagaaagaaaaagaaagaaagaaaggaagaaaggaggaaaggagatgcatgcacttgcatgtttatggcagcagtattcacaacagcaaagacatggaatcamcctaagtgcccatcgatggtggattggatgaagaaaatgttgtgcatatacaccatggaatactatgcagccataataaggaatgaaataatgtcctttgcagggacatgggtgtacctggaggccattatccaaagcaaattaatgcaggaaacagaaaaccaaataccatgtgttctcactaataactaggatctaaacaatggg

SEQ ID NO: 592364 - DNA, 523 bp, Homo sapiens
atccatccagtgactgttcagcaggaaagcccttcacatatttgaaactcatttacatattcttctttctgctcatctacaccagaaacaaactctctagtcctataatgcaatccttatatagtcagggtccccaggggatccttatttagttaagactcttctgaatgaattactttgccaatatacctttgaaatgatggtgcccagagctagacccaaaatttcaaatataatctaatrttatctagacatatgtcactactaatgcaaaggtagggaaacattagcttttcaagcagacactgtaattttcttgaaccttttaaacctggaattaactaaaatgtttagacctttttatatgaaaatgctttcatgtcaagtttttaccatcaatacaccgcacttcacatagttactcaaattgtgttttatcaatatgtcacaggaaaaatgtactcaaagttttgggttttcttcacatttcacctttggggtctctaatgtgaagaaacaaggt

SEQ ID NO: 592365 - DNA, 546 bp, Homo sapiens
tcctttgtatttttctcacttaacttggcaatctttytaaaatttaattttatttatttatttatttttgagacaaggtctcactctattgtccaagctggagtgcagtggtgcaatcacagctcactgcagcctcaacctcctgggctcaggtgatcctcacacttcagcctcccgactagctgggactacaggtatgcaccaccatgcctggctagtttttgtagtttttgtagagatggagtttcgtcacattgcccaggctggtcttgaattcctgggctaaactaatacacccacctcagcctcccaaaatgttgaggttacaagtgtgagccacggtgcttgaccaaatttaatttttttaactgacaaataataattgtatatattcatacagtacatagtggtgtttggatatacatataatgtatagtgatcagattagggtgattagcataaccattatctcaaacatttatcatttctttgtgttgggaacattcaatatcttccttctagttattttaaactatattttattat

SEQ ID NO: 592366 - DNA, 583 bp, Homo sapiens
ttgacttatctgatcctttactttctacattttaaattttcttccacccagccaactagcgaatttggagctgcttagacaaccattctgctctaatacgaattatttgtatagaaagttaagatamctcagaaatccaagcctgactgctggatgtcgggcacacagccactgtgccactgtccatcaaaagcacacaaaaccagcaagaagccccacaggctttgatttcgaggtccttaggcaaatggtctcaattttgaaattatctcttcttaataggaagtactcacatagtgctattatatgtcaggcatttgaatttatgtaatcctcacatcagtcctatctcatgtgtatcagttagctttgtgctgcataaaaaagggccttaaaatttagtagcttcaaactaactagatcatatgcctagaagacaatagcactgcatattattcactagtctgtgggtcagctggacagttctgcttatccagctagtgtattttctgcctgctaatcttggctgagctctgttataatttgtggggccttggctgggaccaatggaccgactcactgg

SEQ ID NO: 592367 - DNA, 550 bp, Homo sapiens
aggaactacaatggatgtgaatatagggagaagtaaaggactgtgtccatttttagaatctacacaagtgggcacaattattttcattttgaagatgagggaactgagatacagagtttaaatgacacagtttatatagattctaaatgtccaaatcagaattcagacacccagggagagacagactccagaatccatgttgtttatcratatgctaaatatttattttgtgtgtgtatttcctagatgtcactgctacacgtgttgagaaagaagatcatgctccttgaatcctttcttgtgcaagacctttgattccctcggtaccatccgttctatcccattccctggaccaaatgtttgcaatatataacacttctttaaactttagtattttctcctggtctttacagttacctaaaaaaaaaaattaagttttaaagttttaaaaagtggtacatatgaatgtgtttttgtctttagaatgcaaatagctgagaatagaaactatattttatttaatagttatgtttttagcaagttgtaaaat

SEQ ID NO: 592368 - DNA, 550 bp, Homo sapiens
aggaactacaatggatgtgaatatagggagaagtaaaggactgtgtccatttttagaatctacacaagtgggcacaattattttcattttgaagatgagggaactgagatacagagtttaaatgacacagtttatatagattctaaatgtccaaatcagaattcagacacccagggagagacagactccagaatccatgttgtttatcaatatgctaaatatttattttgtgtgtgtatttcctagatgtcactgctacacgtgttgagaaagaagatcatgctccttgaatcctttcttgtgcaagacctttgattccctyggtaccatccgttctatcccattccctggaccaaatgtttgcaatatataacacttctttaaactttagtattttctcctggtctttacagttacctaaaaaaaaaaattaagttttaaagttttaaaaagtggtacatatgaatgtgtttttgtctttagaatgcaaatagctgagaatagaaactatattttatttaatagttatgtttttagcaagttgtaaaat

SEQ ID NO: 592369 - DNA, 471 bp, Homo sapiens
gttatattgtggtctgtggttgataagggcttttatcttgactagcaggagagagtgcaatatggagcaytctacagatcagcagttctctatcatttttcaatttgtgattatcaaactgcctgactgagaggcaggataactagtatcatctttcccagacttataagaagaattacctggaggcctcattaaacatacaaattcccagctccacccagatcctggtaaatgagagcctccagggaaggactgtggatattcatatttttagtaagtttgaaggtaattgtgttagctgatggttttgaggatttataattcaactttgccattgtctgtgttgagatgacatgttatttcaccatgtctaaacatgcttacttttctgtaaaagcaaggtgatgatagtatctccttctgggtactattgtgaacattaaatgacaaaatgtgtgcaaaacaattatc

SEQ ID NO: 592370 - DNA, 549 bp, Homo sapiens
agatgtgaagagccatgatgacttcctgaagggacatagtgagtcagtggctcagatagaagaggctcccggatgtcagtgttaggtcatgaagatgtcactctctcttaagaaaaagttttcatttattctacagaaacatcaaatgcacttctttctttgtatgtcatgaaacagtgaacttttttttaatccatctttcttagtacatgggtcactttaatgatgagagattttgcttattgttccatacctataacatgctacttttcaaatggagatatctaaggatgtgagagagaaacataacaaacatttraatctgagaactacaggctccaattcaaaaattcacaaaaatgtaagcgtgaagtaatatgaactcttaagagtagtcataaggaaaagttacatggttttgtaacttatatagctataaaagattgataattttgtgcctctggttacatgtctgagatactgcaggaattaaataactggtttttctattatgacaattagaagaaaggcattaagtttgcatttaga

SEQ ID NO: 592371 - DNA, 331 bp, Homo sapiens
gtttacaagctgggcctagaggcagcatttgagtaggtgcggacaatactcacatagtcacaggggcaggacaatttcaaggtgatctctgaattattagtctagtgaatttttttcctgtcatcttagaattgtagtttttttctacttcaatttttcaaaagttattaaagaattaaaaggaaaaatgtggtgctctacctgaataatgataatattttgctyttctttatccagtttatttttttttttagacaaagtggtagttacatcatagtttctatattacagaaagatgctttcttagtccagatactacacaactgtgtcc

SEQ ID NO: 592372 - DNA, 537 bp, Homo sapiens
gcatttccactcccagatttatacccaatagaaatgcatacaaatgtgcactaaaggcatgcacaagaatcttcaaagcagcattatttacaagagcaccaaactggaaacaatccatgtgttcatcaagagtaaaattgattcatcttgatctatttctacagaggaatactacacaacagtgacaatgaataaactctagagttttyggcagcatggatgaatctcataaaaatagtattaggtaaaataaacaagtcacagggtacataatttatgaatctatttatataaaattcaaaaatcatgtgaaccaatctatggtgttagctaactaggatggctggtactcttggaggaatagtgattaaaaagagagcagatacatgggtgttaactctgtgtacaattatgatgaacacttttctgtgggtatgtagtttttaaaataaagacaatagaaagtttatttacaaaattaatgaaaagggatcattaatgtatgattttgtcacagagatttgcacctgtgcaaag

SEQ ID NO: 592373 - DNA, 646 bp, Homo sapiens
actctgtgtacaattatgatgaacacttttctgtgggtatgtagtttttaaaataaagacaatagaaagtttatttacaaaattaatgaaaagggatcattaatgtatgattttgtcacagagatttgcacctgtgcaaaggcctttgacaaaagtcctgtggttaagtgcatccaaaaagataaaggtagaaagcctaattattaatgtccacttttctcttgtgagaggatctacagaaaataagaccaccctacataaatatgaacaaaaaatcttcctggggcttcagaagaatctaattggttctcagaaaacataaaggaaaatctaattggttctcagaaaacataaaggaaaatctaattggttctcagaaaacataaaggaaaatctaaygcacccctcagcagggcttgggttttccaagtcctatgagagggtaacagagtcttctggtcatctcaattccaaggacaaggcactcgggtgaccccgaaatcaacagtataggcaggaggagaaagacagacctgatttgagaatgttttcttttaatacgtactgacctcagtgacctttgagggctgtcagaatgatggccagaggaagcattggagcatatgcttactcattatacatgaat

SEQ ID NO: 592374 - DNA, 540 bp, Homo sapiens
tcactatatcgtaacaatacagctaggactcaaccatgccttgttactagaaatccatgttctaattcttacaaagtagattatgctaaaacagagagggatgtgtttgagcagaagtgttagaaaattctatgatatgtctcttacaactcactgctaggtgcacacacaactcctggttgactagcttggatgayttctggtaatgacctccacaggaaactgggaagtatcctccaatgttatagagtgaggttaatcatgcaaaatatccattggccactactatatctgctttcttccaacagtcatctgaacatgattatagaaaggattcctgtacctctttatcttcacaaaccctagaagtactttaacttccatacaaatatatgttaggaaaaaaagacacatgaaaacatgcagcctatcttaacccactggtagattttaagtctcagcttcagtctaagtagaatacatacttccaattttcttctaacactatttttcataataattttatttgaaccatagcta

SEQ ID NO: 592375 - DNA, 518 bp, Homo sapiens
ttatatttaaagtaacttttttggatgaaaactcatgggttgggcaacaactaaaattaattcccatcctttagaggagaaataggaaaataaacattcataccaagtcaataattgcttaaataaattacatatctcataaattctaatatacattacatgtgaatggaagaaaactataaataatatcttaaaactatgcatgcaaaataggacaaaatttaaatgactagtatgtagacaaagttgagattcaaatacagcagctctaattttggtaatctgtgcaatttgaatacaataattttttttcttgaaaattaagggcacttttcatggtatactttactctcatttcgccagttgacaactctcaaccatcataccataaattgtgcactgtgttcctaagtaccagcatttttcatatgttgaacagagcctgttcgttgattgttgwgtgatcctgaaagtaattagcttaactacttacccttaggctgtatctcttcttgatg

SEQ ID NO: 592376 - DNA, 583 bp, Homo sapiens
tagaatgttttgatgggccaatgtattttcccacacaacagttgtttaaatagacaatggtgaccagcacagatgaagaaggagaggtgggcagctctccattaggccagagtttatcagcttgttgatgtgactttgggatatgagattttccccgtggaaaaagcagaggagacctactctgagggaggttggctagtgcactgcaaagtcaatarccacgtggccatgtacctatgtatacatcacttaccatgtgccaggcactattctatatgctatacatatgtcatgattaattttctcagatttttgaagtagatattattatatcatcttcattgtacagcgaatgaaattgaagtgcaaaggggtcaagcaactcacacaagatacaataatcaaacccaggcttttaaccattgattgaactctattacctctattacctggcatgaaaaagagatcaagtagtattattactttatcattgtaaacagaaatgtctgcttatatttaaaatagaaaaaaaaattctggatcttgttgcttcacaggtgatttgttatttcaatttttaact

SEQ ID NO: 592377 - DNA, 583 bp, Homo sapiens
tagaatgttttgatgggccaatgtattttcccacacaacagttgtttaaatagacaatggtgaccagcacagatgaagaaggagaggtgggcagctctccattaggccagagtttatcagcttgttgatgtgactttgggatatgagattttccccgtggaaaaagcagaggagacctactctgagggaggttggctagtgcactgcaaagtcaatagccacgtggccatgtacctatgtatacatcacttaccatgtgccaggcactmttctatatgctatacatatgtcatgattaattttctcagatttttgaagtagatattattatatcatcttcattgtacagcgaatgaaattgaagtgcaaaggggtcaagcaactcacacaagatacaataatcaaacccaggcttttaaccattgattgaactctattacctctattacctggcatgaaaaagagatcaagtagtattattactttatcattgtaaacagaaatgtctgcttatatttaaaatagaaaaaaaaattctggatcttgttgcttcacaggtgatttgttatttcaatttttaact

SEQ ID NO: 592378 - DNA, 583 bp, Homo sapiens
tagaatgttttgatgggccaatgtattttcccacacaacagttgtttaaatagacaatggtgaccagcacagatgaagaaggagaggtgggcagctctccattaggccagagtttatcagcttgttgatgtgactttgggatatgagattttccccgtggaaaaagcagaggagacctactctgagggaggttggctagtgcactgcaaagtcaatagccacgtggccatgtacctatgtatacatcacttaccatgtgccaggcactattctatatgctatacatatgtcatgattaattttctcagatttytgaagtagatattattatatcatcttcattgtacagcgaatgaaattgaagtgcaaaggggtcaagcaactcacacaagatacaataatcaaacccaggcttttaaccattgattgaactctattacctctattacctggcatgaaaaagagatcaagtagtattattactttatcattgtaaacagaaatgtctgcttatatttaaaatagaaaaaaaaattctggatcttgttgcttcacaggtgatttgttatttcaatttttaact

SEQ ID NO: 592379 - DNA, 534 bp, Homo sapiens
ccttgacacactgatttcatttcctttgatatataccctgtagtaggattgctggaccacatggtagtgctatttttaattttttgagaatcaaccatactgttttccataatggctayactaatttacattctcaccaacaatgtgcaagggctttcttttcttcacatcttcatcaacacttgttatcctttttgataatagccattctaacaggtatgagatgatatctcactgtggttttaatttgcctgatttttttatcatgaattatttttttgatagttagtgatattgagcatttttcacatacctgttggccttcaatgagcatattcttaaaaaatgaaaattaccagagattttgtacatatattagcatttcctgcttatagtgggccttggcctacaagagttaaatggcaggtaagggaccagaatagagttaataatagtatagtgttttcatcattaaagtaggttggcattgaatttgaaaccaggtaatctatattgaattctgataatgtgagt

SEQ ID NO: 592380 - DNA, 591 bp, Homo sapiens
attagtgcttaacctccatagtgtaatcattcttgccccagacagattttcttgacctgaaaaccaaatgtctctgtggtaaatgcattacataaaaaaagaccctacactctgctttttcttcttgtaaatcagttttcttatgtttcacttttatgagtttctagctgtgatgttattacaattgattcagcaatggaagaaatatttagttggatttcaaaggaatattctatgcagttgtggtagaaagacattcacttaaggtattgtcttagtccattcatgttactacaacaaaaatgccataaactgggcagcttatagacaatagacatttatcagagttctagagactcggagtccaaatcaaggcattgaagggcactaatcccttcatgaggccctacctgctgatgtgatcaccccaaaggccctacctcctaatgccatcaccttggggattaggatttcaatatataaattttggggagtacaagttgtgacaccatagcaggtatcttgaatatatcttgtagtcccagattttstaattcttaagaatcatcaaatctgataaatttcacactt

SEQ ID NO: 592381 - DNA, 567 bp, Homo sapiens
cagttgtatgagatgaaaacacgacatacagaataccttggagatatttcaggtttggttctagacaaccgcaataaagtgaatgttgcaataaagttagcaagtcatgcaaattttttggttttccagtgcacataaaagttatgtttatactatgctgtggcgaattcagtatgcattcacattatgtctaaaaaaaatgtacatgcccttggtacttacataaaaacagccatagatcagtggaacagaatagagaacccacagataaacccatacatctacagtgaactcatttttgacagagatgccaagaacacatactggggaaagaacagtctcttcaataagtgttgctgggaaagttggatatccatatacagaagaataaaactagagccctatcttcaccatatacaaaaatcaaatcaaaatggacaaaagacttacatctaagaccttaaactattaaactamtaaaagaaaacattggagaaattctccaggacattggactaggcaaagatttcttgagtaataccccacaagcacaggcaaccaaagcaa

SEQ ID NO: 592382 - DNA, 587 bp, Homo sapiens
ctggggaagcctcacaatcatggcagaaggcaaggaagagcaagtcccatcttacatggatggcagcaggcaaagacagagagagagcttgtgcaggggaattcctctttttaaaaccatcagatcttgtgagacttactcgctatcatgagaagagcacaggaaagatttgttcccatgattcaattatctcccacgaggtccctcccacaacacatgggagttcaagatcagatttgaatggggacaccgccaaaacatatcaatatcattgatcatctgagaaacacaaatcaaagctataatgtggtatcatctcaccccagttaaaatagcttatatccaaaagccaggcaataacaaatactggaacccttgtgcaccgttgttgagaatgtgcattagtgaaaccattatggagaacagtttggaggttcctcaaaaaacaaaaaatagagtgaccatatgatccagcaatcccactcctaggtgtatacccaaaagaaaggaaatcagtatatcaaagagatatctgaattyccatgtttattgaacaactattcacaatacccaagatttggaagcaa

SEQ ID NO: 592383 - DNA, 643 bp, Homo sapiens
ggcacagaaagacaaacttcaagtgttctcacttatttgtgggaactaaaaattaaaacaattgcactcatggagatagacagaagaaggatagctaccaaaggctgggaagggtagtgggagttggcagaaaagtagagatggttaatgggcacaaaaaaaaaataggaagaataagacctactatttgatagsacaacaggtgactatagtaaacattaatttaattgtacatttttaaataactaaaagagtgtaattgggttgtttgtaacaaaaaaaaatgcttgaggtgatgaataccccatttactctgatgtgattacatattgtattcctgtatcaaaatatctcatgtacatatgtacatacataccatacacctatgtacccacaaaatttaaaaatcaaaaaaatgcatgccttaatttaaaaatactttattactaaaaagaaggattcagaaggttgtaatctttttgctggtagagggacttgcctccatgggcatggatcaagtctcccccaagcaattataacacaaacagcaaagattactgatcacagatcactacaacaatataataataataatacaattagaaatattgtaagaattaccaatatgtaacagacatgaagt

SEQ ID NO: 592384 - DNA, 602 bp, Homo sapiens
ataaaaataaaataatattttaatatgacttatagtattttaaaatattatacaaaatattaataaaagcctcattagaaaagcttgttacgtctttctataacttcatttatggataaacaatgtaacatataaaaatatagtttcattataaatctcttggtcttcttttttaacctgattgcttcccttaacgtctttcctatagataagtactggaattaccacagatgagagaatatggacaacttgagatttccatatttcagatatatcacagactaaattggatattttggaatgtacatggccacatggattcatgtctcatcacatgaattagttaacatcttcatttacccactttcctccacacaaacatagcacaatttatctgctggtcttttcttctttcccatgctcacgtttttttttttttttctgcagctttagtttttcttttgtattctytctagttttcctcattgactatgtgtccttaatattctagatttagctttgattccaaccttgccctttctcttgatttcacctccacatcatctacttctgcttcatgtttgaagccatttttttttatt

SEQ ID NO: 592385 - DNA, 616 bp, Homo sapiens
acactccttgttctttttgtcattcctcatgtgtgatagtaccaggcttccttaccattctcttcgaattagctgcagtttatgaaagttctcaaataatggagtcctggctgaacacaactctataggtatttcttgaccagagcggaaaatacaaactcttacaactcacattctgaatgctctgatactattatgcaatcaaattgcttatttatttgtcagtcacatcacacatgacagcagtgattttgtttccaatttattaaattaaatctgaaataattaccctgcctttaagcccctgcctaatctacttgtaatttatccaccagtactctcctatatgaatgaattcattgtgtattttctttcttacacatctttgtcatgttcttctctcttagaacaacccagaatgtctcrtggtggcctgttttacaggtaaatgttttaaaaggatcatctttgatgactttttgttcctgaaacatcctcagtttctctctgtcatgtggtaggtgtggaggaatgtctgtcaaattagttggaagtgtgctgtgaatcagatatggctagatattgaatagcatatgttgtattaggatataactca

SEQ ID NO: 592386 - DNA, 350 bp, Homo sapiens
aaaaatgggcaccaatagctccaaaacatcacaatttactgctgctatcactagagtacactgattcttatttccaggtcaaaaataacccatagaagaactcccagcatggactgtgtaccctctaggtgtatacagggtcgtgtatgaaggtggtagttgatactgaatctgcaactgaccttaggtcatttgccccyttataagtttgtattttaatagccacaaaagggcaggcaacacagacctggtcctgtgtgaaacgtgggctgtggaactgagactcatgctgagtgataggatagcagggcaggaaaaaaaataccttttggaaaagagacggagaatga

SEQ ID NO: 592387 - DNA, 350 bp, Homo sapiens
aaaaatgggcaccaatagctccaaaacatcacaatttactgctgctatcactagagtacactgattcttatttccaggtcaaaaataacccatagaagaactcccagcatggactgtgtaccctctaggtgtatacagggtcgtgtatgaaggtggtagttgatactgaatctgcaactgaccttaggtcatttgcccccttataagtttgtattttaatagccacaaaagggcaggcaacacagacctggtcctgtgtgaaacgtgggctgtggaactgagactcatgctgagtgawaggatagcagggcaggaaaaaaaataccttttggaaaagagacggagaatga

SEQ ID NO: 592388 - DNA, 441 bp, Homo sapiens
gaattcaagctctccctacccacgtggttctccagcctcgcctcagcccagcctgttcctggcttggccctttctggagaggggtggggggactgtttgttcctttacacattctctctccatcccttcccttccctgattctcccacagcaggaatttcatgaaggggctcattttttaagtgcaaagtgtttctttctcaatgcacttgctgtgtgctctctcctggctaccactggcatagacgccctccaaacttgctagagacasggaaaagggaagtgaaatggggaaagaggcagagagaatgagcaggatttttccaattgatattcacttttgagtattaaaacatttgtctttcaaataacctatgcattaaataggtcattaatgaattaggggtaattttttttcatttgacaattgctacagtgaaac

SEQ ID NO: 592389 - DNA, 441 bp, Homo sapiens
gaattcaagctctccctacccacgtggttctccagcctcgcctcagcccagcctgttcctggcttggccctttctggagaggggtggggggactgtttgttcctttacacattctctctccatcccttcccttccctgattctcccacagcaggaatttcatgaaggggctcattttttaagtgcaaagtgtttctttctcaatgcacttgctgtgtgctctctcctggctaccactggcatagacgccctccaaacttgctagagacagggaaaagggaagtgaaatggggaaagaggcagagagaatgagcasgatttttccaattgatattcacttttgagtattaaaacatttgtctttcaaataacctatgcattaaataggtcattaatgaattaggggtaattttttttcatttgacaattgctacagtgaaac

SEQ ID NO: 592390 - DNA, 465 bp, Homo sapiens
atttgctcctgtggtagaatgtacaaataattatcccatagatcaaaacacttttgagagtgaaagcaggtcccattgttacaccaggagtataggtataaattggaactctttcattcaaactagcatagatggtcaccctccctrtgacactttcctgatctcttccacaccaccattgactctaccattggcaatctcactccaccatggacttctatagcactgactgattgtctatagcaagtattttgccatttggcatacattacttcactttttttattacatacattaccttacatcttcttccatgtgaatatttgtcttatttctcatttcaaaatagagtgacaattttgaaatgcgagattatcttacattttctgcttacagaatctatcacagaaaaacctcctacgaaggaggcacacaatgaatatttgttgactaacatattcttaa

SEQ ID NO: 592391 - DNA, 465 bp, Homo sapiens
atttgctcctgtggtagaatgtacaaataattatcccatagatcaaaacacttttgagagtgaaagcaggtcccattgttacaccaggagtataggtataaattggaactctttcattcaaactagcatagatggtcaccctccctgtgacactttcctgatctcttccacaccaccattgactctaccattggcaatctcactccaccatggacttctatarcactgactgattgtctatagcaagtattttgccatttggcatacattacttcactttttttattacatacattaccttacatcttcttccatgtgaatatttgtcttatttctcatttcaaaatagagtgacaattttgaaatgcgagattatcttacattttctgcttacagaatctatcacagaaaaacctcctacgaaggaggcacacaatgaatatttgttgactaacatattcttaa

SEQ ID NO: 592392 - DNA, 558 bp, Homo sapiens
gtttctctgttgactttctgtcttgaagatctgtctagtgtggttcaatggtataytgaaatcccccactgttattgtgttgctgtctgtctcatttcttaggtccaggggtaataattctatgaatctgggagctccagtgtttaatgcatataaatttagcattgtaatatctctttgttgaattgatccctttataattgtatagtgaccatctttatcttttttttgctgttgtggctttgaagtctattttgtctgacataagaatagctactcctgcttgattttggtttctatttgcatggaatattttttctaccctttaaccttgagtttatatgaatccttccatgtcaaatgagtctcttgaatacagctgatatttgggttgtgatttttttaattcattctgccattctgtatcttttaagtggagcgtttagggcatttatattcactgtgactattaagatgtgaggttctgttctcttcatcatatttattgtcacctagatattgttgttgttgttgtgttattgttttgtaggccctgtg

SEQ ID NO: 592393 - DNA, 392 bp, Homo sapiens
gacaacagcaggacacaacttcccccttatttcataatctctatttcatttgatggccacatcatctaactggaaagctaaggaacagcttcaacatcactttaactttaccactattcaaatgctagttagcatayagaggtcttacattgaaagagaatttagaatacaaaacacaatcctaaaatttatatggaatgacaaaagacccagaatagccaaaactatcctaagcaaaaagaataaaactggaagaatcacattacctgactttaaatcataccttggagttacagtaaccaaaacaaaatggtactggaataaaaacagacacatagaccaaggcacagcctagagaacccagaaaaaaatccacacccctacactgaaat

SEQ ID NO: 592394 - DNA, 576 bp, Homo sapiens
tgtgctatctccagctttgttcttctttctcaagatcgctttagctatctgctgtcttttgtggttctgtacgtattgtaagatttttaaaaaatatctgtgaaaaaagtcattggaattttaacacggtatttcattgattctgtaggtagggtagtttgggtagtatggcagatagtagggtagcatggatattttgacagtattgattttgatccatgaacacagcatatgtttttatttacagtcatgtgtcacttaatcatgaggacacttatgataaatgcatacttaggcaattttattgttgtatggccaatatggtgtgtacttaacaaaaacctagacagtatatatggtctactacacacctaggttacgtggtataggctattgcttctaggatacacacctgcacagcatatactggactaaatactgtagggaattgtaacacaatggaaagtatttatgtgtctagctgtagaaaagttacagtaaaaaaacagtattgtaatcttatggaaccactgttgtgtatgtgrcttgtcattgaccaaatatccttatgtggca

SEQ ID NO: 592395 - DNA, 620 bp, Homo sapiens
tatgtgtttgtgtgtagatggaaaaattttagtctggttgattgggtagctttttatattgaataacttttatattaaatagatttttgttatgtcaaataaccctataataaataagttagatggaaaggctaattctggttagcttctacttattatgtcaaaggtagtgtaatcaatgtgactcagcttattgtggatcttagattccacgtagtattgacaagcttsaattgataataaaatgctctctctcaaaagggactaatacacacaaattgttggatacagttaatcacatgtttccatcaaaccacaagattgccaggaaataaaatcctattatgtgtcaggaagtggagagaactgggactatttggcaaataccattaataactacagtgaaccaacagtgaatttcctgcctgaaattcagattgaatgttgaccatgtgtgaactcaatttttgcactgacaggaagagttttaagaactagatcatctaccaatattttttctcatgttacattgcaatttgttggatttctgattccttctctcttgcaaatgccttgagtgagtctacaccctctttaaacagttatttgttcatcctaga

SEQ ID NO: 592396 - DNA, 563 bp, Homo sapiens
tattgtttacaatttaaataaaagtaataaaacttttcccacccagctctgaaggtagcattattcgcacctccgcggaacattaaatgcacagacttaagcttttatcaagctccactgtgatccaactttatctgtatatatttgagaaccaagctgaatgcaattagaccacattgtttgtatgatatgctgtattttctggattcatgaattagcttcttctggggattcagggagtctgtgtctgtatttctaacactttaccactagatgataacacaggtttatataccaaatgtaagagtctgttcagttaagtgtgttgaagctataccagagaccataattctttcattctttagaaaattatctccaaactactgagatatgttttaatatcacatatatatttaatttatatatatawaaatcataaagaaaaaatatgatagaatataatctcctgatctgacaatggtccaacagtacatttttccactattattctcagttgtctgtctttttgttttatttgctttccttttcttgcttttatgaaa

SEQ ID NO: 592397 - DNA, 592 bp, Homo sapiens
ctcttgttaacccacttttcttttcctttttcttaaggatatgaaaatattagttttatggttctttttccatccagcaatgagagcataagatgtttctttcaaatttttgtcagtgtattcttccctatctccaaggagaatatagaaaatatccaagtcttctttcgatgtgaaacttgccacttaagactttttaattatttcatgtttctttcatatcttgaaatatatatttatttgaacaagctctctttggagaaaataccttaagcgtaagaaattaatccagtagtggtgatttcagttaattggctacttaaggctatatacttacggaaaaactggatatcagtatgtctttttgctgttttctcagactrtcaagcactagcaactcaggagagtacccagaaggccctctttaaagtgagtgatgaaggagaaaatgatcaactgttccttactgaggtcagtaaaggaaatattttaaaatatgagtcattccacggagataaatagagccacataatacttgatgacatcaattttgctttatcagaggagttaagctcacattgcttttacatct

SEQ ID NO: 592398 - DNA, 545 bp, Homo sapiens
gattaaatattaactgataatgttatgcaaactatttttacygagcaggacagattatttttcaaaatcatgttttccaaacaggcattttattattttcctatttttgaataattttggatccattgagcgtatttgtaaatcctcaaagtaattatttgcttgtgacaaacatcattctcatgctcatgctcctctatctgaagtgcataggtaaatgttcttgttcatttcaaccataattaaaggcatttgaggtaaagtgtagaaaatacttcttaaatttaatgtagggcataagaaataatgtctataatcattcattaattatgaaaatcccaaaaggaaattggtttactccatttatatataatacattttttaaaattttattattattacactttaagttttagggtacatgtgcacaatgtgcaggtttgttacatatgtatacatgtgccatgctggtgtgctgcacccattaactcgtcatttaacattaggtatatctcctaatgctatccctcccctctcccccccac

SEQ ID NO: 592399 - DNA, 578 bp, Homo sapiens
tgatggtatagctccagcccttgtctgaaggcctgagaacaagaacatccaccaatggtgtaagttccatttcaagttcaagtctaagggcaggagaagmctaatgtctcaacttgaagacaatgagacagagagagagaattctttctttctcagccttttattctattcaagtcttcaacagatggatgagcccacccacattgagaaaggcgagttgctttactcaatctactaatttaaatgttaatcctatgcagaagcacccttacaatcacaggcagaaataatgtataagcaaatatcttggcaccttgaggtcctcaagttgacacataacatgaaccatcacaccttgttttcttcgttgagaaaacagagtgaatcagaagagaacacttataaacctcccccacagcatgtatccaccaaccagccttcgtgccacaatattctgcctttactcctgtcacacttggatgctacaagctaaggccaaccctcagaattgtataataaatggtatcacaatttattgagtgattgcacagtaaattgctttggcaattttctctatt

SEQ ID NO: 592400 - DNA, 656 bp, Homo sapiens
caaattcttcttgtctacttaaattytctccaaaacacacagcactgtgtaacacagtatatgtatattcttattggttgtgctttttgtctgtcttcctcaccagcaataaaggctccaggagggcagtgactttgtgttttgttggctgtgttatccctaccacctagaaacacaatgtagacactcagaagctagctgatgaatgatttgttgagtgagagagggaatagcaaatgataaaatagtacctgatttttgtttgaggaagccactgaaaagaaaagcaagagacccatttactctatttcatcttccatatataaacatatgactcaaacagcttaggaagctccttcagctctaaacctccataaatcagtgttttaaaaatatttatgagtaaaataattactggttgctaaaaaaacatttccttgacctgtctgatatggtctggctttgtgtccctacccaaatctcatcttgaattgtagtcagaattgtaatacccatgtgctggggaggagacttcatggaaggtgattagattatgggggtgtttcccccatgatgttttcatgatagtgagtgagttctcatgagatctgatggttttataaggggcttttctctcctttgcttggcacttctcc

SEQ ID NO: 592401 - DNA, 656 bp, Homo sapiens
caaattcttcttgtctacttaaattctytccaaaacacacagcactgtgtaacacagtatatgtatattcttattggttgtgctttttgtctgtcttcctcaccagcaataaaggctccaggagggcagtgactttgtgttttgttggctgtgttatccctaccacctagaaacacaatgtagacactcagaagctagctgatgaatgatttgttgagtgagagagggaatagcaaatgataaaatagtacctgatttttgtttgaggaagccactgaaaagaaaagcaagagacccatttactctatttcatcttccatatataaacatatgactcaaacagcttaggaagctccttcagctctaaacctccataaatcagtgttttaaaaatatttatgagtaaaataattactggttgctaaaaaaacatttccttgacctgtctgatatggtctggctttgtgtccctacccaaatctcatcttgaattgtagtcagaattgtaatacccatgtgctggggaggagacttcatggaaggtgattagattatgggggtgtttcccccatgatgttttcatgatagtgagtgagttctcatgagatctgatggttttataaggggcttttctctcctttgcttggcacttctcc

SEQ ID NO: 592402 - DNA, 656 bp, Homo sapiens
caaattcttcttgtctacttaaattctctccaaaacacacakcactgtgtaacacagtatatgtatattcttattggttgtgctttttgtctgtcttcctcaccagcaataaaggctccaggagggcagtgactttgtgttttgttggctgtgttatccctaccacctagaaacacaatgtagacactcagaagctagctgatgaatgatttgttgagtgagagagggaatagcaaatgataaaatagtacctgatttttgtttgaggaagccactgaaaagaaaagcaagagacccatttactctatttcatcttccatatataaacatatgactcaaacagcttaggaagctccttcagctctaaacctccataaatcagtgttttaaaaatatttatgagtaaaataattactggttgctaaaaaaacatttccttgacctgtctgatatggtctggctttgtgtccctacccaaatctcatcttgaattgtagtcagaattgtaatacccatgtgctggggaggagacttcatggaaggtgattagattatgggggtgtttcccccatgatgttttcatgatagtgagtgagttctcatgagatctgatggttttataaggggcttttctctcctttgcttggcacttctcc

SEQ ID NO: 592403 - DNA, 514 bp, Homo sapiens
gttgaaattacaagggaaaaatgactaggtcaatttaattacaaaaattcctgtgtacatctccatgtatttggattcataatgtaagtaacgctcatgagcattaaacaaaattaatagacattgtctcttcaatgtgacttaaagtgaaagccatattttattctcttacccagacttcatcatatatatttttggaaagggaataacagaaatttattagggataagacctccaaaataattcagaattgtattcatcagatgcttctagattggagctttcatcacaggtctgaaaaggaggtgagccgttcagcaacaaatactatttatagattggtcgaggctcrgtgacagtaagtttgattgaggattagatgtcattaaagtctctgagctacatcttgaaaaggggaagaacttgcccgtagtaaactgataaccttaaatagtttatagttgaatgcaaaaaattaaatgtaaagaaaaaccctaacatttcaaaggttttt

SEQ ID NO: 592404 - DNA, 556 bp, Homo sapiens
tctgcaaaaacttgtgtaaagtttagatattttgaattatctatatttatagacaattagtagtttttaatatactttcttgggttaacctataaatcagaggtggcaaaatcaaatgtccacaggaattcgataggtaacagaaatgtgtgatcctaaaccagaaagagcctggggctgggggatattggtgaggagttcctgaataaacctcgaagttaccagttccactgacagattaacattctaaatttgtaaatttataaagcgccaggcctgccaaccaaacatgtttggttccacatctgtatttggtccagctgcttgagctgttaaatacaacccagtttgttttctcaatattttaccttaagaatactatcctcaattttagtcctgattctttttttgccactagttgctatctgtaatttatttatacagaactttatccatatgccagtttaagctgaaaattgattttgtatgtaattgctgaaggaggtaaaaggtgatggtaaaaaakgtgaagatttaacagacacacagacatgac

SEQ ID NO: 592405 - DNA, 581 bp, Homo sapiens
aaaccaccttttccctagaacatacacttttcaataaatgggaaactgggaaaatgactaaagtgccaaactaaactggagaaattagcttctaggtcatagagcggctcagagggtaagatttatttcaagcatgggagaagataatttggagtaactttcactaaacaatttgtatcagaattactaggagggaaagtttgttaagcatccagtatgttttatgcctggtttcactatacatagttttaatagcatttgtccctctagtgacaagttcgtgacagaagaaataccacatgagtggtaaattgtctcaaatgaaggatgtcaaaattacattcatcctgacctgtgtatgcctctcttttcattaaatgatgaacactctttccactcagctggaatctgggttagccctgtgacttgctttgaccagtaggacatggtgaaagcgattctgtgccagttctgaatctgggctgtcagaagactgttagcttctgctttcrtgctgttggaatccagctgccatgctgtgaggaagcaagtctaagctagtggcaagagacaggccatgc

SEQ ID NO: 592406 - DNA, 634 bp, Homo sapiens
atatatacacctagataagaatttattcttttcctcataccatatggccttagaaatccaaccctaagtcatttttcttctgcaaaacagacactagaatgacaaccaatttttgattcagcaggaagtattatataatccacaaagatgtgagcaacacaacatatggctacctaaaacatatattcatacctccatagttagctacagtttaggaaatgcctcaaacttttaaagaaccctatagattgaacagcctagtggttatcgaacagtggtggcagaacaataaccagcggcgtaagtattgcctaggaactcatctgaaatgctaattatcccaccatacccagacaaactgaatcagaaaccatttgaaaggataagggtgttttaacaagtcctacaggtgatattgatgcatactaagttttgagaacactaaactagtgaatactattcagcaaattacctgggaartatatttggaaacatctgaatggaatcagctcattatgctgccatctaattattactatcttctgttttaaatagatcaacaaaagttacctatgttctctacaagaacaatgtctttgtgtgcattatggctctctgaaaaaagtaatgcaac

SEQ ID NO: 592407 - DNA, 595 bp, Homo sapiens
aggtgatattgatgcatactaagttttgagaacactaaactagtgaatactattcagcaaattacctgggaaatatatttggaaacatctgaatggaatcagctcattatgctgccatctaattattactatcttctgttttaaatagatcaacaaaagttacctatgttctctacaagaacaatgtctttgtgtgcattatggctctctgaaaaaagtaatgcaactttacctggagaaatgtgggccatatgcttagtatataaaagaaaccaaataaatacttgttgacctaatttattattatttcaaacaagacccaaagaaaattatttttcaaaatgttgtaagaagataacttcaatatttcaatgaaaaagggattccaaccagttatattgttttaaaatcagaaagaaccatgtggtttgacaacttctttttacaaagaaaaaagtcgcagctcacagggggtcaggtggtttttttcaaggtcaattcaatttgtagtgacggaatttggacaggaattgaggtttytaactcacagtccagcattcccttctttaaaatccagctttcctgatgaagtaga

SEQ ID NO: 592408 - DNA, 609 bp, Homo sapiens
gattattaactctctcagcacctgaggcagatgcaattattagttaatacaggagtcatttattttcataagatttccagcctcattccttccctctacttcatatatttaaaaataaccaaagtgtctttttcaaaaacatttaaatttatcttttatgttcctatgaaaagtcagttcatactgactctcaagattttaaaactggtttatataatattcatagtttacagttagtgccttatggacaattaatactgacttacatagctttcaaaaatgttcatgtgtacttggttttgtaaaaacagtatgttgtttatgaatctgagtttagtctcctacttgtagtgacctctttgtaacaagacatagaacagaaatctgtgatagacacttatttycccttttctgcagtgtcatatgtctggaggagtaggctgatgaaatgtaagctgcagagtacaatgaccctcacaaaatagcctcagcaagtttccatgaggccaagacacgtcaaccatatttcttgggttggtagatcattgctgccctcttcaactatggtaaattgcgaaagatgtgggttatcctaatggccccgggtag

SEQ ID NO: 592409 - DNA, 436 bp, Homo sapiens
gagtagcaatggaatgggtggcagtgggccaaagatctgtaattttcaaagaacaatgtaggggtgtggtgtggttggtraagtagactatgtatcaaagtggagtgcagtttaatacacgaaattcaaaatggtgggcctgtaaagggtagtaaaagggacacttctgcaccccttgtgcctcatggtacaaaaagcactggagagaaacagctgccctttgggaggattacaggggaatcaggtatcctcagtgggcatagatggtttccctagaacatgaaggataagagattgtttagagaagaatgttagtttagaagagattttacaagatttcatcttgacttccaaaaggcatactaaggaggtttcagtaactggggaggagtgggagcttgagtaaaaaaaaaaaaaaatgaacagagtcatatgt

SEQ ID NO: 592410 - DNA, 601 bp, Homo sapiens
gactggtgctctcacctctgctacatacaataatcatgaacttgatgaagttatttagtcagatattgagttcttcccatataccagccattaatctggatatttcacacttactctacagtatgtttctcataaaaatttcatgcattattattgttggcctcattttatgaataaggaaaaaattcaattagcttaccaaggccatagaggtaggattcatgttcagatttattggaagccaaaatccttgttatttatattatcttacactatcactgtaagyggcagttctctatctttttaaattacagtaattatgagatggagaaaatacatgaaaaactattttgcacataatatgtgctaagaaattggcagcttgtttatcattgacctcctattctcacccatatcataattgtatccagtaaaattagagtgcaatgaatatcaagggcattcttcaaagtgaaaagaaatcagaaaattacagcattctatcttatagaggcataatagttaaatctgagtatctctaactcttgcctattttttgaaaaaatgtgttttttagtactaatgaacttagtttttctct

SEQ ID NO: 592411 - DNA, 566 bp, Homo sapiens
tttttaaattacagtaattatgagatggagaaaatacatgaaaaactattttgcacataatatgtgctaagaaattggcagcttgtttatcattgacctcctattctcacccatatcataattgtatccagtaaaattagagtgcaatgaatatcaagggcattcttcaaagtgaaaagaaatcagaaaattacagcattctatcttatagaggcataatagttaaatctgagtatctctaactcttgcctattttttgaaaaaatgtgttttttagtactaatgaacttagtttttctctgaccctgttgaatcacagttcaacartagagataaagtgagatccaaaaacaggaaccgagggcaagtggtccaaatctccaaaccttacagatggttcagggattttctttcttcagatttctgctttgtagcctctttgtgtaccaaggggctccagaggtttcatccctcctgtatactttaaatcaaaagtgtccacagtgttcaatttcatgggccaggaaaatttcaataataagcctggaatctgatataggtttgtc

SEQ ID NO: 592412 - DNA, 549 bp, Homo sapiens
tgtataacacactgtcctctgggatctgagggactgagtcaaatgaataccaactgtgaagaaaaactgaagccaggaagggatcacatttatggttttccacagttstccccaactgtgttttcacctttctttcagtcccagttttcctgatttctcacggttctgacacagaacaactgtcaggaacaccagcatatgaaacatcacagccttttgagacctccaggccaaccccatcaacagacacatgaagaatctgggccttgaaagacacatattttgcagaagtcacacagcaagttagtggcagggaccaccataggactagaatacccactatctttatggagaaagaaaatgccctccttcatttagctgaagcaaagttaaatttgttcaaaaggagctttgcaagtaagagaggagaaaaaaaaaacaattactactcaaatatagaaataaatgagcttgtagaaagcacatatttctgaacattgaaaggcagcagtgcctgcttaaaacaatatggagtgtgatgtagggcta

SEQ ID NO: 592413 - DNA, 549 bp, Homo sapiens
tgtataacacactgtcctctgggatctgagggactgagtcaaatgaataccaactgtgaagaaaaactgaagccaggaagggatcacatttatggttttccacagttctccccaactgtgttttcacctttctktcagtcccagttttcctgatttctcacggttctgacacagaacaactgtcaggaacaccagcatatgaaacatcacagccttttgagacctccaggccaaccccatcaacagacacatgaagaatctgggccttgaaagacacatattttgcagaagtcacacagcaagttagtggcagggaccaccataggactagaatacccactatctttatggagaaagaaaatgccctccttcatttagctgaagcaaagttaaatttgttcaaaaggagctttgcaagtaagagaggagaaaaaaaaaacaattactactcaaatatagaaataaatgagcttgtagaaagcacatatttctgaacattgaaaggcagcagtgcctgcttaaaacaatatggagtgtgatgtagggcta

SEQ ID NO: 592414 - DNA, 588 bp, Homo sapiens
ccaggcttctagtattttagggttccagctccaacctcccaaggcaggtctctggcagggctgagactgatcctggatgttaaaacctggcatctgaggcactctagatttgaaaatgggggaggggggcrggggcgggggagaagaggtttgaggaacagcacttttaagtgcttctaagcccaggattccttcctagtgatccttgctcttcaattagactcaagggcttacttgtctgttttaatttcctgtagcttgcgtcaggacttttcctctcccttacctatagtctgtaaatataattagtttttttgcaatacttgcttaattttatctatttacttatttatttattttttttaagagatagggtctccctatgttgcctaagctggaggacagtgactatatacaggtgcaatcctgcagctgatcagcactgaaattttgacctgctttttttctgaccttggctagctcaccacttcttaggcaacctagtggtctcctggctcccaggagttcatcagattgattccaaactttgtgcagatacccacttgacatagcacattgcagcccagt

SEQ ID NO: 592415 - DNA, 588 bp, Homo sapiens
ccaggcttctagtattttagggttccagctccaacctcccaaggcaggtctctggcagggctgagactgatcctggatgttaaaacctggcatctgaggcactctagatttgaaaatgggggaggggggcgggggcgggggagaagaggtttgaggaacagcacttttaagtgcttctaagcccaggattccttcctagtgatccttgctcttcaattagactcaagggcttacttgtctgttttaatttcctgtagcttgcrtcaggacttttcctctcccttacctatagtctgtaaatataattagtttttttgcaatacttgcttaattttatctatttacttatttatttattttttttaagagatagggtctccctatgttgcctaagctggaggacagtgactatatacaggtgcaatcctgcagctgatcagcactgaaattttgacctgctttttttctgaccttggctagctcaccacttcttaggcaacctagtggtctcctggctcccaggagttcatcagattgattccaaactttgtgcagatacccacttgacatagcacattgcagcccagt

SEQ ID NO: 592416 - DNA, 593 bp, Homo sapiens
agcttaaaaaccttaatagcatttgggtctttttatgctatatattcctaacaatgcaaattttcaggggagtaaaatctctggtattttaacgaaaggcatttgcatgatttcagatttcaaaaaaaagttcctgtgacatatccagaatatagaaaagatattttaaaataaaagattacatatttagttcttattcaattaaattcaggtaaaaattgattatttggaaatgtacatgtgaaaggtgaaargaatagttttttttttttttaataaagaatctctgacctattggatggaaaattacttagggatttcataagaaaataatacataatgacattttctttgttaaagatagacatataaaacattttatctataaataattaaagctaaaaaagaatgtcttttaaaatacagaaaacaattacaaatgaactttagctttccgttgtgaaatagttacaagaataagttcaagctcactgtaaattccagttcttatctacaggatatgatgtaaagacattgacatgaaatcatgtaaacaattatatgtaaatgtctcatcatgagcttaattgaaa

SEQ ID NO: 592417 - DNA, 604 bp, Homo sapiens
cacatgaaatcttggcttggagtaccttaaaatcaccacttgatgatgaaaccagactcagtgcccttatcaatctcaggttttatatgagaatctgtttgagcaatggttttcagatctgtaaaagttgactgcaatcacataaatattcttgacttcctctggaagatgtctattaattttaaagaaaaatgaccaatattttttaagtgaacactagtaatcacaaaagcaactttggttttggagccaccttaattcctttgtggattggaagtggagaaggagagatatcagtgttttgtttgtaaataataaaatagtctttacttttggagagctgatagtaatttcatcagttctaatatctttcgtcaactcccttttactctcaaaagttgctggttacacacctgattttgaacactttattacagagagtggyatagattattttctcaaccatactattctgcctcaagtttatttcattcttatcagcactgtcaaattgtggttctctttgattatgtgcattcataatgattccactattattatatatgatcctgtaaatgtgagtgaggtatggaagtatttcaaa

SEQ ID NO: 592418 - DNA, 604 bp, Homo sapiens
cacatgaaatcttggcttggagtaccttaaaatcaccacttgatgatgaaaccagactcagtgcccttatcaatctcaggttttatatgagaatctgtttgagcaatggttttcagatctgtaaaagttgactgcaatcacataaatattcttgacttcctctggaagatgtctattaattttaaagaaaaatgaccaatattttttaagtgaacactagtaatcacaaaagcaactttggttttggagccaccttaattcctttgtggattggaagtggagaaggagagatatcagtgttttgtttgtaaataataaaatagtctttacttttggagagctgatagtaatttcatcagttctaatatctttcgtcaactcccttttactctcaaaagttgctggttacacacctgattttgaacactttattacagagagtggcatagattattttctcaaccatactattctgcctcaagtttatttcattcttatcagcrctgtcaaattgtggttctctttgattatgtgcattcataatgattccactattattatatatgatcctgtaaatgtgagtgaggtatggaagtatttcaaa

SEQ ID NO: 592419 - DNA, 510 bp, Homo sapiens
agaaaatgcattcaatgttttaaatcttatactatattagtaggggttctaaagagaaacagaaccaatggaatatatatacatatatatcctctgggtataaatatatattaccatatatttatatattatatttatcatattgaatatttatatattattttatatyaggcaaataatttatatttctatatttaataatttatatattatttatatttcaatatttaataatttatatattatatattatgtatttttataatacataatatataatgagatttattataaggaattggctcatgtaattatggaggcgagaagtcctataatttgttgtctgcagatcggagacccacaagagcctgtgttgtagcttgaaggcctgagagccggagaactaacagtatagattccagcctgagtctaaaaatctgagaagcaggagcaccaaaggcaggagaagatcagtgtcccagctcaaacaggcagagggagagtgaaccc

SEQ ID NO: 592420 - DNA, 499 bp, Homo sapiens
gattctatcttttgtcttctctacaattgagtgtatatagcaactttaaaaaaattgttattgtatttttcagtcacatatttcttgccyggttcttttctttaatttacgttttttgatgggttttctatttttcatttgttgcaagggaattgatgataatgttaaagttgctttgacatctttatcagacagttctagtatctaatccatttcagtagtggtgtcagttgattcttttatcattcaagctgtgatctcactgattcatggaatgacctgtgatttttcagttgtatccttgagattttgcatattatgttaggagatgcttgatcctgttctaatcttctatgttagcaggcagtcaccctctttaagttcaatgcgtagtaagtagcctacttttgtgggctgtatcccaatgacaatttaggtttctgagtccttgtaagtctattctggtctaaatcatccttctggtttatgtgaactcttg

SEQ ID NO: 592421 - DNA, 573 bp, Homo sapiens
accttaattttgattcatagcatatacttagacattagaattttagaaatcccatacaattttagaatatatgttagtattatttaccaaaatataacttaaagaagattgaacatcattttggcatttccatgtacctaaacatgtcaaataatcctgtttacctcttttctggatgtttcaggggccctctgaagtatccaaaaaaaacaagcattaggaaaaacaattttgaaagtgaagtatgattttgaggagcctgttaaatatgttcaaagttttaaacacttgatattatggaatagaattccagattatcataagttatttgttttgccmaagtgatgactcagaaatttaaagaagcaaaaacgttttataaccctttacaaattttgccaaagagcagattagtgcattaagaaaacctttctgtgcttttatttaaatgctcaattcacagaatgatcatataatacctttttgtgaatttagtcattatgttcacacagagaatctcttctgcaagattaatttccacaatctttccaccacttgtttgaaccttcagct

SEQ ID NO: 592422 - DNA, 573 bp, Homo sapiens
accttaattttgattcatagcatatacttagacattagaattttagaaatcccatacaattttagaatatatgttagtattatttaccaaaatataacttaaagaagattgaacatcattttggcatttccatgtacctaaacatgtcaaataatcctgtttacctcttttctggatgtttcaggggccctctgaagtatccaaaaaaaacaagcattaggaaaaacaattttgaaagtgaagtatgattttgaggagcctgttaaatatgttcaaagttttaaacacttgatattatggaatagaattccagattatcataagttatttgttttgccaaagtgatgactcagaaatttaaagaagcaaaaacgttttataaccctttacaaattttgccaaagagcagattagtgcattaagaaaacctttctgtgcttttatttaaatgctcaattcacagaatgatcatataatacctttttgtgaatttagtcattatgttcacacagagaatctcttctgcragattaatttccacaatctttccaccacttgtttgaaccttcagct

SEQ ID NO: 592423 - DNA, 546 bp, Homo sapiens
tacctttttgtgaatttagtcattatgttcacacagagaatctcttctgcaagattaatttccacaatctttccaccacttgtttgaaccttcagctttatcttatttaatttaaaacaatcctttaaccctaggcaaaaatttacatttccatgcctccttataaccttttacaaaaaacaaacaaacaaaaaaaaacaaaacacattttattgttcttacacaacttgtatgtaaatytagttctggtagtctcaattacaggttataatggtaactcccagaaatttttaactttaatgtaaaacttggtaagttgttttaattgtgtgctatctgcagccaagatttgccttcttccagcataattaagggcatggttagctccaaatgtcctccggccttaccaattgtgaaactggcaaattgaaaagttctcaaaatccaaaaagcagtttataaccttaaacacttagcaaaccttgcatgtgacctgcataatttagttcacctatttacactttaatgacacctgcattttaccag

SEQ ID NO: 592424 - DNA, 540 bp, Homo sapiens
tattcttgtgcaactgattcctccaccaggacaaaagcttaattactgtctgatggagtaaaaccccttggctggggaagggcwaagctcctgtggcacatagcagggaccagcgatgtggggcccttgggttatggatcacaaccctggcagggaggggaggagagagggagccactgctcactggtctgtcctgaaaaaggaaagaaaaggccatggagatcaaggctgatcaactttcctgacccctgggaacaatgcaggaggaggtgcggtttccagtaagctcagaagtctgaggataaaaaggcttagaaaccacagtgagagtccccatttcactcaacacttcttgagccccacgttgggtgccaaaattgttgcagcactttttcattaattcagctaaagatgggggtccttatcacacggccatgaaaatttaggctcacagacaatttgaagggtaaataaggcagggttttatcgggtgaaaagggaaaagaagaaaaatggggactctctgcaaagccaggatct

SEQ ID NO: 592425 - DNA, 423 bp, Homo sapiens
gtggggcccttgggttatggatcacaaccctggcagggaggggaggagagagggagccactgctcactggtctgtcctgaaaaaggaaagaaaaggccatggagatcaaggctgatcaactttcctgacccctgggaacaatgcaggaggaggtgcggtttccagtaagctcagaagtctgaggataaaaaggcttagaaaccacagtgagagtccccatttcactcaacacttcttgagccccacgttgggtgccaaaattgttgcagcactttttcattaattcagctaaagatgggggtccttatcacacggccatgaaaatktaggctcacagacaatttgaagggtaaataaggcagggttttatcgggtgaaaagggaaaagaagaaaaatggggactctctgcaaagccaggatct

SEQ ID NO: 592426 - DNA, 523 bp, Homo sapiens
ataaacatgtatacctcatgtatacatagaaaatatgcagaaaaattagtaaatctcacacaggtggctaagagtgtgggcttaaataccatcttcaactgaaacaaaggaaaaagggtgttaagaggccagtaatagagaggtgaccaggaaaagcacagtaaacaacagtaaggtttgttttgcagatttaagttggtgccttctccattgataagagctatctagtggcttagaatcatccttttattcctgatacggagagggagacacscttacaaatagagattttctttatagatgcaaatttttcttataaaagggtaacttctgttttcagaacttcttctatgtctgcagtttctcaaaataatcaactcaaaataatttttatgctaacaaggcacattttggggtgacatattctgtcttaaacttgcttacatatcattcaaattatctctcgtctaaaaactccagatttgaatctgatattatcagatcgtaccaccaagttaaggtt

SEQ ID NO: 592427 - DNA, 260 bp, Homo sapiens
aaatatattaacaggagaaaaagcatacaaatttgttaatgtgcatggggatcttataaagagctcaaagaaatgagtggatagttgaggcttttataatgtmttgaggttacagaaaaaataggggattgaatcatggcaaaccagtttatggtggtaaacaggttatataggaagggaagaagaggatgggctagcaaagatggtctcgttatgtagatgaaacctcacaggtagcagcccatggagagaataaatgc

SEQ ID NO: 592428 - DNA, 503 bp, Homo sapiens
ctgtttgtaggcctgtttgtatgaacagtcatctcaaaatatgtcaaagaagtatattttagggtgaaatattttggttcccttcaatataatatkatctttcctccgacattataatttaatgattcatgctcctaactaagaccaacccttccagttggtcaatggaacctatttcctttttacctactcaataataaggccctagcaattgttcctttttattgtgattaactggtttttcctgacctatgggagcacttctaccaacatagaaacaacctataatttatcttgttataagaaagggtcttggctgggcatcgtggctcatgcctgtaatcccagcattttgggaggccgaggtgggtggatcacctgaggttgggagttcaagaccagcctgaccaacatggagaaaccctgtttctaccaaaaatacaaaattaaacaggtgtggtagtgcatgcctgtaatcccagttacttgggaggctggagaat

SEQ ID NO: 592429 - DNA, 576 bp, Homo sapiens
accccaatgggaagagggccccaaaacattggaaagctcacacagaaattccatcccgtccttcctctttgtctcacaactcttttggtgagacaagaatatggaaaactggattttgtccatacttttgaaagtcttgtataggttgtccagaaatttcttggaatatgatttttttttttggcttctgttatttgctctaggagattcagctgaaactgagatgaatagtgcctcattttatctttctattagatattgattcactctttctggcttgccttcttttgtaaaccaggatgcatttattagtgggttgactcgtgaggtgacaactaaagtttccttctgattctgtttttcagcccttagctgactgtcagaatccatcttggtgggccgagtgtggtagctcacaccwgtaatctcagcactttgggaggctgaggcgggtggatcacttgaggtcagaagtttgagaccagcctgccagcatggtgaaaccccgtctctactaaaaatacaaaaattaaccaggtgtggtggtgtgtgcctgtaatcccagctactggggag

SEQ ID NO: 592430 - DNA, 381 bp, Homo sapiens
agttcacctcaacaggcttttgacattatgaaggaagcaattggcaaactactgctagcggctgaagtattcagtgaaacatctactctgggaccaaagaccttccataggtaaaaaacaaattttaatttaaaaaaaaaagaaaagaaagaaagaaacctatcttttaaaaattgttggtggaaatgtatcttaattatcataagtaggtggtacttggaaaattttatgtcaatatacaaacatgatcttctaaacatatgtggccatatttatagatcctaaaactttagaacgtgtggcagactcagtagtatctaaatagtggtaacaagaagtaaagtgcgcattttcaaasttaatcttttaattgcagccgcc

SEQ ID NO: 592431 - DNA, 419 bp, Homo sapiens
aagaaatcctgttgtttgttatttgtgacatagatagtcctggagaatgttaagtgaaataagccagacacaaaaagataaaaaccccataatctcactcatgtgggatcgaaaaaagttgatctcacagaagtagagagggkttaccagttttatgctctcatagagagtagaatagtagttattagaggccagggagggtaggaagggaaggaggtggctagagattggttatagttaggtagaagaaaaagttctgttgttctattaaaaagtgggatgactattgttaaccaatatatatgtttaaatagctggaagagaggattttgaatgatctcatcacaaagaaatgttaaatgtttgaagtgataggtatgctaattagccacatttattcattacacaatgtatacatg

SEQ ID NO: 592432 - DNA, 582 bp, Homo sapiens
tgtttgaaacagcttgcattttaaaacagataatactaaggaaggggaaaataggatttaaaaaattctccagcatttagctacacatttgaaactggcatttgatgacttatttttaaaaaatcaattagccatctagattctgagatattaaatgatgtgtgaatgacttcagttatgatattttgaaatggtttagaactctctcatttatttttttgtacccttccaacaccatagagggctattataaaatagctcaagtgatagttatctaatagcaaatatccataatgagaatagggagtgcatttatcagtaattatttaataaaaacctattagttttcaaagttgtactgtcaattaaatacctattttaatggttattagttaccttgcctacttcaatttaccagaggaatatgatttaatttttcaacaatacaatatgtgctatagtgaagtgctctcaactagtaacatttrttaagtacccactatgcactttgttctgagaaatatgctatgtgctataggggaatacaaatagcagcaaagcagcagccgaggtaataggtgt

SEQ ID NO: 592433 - DNA, 582 bp, Homo sapiens
tgtttgaaacagcttgcattttaaaacagataatactaaggaaggggaaaataggatttaaaaaattctccagcatttagctacacatttgaaactggcatttgatgacttatttttaaaaaatcaattagccatctagattctgagatattaaatgatgtgtgaatgacttcagttatgatattttgaaatggtttagaactctctcatttatttttttgtacccttccaacaccatagagggctattataaaatagctcaagtgatagttatctaatagcaaatatccataatgagaatagggagtgcatttatcagtaattatttaataaaaacctattagttttcaaagttgtactgtcaattaaatacctattttaatggttattagttaccttgcctacttcaatttaccagaggaatatgatttaatttttcaacaatacaatatgtgctatagtgaagtgctctcaactagtaacatttattaagtacccactatgcactttgttctgagaaatatgctatgtgctataggggaatasaaatagcagcaaagcagcagccgaggtaataggtgt

SEQ ID NO: 592434 - DNA, 582 bp, Homo sapiens
tgtttgaaacagcttgcattttaaaacagataatactaaggaaggggaaaataggatttaaaaaattctccagcatttagctacacatttgaaactggcatttgatgacttatttttaaaaaatcaattagccatctagattctgagatattaaatgatgtgtgaatgacttcagttatgatattttgaaatggtttagaactctctcatttatttttttgtacccttccaacaccatagagggctattataaaatagctcaagtgatagttatctaatagcaaatatccataatgagaatagggagtgcatttatcagtaattatttaataaaaacctattagttttcaaagttgtactgtcaattaaatacctattttaatggttattagttaccttgcctacttcaatttaccagaggaatatgatttaatttttcaacaatacaatatgtgctatagtgaagtgctctcaactagtaacatttattaagtacccactatgcactttgttctgagaaatatgctatgtgctataggggaatacmaatagcagcaaagcagcagccgaggtaataggtgt

SEQ ID NO: 592435 - DNA, 606 bp, Homo sapiens
tgtcatgtttattgatttgtgttcacagatgacatgatcttatacctagaaaatcctaaatactctatcaaaaaacttagagttgctaaacaattcagttaagttgcgggttgcaaaatcaacatacaaaaatcaatggcatttatatatgccaacagcaaacaacctgaaaaagaaatcaaggaggcaaccccatttataatagctataaaaatataaaataactaggaatcaatctaactaaagaaatgaaagatttgtacaaggaaaactataaaactctgataaaagaggtcacaaataaaatggaaagatgttccatgctcatggattggaagaattaatattgttaaaatgacagtattttccaaaacaatttacagattcartgcaatcccaattaaaataccaataacattcttcacagaaatagaaaaacaatcctaaaatttatgtggaaccaaaaaagatcctgaatagccaaagcaatacttggtaaaaagaacaaaactgcagacatcacactacaggacttcaaaattaactacaaagctatagtaacaagaacatcatagtactggcataaaaacatatgtgtagaccaat

SEQ ID NO: 592436 - DNA, 570 bp, Homo sapiens
aactatcatgatgaattgagaaaaaagaatgtagcctttgtgatccctagtgaattaagctgcttccagttcatttttaaacctgcacctattaagtgaaaatcttttcttgcggcaataaaaaagatgtgatccttgttcaatgggatttgataaccataaaggtsggaaaatggcagcccaactcactttactttacttcagtgtacttacgtgaaataatagcttcaaccgagagcttaccttgacagtgaagcgttttttctttggtggattccaaactgtgccagtcgaatgaatgaatgcacgcaaaggggttaaggacgtcaccaacacatacgctttaagaatcacagatagatcttcggctcgaaagattgtttcatgtggagcaaggactgtcgtttcattcctaaaaaaaaaaaaacatagttagcgctccataatgtagggttgagtacataatttgtaaattacctacaagctttgtaaactgcttctatcctttgtaggacgccagccctcagtgtgtgggtttccttgaacaatttcagttgcttattagcatca

SEQ ID NO: 592437 - DNA, 579 bp, Homo sapiens
caacttagatataagcttcatttatatctttaaaagctgcaaatgcattttatggaattttataaataatcgtgtaaacatttcagtgtcctaggctatcatttaacagataaaggtatgtctggagcactatttcttgtatctgttggcatagccttcaagggctctctcaacagtccagtctaatccatttattaatccatcccccttctccatagcccaaccaacacactcaaagagcctagaaatctcctacaaacaatgctcaaacgaccttctgtttttggaagggatttgggtgatgaggctgtatgacacagtcttccaaatagcctagttcattaacatatacttgttaaaaatgttaaagtaacttaatatggaatacctaggcatgactctttagggctttcctgccygcataatatgcaaactgaatggaaaatagattaaaatgtgaaataccatatggtggatagtgctgtacttttatttattggctactcttagcttattttagagagccctgaagcctgtaactttatgatcagtaaagtttacccagaataaaagtgaaca

SEQ ID NO: 592438 - DNA, 574 bp, Homo sapiens
ttcttcttacccaaataaccagatgtatgtacagaaatgaaaagagtaaacaagccaactgctgagcaacttcactggatttgtataaggcaaacttattgttcagacctaggaaatgtgtataacatgggtggggattggttttctctcgctaccacaatgtagtgttagattggcacaatactacgtacacaagagtgggttgcaacaatggcaccaaggcagtcccaggaagggatccacagctcatagattaactatctaagaccaagaggcctaatatcagcaaagccccctggaacccacaatgagcatgggaaagcayaggagagaatgtcaccagcagacagccaaaaggaaggctgctccttacaaggacactgagaaagttaaggatttagaggcctagggttcatttgttttaccaaattgcctgaacttgggcccaagatgatgtgggggaaaccaataaagatgcataatctaatttgtccagcacattatagatagttgctaaataatatttttccaaaaatattttacaaataatattataaataacattttaaaaaca

SEQ ID NO: 592439 - DNA, 533 bp, Homo sapiens
tcccctgcccaccaacgagtggtattttaggtcattagaaacaatgatgatgcctttggcaaattagattcaatgccagggaataactctacagtctatgagtgcccaaaactattgaaattcacagaaatggcagcgtaatgattgctttgaaataggaattacaagtgctctttagcatttgtaatcagggagctaagaagaacataacaaggggtcttagatcatcagtagaagcacagcattaccaagtgtggttctctatgatttataggctgaagtagtgaatggacagtagggacagtccacacatggggtataataatgagtaagagtgtgaacaccttggagaattagattcaactcactggctttcccaaccataataatttagtcaacagtgttgaaaatattttcatgrggtatatggtctttccgtgtgctatagaaaaatacaaacatagggctgagcgcggtggctcacacctataatcccagcacgttgggaggcagaggtgggcagatcacgaggt

SEQ ID NO: 592440 - DNA, 533 bp, Homo sapiens
tcccctgcccaccaacgagtggtattttaggtcattagaaacaatgatgatgcctttggcaaattagattcaatgccagggaataactctacagtctatgagtgcccaaaactattgaaattcacagaaatggcagcgtaatgattgctttgaaataggaattacaagtgctctttagcatttgtaatcagggagctaagaagaacataacaaggggtcttagatcatcagtagaagcacagcattaccaagtgtggttctctatgatttataggctgaagtagtgaatggacagtagggacagtccacacatggggtataataatgagtaagagtgtgaacaccttggagaattagattcaactcactggctttcccaaccataataatttagtcaacagtgttgaaaatattttcatgaggtatatggtctttccgtgtgctatagaaaaatacaaayatagggctgagcgcggtggctcacacctataatcccagcacgttgggaggcagaggtgggcagatcacgaggt

SEQ ID NO: 592441 - DNA, 533 bp, Homo sapiens
tcccctgcccaccaacgagtggtattttaggtcattagaaacaatgatgatgcctttggcaaattagattcaatgccagggaataactctacagtctatgagtgcccaaaactattgaaattcacagaaatggcagcgtaatgattgctttgaaataggaattacaagtgctctttagcatttgtaatcagggagctaagaagaacataacaaggggtcttagatcatcagtagaagcacagcattaccaagtgtggttctctatgatttataggctgaagtagtgaatggacagtagggacagtccacacatggggtataataatgagtaagagtgtgaacaccttggagaattagattcaactcactggctttcccaaccataataatttagtcaacagtgttgaaaatattttcatgaggtatatggtctttccgtgtgctatagaaaaatacaaacatagggctgagcrcggtggctcacacctataatcccagcacgttgggaggcagaggtgggcagatcacgaggt

SEQ ID NO: 592442 - DNA, 558 bp, Homo sapiens
gaactgcctactctaaaaacctctttcgcctatttaatgatgcctccattctaaactctttgttccaaaattggagaaggggccactggtttgattacgggttaggttaaaaaaaattatatcctttcctttcttgctggggtggccagaagagactgagcagattggaagtytaaaagtccataatagttttacaaagtagaagcccctgaatgagaaaaaggatcagaaaagggatagggatactgaaggaaaacatctctaaataaaaaatattggaaaggcccagcctcacttattgtcatcatagaaaaggcagaggaaattgtatacaagtatatttcaagtctaccagtccacacacacctacaggcagccatatgtcagactttgttcctatgggtgaaaattaggtgccctacctgcccaaatctgaattgatctccagaatgatgggcagagcaaatcacagaacctgaacagtgtccacattgtattccttgtcccttcacagaggactggtcagtagccccaatgatccaaaaaggagaggcacat

SEQ ID NO: 592443 - DNA, 564 bp, Homo sapiens
agctaatgctgatttacagaactctgctaaatactacattttctgtgtctatagatctgtggctccaagagatgacacttaagaccaaaaaagagctgttagctgggcacagtagcatatgcctacagtcccagctacttgggaaactgagatgggaggactgcttgagcctgggagtttgaagctgcagtgagccatgatggtaccagtgtactccagcctgagmgacagaggaaggctctgtctcaaaacaacaacaatactgttgtttattctttttagtaactgatgtattcaatatgcctaaacctgaccaaattgctgatcatcccagtgaagaaagaaatgagagacactaatgagaattttcctttttttaaatgttattactgtgattaatcacttttaaggtctaaagaaatactcaaaaagattcatgtggcatttaaattataagtttcagagaccctttgaggaatagagaaatttggctgcatcttacgtttctatagtggcttgaccaagcaggagtttgtttttcatagtaaaaagtgtagaggtagc

SEQ ID NO: 592444 - DNA, 303 bp, Homo sapiens
cttctttgaacatttttagaaagttatccagcttgctgaagaatgcastagatccttgtccatgtgtgaggcaagggactcattgggccaccttcacagggtttcatttttggaacatttatctaaggactatcttactaccctgagagaccaagatgtaggctaccttaagtcgtatgaggctgctgtgaaaatggcatttgtttttttggctctaagaaattttcaggacctagtcaagcatgtgacaacaaatatttaatgatagtggacaaggtaaacttcaaaagtgactagaaaccc

SEQ ID NO: 592445 - DNA, 532 bp, Homo sapiens
tgtgctgtcactctgcacatgtctaaagaataggggctgtaccatatccaaactgaacaggttgttttgaccacaggaaaataggacctctggcaaacttcctaccacttcagccaaatgccctaagcatcctcaatgaagcatttcctctgctcaagcaactcaggcctctcaaagtcggcaggcactggtttaatgcaggtgtgttagaacagcatttctctgtaaatcaaagcttttttcagagagcaacattgcctgtaaaatgatggctttcttcctaacactctcaaattaacattacaaaggcctgaccttatgtgcattaagtattccccaaagaagcacaagaatattttgtgagtttgttcatactgcatttctttcttttgattacctttgggacttattaargaattcatgcttctctcccctcccatttttcttacaggggtcccacaggggctagggatgaaggaatggagaaagaacccaaaccaagggtgtaatagtcacatcaaagctaaaaaga

SEQ ID NO: 592446 - DNA, 585 bp, Homo sapiens
ttctcttctcaggggctgctcaggcagcaggtgtgtagcatcaaacatagcgagaggcactcaccacctggaggaataaagatgtaaggagttaacaattttacttttcatctctgccagcctgtgaaatattttccaatgtactttttttatttgattctcaaaactgccttgaggaccattgtttttgtttgttttcataaagaaattgaggctcagggatgcgactttcttcagtatttcacaaggcaatcttggcagctggtgtgtgcctcggagaggagggatatcgtgcccatcatgtggggacatttgaggaccttcgtggacttttacttttgaaagccctgccccacatcatttcaagtgtattaaaacatacgcaatctcctatctgtccyacagatcccgtgtataatatatatcatcatatatgtgagttgagttataaatagttgagatggtacatttcgtagacacttaattaaatgtttactacttttaattttatagtttctgtttcattttggaaccaactaattattttgaggtctggaacattttcatgggcctttaaaaaactca

SEQ ID NO: 592447 - DNA, 571 bp, Homo sapiens
cacatttctttgtgtgttaaaaggaaaatgttcacttaatgctctgcagtgcaaaaacaatgtgttattttgtgcctggcattttcaaagaaaatcaaaagcatttctcagaagagaaaaagaaaaattgtgaatgcctgcatttgttctttccaggcctctgttattagtcctaatgaaaattgctgtgaatatagacaccatgtattatttttaaggtctttagaagacaggcctcagctccccctttttatttttcagtttctgacttattaamaagtaaagaaaagcaaaatcaaaaatgtaaaaagtcctggtattttcaatgtttatatttaaaaattaaactgtatttgatgttttcatttcaatcctgtctctctgtgattgtatgtataaagtcatttcaagagagcatcaaaattctaaataggaagcaccaaacacatgctcccactttctgaactccgttcccactgggaagggccagacattactcatggaaaatagaagatgcctctatgcatctctctcaagtcacccatagtagaaaagccaagttttacattaa

SEQ ID NO: 592448 - DNA, 542 bp, Homo sapiens
tcaacaaacaaggcatagatgggacctacytcaaataataataactatgtatgacaaacccacagataacatcatatggaatggaaaaaagttgaaagcattccccctgagaacaggaacaagagaaggatgcccactttcaccactcctattcaacatagttctggaagtactagccagagcaattaggtaagagaaataaataaacagcatcaaaattagaaaagaggaagtcaaactatcactgtttgccgataatatgattgtacacttacaaaatcctaaggattcttcaaaaatactcttagatatgataaacaaattcagtaaagtctcaggttacaaaatcattgtacataaatcagtagcattgctatacaccaacaacaatcaagttgagaatcaaattaataactcaattccttttacaacagctgtgaaaactaaaataaaataactaaaaatatacttaaccaaggaggtgaaagttctcaaaaaggagaactacaaaacactgttgaaagaaatcatagatgacacaa

SEQ ID NO: 592449 - DNA, 566 bp, Homo sapiens
ttgctagctaccttgatttttcaatgtacccttacaatttatttaactaaagaaaagtttgagaggacagtcatgcatcacttaaccacagggatatgttctgaaaaaatgtgtcattaggcaattttgtcattgtgcagtcattataaagtgtagttacacaaacctacatggcatagcctactacacatataggctatatggtatagcctattgctcctaggytacaaacctctatagcatgtttctgtggtgaataccataagcaagtgtaatgcaatggtaagtatttgtgtatctaaacatagaaaaggtataataaaaatatagttttataatgttatgggaccactgtcacatatgtggtctgttgctgagcgaaacattatgtaatgcatgactataaatagtactggatgtttctctggggtactggcattctttctaccaaatgagcttgttagtgggtcttttcaaaactcagtattattggtaactattacattaactccttagtctaaaaccttggaatccaagagagatttacccagacttttaaaaagaaa

SEQ ID NO: 592450 - DNA, 549 bp, Homo sapiens
tggttccagttgaaaataggtctcctgcccccattagcatagcagggcctgtctggtcacaagtcctggctgtttggtttggagactatgtgcagtatggattggagcagaggtacaaagccccaagtttttggtactagggacacttggaaggtgtgagagcacagcctgctcttccctcaaggccagcccaaacttagcagccaagcagggcttctggggcagtccakgtgtggagctcttgtccattgtcacttaagtcctctgtcaccttgtctgtgtcctctggtcatactagatcttggatatgcccacccccctggagacaccactagacaaagagaaatgaggatgtctagtcagtgacttcccaagtccaagtcgagacgtctgcttcagctgctttgacatgcagcaacatcaaaggagcagtaccccaatatagtaacaatttgttgtaaattatcaaaatgtgtgagctttacccacgcctccttacctggaaaccctcccctgccttttcctcttctttgactatcccatcttcac

SEQ ID NO: 592451 - DNA, 472 bp, Homo sapiens
tctgtggtcaggagcacctgggcctccaggcctccctgggagtgttgaccttctgagaggggagccaggtgactgtggtctaccagggccaccaggtccccctggcccaccaggcctccaggatacaaaggctttccaggatgtgatggaaaagatggccagaaaggtatgaatgttgttccgttaagtaatatgtgaayaacttggttatcttacccttgagggtctggggtactgtgccgccatttctatttcctatgcaaacaaagtgactaccttccaaaatgtccttatttccccaaagagtcctgaagtttgggtcaaagttggacaagtaaaaggaagaaacacaagttcatctttagcccctaataatactcttgataatcttccaggccagaattgaacagtagaaatgtaatgcaagccacatgtgcaatttaaaaatatagtagacacattttaacaagta

SEQ ID NO: 592452 - DNA, 392 bp, Homo sapiens
acatgcatatctaacacaatagaatgagaagtctcgataaatcataaaatagcagcaggtgtccaatgctgagttcagaaaatctgactcttactatgaacatggagaaattgtgcaaatgaagaggctgggctaaatgtgaatagctaccacttattgagggttggtgcttcaagtatattgtctcatttttctaatgacttcacaatctagtagcatcatcccccatgttaaagaaatgtttaaagaaagttaataagcagttsagggtctgaatgaaaaattttctagagagatagatatcaccaataaaacacccaagtttgagcctctcagttccctctcagttcctgtatcctaaaatggaatttttctcttttatattaggaata

SEQ ID NO: 592453 - DNA, 392 bp, Homo sapiens
acatgcatatctaacacaatagaatgagaagtctcgataaatcataaaatagcagcaggtgtccaatgctgagttcagaaaatctgactcttactatgaacatggagaaattgtgcaaatgaagaggctgggctaaatgtgaatagctaccacttattgagggttggtgcttcaagtatattgtctcatttttctaatgacttcacaatctagtagcatcatcccccatgttaaagaaatgtttaaagaaagttaataagcagttgagggtctgaatgaawaattttctagagagatagatatcaccaataaaacacccaagtttgagcctctcagttccctctcagttcctgtatcctaaaatggaatttttctcttttatattaggaata

SEQ ID NO: 592454 - DNA, 383 bp, Homo sapiens
tgctatctagtggccaatctggggaaattccgtccgtgatctaaacaggagcctcaggaggagcagcagctgcattccagcaaaacaaggagagctgattccagcagttcataaaggtccatttagacccttgtttctgcagagctgrggaacctaggctctctaccacccatgttagcaataaaactaacactgaatggtgttctaaatattttacctgtggggggggggtactattaatgttcccattttaaagacgaggacactgaggtacagagaggtttagtgcaaactcaaacacacactgctaagaaacagtggagtcaggattcaaatgcaggtccagctgactctctggcctctggtcttgatcgtcaatgcat

SEQ ID NO: 592455 - DNA, 447 bp, Homo sapiens
taacctcccccatgattaaattacctcccacttggtccctcccatgacacgtggagattatggaaactacaattcaagatgacatttggttggggacacagccaaaccatatcagaggctattcagaccagtggggagcactggcttcccattaagctatttccatggactgacaaccagtcagctttcaaaccaaaggtcccaggatgtgctgggggcctcctgacctcacctgagctccaggaggattccaygcaacatgcatgccacccagctcagaggacacaaatgcacacaggcatatcaactctagggagaaggagcctaggctgagtgtgtttgctcttttatctccatgattaaacagtgccttgcatttagaataagtgatcagtaaatttttgaagtgaacattgccttgtcatttcaaaaacaaaatgatagatc

SEQ ID NO: 592456 - DNA, 376 bp, Homo sapiens
tcaagatgctctccattatcaaaaagtgcttttacttaagctaataccagcaatttatcctttggtgtgagtttatgtcccaaatcaccaccccaaagggtggtttggttgccactcactgcatacattgccccacataactctgtttgctctgtcaacacgtaccctctgctacctctcaccaagcccctaatctcataccctcttcctggtgaacttccatcctttaagacacatctcatataaatgycaccttttctgttacaggctttgaagccttgactcccaggcagagttatttgctcctcctcttggttctggcagcatttaggggcttgccaattcccccacagctccctcaactctggccaggtct

SEQ ID NO: 592457 - DNA, 601 bp, Homo sapiens
tgcattggagtcttccactgtcccaaatgaaaagggagtgaaacgaatgggaagaatgccggtttggggcaggaagacaggagtttggtaagaggagaataacgccctgctgggcagaccccttggatgggtcagaggtgaacagacagcttttctgagaaccagtatctttggagatgctttgctgacagagttgatggctaagaggccccagacagagatctgttgaacgggtacacagagcagaatcccacctggagcaaccttggcgccccagggctcctgggagtaggctacatggtatatrggatggaatgggggtcaaaagtccccacatttacctttacttttcggggagagagagtatttaagtaatatacactaggagctttaaatttaattcctatcctcagtttaaatataacttagtttaatttcacaactaatattcaaggcagccattggaagttcacgtgaaaatacataggtgagactcaaacttcctacacgtttgcaattgggtgctggttagtaagttgtgacagttaatacacacaaacacacacacacatatttgtgtgcatatatatacaccatatat

SEQ ID NO: 592458 - DNA, 576 bp, Homo sapiens
aatatttagcaattgccttcaaatcaaggaatttctttttatagccaatctgaaatagatgtttttaagacaaagaaaaacatacatagtgctctacaaattaggtgcgtatgctattaaaataataaagattatattatattcaaaaatgtttggcctcaaagttcattattgtgggcactttgacagataaataaaattaattttagaaaggggttaatagtttcaatgggcatgataaagtattttcaggtattctgtagcgacaaggatgtatgcactggtcggagatttcacagaagcagtgatggacaaacatgggaagggaagtctcagcaragggaacagcatgggcaaaatatgggagactggggaaaattgtctattcaggaacagatttcaaaccttatttaatcagaaactcgagttaaatctccacatacctggtcatattctttgttttgccttactaaggagagtctaaagaatgcaactaaattgttcctttttattatagaatcctccattgcttaaggagttttacagggtatttctgtccaggctcaggaagagagt

SEQ ID NO: 592459 - DNA, 504 bp, Homo sapiens
gaaaaagtatcagtggatctggacttgaaacagaagtcacttgttgaaacttttcaaataagagagaaagaaagagagatagagacagagtggataatacgaaagaaacctggcctatgtctgaatcaaacctkcccacttgcttgctaatattttctgaaaagcaaagaaagtatttgcaaaggaaaagaagaagattgattgtccaaataattcaagaattggtcctaaactatgagtcatgacacctgtattttaagttattggctgtggctgtaactcagttgatgacttgaacaagtcacatcaagccttaatttccaggctataaatgggtatagtcataagtgacccctacttacctgtttgtgtagctgaatagatgactaggatatgcctgttaaatgctctaagcctctgctcaaaggctcccatataggtgtcattacttcattggcggtgattttggagactgtgagctttgaaagtggtgagtttgagtcc

SEQ ID NO: 592460 - DNA, 534 bp, Homo sapiens
gaaaaagtatcagtggatctggacttgaaacagaagtcacttgttgaaacttttcaaataagagagaaagaaagagagatagagacagagtggataatacgaaagaaacctggcctatgtctgaatcaaacctgcccacttgcttgctaatattttctgaaaagcaaagaaagtatttgcaaaggaaaagaagaagattgattgtccaaataattcaagaattggtcctaaactatgagtcatgacacctgtattttaagttattggctgtggctgtaactcagttgatgacttgaacaagtcacatcaagccttaatttccaggctataaatgggtatagtcataagtgacccctacttacctgtttgtgtagctgaatagatgactaggatatgcctgttaaatgctctaagcctctgctcaaaggctcccatatagrtgtcattacttcattggcggtgattttggagactgtgagctttgaaagtggtgagtttgagtcccctaaaggggcagactcattttgtcaaagg

SEQ ID NO: 592461 - DNA, 585 bp, Homo sapiens
gtacaaactgcacacgagggacagcgtttcttttctagtgtaaactgttaaattttgcagcaaatctctctcctatatgagctatagaatctataattgtttgcaggggtggaaaccattatgcatcaatgtcactgtcatcaaataaaatgtaagtgcctacagagacacagtgtggtctaaggagttttgcaaagaacccataattggtatcctgctgttcaaatcatcgagaaagtaggagcttggggcaggagctccyggctgcagattttatacatgattctcacgaaccttgaaatgtcagaccaaggccatgctcccccctcccctatccagcaaattcctgagggctgttcttcctctgtcatggacaatcagtgctgtgcgaggatgttctcacatcctagaaagcctgaggtagtttcttacagccaatatgaatctgtgattttagctccagaacccagagtggcaagcccagggaggcagaagatgatccaggcacctgcctgtgcagctcaggaagtgagggcagtcctcttttgtcttgatgttttctcctttctttgtttgttttgagac

SEQ ID NO: 592462 - DNA, 581 bp, Homo sapiens
ttctaccctatgttaattgcaaaaatactaaaacactctcatccaaaaagccagtatgtatttctgtgaagtgtgtatatatacacacacactaatatatatgtatgactgccatgtgaatatatatatattatatatttcacactttagaatatatatatatatatatatatatatatatatatatatatatatatayacatacatcaaagtccatatcaaagagaaaatgccaaagaaagccaataaatttgtataaaaatcaggaaaaaatcgcttctcagccttttggctaagatcaagtataaaaatcaggaaaaaaaagttgacacattatatatcagagatgaagatgtattataaaaatagattaatcagaacaacgtagtatgcgaacagggatagatgtgaacttggtctacattagaagaggtattagaaaacaaaatggaaaagatggtgttggcacaaatggctttttctaaaagaaaataattagatccctttcttatactattttcccaaatatattttatacgtatcaaagtgaaaaataaactttaacattagatgtaaacatt

SEQ ID NO: 592463 - DNA, 435 bp, Homo sapiens
tgaagattgacactgcccaatcgtctcggaagccccctagaccatcacggacgccgagcttcgggtaactctcccagtggaaggtaagcctgtccccttcttaatcaatacggaggctacccactccacattaccttcttttcaagggcctgtttcccttgcctccataactgttgtgggtattgayggccaggcttctaaacctcttaaaactccccaactctggtgccaacttagacaatactcttttaagcactcctttttagttatccccacctgcccagttcccttattaggccgagatattttaaccaaattatctgcttccctgactattcccggactatagccgcatctcattgctgcccttcttcccaatccaaagcctcctttgcgtcctcctcttatattcccccaccttaacccacaagtata

SEQ ID NO: 592464 - DNA, 384 bp, Homo sapiens
tgtggggaaacagggtccatccaggattggatctcctatcatgacacgtgggtttcccacccaaccacagatggacaccccaggttcgttctgcctagacactggggagttctggtgttggagactaacttacctacggcactatactgaactgagaggaaagcgtcactgcgtataaagcagtagcctttctcctactatcctatctttcacttcttgccagcagcaacctaatcattttcagcagatctgttcacagacaacatggaaagattttaaaccaaaaggaattccagaaaggtgtcaagatcagagwtccaagatgaaggatttaaaatttatccactgcaatggttcctgcaggaagagacttttaaagctaaa

SEQ ID NO: 592465 - DNA, 571 bp, Homo sapiens
cgatgttattgtactgggaagtcaagtgggtcctttcaatctggaaacttcttactatgcttctttacagggaatttttttcttgaacgacttcactgatgatttcctcccctgtgttttctctgttgtttcttttaagaactgttacttggaccaggcacagtggctcacacctggaatcctagccctttgggggaccaagagtctgagaccagcctgggtaacatggcaaaaccctgtctccacaaaaataaaaaataaaaaaattagccgggtgtggtggtgggcacctgtagtcccagctactcaggaagctgaggcaggagggtcayttggacccaggagttgggggttgcagagagccgagatcacgccactgcactcttacgttccacggttctctaacctaccccacctaacttcggcttcaaagaaaatacagcccacccagcatcaactctcttcccaactgtcctaaaggaaaaagtgagtctgctctttgtttcttctgggacccaaagtgatcatactacccatctgatcttcaatttgtccccaagacagcaagctt

SEQ ID NO: 592466 - DNA, 571 bp, Homo sapiens
cgatgttattgtactgggaagtcaagtgggtcctttcaatctggaaacttcttactatgcttctttacagggaatttttttcttgaacgacttcactgatgatttcctcccctgtgttttctctgttgtttcttttaagaactgttacttggaccaggcacagtggctcacacctggaatcctagccctttgggggaccaagagtctgagaccagcctgggtaacatggcaaaaccctgtctccacaaaaataaaaaataaaaaaattagccgggtgtggtggtgggcacctgtagtcccagctactcaggaagctgaggcaggagggtcatttggacccaggagttgggggttgcagagagccgagatcacrccactgcactcttacgttccacggttctctaacctaccccacctaacttcggcttcaaagaaaatacagcccacccagcatcaactctcttcccaactgtcctaaaggaaaaagtgagtctgctctttgtttcttctgggacccaaagtgatcatactacccatctgatcttcaatttgtccccaagacagcaagctt

SEQ ID NO: 592467 - DNA, 524 bp, Homo sapiens
  misc_feature 515, 516, 517, 518, 519, 520, 521, 522, 523, 524: n = A,T,C or G
acctgtgtccatggaccacatgcggctcagaacagctttgaatgtagcccaatacaggctgggcgtggtggctcactcctgtaatcccagcactttgggaggccgaggcgggcggatcatgaggtcaggagatgaagaccatcctggctaacacggtgaaaccctgtgtctactaaaaatacaaaaaattagccgggcacggtggcaggcacctgtagtcccagctacttgggaggctgaggcaggggaatggtgtgaacctgggaggcggagcttgcagtgagctgagattgcgccatgcactccagcctgggtgacagagcgagactctgtctccagaaaaaagaatgtggtccaatacaaattcataaactttcttaaaacattayttgtgattttttttttttaccttattagccattgttagtgttagtgtattttatgtgtggcacaagacaattcttcttcttccggtgtggctcaggtaagccaaaagatcgacaccccgtgattgnnnnnnnnnn

SEQ ID NO: 592468 - DNA, 622 bp, Homo sapiens
tgaaactggatccctctgattattgaacacagttgccccttggcctgggaaggatttactgagcattttggtcacctcctgtcactcttcatggaaagactcaccacttcaggggctcatcatcctgttcctgaacaaactggagttttacaggcagaaaacgcatctctttggcttttattaagaactaatattgaaaaatccagcagtctccagagggctccttctctgtggcctcatctgtaatttatctattatttaatctttaaatggagtctctcagagactttgctggatttttttcatctgcctccccacacagagatgaaattatttcccaagtgccttagatcatgaattggtaccttttggaaaggaaaagataatactgtttatgtgcgagtasaagagaattacttcacttgtctgtagtaacactgattaaactgaaatgtcagagctaatgttacagttaataaatgttatacatactcaaatctgtctactgatgattctaacaaatgcagaggacactgcttaaaaataggagggatacctgcatcaccatgtgagtgccatttgtgctgtccatttccagtgagtaaggtaaaaatgtgcatta

SEQ ID NO: 592469 - DNA, 566 bp, Homo sapiens
cacagtgtgtttggatggagctagaatttgacctggttcagctcaaccaccatacatagtacatggaccaacttcagctcctgttcctcgtctttagtgtcccccagtaggctctgtcacattattcaggatgctgctgaactctgctcaaagtgagcttcttcccactttcccttarcaacaatgtcagtcacaatcctgtggatgctttgaatgtttgtaagaccacccagatttggtggtctcttattgcctccctgatcagagatcattatgtctgttttcttgtgcatgccaactcccagaatggacagatgggagaattttctgccctcactccacccatgtgcagattgggcatcagatcctctcagcatcctgaagacagttctcacaacagcagcagcagtagccatataagcattcggcttgggttgggccatagggaaaactttccttctcatccacagataatgaccaggaaggtgttcctcagtgagaggcttgttcttccaagcgagattaggtagtagaaccttgaaggggagttgaaggcattgaggctg

SEQ ID NO: 592470 - DNA, 566 bp, Homo sapiens
cacagtgtgtttggatggagctagaatttgacctggttcagctcaaccaccatacatagtacatggaccaacttcagctcctgttcctcgtctttagtgtcccccagtaggctctgtcacattattcaggatgctgctgaactctgctcaaagtgagcttcttcccactttcccttaacaacaakgtcagtcacaatcctgtggatgctttgaatgtttgtaagaccacccagatttggtggtctcttattgcctccctgatcagagatcattatgtctgttttcttgtgcatgccaactcccagaatggacagatgggagaattttctgccctcactccacccatgtgcagattgggcatcagatcctctcagcatcctgaagacagttctcacaacagcagcagcagtagccatataagcattcggcttgggttgggccatagggaaaactttccttctcatccacagataatgaccaggaaggtgttcctcagtgagaggcttgttcttccaagcgagattaggtagtagaaccttgaaggggagttgaaggcattgaggctg

SEQ ID NO: 592471 - DNA, 487 bp, Homo sapiens
gaagtctaattactcttcctttaaatctgggctgaatctgatgctgtatgtctttgggactaggtcagaaagggccatacagtgtctgcttagttctcttgagatacttgctctaggacaaagcttttcaacctgacactattggcatttggggccagataattatttgtgggttgggtgtgggggctattctgtgcattgcaggatgtttagtggcatccttgacctctgccaactagatgccagtagtgcctctcccccgactccccgrccccccaccagtgtgataaccaaaaatatctccagacattgccaaaaacccttggaggatagaattatgcagcccccccccccaccacccattgagaaccaattatctaggagaatccagctgcccgcaaaaagtacagtaaccctgagaccaccatgctggagagaccacctgtgggtcccacatggatcccatatgtgtccagccttccaatca

SEQ ID NO: 592472 - DNA, 581 bp, Homo sapiens
tgaaaacgacgtttcaaaaacaggacaaggtacagaactttctcctcttgatttcaaagttaactgtaatgctacagttattgagatagtgtggcactgctgggacaatagacaatccttccaccagtcaatggtcaatgaaacagaaaagaaagtccaagaatagatacacatactgaagggcaattgatttttgacaaaagatccaaagtagaaaggatattttcaatggctggtgctggaaaaattaaataactatrtaaaaaaataaaataaggattaatcttaacccttacctcatatcatatgcaaaaattaaccgccaatatacacaacaacatgcgtgtgtctcaaaatcaatatgctgagtgaaataagctccacaaaaaaagagtataatacaggtatgattccattgatataaaattctaggaaatgtaatctacagtgacagaaaggagatcagaggttgtcttgagattaggtagaggtagaaattatatggggcaggaggaaatttttgtgggttatgcaaagatgcattatcatgattgtggtgatgattttacaaatgtatattt

SEQ ID NO: 592473 - DNA, 581 bp, Homo sapiens
tgaaaacgacgtttcaaaaacaggacaaggtacagaactttctcctcttgatttcaaagttaactgtaatgctacagttattgagatagtgtggcactgctgggacaatagacaatccttccaccagtcaatggtcaatgaaacagaaaagaaagtccaagaatagatacacatactgaagggcaattgatttttgacaaaagatccaaagtagaaaggatattttcaatggctggtgctggaaaaattaaataactatataaaaaaataaaataargattaatcttaacccttacctcatatcatatgcaaaaattaaccgccaatatacacaacaacatgcgtgtgtctcaaaatcaatatgctgagtgaaataagctccacaaaaaaagagtataatacaggtatgattccattgatataaaattctaggaaatgtaatctacagtgacagaaaggagatcagaggttgtcttgagattaggtagaggtagaaattatatggggcaggaggaaatttttgtgggttatgcaaagatgcattatcatgattgtggtgatgattttacaaatgtatattt

SEQ ID NO: 592474 - DNA, 595 bp, Homo sapiens
taaaagtttataaaataacagcagtgtaggcattggaatcagactacttttgctcagatctagagcactccaaacaaaacagaacttggccgggtgcggtagctcaagcctgtaatcccagaactttgggaggccaaaataggcagatcacttgaggtcaagagttcaagaccagccttgcccagcatggtgaaaccccgtctctactaaaaatacaaaaattagcccggcatggtggtgtgcacctgtaatcccagctatttgggaggctgaggcaggagaatcgcttgaacctgagagctggaggttgcagtgaaccaagattgtgtcactgcaccacagccttcaacaaactgggactctcaaaaaaaaaaaaaawatatatatatatatatatatatatgtaaaatataactcaccctgcacagaacctataaccttcatctcctttcaacacttgctacttgaaggtgcttgtttttgcactaaccgttggtcctccctgacatcagtttaatcaactctcagcagctcctgttagccccacctttgaaactcctgagcctgaatccatctcaccacctccatttgaacc

SEQ ID NO: 592475 - DNA, 592 bp, Homo sapiens
agggtgaggagagtgcctgcccctcactgcaagtcttcttggtggggccattgaaagttcaacataagacagccaggactttaaacaagcaggattctttgcagtaaatcataaaagctactttacattgtcttccactggctctttgaatctgttcattcattcacttctattggataagaatttcatctgtcggatgaagtttcgtggcttttctgtctatttctagttaacaggaagttctgtcactttaagttgcaaagccaagttttgattcagctattaaaatgatctacccaatataataatcagaacttttacttggcttgatgcggaaattttgacccttwaaggacaaaaatcaacatgtatcttccattaagttagagctgggctggttcaaaggcagtactgcatgaaggtaacacagggtttggaatcagaccaacttgagcttaaaattccagcttgtctttatattgttgtgatacctcagaccttttctgaacttcaacttcatcacctctactggatttttaataatctctctcttataaggttgttgtgtggataaagctatataaaactaaca

SEQ ID NO: 592476 - DNA, 549 bp, Homo sapiens
ttggaatcagaccaacttgagcttaaaattccagcttgtctttatattgttgtgatacctcagaccttttctgaacttcaacttcatcacctctactggatttttaataatctctctcttataaggttgttgtgtggataaagctatataaaactaacacatctgtgcaaaggacataggcaaccatgtcacaaaatagaagtagacgtgatgatcaatcaagaaatattaaaagtgtttgacttrgctaataagcaaagaaatacaaattaaacaatgcagtgcacctttttatctaaaatattggtaaaaacaaataacaatttattatattcatgtcacaagatgcaagagtaagatgagacaggcactatgataaaagcagttcagactctttgagtttccatactttgaaatagtaatattatcatcagaaggagacatcaagagatctaggtataaggatgttgattgcagcataatttacaatagcattaaccaagctaagtttccaacaaaggagaagatttgcataaattatgattcctc

SEQ ID NO: 592477 - DNA, 462 bp, Homo sapiens
aaccaaataaatcacctttctttctacaacagttaaaagagaaaatgatcagtacattactttgtaarattagaggggactctgtttctgataagcttgaaggctgtgttcagggaaatgagtcataggagtgaggtgcacctgcccaccgtgactgtgtacatctcaaggtcggcagccaagagtgtctgcctctatgtggcctccaaagaccctgggctcagacattcaaacattcagtaagaacatctgcaactgaactgaaagaaatggaatggaatggagtagaacattcacataattccacactgattgagaagcagtacagtatagtgtaatgtgcttccactaaaaaacctgaggctcaagggtgagattgcctgagaaacatcatgtgaccttagtcaattcatgtgactatcctatgtttcactgtcatcccctgaaaaccaggagcagaag

SEQ ID NO: 592478 - DNA, 608 bp, Homo sapiens
ggttatgccttcagtgcaagcatgatctaagtaagagtgaggaaaaggctaaaatagaatcccacaacaaattgaaaatcatacctcaataggaccaagatgatttgttagcaacaaaaatgacttttagtatagcattttacaataatcagacaaaactaacataaaccaaagatggtacaacgtatctcccacaatgtccaggaaacgtaaaaatgtactattacacatattaaaaaacagaaaatgactgataatcaagagataaaatagtmaatagaattaagaccttaaaaggtaaagatattgagtgaacagaccagcatttaaaaataaatattatgtctatattatgcttgtatgtcaaagaaaacagaggaaatgagagacaacctgaatgaaaagttaaaaaatttgaacaaataatttaaatccacaaaaaattataaatacagtcgagaattgtaaaataaaatataaaatcgaatattcactaaatcagaataaaatggaccggacacagcagaagacgtgactcgttaacctataaatatgtttatacccaatattcaactgattcacagagaaaaaaataaaatgaggaaaaa

SEQ ID NO: 592479 - DNA, 547 bp, Homo sapiens
ctgaaactattccaaaaaattgaggaggagggactctttcctaacttattctatgaggctggcatcattctaataccaaaacctagcagagacacaacaaaaacagaaaacatcaggccaatatcattgatgaacatagatgcaaaaatcctcagcaaaatactagcaaactgaatccagcaacatatcaaaaagcgaatccaccacaaatgggtaggctttatctctgggatgccaggttagttcagcatatacaaattaatgtgattcgtcacataaacagaactaaaaacaaaagccacatgattatctcaataaatgtagaaaaggttttgataaaatggaacattccttaatgttaaaaaccctcaacaaactaggcattaaaataacatacctcaaaaaaaaaagtcatatataacaaacccagggccaacatcatactgaacaggcaaaagctggaagcattccgctgagaaccaaaacaagacraggatgcccattatcatgactcctattcaacacagtattggaaatcctagccaga

SEQ ID NO: 592480 - DNA, 557 bp, Homo sapiens
tggagctctccacctgtcgaggcttggtcctctggtgcagaagctatggtgtgtgccaccagggcacctgacgctgccttataagcaggcatggtgatgctggggccccaggagaggtaagcaggccaaggagtgctcaggttggaccagtcctgtttgatgtgcaagaccaccctacagagatcaagtctgacagttcccctaaagctaaagtctcttatttaggaggaagttgagcctagggagatagctgtacctggccatgctccactacagctgcacctataccaaagcctctatactctacatcagctggctgctgccccaccacttctctaatcagctatccctgctatctcaagtgtccgtgatggtcaaggggtcctctcctgcctggaatccagaggcctgtggtgagagtgggttgctycttgccagttcaattcatccattcccctagagctgttgtaggtcaaaaatgaatcccagggctcagtagcccttgtggggttaacagttttctccctcttcaatctagcttgtgtgtctttcctcca

SEQ ID NO: 592481 - DNA, 615 bp, Homo sapiens
tctctctctttcactacatatttgtgtgtgtctatatatacatatatatgtgtatgtatgtgtattaatatgtgtatatctgtgtgtatattatatatatatacacacacatatgtgtgtatatatatattmccctgctctctttcaacttaagagggctcttgctgtgtatcagcatggtggtaatggcagcattggtacctaaagttagcatggaaactcatgtattgctttatatttggtgaacttgaatagaacaatagaaacaattcaatctgaagagaaaagaagggggaaaagattgaaaaagaaagatcagagcctctaggactctagcattaaatggtttaattgatgtgccattggagccccagaagaagagagaaacattttcatgcaaaaatatttaaagcagtaattatagaaaacattccaatttgataaatatatatatatataattcggattcaagacagtcagtgaactccaaaaagtataagccaaagaaaaccatgtctacatacatcttaatcaaattgctgaaaacaaaataaaaggaaaaatcctgaaagcagccagaagaaaacaacacattatacacaggggaagcaggat

SEQ ID NO: 592482 - DNA, 506 bp, Homo sapiens
agaaatgtcatttttcaaatgtgggcaatagttcacagagttgtttcttctatcaaagcatcaatatattcagtaattaaacaarcatttattgaaggctgccacatgccagaaactgacaggcacaggtcacagaaatgaagtatagatcctgtcctagagaaatgtctggtctagaagggagaaagatagaataaaagaaagtaattaaaatcatgagttacatatgagaaaaaggtttgtagaatgcactgaggagaaacagagaaaagagtgatcctctgagcatatgagactagggaaaggtatgacaaagagagtgagatatgattaaagttaaagagtgaatagaatttccccaaacagagacttacataaagctcattactgatcaaagaaagagcatatgaaaagcaatggtggtaaaaagagagcatactatgctcagagatactcttttccccaaaaacttctcatttccttgacttacatccagtgggccaaga

SEQ ID NO: 592483 - DNA, 522 bp, Homo sapiens
cggccctttttcataggctagtagaggggctgctagaaagggtcctaggactccaggcctggtcaaacttgcgcaagcatttcagttacctattgaagcaaaacaaaccacccccaaacctaatggcttcaagcagccacaatgtattatttctaacagttcaatgagctaatggagcctgctcctgggatttcattcagctggaagatcaataggtcctgggttcagctgagccggctgagatgacttggcctttctctccacgtggtttcygtccttggttcttcagcgcctgcccagttcaggatggcgtccaagggaacaaaacagaagctgcgtggtctcttgaggctccagaacttctgcaacgtcacttctgccacatgctagtggtcaaagcaagtcgcaggagtgccaggattcccagagtaaagcaaaggactcttctgaagaggtaagagcatcaaattcacattgccaaggagggcgctcatgctctgctggcgtgagagcgtgagaaaa

SEQ ID NO: 592484 - DNA, 566 bp, Homo sapiens
ttagcctcattaaaatgtaaaactttagctttgcaaaaaatcctcaacagaaaaggaaaagccaaatacaaattgcaataaaatgattgcaaactatatatccaataagagactagtatctagaatatataaagaattctcaaaactcaacagtacaatataagcaatcgtcttagaaaaacaggcaaaagacttggacagacatttcactgaagagggtatccagatggcaaataggcaaacatgcacataaaaaamattcaacaccactgaccatcagtgaagtgcaaattaaagccacaataagatatctccatgcaattattaaataaaaaatagtgatatcacaaaatgcaggtgaggatgtagaggcattttcttatgcatttcatggctgaagtataaaatggtacagctactctggaaaacagtttggctgtaatttttttttaacactacacatgtaattaccatatgacacagcaattgcactcttgggcatttatcccagaaaacctgtacacaaatgctcatagtggctttattcataactgccctaactgcaa

SEQ ID NO: 592485 - DNA, 635 bp, Homo sapiens
gaagtggcaagaactggggtggcctgtgttgagacctccacatagccagcagccgaggggaggcagcagaaggggagatcactgcttggaagccacaccttagaatggaggactctaccaagcgcagcgaccgcagccctaactcagattgtcaagcctctatgtcaacaagcaaatgctaccggtgatccaggtgcccaacatcctctgccaacgcagaggaggttggcctgcaagggcactggctctctgaactgagtaaagtgaggcagggatgaagctaacagccatgttctggcatagtcctcaaatctctgctgtgtccactgaatctcaagtctgctagtccttgtgtggcttgctcactagccaagctttctggggacacagggaggcagaaagcagaccacagtgagaggctagcaaagaaatgcatttgctacctatagctacaacaaactgtggtattggcagctgaaatcattatctggataaaaacaaacagcaaatttgacaataaaatgcattmcttcccagtgtaatgggaaagggtcctatatcagcacaaacctccaccttcctctctaattctccaacctaatgtataattacagctgggcaccttctcctctggc

SEQ ID NO: 592486 - DNA, 635 bp, Homo sapiens
gaagtggcaagaactggggtggcctgtgttgagacctccacatagccagcagccgaggggaggcagcagaaggggagatcactgcttggaagccacaccttagaatggaggactctaccaagcgcagcgaccgcagccctaactcagattgtcaagcctctatgtcaacaagcaaatgctaccggtgatccaggtgcccaacatcctctgccaacgcagaggaggttggcctgcaagggcactggctctctgaactgagtaaagtgaggcagggatgaagctaacagccatgttctggcatagtcctcaaatctctgctgtgtccactgaatctcaagtctgctagtccttgtgtggcttgctcactagccaagctttctggggacacagggaggcagaaagcagaccacagtgagaggctagcaaagaaatgcatttgctacctatagctacaacaaactgtggtattggcagctgaaatcattatctggataaaaacaaacagcaaatttgacaataaaatgcattacttcccartgtaatgggaaagggtcctatatcagcacaaacctccaccttcctctctaattctccaacctaatgtataattacagctgggcaccttctcctctggc

SEQ ID NO: 592487 - DNA, 505 bp, Homo sapiens
aacaagactcaatttttgttcccctgcttcactctactggaaaaatccaaaacctgccttaggagagtgaaatctctctaacttgatgggagtcttctcagttctcctgccagggtttcatccctaccatgtagtgtaggcatcagatgctcactgagtacccactggctactgcatgccaggccctgtgctcccagcagacatcaccactcccagatgtttcagaaggacagacacccaggtaacgatagactcctttgcaaatcagaaaggacaggctcaactgatcctctcccggcccaggctgggcttttctgttttaatcaaaatatgttgaataccagaaagattggacagcatttgacagcattatccactctacaagcagaaatgtgacgaggttaattacatcatctaaagaggtcctaactgccccttccaggcatgttctatgagyttgcccctgaatgagcagtcactaatacctcctaatctcacacaacag

SEQ ID NO: 592488 - DNA, 657 bp, Homo sapiens
tctgtaggacgggcagtatcattgtctactgacagcttgaaaacagaatttcttcattcattcaacaaatgtttattgagcatgccaggccctgttctaaaccttggggacccagcaattaaaaaaacaagtaaaaatcactgctgtcttatatgttacaatttagtgaaggtagtctaatacaggtgttatatgggatgagcaatgggaagtgttagagttgaaatgttaagtgaacaaaagaatctcattgaagaagagttatttgagtaaaaaccttgaaagattgggggcagtaaggcaaatgagtatcaggggaagggcattctgggctgagggagcagcgagtgcaaaggccctgacgtagatgcatgcctggtgggcataaaatgagtgcaatactgccagggcagctgctgtggagccagggatgtcacaggggacygggtcacatgggcctcagagactattctagaaaagattcaagtacaaattagtgtacgtgcacgtctaaatcttcttccaggaggaattttgggcagctgacccagttaattgcaataaaagacacacattgacatgggatcaaaagaagaaagaaaatgaataaggatggaaataaactacagccagaacggcactagaaatgcctaaaaa

SEQ ID NO: 592489 - DNA, 595 bp, Homo sapiens
ttcaaatcaatggtgacacccatagtccttgaattactcatttcctgtatgctgttttgggtggcagcccctggatccctcagagccttgcctcagtgagtacttcattaaaggcaaccctaaacaacagttgcatcgcttctttcatcacctygtgccctaacttacaagttcccatccctaaatgattattgtattagttatctcttgatgcgtaatacattaccccacagtttagagacttaaaacaacacacacttgcgatctcacagtgttggtgggtcaggaatctgggcacagtttgtgtcctctgtgccagctctcacaaggtggcagtcaaggtgtcaattgaggctgcgttctcatctgaagactggggatggatctatgttcaagctcactcacctgcttgttgacgggattcagtttcttacaaactgttggcagggatcaacctcaatttcttgccatctggagctgtccagcatgtcagctagcttcatcaatgcatgcagacacagaaagcgtagagaaagacagaagtcacagtctttgataacctaatcatgaaagtcatatcccatcacttctgcca

SEQ ID NO: 592490 - DNA, 631 bp, Homo sapiens
tagggcctacctgcctcccattctattcaaagtcatccctctgctcactgagataaatgcatatctgactgtctacttgagactaatcagatactcaaaagaatgcaaccatttgtctctcttttttggggggaggggggacagagttttgctcttgttgccaggctggagtacaatggtgtgatctcagctcactgcaacctccatctcttgggttcaagcaattctcctgccttagcctcccaagtagctggaattacaggtgcccgccaccatgcctggctaattttttgtatttggagtagagacggggtttcaccatgttggccaggctggtcgcgagctcctgacctcaggtgatccacctgcctaggcctcccaaagtactgggattacaggcttgagccaccacgcccggcccatttgtctcttatctacctataacctggaaccacgcttcctggctttggctttggttttcccacttttgattccagttgtcccacctttacttccagttgtcccrcctttacttccagttgtcccgcctttccagaccgaaccaatgttcatctcgcctatactgattgatgcctcatgactccctagaatgtataaaaccaaactgtgc

SEQ ID NO: 592491 - DNA, 389 bp, Homo sapiens
tggaagcgtttaaggtttcttaaggctcaggctgaggactttatcacttctgtcattttctttaggccaaggtgagttaaaatccagctgagattctgggaggagctgccaagtcacattgcaaaaggtgtggctrcagggaggagtgagtggaaaattcaggcaatttttgcaatttatctcccatattactttaaaagctttcaattctaccaggaagagatagcaattctaacttgtacagtatgtgcccaataaaatagcctcaaaatgcagaaagaaaaatagaactacagggagaaatgaaaaagattactcttatagtgggaggttttcatgcatgttttgccattataggtcaagcagacaaaagaaattattaaagatat

SEQ ID NO: 592492 - DNA, 556 bp, Homo sapiens
taggcaaaacaatccaaccacactaaaatccaccttaaattcctcttgggaagagctgcagggtctctgaactatttttcctttatttggagtttccccgrttataccggagggagctggataacttctgggtgcattaaaagcaaattatccatttgtgggagaagggcgggcttctcactgaaagcaattagtagttttctaatttcccaggtgggtctccattaaccgcctaacaaacaccaaggctgtcggagtccgacgaatcatgcacctctcttagggggaactggttgcgctactctttagaacgctgttttcccatggtagccttaaaaaaaacttaccaattttctgaattaggtaacacattgaatgggaaaaacctaagatagcacaaaaaggcgtacagcgaaaaattaagactccttcctcccgtcatccgccacctcactgtcctccctagaggcaatcgctggttcacttctttaaactttttattatggaaaatttcagatacacaagtaaagagactgtatgatgagcacatatgctc

SEQ ID NO: 592493 - DNA, 571 bp, Homo sapiens
ggcccggcacagctgcacagcccgcggtccccaggcaccggcgggtccctggaggggaagcgattgatacagctgcctgcactgcgccacccgcccggctgcccatctccgtggcacctgcgtctcccggctgggccgggagctagargtggctgccgagaccgggagggcccggccagtcgcccgctcccgctcccgcgcctggccctcggcccgcgacctacgcggacctggactacaactcccgtcgggctccgacggccgggccaatggcgggcgcccggagcatgcggggcgcagcgcctgcgcggcggtttgagtaagcggctgcgcgattggctgcggggtcgggcggccgcgcggggactgtgggaagcggagtgacggagcgagcggctgttggaggaaggaggtgggggccgggagcgcaaatggcgttgagatggttcagggccctgttcaaactccagcactgaccattcaccggcggaagcggcggcgcaggaggcggcggcggcccagcgggggcacacagcaggctctgttaccagctccagcagtggcggccagc

SEQ ID NO: 592494 - DNA, 532 bp, Homo sapiens
aatattatacgatcccacttacatgaggtacatagagtacacaggtacaaattcatggagacagaaagtagaatggtggttgccatgattggagtgaggagaatgggaagttattgtttaatgtgtagggcatttcagtttgggaaaataacgttctggaaatgcatgatggtgatggatgcmctacagtgtgaatgtatttgcattgaaccatacacataaaatagttaaaagggaaaatgttacattatatgtattttatgacaataacaaaaaaagataagcataagagaaatgagataataactttagaaaattagttcaggaggtctaatctccaataaataaaagtttgagaagaaaaaaaattgaggaagagggaatatttgccaactcattctaagacgccaatattacctttattctaaagctagggggtaaaatcatgcaaaataaaaactagagaaaaatattcttcatgagtatacatataaatatcttgagcaaaataggttttttgtttatctgtttt

SEQ ID NO: 592495 - DNA, 641 bp, Homo sapiens
ttggcaatttctgccattgctgttctatgctctgagaattcctccatctatctctcttctccataatgacccataaatctcattcttcatacttcttcacacttaacctcttgtaaatatttttacctactttctagtaaaatagtaccaaccatattcaaagattcccttaggtacaccacatcatatgcttaagcctttatttttagttctagttgccaatccttcttatattacataaattttattcaaattagccttttaaaaatttgtagaataaatttgtgaatgtaaaaaacataggaagagacatggtcctttcttctgatcccacttttttttttcatttcatgagcatggcctagccttatgatactttagtaattcatggtttacgtattttggtctgcgttattttcctaatattaactaccataacatttattttagytctcaccttttagtaatgcatcactgcattgcaatttatattgtttgtccctctaatcttctcttgaagctcaattttctgcattttagacacataggttttattaaatccagcctacctgctgataatgccaagtttctaaacctgaaatacatgatctcaggtctacacttcccagagtttcagagtt

SEQ ID NO: 592496 - DNA, 548 bp, Homo sapiens
aagttgtgggaagaggggatcagaaataaaaaaatatatatgaaaaaattgacttctataagraagagttatcctgaacaggcaagtttgagaacttttgattccactgtagacatgatttatctccattcatttaatcctcataagggtatagagaaaaactgagtagtttttggttaaacagagccaccaatatatcctgtctgaattcattgctgggaagaaaggaaaaactggaggaacaatgtttacaggtgcctcagttactgaccacaggttcttaggctcctgtgcaatagaaattgacacaaagccaagcaagtttcccagacaaggccctttattagtggcttatgttccaataccagggagccaaggtaggcacgtgagttctccagtcagctggctaagggcaggcctttgctgtgtttttaggaaaggtgacatgagtatgtatgaggtatgtgacaatcgttacatgtgcagggtggagctcaggtcacacaagcacagtgagaaatcatgttagtacatacactacattatca

SEQ ID NO: 592497 - DNA, 609 bp, Homo sapiens
tcctctttgtataatacttatatttggtccatgcatacttaaccyccttgtaaaatttgtttcttcttgcctaaaggccatcaaactccaaagggtcatgcaaatggagccttagatgatggcttcctttttatcagggacacttacaggtctctgaatgatatctgactgccattttcccaaaacaatgctccctgtcagtatgaacggtcattgtccctatcctaacagctagatgtacctcttcagatgggggattgatagcagcaggagacagacatattcataggcagacagagacagattcccagtgaaacctaaccttcaagccaaagacagtttaaagcctgaaaactgagctgccagttccagatagagtccctgaccagagtgagaacttctattcccatcttacccactctcagttggttccttctgaatgaagccttttagccaactgaaaagtgatttttccaagaccatacacagacgaatcagtacacactcacctcttctaagcccataaaaaccctggactcagcctcacaggctgctacccactttcattctgcttgtgtggctgacagctttctttctgtagctcaataa

SEQ ID NO: 592498 - DNA, 609 bp, Homo sapiens
tcctctttgtataatacttatatttggtccatgcatacttaacctccttgtaaaatttgtttcttcttgcctaaaggccatcaaactccaaagggtcatgcaaatggagccttagatgatggcttcctttttatcagggacacttacaggtctctgaatgatatctgactgccattttcccaaaacaatgctccctgtcagtatgaacggtcattgtccctatcctaacagctagatgtacctcttcagatgggggattgatagcagcaggagacagacatattcataggcagacagagacagattcccagtgaaacctaaccttcaagccaaagacagtttaaagcctgaaaactgagctgccagttccagatagagtccctgaccagagtgagaacttctattcccatcttacccackctcagttggttccttctgaatgaagccttttagccaactgaaaagtgatttttccaagaccatacacagacgaatcagtacacactcacctcttctaagcccataaaaaccctggactcagcctcacaggctgctacccactttcattctgcttgtgtggctgacagctttctttctgtagctcaataa

SEQ ID NO: 592499 - DNA, 608 bp, Homo sapiens
cttctcttgaagctcaattttctgcattttagacacataggttttattaaatccagcctacctgctgataatgccaagtttctaaacctgaaatacatgatctcaggtctacacttcccagagtttcagagtttatatgcacaacaatcaccttcttgtcagctacaaatgtcactataccttttgataactatgccacagtgtcatgactggtctatattctggtctgcttttgtgtacctcctcctgtcttattgattcataattcctataattcctattcagaaactatgcttctatatagttacatgtggcactttttaagtgagtcactttgggattttttacatgcatgtctgtgaatttgttattttagtaaaaagaagcctgaaagagatggggcgggggggtggttgggggtggggagagagagagagagagagagagagagagagagagagagagagcrtctacgcctattttgaagaatgccccttctctgctctgaagaataatgaggaccagtgaagttacaagtaaagaacaaaactttaggaggtggaagaaaatgtttgttccagaacataggaacaggataattttaagac

SEQ ID NO: 592500 - DNA, 373 bp, Homo sapiens
cccagtcattagttcctgttaactaacctgaatggctcaccactatcatttcagcgtactactctcctgtatccttacctcatttyccgtgttattagaaattcagaaggaacttgagaatttcttttcttcttaatgaccttttgaattccatatttctggaagaaatacacaactcagtgatcccaacccttactcatgcatccactgagagtctatataaaatgctgtagtacataccgggaagaaatacatgggtatgaaaaacattgtgtgccatagttgaccttagaatctatataaaggcaaattatacacatctctatttcccatacttcagtagcataattctaatttcttgacaaaaatcaca

SEQ ID NO: 592501 - DNA, 460 bp, Homo sapiens
tagttcctgttaactaacctgaatggctcaccactatcatttcagcgtactactctcctgtatccttacctcatttcccgtgttattagaaattcagaaggaacttgagaatttcttttcttcttaatgaccttttgaattccayatttctggaagaaatacacaactcagtgatcccaacccttactcatgcatccactgagagtctatataaaatgctgtagtacataccgggaagaaatacatgggtatgaaaaacattgtgtgccatagttgaccttagaatctatataaaggcaaattatacacatctctatttcccatacttcagtagcataattctaatttcttgacaaaaatcacataattgtactaatcaagaaattatccaatttaatactcagatttcatatacgtaaaaattgaaaaacagaggttaagtgactcatccaaggaaggc

SEQ ID NO: 592502 - DNA, 460 bp, Homo sapiens
tagttcctgttaactaacctgaatggctcaccactatcatttcagcgtactactctcctgtatccttacctcatttcccgtgttattagaaattcagaaggaacttgagaatttcttttcttcttaatgaccttttgaattccatatttcyggaagaaatacacaactcagtgatcccaacccttactcatgcatccactgagagtctatataaaatgctgtagtacataccgggaagaaatacatgggtatgaaaaacattgtgtgccatagttgaccttagaatctatataaaggcaaattatacacatctctatttcccatacttcagtagcataattctaatttcttgacaaaaatcacataattgtactaatcaagaaattatccaatttaatactcagatttcatatacgtaaaaattgaaaaacagaggttaagtgactcatccaaggaaggc

SEQ ID NO: 592503 - DNA, 596 bp, Homo sapiens
acgggtgaggcagctaatcaaaaacagaaattctttaaacacccatgcatgtgtgaggatatgggggtggggggctataagtaragtcccactctcatgtatttctggacctgacaattttttcatgcctgacatagctcagactggtctgagctatttttcttttctaacatctcccttacctcctaaattcctccaaatactcatgctcatatatgagtattagggtacctattccatagataataaaattataattgaaataaatttgcagccataaaaaaagaagaaaatcatgtcctttgtagcaatgtggatgcagctagaagccataatactaagtgaattaattcaggaacagaaaatcaaataccacatattctcacttacaagtaggcagttaagcattggatacacatagacacaaaggtgggaataatagacactggggaatacaatacgaggaggaaggtagggaagcaagggtgaaaaactaacttttggttactatgttcactatctgggcgacagattcattcacacttcaaatatcagcatcacacaatatatctttgtaacaaacctgcacatctaac

SEQ ID NO: 592504 - DNA, 460 bp, Homo sapiens
tagttcctgttaactaacctgaatggctcaccactatcatttcagcgtactactctcctgtatccttacctcatttcccgtgttattagaaattcagaaggaacttgagaatttcttttcttcttaatgaccttttgaattccatatttctggaagaaatacacaactcagtgatcccaacccttactcatgyatccactgagagtctatataaaatgctgtagtacataccgggaagaaatacatgggtatgaaaaacattgtgtgccatagttgaccttagaatctatataaaggcaaattatacacatctctatttcccatacttcagtagcataattctaatttcttgacaaaaatcacataattgtactaatcaagaaattatccaatttaatactcagatttcatatacgtaaaaattgaaaaacagaggttaagtgactcatccaaggaaggc

SEQ ID NO: 592505 - DNA, 458 bp, Homo sapiens
gttcctgttaactaacctgaatggctcaccactatcatttcagcgtactactctcctgtatccttacctcatttcccgtgttattagaaattcagaaggaacttgagaatttcttttcttcttaatgaccttttgaattccatatttctggaagaaatacacaactcagtgatcccaacccttactcatgcatccactgagagtctatataaaatgctgtagtacataccgggaagaaatacatgggtatgaaaaacattgtgtgccatagttgaccttagaatctatataaaggcaaattatacacatctctatttcccatacttcagtagcataattctaatttcttgacaaaaatcacataattgtactratcaagaaattatccaatttaatactcagatttcatatacgtaaaaattgaaaaacagaggttaagtgactcatccaaggaaggc

SEQ ID NO: 592506 - DNA, 460 bp, Homo sapiens
tagttcctgttaactaacctgaatggctcaccactatcatttcagcgtactactctcctgtatccttacctcatttcccgtgttattagaaattcagaaggaacttgagaatttcttttcttcttaatgaccttttgaattccatatttctggaagaaatacacaactcagtgatcccaacccttactcatgcatccactgagagtctatataaaatgctgtagtacataccgggaagaaatacatgggtatgaaaaacattgtgtgccatagttgaccttagaatctatataaaggcaaattatacacatctctatttcccatacttcagtagcataattctaatttcttgacaaaaatcacataattgtactaatcaagaaattatccaatttaatactcrgatttcatatacgtaaaaattgaaaaacagaggttaagtgactcatccaaggaaggc

SEQ ID NO: 592507 - DNA, 597 bp, Homo sapiens
taatggtatgttttacttagaataaagcaatttcaacaactttcattcagaatcctccagacaaaactaatttttgttccaatcttctgctaatggcaaaacagtaagttgtatgaaactttctagcttgaaccagtagaatctttgaaaattrctggtatagtccccaaaattgtgataatattacacttcaatttgcccatgtgtgtttctattttctactgtccatagcaacacaaatcttaaaatactgcctctttcatcattttctcagcctatatcaattgatataaaaagcttttcttcatctgtctgcattgtggtcctccacattaaatagcacccacctaaaatgcaaaagagcaatcattataaattggcctaatcattaattatggcatgattcattctctaggagaacatcataacagctcatagatttggtatgaaaatactaacctttgttatttttccaaaggaagggtatcagactatgtgatatatatacatatacatatatatatgtatatttcttctccttgaaattaaagttgtatagttttattaagcttttattttataaaaggcaaaatcaat

SEQ ID NO: 592508 - DNA, 356 bp, Homo sapiens
ttgtctcaccatgcagggagaggtttaagttatgaaacagctccattttatatccgtaacacttgtacagcttatgtgatattcaccagggagctatgcttcatgaacctatacatctacatcgcaggttagtttaccaaaagtagatacaaaaaagagrcaactcattcaaagtattttatagatttaaaacactcctcttaggaaataccattagtctgtttacctagaggtctagttatatatacaagaaaagtagaccagttatctgtctttttttattttctcttgtaacattttcttgtcacagactgaaagtttatgtcctctaaaactcatatgttaaagctataacc

SEQ ID NO: 592509 - DNA, 584 bp, Homo sapiens
tatatgacctgagcctcctcctcctctgctcttatttttgaaagattctactagtttaaatttctcttttggttaacttagtaaaattaaataatattctcaaaactttcttttgctatctaggcaacaatttaataatttataactgttcactatgtaagataatagtattttgattccttccttccatctctactagccatttgacccctaatttctttccatttttacctttatttttttacattggtaaggctgataacatkaattttttataaacaaatacataatacgtgtttttactaaagattgattgcaaagtttaaaagcaataaaaatactttacattaacatatctgtacaaatatcaaggggtttattaatattgcataatattttctaagggtctaaggtcaggaaacctgtgctattatatttgaagggaagtgttcctaagtgcaaagtcaagcggattttattttctccagttgttcagtggatcatgccatgttttattttacttcttaatgacttgggtaatgacttaactgtacatttcctctcttccctcacaagtcgccaat

SEQ ID NO: 592510 - DNA, 471 bp, Homo sapiens
tctctggggttcctgaggaagatgggctcccatgcaacatctttacatgtactctcagctgtttcatcaattaagttgtctttatgcgatcgatgtcttcggaattttgttgacatcattctctagtattgaacttccttcaagccaaaatggtgcaaaagatattttgttgacactattattggaatatgttaatagacaggaggtccaatcacaacattagccctagagacttaagagttcctcagatgctgttaagtcatctgatgaatggtgaggatggttaattcatgtgaggacagttgagacatgctgttttcagccatctcatatttgtcctataagaactgcagtgaattctaaagkcttgtcactttagtagaatctccagttccaagtatctctaatttattctgaggaagttatttaacctcaccgtgctgagttctgctcccttattgtggaaccaca

SEQ ID NO: 592511 - DNA, 575 bp, Homo sapiens
taattgcaaacatgacttgacctggttcaaaccctaagagcttttaaaactccaatgtttaartggagaaaattgtagttttctggtacaataaaaatattctcagtcataaaagatcactaccaaaaaatggttatttttatattgaggatagtcccttaaaagtgtaaagaaacaattacaggttagctcaacagacctgtccctagactgatacccagcatcccattaattcaaaaattatgtgaaaattcgagtcataatcatactgttattataaacaaaaaccaaataagttataataagctaatttagtttaaaaaatgaaggtgaaattaaaataaaacaaactgagctcattcaaaataaataacctgttgtaatttcagagcctttgtttcttctctttagcataagtgtagatcataaaaattgcaaaagtcccttaagttattcatcttacagaatagttgtcagatcaaatgaagtaataaaaataatagcaactgtagcattattaacagctaacatgtattgactcctaaaacatgccaagggctactccaaaggctgta

SEQ ID NO: 592512 - DNA, 575 bp, Homo sapiens
taattgcaaacatgacttgacctggttcaaaccctaagagcttttaaaactccaatgtttaaatggagaaaattgtagttttctggtacaataaaaatattctcagtcataaaagatcactaccaaaaaatggttatttttatattgaggatagtcccttaaaagtrtaaagaaacaattacaggttagctcaacagacctgtccctagactgatacccagcatcccattaattcaaaaattatgtgaaaattcgagtcataatcatactgttattataaacaaaaaccaaataagttataataagctaatttagtttaaaaaatgaaggtgaaattaaaataaaacaaactgagctcattcaaaataaataacctgttgtaatttcagagcctttgtttcttctctttagcataagtgtagatcataaaaattgcaaaagtcccttaagttattcatcttacagaatagttgtcagatcaaatgaagtaataaaaataatagcaactgtagcattattaacagctaacatgtattgactcctaaaacatgccaagggctactccaaaggctgta

SEQ ID NO: 592513 - DNA, 575 bp, Homo sapiens
taattgcaaacatgacttgacctggttcaaaccctaagagcttttaaaactccaatgtttaaatggagaaaattgtagttttctggtacaataaaaatattctcagtcataaaagatcactaccaaaaaatggttatttttatattgaggatagtcccttaaaagtgtaaagaaacaattacaggttagctcaacagacctgtccctagactgatacccagcatcccattaattcaaaaattatgtgaaaattcgagtcataatcatactgttattataaayaaaaaccaaataagttataataagctaatttagtttaaaaaatgaaggtgaaattaaaataaaacaaactgagctcattcaaaataaataacctgttgtaatttcagagcctttgtttcttctctttagcataagtgtagatcataaaaattgcaaaagtcccttaagttattcatcttacagaatagttgtcagatcaaatgaagtaataaaaataatagcaactgtagcattattaacagctaacatgtattgactcctaaaacatgccaagggctactccaaaggctgta

SEQ ID NO: 592514 - DNA, 596 bp, Homo sapiens
gctgtatatgcagtatctcgtttaatcctcccaacaaacatataaggtaggtatttttatttccatttcatcatataaggaggaaaamggcacagaaagtttatgtagcttattcaagttcaaagaccaagggctagtgccaggtcccaaacagtccagtgaaggaactcaggctcctgagcaacaggctttgcttcttcctgaaggtgtcacgcttgcaaagtccttgtaagtctatgcaagcagttacccttacatagactcttacatgggacattgtgatgctccatgaaagagtaaaggtcgtctgttctgcttaataaggcaaccatatggtgacatggaaagtgcatggacagaaaaacaggtttgattccaagttctgccatttatcaaccatgtgtgatctttggccagttaactaacctctctgagtcacattttctaaatcaaaaactgagaataataatgctgtatcagttttctagggatgtcataacaaaatacaatagacagggtgatggcttaaatatgtattttctcacagttccggaagttaggagtccaagatccaggtgtcaacagattcttctgag

SEQ ID NO: 592515 - DNA, 596 bp, Homo sapiens
gctgtatatgcagtatctcgtttaatcctcccaacaaacatataaggtaggtatttttatttccatttcatcatataaggaggaaaaaggcacagaaagtttatgtagcttattcaagttcaaagaccaagggctagtgccaggtcccaaacagtccagtgaaggaactcaggctcctgagcaacaggctttgcttcttcctgaaggtgtcacgcttgcaaagtccttgtaagtctatgcaagcagttacccttacatagactcttacatgggacattgtgatgctccatgaaagagtaaaggtcgtctgttctgcttaataaggcaaccatatggtgacatggaaagtgcatggacagaaaaacaggtttgawtccaagttctgccatttatcaaccatgtgtgatctttggccagttaactaacctctctgagtcacattttctaaatcaaaaactgagaataataatgctgtatcagttttctagggatgtcataacaaaatacaatagacagggtgatggcttaaatatgtattttctcacagttccggaagttaggagtccaagatccaggtgtcaacagattcttctgag

SEQ ID NO: 592516 - DNA, 609 bp, Homo sapiens
atatagtgaaatataaactcaaagaacccccttgagtttagttaaagctaaatagttaaagttataccagacagcactcactatgtgtttttcactagtcctgcctagtgacacacatagaaacacaagaaaggcaaatatttggatgtaatcatggttgatattttaccttggtggctagtttatttatttttcattcatatatttaactcctgagtgcatattttcatagtgcctacaaaataatatacatattttaagggtaaattacactgtatttttaattaactggcttttggttttttaagtaatgattcacttcagggatattttgtagtacattgtagctatataatgcattctgaagcatastgagctctcacccttcattcttaaggtttgaaagaacttatattactatcatttttaattttctcagctgagtctgctctgtttccaagctacaaattaaacagaccaacaacaacaataacaaactcaaggaagtgaatattctttattttcttaattgttttaaaatagcctaaagtatattgtgaatacctatgaagctaatataattttattatcaggagaatgaaatgctta

SEQ ID NO: 592517 - DNA, 627 bp, Homo sapiens
accaccacacttggctaatttttgtatttttagtagagacaggatttcaccatgttgtccaggctggtctcaaattcctgacctcaagtgatccacccaccttggcctcccagcatgctgggattacacgcatgagccactgcacccagccagtacattcaatcttaatgtccagtaaaagattttacttttaaaggagaaaatttattttatcctattgctctacaataccttcctgtacaaagtaaaggaaaaactagtttaaataagaaggacattttaatatgtattgttgtactttctaatgcatcaacttgttcatttatttacaaatatagaatggggaaagcagagaggaaaagaatgggaggcagaaatacttttattcagatctttacctataccaaagttatttggctcatagargagagtctgtagatgatatctttggaagggtatgttctatcacataggaagaatgagatggatggaataaatgttctaaatattttggagcaattgcaaactacttatcctaatacttaatatgatcaatgtttattacaaaagaatgtgaagtcattagtggaataagtggaaaagtgcaatgggtagaaccctgtttcc

SEQ ID NO: 592518 - DNA, 584 bp, Homo sapiens
tctagtcctattcaccaacaaggtgaacaggaaaagcttaaaatatcttcccacaaagaaaagcctgcaaagtgatgtcttcactggcaaatcctttaaaatgtttgaaggagaaacaacaccaattcttcacaactatttcaaaaaatatttgtaaatcatatatctaataagggacatatatccagatatagaaaaacatttaaaacgaaaaaataagaaaataacccaattaaaaattgagtaactgatttaaatagacatctctccaaacaagatatgcaaatggaaaataagcacataaaaatatgcccaacatcattaatcattagaaaaaaatgcaaatcaaaccgccaaaataccactttacaactrgtaggatggctacaatgcaggggaaagggataatacaagcgttagtaaggttggggggaaattaaaacccacatacattgctggtgggaatgtaaaatggagcagctgttatatagtccaggtattttaaaaaaaaaataaatttcaaaagtaaacaaccactagcaaaattatttgaaaatattaaacacaaagtattaatttctaat

SEQ ID NO: 592519 - DNA, 622 bp, Homo sapiens
tcttcactgctttaaaataatctcttcctcatcatctaatgcaagcttcatatgttaattgaaaccaatgatacagctcattatttgcatatttatttgcttacagagccacacaggcactattttgcaagtatccgaagtgacatttgggctatggcatcaccttctgcactttgtggccctggccatggtatgccatggtgaaagctcacaaacactacactctggggatgctttattacttttctcaaactcatccccagwcttctcacccttactctctctttattgtattttattttgatgtggttgtgttaacacttaggcattaacagcaggtagaacttcaattaccttgatgaaaacatcagctcaaaattttaagtctgcagtttgcagcccttccttaatttaagcaatttaagcataacatatacagttctttttaagtttttaatgttttccacattatctccttactattacaagacttcctactaaacaataaaattatatatacagggtgtatttattttgttttaatattttatcttacttgaaatatgcatgattatatctacaaaatgtatgtaattatacattttaatattctataaacaac

SEQ ID NO: 592520 - DNA, 605 bp, Homo sapiens
atcctaacaacaatcctaaagctgaagagaatgaaaaatcaaccattcrtcttgtacccttaagagaagtgaagagacataaattgctgtccccaagattgtggagatgaatacagggagtcaaggcttaccagaacagagacttgtgagtgaaaacttacacaagaaccaacatcagaataggaaaatctgaacagtaattgatgactcactagaggctcagtgtgggcaagtcgaaggttaaaactccagggcatccagttataaagcagtcggtctcccacgttttgtgagttttatctccagtggtttgagcaggttcttatagtgaatataagagaaaaatatctgcatatatctggcaaaagatgaagaaaaaataatttctaaattcaccagaatactctattcttcttaacacgggctgcactcaagagaaactgtgagctgagtctaacctactgggtttttttcagaacctgactgatctaggagaagtagccaactctagcccatctctagccacccagttccacccaaggaacaatgtctgaaagcacttgtgaagttcacagtccaaaggcccagactcactaaaagactga

SEQ ID NO: 592521 - DNA, 540 bp, Homo sapiens
catagaacattgatgagcagctcattaacgcctgaccttaagtttcttgattcataacatagtataatatgaaattagatatgagagaatctacccctgaaagtaactctggctgctccaacagactccgaggagtcagtaatttaacataataaaaatttcattctgactccctaaattctaaataggtatccattagtggtgagcagttctcctccatgtgtgtattagggacccagggtcattttatcccgtgatttcattatcctcaattcrtagctcataacatagctctgagatttgtctccacgctagatagacaaaacagaggttcgtaagggtatatatcacccaggcaagtggccacagcttacataaaagacactggaaaacatcatcccatttcatactcgggaagaagaggaatcagactggttgattagctaacaatctccccctgtaactatgtatttacatttacagacattatatgtaaaattattattttaagtatttagtcttagtcattgtcattccaga

SEQ ID NO: 592522 - DNA, 520 bp, Homo sapiens
gtggtgcttggacagatgaaaagacatgggagaggggcactgattacataataaaggaagcattacatggttatttgaacktatgaattgctcagtaaatggtgatgaggcagctgaacaataatgtaggaaaacgaaatggaattccactattacttcttatgtcaatatgaaactatacataaaaagtgaaatacttaaaatactaggaaaaaaatagaaatgaatgaattatataatctcactaaatgcataaaattacaaagaaaaaatgtattttactccagtaacctaataaaacatatgtaccagctcagaagaatatcttgttggcttgtaagcatgtcatactattctcagactctacaaatcacatcttctgccttttcagaatttttatttagcacgttttcaaataaattaacttgtgaacaatgataagcaagaccataagatgcattaaatcaggagttcaagtcgtgttatgtcaattctagaaaacacatgaaattagactaaa

SEQ ID NO: 592523 - DNA, 533 bp, Homo sapiens
ctaaaagttgttgagaataatattaatttttatttgtgacacattacccaatgataccaggctatacttgtttaaaattacataaaaattttactattctttagaaaatgaagagaattatttacaatgagttgaatcaaacatttatgctatttcctacttcttgatccatgtaattttatatatctactattagacccagacataaaaatggccytctaggttttccttgccaaataacaggaaactgcaaagctgctacataatcccatttgttagcattttttatgatcctctcagccactgcatttcatttcttttaggatttaatttgctgtgtcaatttggatgctaattttattttctaaatagttaattctgagttattcctcaattaacttgctaaattattgaaatatgaattatgccatcagggaatgctgcctaagtgaaccatcatgtttttgaagcattataccatctgttcgttctggcataacaaatatagcttattgagtcatcaaactttcggg

SEQ ID NO: 592524 - DNA, 416 bp, Homo sapiens
gggtgcacggcaggggcaagggaagtttccatcccaccggtaagcatggttaaatccggtagatggagagctcaggaaaagtggccatgagctttgagcataaatggacctgacccttaggggatgccctaagggaagacgagtccgaggactaactagaggtgtaggcacccctgtgttaaaattccatatgggcaccacaccttcaaaaccagacacttccttaagatgtatcctgaataattaggacaaactcgaccctgaaaccttaaaaaagaarccactgattttcttctgtaccactgcctggccacagtattccttacaaaatggagaaacttggctccctgagggaaatattaattataacatccttctacaactagattttctgtaaacaggaaggtaaatggagt

SEQ ID NO: 592525 - DNA, 528 bp, Homo sapiens
agggcctcttccctcagcctcactctcctcccccactgactctcttccatctggccccaccaaagtgttaaaggcacactggaaagaaaatgtaaactccacgagccagacacccaaactatgtcccttataaacagtaggaagaaaatttaggcccattcacctgcatgtccctttctaactmtcagatttaaaacaaatcaaggcagatttgggaaaattctcaggtgatcctgatagctatatagatgtcctgcaaagattagggctgtcctttgatctaacatggagaaatatcatgttacttcttgatcagacctgaagtcctactgaaaaggaagcagctttaacagcagcccagcaatttggggatctgtgctaacttagccaggtaaacgattgaatggccctggaggagagggaaaaattcctcacagggcaacaggcagtccccactgtagaccttcattaggatactgactcagatcatggagattagagccacaggcatttgctaacttgcatttt

SEQ ID NO: 592526 - DNA, 464 bp, Homo sapiens
agaattcccatatttcttagtttttgaggacatttcatgtatatggaatttatcacattgtgtgaaggcaatcccattggaacatttacataaatcgatatataaagagagattcacagttacagagtataaataatcaagctccttgagtctcacagttgtattaaatacaacaataatttaaaataaaatcaagaactgaaaaaatatataattattttaagaattttggtttgagcatatcagtaaaaattgctgcagtttctactgatagtggtttaatattaaacccaaagtaccagacaaaaagacaagggtctgaaatctctagtctacaaaactacaccaattttgtatgcttgctatttggttttagakgcacaatcaaatatcattgacaaaaatcaagtaagaaggaagagatctggaaatcaaattaaattttcagcatggcctgggagaat

SEQ ID NO: 592527 - DNA, 464 bp, Homo sapiens
agaattcccatatttcttagtttttgaggacatttcatgtatatggaatttatcacattgtgtgaaggcaatcccattggaacatttacataaatcgatatataaagagagattcacagttacagagtataaataatcaagctccttgagtctcacagttgtattaaatacaacaataatttaaaataaaatcaagaactgaaaaaatatataattattttaagaattttggtttgagcatatcagtaaaaattgctgcagtttctactgatagtggtttaatattaaacccaaagtaccagacaaaaagacaagggtctgaaatctctagtctacaaaactacaccaattttgtatgcttgctatttggttttagatgcacaatcaaatatcattgmcaaaaatcaagtaagaaggaagagatctggaaatcaaattaaattttcagcatggcctgggagaat

SEQ ID NO: 592528 - DNA, 522 bp, Homo sapiens
aaggctgcagctgtcaaatttcacagaagcaattattctatctgctatcttgaaagtgatctaactcacatattgatactccattgacatgaccacagaccatggcctccccagggattctaycaagcaccagcaatggtcccggcattagccagtaagcaaaaaactaacaactaaccatgagttgatgtttggaattagttttatttggaggtgagaatttatctcttttttgtttcttgtctcagaaatagtgcacttaatctcaactttcctggttaaccatgcacaaagttgacagatttattattctatctatgtgttttgctttcatttgtgttatataatttattttctgtttaaataaaagtcaccttcagaatttagaagatcaagtattaaattataagctttcatatcaaaactctaagaaaaatattttaatttctttacttatctttattaaatagcttaatccttcaagcaacaataaatttttatagtgtccttagaaagatgatt

SEQ ID NO: 592529 - DNA, 617 bp, Homo sapiens
agtaaaattacaaaaagtaaaaaaagaaattaaatacccatcactaagtgaattagwgaataaattaataaatatatatccgtatcaaaaatgactttgcagtagccatgtagaagaggaagtggacctctattcccagcaatttgatgaactacactgatgttaaaaatctttttctaacaactccaatgatagatggcaatagatgctgaattaaaaagtctctttctttttaaaaaatgttatagcttaaaatgaaagaaacaaaaacaaaaattcaagtaccaaaacaatgaatatgatgaaagccaaagcaataggtgcataagctgatgtttctgcagccatgaaagagtttcagactcagtaatgttgagaaggttagctttcaaccttcaattcctccgggaataggagattaaggctcagatacacaggaagtatggagttacaacttaagtctctgaaaaaatcaagactgctggaatggatataattctggataaagaataaatcaataatttgatatatgaacccaaaagagtatacaataaatctaatgtttctcctcaatctgagtagaaagaaattatcccatggacaagtgaaatcatacc

SEQ ID NO: 592530 - DNA, 461 bp, Homo sapiens
acaaaaaaattaagtgaaaccaaagtaaaacataaacatatattacttcacaaatagcagaatagcagcacacaaactgctgacttctcaacagaaatcactgtagctggaagactatagaatgatgtctgtgaaccactgaatggggataactgtattataaaaattttacatcaaaattgagagaggtgatattgaaagacccaagttaagaaaaatactaaatactaaatagtactcttcagggaaatgtagaggtataacacaggttatattgattaatctgaattagtctaagtaaatattggctgtaaaacgacaataataatattttggggttttaagtatatagctttgtaaaataacttttaaagagaaagrgttaacaattaataaggtattccacaggccttgaattttccaaaaaaattgtaattttagaaacataacaaatcttaaga

SEQ ID NO: 592531 - DNA, 386 bp, Homo sapiens
aaatcaggtcagggataggattggtggaaaygttcttagggctggctagagtaagtgtaaacaggtcaaaaaataagttaagaagttgaaaaccagaagttcaaggaaggaatcaggagacaagcaaagttaagaatgcctagagggcaatttattacaggaagaaatttggtttcatggagcacaggagataaggtccatatagttaagcacaaatagttcatctattctcctatgcatttgtggagacaaagaagtgatcctgaccctagaaaacaaatcacttgccttcatttatacatatgataatttagaaggaaaactataatactaagtctttcctcatagtttgctcaaagattgtagtttactcattcaaaaataca

SEQ ID NO: 592532 - DNA, 409 bp, Homo sapiens
aaatcaggtcagggataggattggtggaaacgttcttagggctggctagagtaagtgtraacaggtcaaaaaataagttaagaagttgaaaaccagaagttcaaggaaggaatcaggagacaagcaaagttaagaatgcctagagggcaatttattacaggaagaaatttggtttcatggagcacaggagataaggtccatatagttaagcacaaatagttcatctattctcctatgcatttgtggagacaaagaagtgatcctgaccctagaaaacaaatcacttgccttcatttatacatatgataatttagaaggaaaactataatactaagtctttcctcatagtttgctcaaagattgtagtttactcattcaaaaatacatgttgaaatatttatcatttaca

SEQ ID NO: 592533 - DNA, 425 bp, Homo sapiens
tcaagggagaacaaatcaggtcagggataggattggtggaaacgttcttagggctggctagagtaagtgtaaacaggtcaaaaaataagttaagaagttgaaaaccagaagttcraggaaggaatcaggagacaagcaaagttaagaatgcctagagggcaatttattacaggaagaaatttggtttcatggagcacaggagataaggtccatatagttaagcacaaatagttcatctattctcctatgcatttgtggagacaaagaagtgatcctgaccctagaaaacaaatcacttgccttcatttatacatatgataatttagaaggaaaactataatactaagtctttcctcatagtttgctcaaagattgtagtttactcattcaaaaatacatgttgaaatatttatcatttacaagac

SEQ ID NO: 592534 - DNA, 409 bp, Homo sapiens
aaatcaggtcagggataggattggtggaaacgttcttagggctggctagagtaagtgtaaacaggtcaaaaaataagttaagaagttgaaaaccagaagttcaaggaaggaatcaggagacaagcaaagttaagaatgcctasagggcaatttattacaggaagaaatttggtttcatggagcacaggagataaggtccatatagttaagcacaaatagttcatctattctcctatgcatttgtggagacaaagaagtgatcctgaccctagaaaacaaatcacttgccttcatttatacatatgataatttagaaggaaaactataatactaagtctttcctcatagtttgctcaaagattgtagtttactcattcaaaaatacatgttgaaatatttatcatttaca

SEQ ID NO: 592535 - DNA, 425 bp, Homo sapiens
tcaagggagaacaaatcaggtcagggataggattggtggaaacgttcttagggctggctagagtaagtgtaaacaggtcaaaaaataagttaagaagttgaaaaccagaagttcaaggaaggaatcaggagacaagcaaagttaagaatgcctagagggcaattkattacaggaagaaatttggtttcatggagcacaggagataaggtccatatagttaagcacaaatagttcatctattctcctatgcatttgtggagacaaagaagtgatcctgaccctagaaaacaaatcacttgccttcatttatacatatgataatttagaaggaaaactataatactaagtctttcctcatagtttgctcaaagattgtagtttactcattcaaaaatacatgttgaaatatttatcatttacaagac

SEQ ID NO: 592536 - DNA, 409 bp, Homo sapiens
aaatcaggtcagggataggattggtggaaacgttcttagggctggctagagtaagtgtaaacaggtcaaaaaataagttaagaagttgaaaaccagaagttcaaggaaggaatcaggagacaagcaaagttaagaatgcctagagggcaatttattacaggaagaaatttggtttcatggagcacaggagataaggtccatatagttaagcacaaatagttcatctattctcctatgcatttgtggagacaaagaagtgatcctgaccctagaaaacaaatcacttgccttcatttatacatatgataatttagaaggaaaactataatactaagtctttcctcatagtttgctcaragattgtagtttactcattcaaaaatacatgttgaaatatttatcatttaca

SEQ ID NO: 592537 - DNA, 598 bp, Homo sapiens
cacaaactttcttaaaacattatgagtttttttgtgatttttttttttagtagctcataagctatggttagtggtagtgtattttatgtgtgtgtcccaagacaattcttcttccagtgtggcacagggaagccaaaagattgtacacccatgaattagaaagaacaagcatcaggaactgattaaatcattatacaacataggtatgcattaaaacacagcataaaattttttgtgtaccataaatatatacaattgcaatgcrtcaattaaaatgaataaataaaaatacataggtggctggatgctgtgacttatgcctgtaatgctagcactttgggagtccgaggtgggcagattacttgagcccaggagttcgagatcatccttggcaacaaggcaaaacgctatctctacaaaaaatataaaaaattagctgggcatggtgccatgtacctgtagtcccagctacctgtgaggctgagttggaagaatcacctgagcccaggaagtcgaggctgtggtgagccatgatggcaccactgcactccagcctgagagacagagtaagaccctgtccacctcccccatagccccc

SEQ ID NO: 592538 - DNA, 314 bp, Homo sapiens
gtacaaaaagcaaagcaaaggttgatttttggaaattttagaggggtagatatgggcattacataagttgatctcttaatcaattggagatatttaacaataaaataagcagtgtgaagaggtttctatctttggaaatgtataaaggctacagtatgctttggaaggagcacttgagggtggagatgawgacgaataaactaaagaatcacccatttctcttccaacatagactgcgtgattctttaatttccctctccgttttgttttaccagtgtctaagaatctcaagaaacactgattaatcgcttaca

SEQ ID NO: 592539 - DNA, 516 bp, Homo sapiens
tgttggtcatatgtttgtcttctttgaaaaaaatccctattcactgacaccaacaaagattgttattgacattggcaatgccagagcaaagaaacttattgacagctaaagctactgctgtacttctttataatttactcacttctctagctcctcctccaaagccattacctttacagagtttaaatttttggttccacactcttctaattgggagataatgtggaaaaagggccagaggagtaatagcctccctatttttwaaaaaaatttctctgtatctcttaagggtagtcggctgttcagccttccttcttgtattttccttctgggttcgtactcttagattggtttttacacatcgcatatagtgttttcatcctcctcatgtatttcagtaggttcttttgctttcaggattcagaagcattgccaaagacagccaagaagaaggaagctgtagaggtggtttttgtttgtttttgcttttgtggtggagggaaggggcaagagata

SEQ ID NO: 592540 - DNA, 587 bp, Homo sapiens
ggagggtttcctggatgaatagacatttttcctagtcctgaaaaatgagtaagagtcatttagttgagatggcgctamgaatgatggaggaaggaggggaatgttgcaaaaacagagcaagaaaaagggtgaaaaaaataatattatcattcacttagtcatcaagcctgaaaatgaagtcattttgaccaagttttccccattatgctctaaatatgtcaagttcacttatatatatataaactattttaattatatatattcagaagagagtatctggaccttgtctcaagaacctgccagagacttaaaacaattcttggaacagagtatttaaaaatatgtaatttaggctgggcatggttgctcatacctgtaatcctagtactttgagaggccaaggcaagaggagcatcactcgagcccaggaggtccagagcagcctgggcaacatagtggaaacccatctttatttaaaaaaaaaatttagccgtgagtgatggtacatgccttagtcacagctacttgggaggctgaagtggaaggatcccttcaacctgggaggttgaggctgcagtgagccatga

SEQ ID NO: 592541 - DNA, 395 bp, Homo sapiens
agaattctgttagtaagataagtatgggactggagaagtcagctaacctctgcccttccccaatcgtgatatgctcagagaagttaagacttctttctgtgtgagaaatacgggatcttttccactagtcttgcttattatccaagaaattatcatttctagttttagagaatgatgaaactcatttgtgctttgaaatataacctgtatacatgtgcacagtaagtcatttagctatttattgtcagactctgrgagttcatagcaaacttagcaacattccatgtgcaaatttgcatatttttccccccatatcttacctacttgccttaggctgggagtctattttcctacaaaactggtaattgctcttatctctgtgtccttcagtgtgt

SEQ ID NO: 592542 - DNA, 623 bp, Homo sapiens
cacctggccctctaccagatctgtaaacacgcccggcatctactctgataccacccaacgggaggggtgtgacatggggaaagttggagtggaaaaacaaactgggcctgacctattcactgggcctacacwgaaaatatctttctttagaaaattttgcaaaaacatatgaccatgttggctcctgggtgggacccattcaggtgaaaacccctgaggctcaggctttatttgcttcccaggaatcccactcctgcctgggagccttcactgctgaacctgcccgattcctgcccaccctataggtctctttcctcagtgcttcatttcctttttcccttgctcctgaagggtgaagaatgacacatctttgaatcccctggggcatctggaaatctgccctgcacttaataccttctcaacaaatgtttcccaaattcatgtttgtgtatttctgcggggagctgagatagctactcagcaccatgtaaactgtattcaagaaatattgttcaacagtgacaaccctgaaacgctaacatttatgtagtataatcttttgccaggtcccacgctaaggatctaaaaaggtttgtaaaagctttgtttcaaatcatagaagg

SEQ ID NO: 592543 - DNA, 590 bp, Homo sapiens
tttattcaacgtgagctctagcagaataatctgggtcagttatgagttctggatcaagagtttaatttctgctgcgctgtacttttaactatttgtactttgcttcattatttaaaacatgacacagggttttaaagtaaatgtactcactgttgaacttaagtacttcttctgtttcatagaaatgttaatattaaatgttaaaatatatattaattttccctcacatttccctgattttttcaccttattgcatttttttcttatactgctatgtcccataagtttatgtgattttccartttgcttaagtttttgaaaggaagaaacccactgaaaattagctctgttcaaggaaaaattctgaatagtattctttgtcctgtttccaatatgtaaatacttttcttctatttactggcattggttgtattttgatatttgttggtattaatcaaacatttacaccagtaaaagtttgttgctaggctgattctctgccattttcatcccagcttagcaaataaggatgtgcagcaagcattacagaaaatgatttttgtagagtttcttaaaagacatttaaagtt

SEQ ID NO: 592544 - DNA, 599 bp, Homo sapiens
cttcattattataatttagtgatttctagattctttttctagtcattgtttaacatttacataaaagccacacatgtaataatatagctcttttaaaaaattaaagttatcactcttagtggaaataccatttttaggatttattgattaaaattagtaaatgcttagtataaaagaaatcatttacttcattgtggaagctcatccccctctgtgttttctcataacacgtacccagttttcttagcagagtgggaaggaagtggcatttttgtttaatggaaacaatacagtaactatttcctggactgtatttgggtcagatcatttagctgctttccttattactactgttaaaattcctgtgaggtcttcaggaactacaaatggataatttgtctgagccttgacttcactgtgtttatcttctctagaagcatagtgatctaaaatacattgaatcattggtactggtaatttagccattaataattaaaacccttggctgtaatttgttaaagttagtaccatttcttgtgtctggggtggggtgtctgaccactgataatgcccaatrtcctgaaaagtggaactttcaa

SEQ ID NO: 592545 - DNA, 475 bp, Homo sapiens
caaagagaattttgaaactatgaaaagtttacttataaacttttatctcacttacattcacctaattcccttattcttaacagttatgcttgaattgctcatgaaaattttcacaagacattaaacaaaactagtcattatcaggctgggtgtggtggctcacacctgtaatccagcactttgggaggstgaggcaggtggatcacttgaggtcaggagtttgagaccagcctggccaacatgatggaaccccatgtctactaaaaatacaaaaattagtcgggcatggtggcatgcgcttatagtcctagtcactcaggaggcggaggcaggagaatctcttgaaccagggagccggaggttgcagtgagctgagatggtaccaatgcatgccagcctgggcaacagagcaagactctgtctcagaaacaaacaaacaaaaactagccattatcttaagtcatttccctgttaa

SEQ ID NO: 592546 - DNA, 475 bp, Homo sapiens
caaagagaattttgaaactatgaaaagtttacttataaacttttatctcacttacattcacctaattcccttattcttaacagttatgcttgaattgctcatgaaaattttcacaagacattaaacaaaactagtcattatcaggctgggtgtggtggctcacacctgtaatccagcactttgggagggtgaggcaggtggatcacttgaggtcaggagtttgagaccagcctggccaacatgatggaaccccatgtctactaaaaatacaaaaattagtcgggcatggtggcatgcgcttatagtcctagtcactcaggaggcrgaggcaggagaatctcttgaaccagggagccggaggttgcagtgagctgagatggtaccaatgcatgccagcctgggcaacagagcaagactctgtctcagaaacaaacaaacaaaaactagccattatcttaagtcatttccctgttaa

SEQ ID NO: 592547 - DNA, 634 bp, Homo sapiens
gagagaagtcaatacctgatttcaaagtttcaaaggacaggctgactcttttgttaggggctaatgcagctggtgactttatgttgaagccaatgctcactttccgttctgaaaaccctaacaccctaaagaactacgcaaaatctaccctacctgaactgtacaaatggaacaagaaagcctgggtgatagcacatctgtttacagcgtggtttactgaatatcttaagcccattgttgagacctactcgtcagaagaaaagattactttcaaaattactgctcattggcaatgtgcctggtcactcaagagcttcgwtggagatgtgcaagaatatacttgtttttttcatgcctgtgaacacaacatccattctgtaacccactgatcaaggagcaattttgactttcaagtcttattacttaagaaatatatttcacaaagttatagatgtgatagagtgattcctctgatggatctgggaaaagttaattgaaaactattcagaaaagatttacaattattggtgccattagaaactttcttgattcatgagaggaggtcaaaatatcgacatgaagaggagtttggaagatgttaattccaatcctcattggatgactttgaaagctt

SEQ ID NO: 592548 - DNA, 592 bp, Homo sapiens
cacccgtcatctaagaaaccaaaatacttatccaggtggccttaaggcaagcttgtaccccacctataataccatagctgatgctctcttgaaagcaccacctggctggaggccaaccaactcaagccattacagcaactcatagtagaacaatcctgctccaaggaaggagaaaacaacagctaattcctctacctgtaactttttggctaaccagaggtcctgagtctgttcatgttacaacttcaatgctagcacaactagcattcaagaaaaccagcacactaaccaaaactacaaccaaggactctcacagagtctgcttcactcccctgttactcgcactggagcaggtgttggtatccatggctgagagacctgaagatggatcatatatcacaggactcttggatccgaaccaagaagaaatctcttaattgccagaaarggaattcagaaggtcaattagtaggctacttaaggaggcaccaggaaaaggtaaaaaccaacttaaagaactttaaaaactaatacaggttatggatgaaaaaatctccagaggaacagatagcataaataaaaaacaattgca

SEQ ID NO: 592549 - DNA, 661 bp, Homo sapiens
accagagagattttgaggccaagctccaaaactctaagggaaagagaggccagctgctgagaaaatacaggtctctttccaaatcaaagaaagacaatctttccctaactttgatcatgtcacttaatctttcatagtctaagctaaaaaattaatactatttatagagagattcttccaagaaaggggccctatgccttttattttcaagaagtatttcctctataatgggtgtaatgtgcyttctggaggaatggcttatatgtaagaatgatacttcacctatagaccattgtaaaatttcctcaaattcatcacagaagtaaaatgaaagctagggatgatgggtagccagctccacaaaaagagtctttatggtaaaatatattagggaaatgctaaatttgaaaaaaaataaatggtttatttacttcagaacttctgaggttcttaaatataccaatatatgaaatgcagttttacatgagtgatataatttgaagtattatccaaatgtatttgaccactgggacccttttgtacaccataatgttacacaaagtgcattcattctttgcacgttttaaaacctcaatttattatgggacaggaatttgcttaggatggtagaaatctgggagtatgcattgtgttagacaga

SEQ ID NO: 592550 - DNA, 537 bp, Homo sapiens
agagaagtatttagccatttggctctakcagttgtcctgtgcttggtaaaaatacttgccaaattgctcataggagtcaatgtgatttaaactttgccattaaaggcagctatctggaacctgactatcactggggaaatggaggaggatatcactcccattgtacaaggaagacaaaaagtgtttatttcctttcatgttgattaaatttcaaagggaaaggttaaaatggagaatatgaaaaacagaactttggtcccatatgttctcattgccttgtgctgtaaatttgaaaacactatgtgaactggcagcctccaagacctccaatagcaggaactgatataatctaaaattagatattaatggggaaagtttctggggttattcaaaaatgtccttttgtttgttttcttttgtgtcactaagtaaatgttataaattgcaagtcaaaggttctgggatgcttccaaaagacaactccctcttatactgagcacagattctgggataattatggataactaataggaattc

SEQ ID NO: 592551 - DNA, 662 bp, Homo sapiens
tgcctgtagtcccagctacttggcaggctaagatgggagggtcacttgagcctgggaaatcaaggctgcagagagctatgattgcgccactgcacttgagcctgggcaactgagcgtctcaaaaaaaggaaagagtaaatattaaaatattaaatgtcttcaaagcattctaatacagggttcggaagtagagattatcttcagatattcagaatctataacacttcacatgatttggcccttgactagttctctatccttatctcttaccatatttcacttcatgtactctaccaaaatacacagccccttctggaaaatgccaaactatattccgcctctggaccttgcactggctgttcagtctacttagaatcctttgcccccagacacttgtgtgcctgttctgctccctgtcttcatttagccattatttcaaataacctctcgtcataccctatcatctaacccactttattgcatttatttatttatgctacctgattttattgcacattagtttgtctggtattttaaaaatctttaatatctttcacatgaaaatgtcagctccttgaggccagggaagttytactgtcctgttcattgccatatccacactgcttagaagactactcagcacatagaaaacacaccagaaa

SEQ ID NO: 592552 - DNA, 603 bp, Homo sapiens
tgttgcaacaatcagggctgaaattgctgagaaatatgattatgggagttagtaatagaaatgtgttaaagagcaatattttaaaaatcttaaaagagacagaatttgagataggaaaaggcaccctgggaaacagttgtgactcttayccaataatcatatataaaattctatcctaattcataaaaaaaatgtagaaaggtagaaatcaactccaatgaaaaaaatacatatttgtgttacctattagtacataagagctgtttaatgttggcaatgtaaacttgttgcaccatctgaatgtactaacttgaaagagtaaggtttgctttattccctcaagatcaaaagattgctcttaggaagccccaaaaggcatgaactctctggaagaaataccaggcttggagctccctgaagtgtacatttgagcaccattagcaaaggagagatggtttgcctcaagtttcatgggaatatacaaggataaaggtcattgctaaggcagccacaactcaaaccacctagggatagaatgcctgaaatcaaaacctcctataagattggaaacaaaataaagagtaacactgatcacagcctgtt

SEQ ID NO: 592553 - DNA, 532 bp, Homo sapiens
tgatacttagtgtatatctattgatctggcatatatatatatatatatatatatatwtatgtatttatatatatatatatgtatttatatatatatatggcaatccccatcaataaatacaataaataaatcattatgctcttacataggaagggcagcgggctatgatcatggaccaggctatgttaaattgcttgctgtctgtctctttcataatacagtacacaggatgcataatcatctttacattctgcagaatgtcactctgtctacagtgaaagagaatataacattatgcaaattggaccaggtaagtataaagtacaagtattctaagcctagttagacacagtgatattgtgatttataatttaaaaaatatacatttggtctttgtcccatttctggcgcagagtttctaaaacacttagaatttcctaagtgataagagcaataaaggtaaaggagcattttctattattcataataatccctttttaaccacatctgagtttatgttaatgaggtgatt

SEQ ID NO: 592554 - DNA, 577 bp, Homo sapiens
tgggctcaagcaaaacttggacaaaggcaccaccagccataggaatttctggctggaaaagtgacagcctaaggatccaaagacattatgttaaaaagacatttccaggtgtagtagctcacgcctgtaatcccagcactttgggaggccgaggcaggaggatcatgaggtcaggagatcgagatcatcctggccaacatggtgaaaccccatctctactaaatataaaaaaattagctgggtgtggtggcacgtgcctgtaatcccagctactcaggaggctgaggcaggagaatagcctgaatcagggagtcggaggttgcagtgagctgagatcaagccactgcactccagcctgccaacagagcaagactctgtcttgaaaaacaaccaacgaaccaaccaaccaacaacaacaaaaaatttaacttcctcctttactactgtaacatctttttttwaaaaaaaaaaaaaaaaaagaaaaggacatttaacttcctcctttactagtgtaacatcttttgctcactaggatcacctccaatattaaaaagtccaagaaaataaaaagaatgtg

SEQ ID NO: 592555 - DNA, 569 bp, Homo sapiens
ctttgattcacagtatcctagaatattgagattcagataattctgtagtcttaaactatttgaatcccagactcttaaatttctaaggttatagatttatagaatgatgacattctagtctttctttttttttttttttttttttttgagacagagtctccctctatctcccaggctgkagtgcagtggcacaatctcagctcactgcaacctctgcctctcgggttcaagcaattctcctgcctcagcctcctgagtagctgggattacaggtatgcaccaccatgccaggctattttttttttttttttttttttagtagagacgggggtttcaccatattggccaggctggtcttgaactcctgaccttgtgatctgcccgcctcggcctcccaaagtgctgggattacaggcgtgagccaccgcgcccagccaaaattctagtctttttgtcctagaacattaaaattctatgttcaaatcttagatttaattcagataatgttagaatcctggagtttttttgatccaggggaatctggaatgttagaatcttggattcataaa

SEQ ID NO: 592556 - DNA, 546 bp, Homo sapiens
tagaattctttgtcataaatagaaggtaaggaaggaaataaatcctgcacaatgaaaagaaaataatatgtttattgggttggaccacctgaaattgctgatacttgaccctttttgaccttcctaaaacaacttttgcagatggttcagtgtaataaatgttaggtggcctgatgaggcttctgtgtcctcctggctttgaaaagtgagctcagtgaggattagggaggtgttaaaaccatattagcaccatcctgagactttatccttgacaaaatcaggtttaaaagagaactggatgctggttcagcgtctgagtgtgcgatttaacgttacttaaatctcatcyctctaccatctaaaatgatcctgtgctcaccgacaacttctgtccctaactgcaaaccactgagctaatccaactgcttgccctgtagttggggaaactagctagggaggcagagggacctcctgttgtagctaataattaataataacatttcccactgactgagtgctctccatgccacctgctgtgctgcacgg

SEQ ID NO: 592557 - DNA, 455 bp, Homo sapiens
ccttgggctgtgttcagcaaaagggtttactgagctggcaggtccaagatggcctcactcacaggactggctgttgatgggagccttgatgctcttgggctcaccccttatcctccagtaggttagagcttcttacagtggtttcaggcagcatctgaagacagtaaaagcagaagctccaaggcttcttacattctagcctggaaaatcacatcacattgcttccttcatatttttttggcaaatcaggttgcaaggcttgcccagattagggtaaagaggcaaagaggctccttttcttttcttttcttttttyttttttttttttttttgagtcagaatctcgctctgttgcccaggctggagtgcagtggtgcaatctaggctcactgcaagctctgcctcctgggttcacgtcattctcctgcctcaggctcccaagtagctgagactac

SEQ ID NO: 592558 - DNA, 455 bp, Homo sapiens
ccttgggctgtgttcagcaaaagggtttactgagctggcaggtccaagatggcctcactcacaggactggctgttgatgggagccttgatgctcttgggctcaccccttatcctccagtaggttagagcttcttacagtggtttcaggcagcatctgaagacagtaaaagcagaagctccaaggcttcttacattctagcctggaaaatcacatcacattgcttccttcatatttttttggcaaatcaggttgcaaggcttgcccagattagggtaaagaggcaaagaggctccttttcttttcttttctttttttttttttttttttttttgagtcagaatctcgctctgttgcccaggctggagtgcagtggtgcratctaggctcactgcaagctctgcctcctgggttcacgtcattctcctgcctcaggctcccaagtagctgagactac

SEQ ID NO: 592559 - DNA, 455 bp, Homo sapiens
ccttgggctgtgttcagcaaaagggtttactgagctggcaggtccaagatggcctcactcacaggactggctgttgatgggagccttgatgctcttgggctcaccccttatcctccagtaggttagagcttcttacagtggtttcaggcagcatctgaagacagtaaaagcagaagctccaaggcttcttacattctagcctggaaaatcacatcacattgcttccttcatatttttttggcaaatcaggttgcaaggcttgcccagattagggtaaagaggcaaagaggctccttttcttttcttttctttttttttttttttttttttttgagtcagaatctcgctctgttgcccaggctggagtgcagtggtgcaatctaggctcactgcaagctctgcctcctgggttcacgycattctcctgcctcaggctcccaagtagctgagactac

SEQ ID NO: 592560 - DNA, 350 bp, Homo sapiens
ctgccagagcctgagagctttctcctgcccacaggctaggggtagggcagttggaattgatccatgccttctagctagactgtgggtcccctcagtcttgggcatggtgacagcccagcatcagacagaggtcagtatcaaactagaaaatttaataaatrctgtcagatttgtagacccaagaaaatataaactgccaatcacggaggaaaaaaatctctcaatgatcttatctttatatgattcccttgctgcctggagattgacatttccttggggataatctggtcataggattggtgaaggtggaagggaggcaacctccaaaggtggggccctctgctcacctg

SEQ ID NO: 592561 - DNA, 405 bp, Homo sapiens
aaatttaataaatactgtcagatttgtagacccaagaaaatataaactgccaatcacggaggaaaaaaatctctcaatgatcttatctttatatgattcccttgctgcctggagattgacatttccttggggataatctggtcataggattggtgaaggtggaagggaggcaacctccaaaggtggggccctctgctcacctgggacagggagggcctgaggtaggtgtctgtgtgggctggggaggaggatgggagcagtgcttctagatgtttccactttctcctcattagataataacgaatgggtgatttccctagtcactgcagtgtgaggaaatctacaaaattaatttcacaatacrctttacaggataggtggagaaacacatgaagtacaactgca

SEQ ID NO: 592562 - DNA, 551 bp, Homo sapiens
gttgtactatgcaatttgtttaccattattactcttrgtatttttaagaaaagtctttccattgttattataaatgcttctattgatatttattttaataactgttattacagtccgtcatgtacatacactatacttaaacctaatgtttggtatttaaatcgtttcaagattttatcactgtcaacaaagtatgatgaatatttttatgctgaaaacttctgtaaaaatagaattccaagagtattattgcaccaaaaggcatggacttaaaattcttgatacatgatttcaaaatattttctttaaggtttgaatcagtctatattccctccagcagcgtataaaagtgccaatttctctgatccttagccagtttgggtaataataattgtaaaacttttttttctttttttttgagacagagtctccctctgtcgccaggctgaagtgcagtggcgcaatctcggctcactgcaacctccgcctcccggggtcaagctattctcctgcctcagcctcccaagtagctgggactacaggcatgcacc

SEQ ID NO: 592563 - DNA, 586 bp, Homo sapiens
tttcacttttctgcaaaataattaatacattattaaattgaattgtgctgatgccacagttgttcttatctcaagtgtcttaaaattcatttaatttktttttcctttggtttcattattcaaattttaacttcagttctcaagattttatctgatggaagagatggagtccattactaaggactccattgtgctccatcatgccagagttgtaaaatagatcttttaaaggaaatttactgtgattttttttctatttaagagcttcctctccagttgagcatgtaagaaaattataccaggagaatacagtaaactctatgaggcaagctataaacatgtagcattgtgattagggctggttctccttctagagacatggtaggattgcaatttcataccatccttgaagttagagagagccacgtgactcatttagccaatgaactgtgagcagaatgacatgtcacttccagctgaagctttaacaatctgagagacattcatacattttccatgtgctgtagccttatacccaaagcctgggtcccaagtgaccatgacaggcagagctccctgttgagcc

SEQ ID NO: 592564 - DNA, 562 bp, Homo sapiens
gattgcaatttcataccatccttgaagttagagagagccacgtgactcatttagccaatgaactgtgagcagaatgacatgtcacttccagcwgaagctttaacaatctgagagacattcatacattttccatgtgctgtagccttatacccaaagcctgggtcccaagtgaccatgacaggcagagctccctgttgagccacagagatttagagaatggctgttaacacagcataatccagcccatcctgactaatctgatattaacatgtataataaagaattctatcaatgctgagggaagatgactagttaaggtcctaggttgcaagtctcaaaacctcttctaaggattgtagacaggaaattaaatgacttctagtccctagagttcccaatctcctaccatcccatcctaatatgacagaagtaattcctgagttgcttctgaaaccagagcttccctcagaacccttagcctgccagatggcttcttggagagccctcactcacttttctccttctgctattgctgctcattcattccagtttttaaaaattc

SEQ ID NO: 592565 - DNA, 575 bp, Homo sapiens
ggattgcaatttcataccatccttgaagttagagagagccacgtgactcatttagccaatgaactgtgagcagaatgacatgtcacttccagctgaagctttaasaatctgagagacattcatacattttccatgtgctgtagccttatacccaaagcctgggtcccaagtgaccatgacaggcagagctccctgttgagccacagagatttagagaatggctgttaacacagcataatccagcccatcctgactaatctgatattaacatgtataataaagaattctatcaatgctgagggaagatgactagttaaggtcctaggttgcaagtctcaaaacctcttctaaggattgtagacaggaaattaaatgacttctagtccctagagttcccaatctcctaccatcccatcctaatatgacagaagtaattcctgagttgcttctgaaaccagagcttccctcagaacccttagcctgccagatggcttcttggagagccctcactcacttttctccttctgctattgctgctcattcattccagtttttaaaaattcatctttatccag

SEQ ID NO: 592566 - DNA, 541 bp, Homo sapiens
taggattgcaatttcataccatccttgaagttagagagagccacgtgactcatttagccaatgaactgtgagcagaatgacatgtcacttccagctgaagctttaacaatctgagagacattmatacattttccatgtgctgtagccttatacccaaagcctgggtcccaagtgaccatgacaggcagagctccctgttgagccacagagatttagagaatggctgttaacacagcataatccagcccatcctgactaatctgatattaacatgtataataaagaattctatcaatgctgagggaagatgactagttaaggtcctaggttgcaagtctcaaaacctcttctaaggattgtagacaggaaattaaatgacttctagtccctagagttcccaatctcctaccatcccatcctaatatgacagaagtaattcctgagttgcttctgaaaccagagcttccctcagaacccttagcctgccagatggcttcttggagagccctcactcacttttctccttctgctattgctgctc

SEQ ID NO: 592567 - DNA, 517 bp, Homo sapiens
ctagagacatggtaggattgcaatttcataccatccttgaagttagagagagccacgtgactcatttagccaatgaactgtgagcagaatgacatgtcacttccagctgaagctttaacaatctgagagacattcatacattttccatgtgctgtagccttatacccaaagcctgggtcccaagtgaccatgacaggcagagctccctgttgagccacagagatttagagaatggctgttaacacagcataatccagcccatcctgactaatctgatattaacatgtataataaagaattctatcaatgmtgagggaagatgactagttaaggtcctaggttgcaagtctcaaaacctcttctaaggattgtagacaggaaattaaatgacttctagtccctagagttcccaatctcctaccatcccatcctaatatgacagaagtaattcctgagttgcttctgaaaccagagcttccctcagaacccttagcctgccagatggcttcttggagag

SEQ ID NO: 592568 - DNA, 587 bp, Homo sapiens
cctcactcacttttctccttctgctattgctgctcattcattccagtttttaaaaattcatctttatccaggaacctcgcttctagaaaagtcatacaggtgcttccaggaggctacatgggcacccatatttttctagccactttcattagaccaatgcagcagagaagaaaagcctcaataattattatgacatggcatgttaggataccaagtaaattgcatttgtaaaatgtgattttctgttggtgttcacttcagctctactgacatttggtaagtattattgactgactgactaactaatgtggtcattagtcttcataaagaaaggctctctacaaaaacggagggatgccctttttctggcatttaatacgtaagaaattgcctccratagaaaccagagttgcctgattactatcagcacaggagaaatgtattaatgtgcctttctagtaacaggtttttagaaagtcaaatataaacaaatctgtctatttgtgtgtgtgcatgtggtagtggggagggaagaaaaaaggagggggagagaaagagaaataagaaccaagtttattatactgtat

SEQ ID NO: 592569 - DNA, 551 bp, Homo sapiens
gttgtactatgcaatttgtttaccattattactcttggtatttttaagaaaagtctttccattgttattataaatgcttctattgatatttattttaataactgttattacagtccgtcatgtacatacactatacttaaacctaatgtttggtatttaaatcgtttcaagattttatcactgtcaacaaagtatgatgaatatttttatgctgaaaacttctgtaaaaatagaattccaagagtattattgcaccaaaaggcatggacttaaaattcttgatacatgatttcaaaatattttctttaaggtttgaatcagtctatattccctccagcagcgtataaaagtgccaatttctctgatccttagccagtttgggtaataawaattgtaaaacttttttttctttttttttgagacagagtctccctctgtcgccaggctgaagtgcagtggcgcaatctcggctcactgcaacctccgcctcccggggtcaagctattctcctgcctcagcctcccaagtagctgggactacaggcatgcacc

SEQ ID NO: 592570 - DNA, 528 bp, Homo sapiens
gaattccttgaacccagaaggtggaggttgcagtgagctgagattgcaccactgcactccagcctaggtgacacagcaagactctgtcaaaaaaaaaaaaagaaatccaaataaaatttccagaatatgtggaaaatagtgacaataaaaatattacacatgtgtaatcccagcattttgrgatgccaaggtggcaggatcacttgagaccaggagttcgcaaccagcctggacaacatagggagactccatctccacacacgccaaaaaaaattttaaatagccaggtatagtggtacttcctgtaatcccatctacttgggaggctaaggtgggagaatcacccaacctcaggagttcagggcttcagcaagccatgatcatatcactgcactccagcctcagcaacagagcaagatcctatctcaaaaaaaaaaaaaaaatcacatgtgggaaatagctatagcacaataaaaataaatgtattaagtatgaacaacaaaaaagctagtaaaggttgaacaacaa

SEQ ID NO: 592571 - DNA, 528 bp, Homo sapiens
gaattccttgaacccagaaggtggaggttgcagtgagctgagattgcaccactgcactccagcctaggtgacacagcaagactctgtcaaaaaaaaaaaaagaaatccaaataaaatttccagaatatgtggaaaatagtgacaataaaaatattacacatgtgtaatcccagcattttgagawgccaaggtggcaggatcacttgagaccaggagttcgcaaccagcctggacaacatagggagactccatctccacacacgccaaaaaaaattttaaatagccaggtatagtggtacttcctgtaatcccatctacttgggaggctaaggtgggagaatcacccaacctcaggagttcagggcttcagcaagccatgatcatatcactgcactccagcctcagcaacagagcaagatcctatctcaaaaaaaaaaaaaaaatcacatgtgggaaatagctatagcacaataaaaataaatgtattaagtatgaacaacaaaaaagctagtaaaggttgaacaacaa

SEQ ID NO: 592572 - DNA, 528 bp, Homo sapiens
gaattccttgaacccagaaggtggaggttgcagtgagctgagattgcaccactgcactccagcctaggtgacacagcaagactctgtcaaaaaaaaaaaaagaaatccaaataaaatttccagaatatgtggaaaatagtgacaataaaaatattacacatgtgtaatcccagcattttgagatgccaaggtggcaggatcacttgagaccaggagttcgcaaccagcctggacaacatagggagactccatctccacacacgccaaaaaaaattttaaatagccaggtatagtggtacttcytgtaatcccatctacttgggaggctaaggtgggagaatcacccaacctcaggagttcagggcttcagcaagccatgatcatatcactgcactccagcctcagcaacagagcaagatcctatctcaaaaaaaaaaaaaaaatcacatgtgggaaatagctatagcacaataaaaataaatgtattaagtatgaacaacaaaaaagctagtaaaggttgaacaacaa

SEQ ID NO: 592573 - DNA, 631 bp, Homo sapiens
tttttttttgtatgtttgttggctgcatgcatgtattcttttgaaaagtgtctgttcattccctttgcccaattttaatggggttgattgtttttcttttgtaaatttctttacatttgaaatgtttttattattaagttgagctgcctcattcttagtatggtttttcactttaaaaagcataaaggtggacatggtggcrtatgctagtaatcccaactactggggagactaatacaggagggttgcttgagcccaggagttcaaggctataatgtgctatgatcatgactgtgaacaaccactgtactgcagcctgggcagagtgacatagtgaaaccatatctctaaaaaaagagaaaatgtaatttaaatatttaaatacatatgtatatgtgtgtatatatgtatatatattgcatatatcaaaaatggtttgtagtttccattcacagcacatagtaaaatgtcttaacctcctcgctcctccctatgtgtgtttttctaagtgtgtgtcttttttaccttaatttttctcttagtgtctcatagtcttctaaggtctccctctttcttctgtctttcacacacacacacacacacacacacacacacacacacacgcatacac

SEQ ID NO: 592574 - DNA, 631 bp, Homo sapiens
tttttttttgtatgtttgttggctgcatgcatgtattcttttgaaaagtgtctgttcattccctttgcccaattttaatggggttgattgtttttcttttgtaaatttctttacatttgaaatgtttttattattaagttgagctgcctcattcttagtatggtttttcactttaaaaagcataaaggtggacatggtggcatatgctagtaatcccaactactggggagactaatacaggagggttgcttgagcccaggagttcaaggctataatgtgctatgatcatgactgtgaacaaccactgtactgcagcctgggcagagtgacatagtgaaaccatatctctaaaaaaagagaaaatgtaatttaaatatttaaatacatatgtatatgtgtgtatatatgtatatatattgcatatatcaaaaatggtttgtagtttccattcacagcacatagtaaaatgtcttaacctcctcgctcctccctatgtgtgtttttctaagtgtgtgtcttttttaccttaatttttctcttagtgtctcatagtcttctaagrtctccctctttcttctgtctttcacacacacacacacacacacacacacacacacacacacgcatacac

SEQ ID NO: 592575 - DNA, 452 bp, Homo sapiens
gaactgagaccaaatacttaaagaaggcagttctttgaagagttgatgggaaagtattccaagaagtgggaatggcaaggggaaaggacttaagatgtaacctcagaatgattaaggaggagcatggtacaagaggatgtcagaaacatagccaggaaagagagctatgcttaagtattaggattttattctttgcaaagaaaaagcccattgaagctttaaagcaaggmcctaagagttaacataatttttttaaggtaccttaaaaattttgctgaatgaagaattcattgaagtgagtcaggaatgtatgattttggacaactgacacaatgcctgaggcatagtttcttcatatggaaattggagacaatgatcatatctaccttagcagattatataatgaattattttcctagggctcctgtaataaggtaccacaaactgggtaa

SEQ ID NO: 592576 - DNA, 481 bp, Homo sapiens
gtgagtcaggaatgtatgattttggacaactgacacaatgcctgaggcatagtttcttcatatggaaattggagacaatgatcatatctaccttagcagattatataatgaattattttcctagggctcctgtaataargtaccacaaactgggtaacttaagcaacagagatttattgcctcacaattctagaggtgagaagtccagatcaagaagctggcagggctaggctgcctgaaaaggtgctaaggaaggaactgttccagtcctctttctctccttccagtagttccttggcttgtgacagcacagtgtcaattctcatatggcatcctccccgtgtgcctctctctatgtccaaatctcccttttatttaaggacagagtcacagtggattagaacatccccataacatgaagattgcatgaaattatatacataaataactcaacaacatagcttccaaatagaaaacactc

SEQ ID NO: 592577 - DNA, 481 bp, Homo sapiens
gtgagtcaggaatgtatgattttggacaactgacacaatgcctgaggcatagtttcttcatatggaaattggagacaatgatcatatctaccttagcagattatataatgaattattttcctagggctcctgtaataaggtaccacaaactgggtaacttaagcaacagagatttattgcctcacaattctagaggtgagaagtccagatcaagaagctggcagggctaggctgcctgaaaaggtgctaaggaaggaactgttccagtcctctttctctccttccagtagttccttggcttgtgacagcacagtgtcaattctcatatggcatcctccccgtgtgcctctctctatgtccaaatctcccttttatttaaggacagagtcacagtggattagaacayccccataacatgaagattgcatgaaattatatacataaataactcaacaacatagcttccaaatagaaaacactc

SEQ ID NO: 592578 - DNA, 490 bp, Homo sapiens
gctattctggccacagttactgccaagaaacaaggtgttagaaaaggcctaaagttaagtgcagaactgctgtgttttgatgaatattccgttgttttgagaggaggtagaagcattctcagcttcaggatatttgctcactactcattagtctctctgagaagtagcaaacttcaaaggttaaatatgaagagatgaattgtgtaatgcctagatgtcagtagcggagaaggtatctragcaaattcagaattttatccctgtctccatgggcctagtgtgaagaacagtcatttgtgtaagtgggtctttgtgtatatggtagtgaatcaggtcactgagtcagaaacttagagctgtaaggaaagtgaggtgctctccagtccagtgttctggaatttcttctgcagtggcccccaacagcaggtggcagcctcgtccatgattctattcttaagtgacatggtattactctttgtatttgcaatcc

SEQ ID NO: 592579 - DNA, 580 bp, Homo sapiens
taagtgctctgctatggtttaaatgtgtcccccaaagtttatgtgctggaaactcaatcctcaatgcaacagttgggatgtggggcctaataaaatagccttcatgaatgagttaatgttgttattgtggtaatagattagtaatcacagagtgggcttattataaaacagagttcagccccttttgccctcttgctttcttgcactctcttttccttctgccttctgtagtgggatgatgcagcaagaagaccyttaccagatgcaggcccctcaaccttggacttcctaacatccagaactgttaagaaataaaatttattcctttcctttccttttcttcctcctttcccttctcttcccttttcttcccttcccctccctccctctctctctccctccctccctccttccctcccttcctccttccctctttctctctttcccttccttcctttccttctttcccttccttcctttccttccctccttccctttttccctccttccctcctcccttccttttttctttccttccttttttcctttttataaattatgcagtctgtggtattctttt

SEQ ID NO: 592580 - DNA, 428 bp, Homo sapiens
gttaatgttgttattgtggtaatagattagtaatcacagagtgggcttattataaaacagagttcagccccttttgccctcttgctttcttgcactctcttttccttctgccttctgtagtgggatgatgcagcaagaagacctttaccagatgcaggcccctcaaccttggacttcctaacatccagaactgttaagaaataaaatttattcctttcctttccttttcttcctcctttcccttctcttcccttttcttcccttcccctccctccctctctctctccctccctccctccttccctcccttcctccttccctctttctctctttcccttccttcctttccttctttcccttccttcctttccttccctccttccctttttccctccttccctcctyccttccttttttctttccttcct

SEQ ID NO: 592581 - DNA, 568 bp, Homo sapiens
ctcaaactcctggcctcaagtaatatacctctctcagcctcccaaagtgctgagattacaggcataagccaccaccctcaaccaagactttcttaaaccaaataaaaattaagtgagattacttgagcccaggtggtcaaggctgcagtgagcctgattgcaccactgcactccagcctaggtgacagaatgagactgtctcaaaaaataaaataaaatacaaattaacccttyatgacattcccagtaacttcctaagtgctccccacaagtctttgaattctgtttaattctcacataacatttaagacatttaagaacttatgtctgtctgtgtcatccctttatgtcaaaagatgtctttttgtcacttccagctggatctaccatgaaagacttgtgaatccaggaagagagactgactgggcaacatgttattcaggtacaaaaagatttggactgtaacttaaaaatgatcaaattatgtttcccatgcatcaggtgcaatgggaagctcttctggagagtgagagaagcttccagttaaggtgacattgaagccaagtcc

SEQ ID NO: 592582 - DNA, 520 bp, Homo sapiens
gtgagttcaggctgaaacctgtttgagagctggattctggctataaactccacagggaacattttctctctccactcagagctgagaccatagggaaatttatttgctagctcactttgaaggtttattttatttattttttaaatttctagtacacgtgctcactgaaggtgtaatacttatgtgagaatctcaaaatcagttgtgttctttgtatgaccctggttttgtttcctcctgctctcttactttcagtgtgtctcagtatgtctgctcaatatgtcatcttaaatttcaactgagggtggatcttcttcccagctcactcacatggttcttagctagattcagtttctctccatttgtaggactgaggacctcagttcttcacttagggttggctacaggtaatcgtcaatttcttgtaacaggacttacactgtgccactgacagcatgccagttggcttcattcaaatgagagggcaagagaragagagagagggagagggcacaagatg

SEQ ID NO: 592583 - DNA, 565 bp, Homo sapiens
tagcttctgtatttaagccatattagacctttcttcagttttttatatagactttgtcgcatcacacctcagagattctgtacatgttcttcctcctgcctagaaaggatcgtccctccactttygccaactaatccctgctcaacttttcatctcagcaggaggcccattctctttggcaatcctctggcctccagcccatttattatatgctcacatgtcaacatgtacttcgtacagcatgtaacacaattgcacttttatattttaacaaattatatttcccatattgaactgtaagtctcctgaaagcaggaattttgttcttgctcatcatcaactttttcaacatccagtgcaccatttagaacttagatgtagtcaatacaggtttgtggaatgaaagaggaaaagaaagaattaatattcctttaaattaggatggcaaagatcgtatatagaaaattggctaagttgtggtccattcatgtttgctcccaattaaggagcacagctatgaaaaggaaggcttcaaattaataaccaatagatttttttaaaaaga

SEQ ID NO: 592584 - DNA, 638 bp, Homo sapiens
acaactatttgaggtgatggataygctaattatccttatttgatcactgggcattgtatacatgtatcaaaatatcactctgtatcccatgaatatgtacaattatttgtctcaaaaacaaacaaaaaaaagataatgggagaatgttgaaaactcagagagaagagcaactctcacagatagggatccagataacattagcagctgatttctcagcagaaaccttgaaggccagtaggcagtggattatatatttaaaataatgaagaaacctgtcaattgagaaatatatagctggaaaacttatccttcaaaaatgaaggagaaattaagacatttccggatttttttttaaaactgaaaaaaatccatttatccctgaatttgacattcaggaagtgttaagtccttcaggttgaaataaatgaactctaggcaataactatataagtaaataagcaagctgtatgaatatacaaagctctctggtaaaggtaaatacataaacaaacataaaaacagtcctattgtaattttggtttgtaactctgctttttattttctacataatttaaaaggcaaatgcataaaatgtaattgtaaatctgttagctggtatacaatgaataaagatataa

SEQ ID NO: 592585 - DNA, 638 bp, Homo sapiens
acaactatttgaggtgatggatacgctaattatccttatttgatcaytgggcattgtatacatgtatcaaaatatcactctgtatcccatgaatatgtacaattatttgtctcaaaaacaaacaaaaaaaagataatgggagaatgttgaaaactcagagagaagagcaactctcacagatagggatccagataacattagcagctgatttctcagcagaaaccttgaaggccagtaggcagtggattatatatttaaaataatgaagaaacctgtcaattgagaaatatatagctggaaaacttatccttcaaaaatgaaggagaaattaagacatttccggatttttttttaaaactgaaaaaaatccatttatccctgaatttgacattcaggaagtgttaagtccttcaggttgaaataaatgaactctaggcaataactatataagtaaataagcaagctgtatgaatatacaaagctctctggtaaaggtaaatacataaacaaacataaaaacagtcctattgtaattttggtttgtaactctgctttttattttctacataatttaaaaggcaaatgcataaaatgtaattgtaaatctgttagctggtatacaatgaataaagatataa

SEQ ID NO: 592586 - DNA, 507 bp, Homo sapiens
aaaatgtaattgtaaatctgttagctggtatacaatgaataaagatataatttgtcacatcaataacataaaaagagtagagctatatatatagcagtagaattttggtatgtgattgaacttaagttgaaataaattcaaattaaaatgttataactctaggatgttatatgtaattctcatagtaaccaaaaatgaaatatayatagaatataaacaaaaggaaatgagactagaaacaaaatgtgtcactacaaaaaaatcaactaaagataaaaaagaaataattgagaaaatgattggcaaaaatcagtaactctgacgtattaaaactttccatgctacataaatctgaaaactctatttcacataaaactggagctgaaagaaacaaatatttacctataaagttaaaagttatatagggaacaaacactaattttttttagaaaaaattataaaaagagtaaaaatatgccttatactaccgtaatttcatgttttaca

SEQ ID NO: 592587 - DNA, 425 bp, Homo sapiens
agttaaatgctacaaagacaaactcacaggaagatgggatgtagaatgataaggctctcagaatagtaagagaaactattgcttcttacgatgtttgtctttctttgtatcggtgctcagctgagtctgcagtgcttcagaggcagctttcattttataaaaatctatgatttctccttccagttkttttttctcttcctcgagcttccttatctcctcctgttgaatcattttaagatgctcgaacttgtcctgcagctgtgaaaccaatgtgcagttgtgacaccaaagcagtgtggctgaacacctaaaagaatacgctttttttctgattatcaaacaaacccaaatcatcacagtagaccacgatcttaataacaatctcaaaaactcaggagtaaacactcagatatggaatttttctt

SEQ ID NO: 592588 - DNA, 563 bp, Homo sapiens
cggttttgccatgttgcccaggctggactcgaactccttgcctcaagtagtccacctgtctcagccccgcaaagtgctgstattataggagtgagccactgcacccagcatttgccaagacctttgatggcaggctttttccaggtgatcagtccttgtctggtctggctctgccccactctccttctcacctagttggaatccctagctacttttcagtagaggagagtgtgtaccccaatcccagcttggttcagatctgcatttaactcatggaacctggctgctccccaggttctgaagaaaaaaacggtctctctgtgggtatgataaaggatgggcctgtccccaggaccctgtgagagggaagcccaatgtcccaccaggttggcagggctggggaagggaaagtgttatggcagccccaagaaaaaaaagaggcagcagagggagcaggagagcgctcacatggaactcatgccactgcctgaggggagggaggagtgcacgccagtgacgtcagggggcagagaggcgcagttccagggcggctttccccctca

SEQ ID NO: 592589 - DNA, 563 bp, Homo sapiens
cggttttgccatgttgcccaggctggactcgaactccttgcctcaagtagtccacctgtctcagccccgcaaagtgctgctattayaggagtgagccactgcacccagcatttgccaagacctttgatggcaggctttttccaggtgatcagtccttgtctggtctggctctgccccactctccttctcacctagttggaatccctagctacttttcagtagaggagagtgtgtaccccaatcccagcttggttcagatctgcatttaactcatggaacctggctgctccccaggttctgaagaaaaaaacggtctctctgtgggtatgataaaggatgggcctgtccccaggaccctgtgagagggaagcccaatgtcccaccaggttggcagggctggggaagggaaagtgttatggcagccccaagaaaaaaaagaggcagcagagggagcaggagagcgctcacatggaactcatgccactgcctgaggggagggaggagtgcacgccagtgacgtcagggggcagagaggcgcagttccagggcggctttccccctca

SEQ ID NO: 592590 - DNA, 517 bp, Homo sapiens
ggatgggcctgtccccaggaccctgtgagagggaagcccaatgtcccaccaggttggcagggctggggaagggaaagtgttatggcagccccaagaaaaaaaagaggcagcagagggagcaggagagcgctcacatggaactcatgccactgcctgaggggagggaggagtgcacgccagtgacgtcagggggcagagaggcgcagttccagggcggctttccccctcacttcctgccatgttactctgatcgcctccasgtgagcctgcccactttgtgcccaggggcctgtagaaaaccacagctccccatggttatggccccaggagtggggcagagcagggaggagtcctgcacagaggagaggcaggggcaggagggagtgggcctcaaactccaggagggggcccttctcatgggtcctgctttctggcttctccttccttacccctgggctgatcacttggggaagaactgagacaaagtttctcaccctcaggcccaaagggtttaatt

SEQ ID NO: 592591 - DNA, 517 bp, Homo sapiens
ggatgggcctgtccccaggaccctgtgagagggaagcccaatgtcccaccaggttggcagggctggggaagggaaagtgttatggcagccccaagaaaaaaaagaggcagcagagggagcaggagagcgctcacatggaactcatgccactgcctgaggggagggaggagtgcacgccagtgacgtcagggggcagagaggcgcagttccagggcggctttccccctcacttcctgccatgttactctgatcgcctccacgtgagcctgcccactttgtgcccaggggcctgtagaaaaccacagctccccatggttatggccccaggagtggggcagagcagggaggagtcctgsacagaggagaggcaggggcaggagggagtgggcctcaaactccaggagggggcccttctcatgggtcctgctttctggcttctccttccttacccctgggctgatcacttggggaagaactgagacaaagtttctcaccctcaggcccaaagggtttaatt

SEQ ID NO: 592592 - DNA, 591 bp, Homo sapiens
gttttaaagctaacagaaatcactgaattactaagtcattagcactaattttgagccaactaactaattaatatgagatgatacaatgtcctatactttggtaaatacagactatgtttaaacaatgtctgtaacgtgacttgtaaaatgctcctggctttacaaagatgtgattaagatgtagtaacacatgctaaaccatttccccctgcagagcatgtggtaactttcatcagtcacactgagagtmcagaagataaaggaaaaggtcatggatttcgctgagaacttaccagagttgaactccctcattttccgttccccagcattggcaggttctgggactggtggctgtggtggctcgttggtctttgtctcttagaaggtggggaataatcatcatcttgaaaaagaaaaaatggtcattactgaaggaaccatcttaggttacagccacctctgggtcaattcccaacattcaaaagctgagcagggctttaaagctatcttattaataattatttctgtattgcgaacttcagcatacttttttctagttacatttgaaatgttattcttttgggatgtgct

SEQ ID NO: 592593 - DNA, 591 bp, Homo sapiens
gttttaaagctaacagaaatcactgaattactaagtcattagcactaattttgagccaactaactaattaatatgagatgatacaatgtcctatactttggtaaatacagactatgtttaaacaatgtctgtaacgtgacttgtaaaatgctcctggctttacaaagatgtgattaagatgtagtaacacatgctaaaccatttccccctgcagagcatgtggtaactttcatcagtcacactgagagtacagaagataaaggaaaaggtcatggatttcgctgagaacttaccagagttgaactccctcattttccgttccccagcattggcrggttctgggactggtggctgtggtggctcgttggtctttgtctcttagaaggtggggaataatcatcatcttgaaaaagaaaaaatggtcattactgaaggaaccatcttaggttacagccacctctgggtcaattcccaacattcaaaagctgagcagggctttaaagctatcttattaataattatttctgtattgcgaacttcagcatacttttttctagttacatttgaaatgttattcttttgggatgtgct

SEQ ID NO: 592594 - DNA, 592 bp, Homo sapiens
cgcctaaagttatacaaatatagaagaaacgggataaaataaagcttagattggaaaaaatatttaagattctacaaaattcacgcgtaaacaagggaagctgagtaattgtatgttcaaatacttttaacaagtgcaaaacatgtaggcttaaagaaatagagctggccaggcatggtggttcaygcctgtaattccaacagtttgggaggccaaggcaggcagataacttgaggtcaggaattcgagaccagcctggccaacagagtgaaaccctctctctactaaaaatacaaaaattaggccaggagtgatggctcacgcctgtgatcccagcactttgagaggccgaggcgggtagatcacctgaggtcaggagtttgagaccagcctaaccaacatagggaaaccccgtctctactaaaactacaacattagccgggtgtggtggcacatgcctgtaatcccagctactcgggaggctgaggcaggagaatcccttgaacccaaaaggcaaagattgtggtgagccgagattgtgccattgcactccagcctgggcaaaaacagcgaaatccgtctcaaaaaaaaa

SEQ ID NO: 592595 - DNA, 383 bp, Homo sapiens
attttttttttgtcaggtacctcactagttatttttaaaataggattgcatgttgaaatgataatcttttggatatattgggttaaataaatttattattaaagttaatttcacttaaaaatgtttaatgtagctactagaaattttaaaattaagcatgttgctcaccttatgtttctattggacggctctctctagatacaaaggctgccaagagggacctcactctagcttcagggagaagagaggaattagcaaggccaagcagaggctcctgagggcagggccaagggcggcttggtggggtggggatgggatgcacaragataactccaacccttaagaaggtgtttcctagagcaggctgtgacctgtcagtttat

SEQ ID NO: 592596 - DNA, 567 bp, Homo sapiens
ctgcctgcatcacctcaagtctctggggtgaaatccactaatgaattccttttgcagcttaagccaattccaatcttgagccaatctcaggtgaagaagcctgtaaattatcactctcagtcctctcttgtactactaggtctcatgaactcttcattaacaactccagcttctctgttagcccaaaagccttttgctgcctagaaaacccatgattcatgcctcaggaaacagccttcaaatcacaacatgttctgtatctggctggccaactccctgcaacttatttctgcctagatkctccctcattcatttcaatacgctgttcggcctgctaccccagtttcccacttagaacaatggcacacaggacaggagcacattggcacatcagaatgacttatgtactgctcattgtgttgcagaagagacctctgtgggggcaatagaacagattttcctctcacgtcactgtagttgtggtttccctaagcacctacactgtttcacctcatcttaggtagacaataatccatgtaactgactgtgtatcctaattttaaaaaa

SEQ ID NO: 592597 - DNA, 567 bp, Homo sapiens
ctgcctgcatcacctcaagtctctggggtgaaatccactaatgaattccttttgcagcttaagccaattccaatcttgagccaatctcaggtgaagaagcctgtaaattatcactctcagtcctctcttgtactactaggtctcatgaactcttcattaacaactccagcttctctgttagcccaaaagccttttgctgcctagaaaacccatgattcatgcctcaggaaacagccttcaaatcacaacatgttctgtatctggctggccaactccctgcaacttatttctgcctagattctccctcattcatttcaatacgctgttcggcctgctaccccagtttcccacttagaacaatggcacacaggacaggagcacattggcacatcagaatgacttatgtactgctcattgtgttgcagaagagacctctgtgggggcaatagaacagattttcctctcacgtcactgtagttgtggtttccctaagcacctacactgtttyacctcatcttaggtagacaataatccatgtaactgactgtgtatcctaattttaaaaaa

SEQ ID NO: 592598 - DNA, 236 bp, Homo sapiens
gtggggtcccctacgagggaccaggagctccgggcgggcagcagctgcggaagagccgcgcgaggcttcccagaacccggcaggggcgggaagacgcagsagtggggaggcggaaccgggaccccgcagagcccgggtccctgcgccccacaagccttggcttccctgctagggccgggcaaggccgggtgcagggcgcggctccagggaggaagctccggggcgagcccaagacg

SEQ ID NO: 592599 - DNA, 236 bp, Homo sapiens
gtggggtcccctacgagggaccaggagctccgggcgggcagcagctgcggaagagccgcgcgaggcttcccagaacccggcaggggcgggaagacgcaggagtggggrggcggaaccgggaccccgcagagcccgggtccctgcgccccacaagccttggcttccctgctagggccgggcaaggccgggtgcagggcgcggctccagggaggaagctccggggcgagcccaagacg

SEQ ID NO: 592600 - DNA, 592 bp, Homo sapiens
gacatgtttcttttttaaaatgtaggtgttacaactctgagcactgcttttgatatatcacacccatcttgttatatatttgttttcaatcrtctctaaacattttctaatttccctcatgatttgttctttgattcattggttggtaaatactgtgttgtttaatttccaaatatttgtaaattttctagtttttcttttgttattgatatcttatttcattccattgtggccagtgaagatactttgcatgatttcaatctttttaagtttattgagcttatcttatggcctaacatatcatctgtgctggagaatgttccatgttcacttgagaagaatgtgtactctgcagtttttgagagaagtgttatctatagttattgcttatagttttattcaaatcctctaattcctcccttgatatttgctctagatgttttatcttttatttaaagttgggttttcaaatgcccaacaattttcgtggaattgtctgtctctccctttaattctctcaatggttacattatatattttggagccctgttagttggtgtacatatatttataattgttatatcttcttaat

SEQ ID NO: 592601 - DNA, 592 bp, Homo sapiens
gacatgtttcttttttaaaatgtaggtgttacaactctgagcactgcttttgatatatcacacccatcttgttatatatttgttttcaatcgtctctaaacattttctaatttccctcatgatttgttctttgattcattggttggtaaatactgtgttgtttaatttccaaatatttgtaaattttctagtttttcttttgttattgatatcttatttcattccattgtggccagtgaagatactttgcatgatttcaatctttttaagtttattgagcttatcttatggcctaacrtatcatctgtgctggagaatgttccatgttcacttgagaagaatgtgtactctgcagtttttgagagaagtgttatctatagttattgcttatagttttattcaaatcctctaattcctcccttgatatttgctctagatgttttatcttttatttaaagttgggttttcaaatgcccaacaattttcgtggaattgtctgtctctccctttaattctctcaatggttacattatatattttggagccctgttagttggtgtacatatatttataattgttatatcttcttaat

SEQ ID NO: 592602 - DNA, 592 bp, Homo sapiens
gacatgtttcttttttaaaatgtaggtgttacaactctgagcactgcttttgatatatcacacccatcttgttatatatttgttttcaatcgtctctaaacattttctaatttccctcatgatttgttctttgattcattggttggtaaatactgtgttgtttaatttccaaatatttgtaaattttctagtttttcttttgttattgatatcttatttcattccattgtggccagtgaagatactttgcatgatttcaatctttttaagtttattgagcttatcttatggcctaacatatcatctgtgctggagaatgttccatgttcacttgagaagaatgtgtaytctgcagtttttgagagaagtgttatctatagttattgcttatagttttattcaaatcctctaattcctcccttgatatttgctctagatgttttatcttttatttaaagttgggttttcaaatgcccaacaattttcgtggaattgtctgtctctccctttaattctctcaatggttacattatatattttggagccctgttagttggtgtacatatatttataattgttatatcttcttaat

SEQ ID NO: 592603 - DNA, 236 bp, Homo sapiens
gtggggtcccctacgagggaccaggagctccgggcgggcagcagctgcggaagagccgcgcgaggcttcccagaacccggcaggggcgggaagacgcaggagtggggaggcggaaccgggaccccgcagagcccggstccctgcgccccacaagccttggcttccctgctagggccgggcaaggccgggtgcagggcgcggctccagggaggaagctccggggcgagcccaagacg

SEQ ID NO: 592604 - DNA, 552 bp, Homo sapiens
ttgttcctaatttcctcaattatcgccttcttttgtgtttagttgctattttgtagcatatcactgtgtttaccctgtgctttccttttctgtattttcaaaagatattaacttagtggttaccatggggatttacaattaacattcttaatttggaacaatttagagtaaattgaaacaacttcaatagtatacaaaatctctattattatttagtttcctatgaatttctttatgttggtaatttcacaaaccacatctktatacatcatgcttcattaacatagatttatagtcattattttacacatttgttttaaaacatatagaatattaaaaaagacttacaaaaaatgtgataattgcttttatatttacctatgtagttatctttactggagttatttctttatgtggttttgagttactttctagtgttttttagtttgtatctgaaggagtcttttttttaaaagtgtatcttgaagtacagcctaccaaacatgaacttttaaagcttgcttgcttttctttctttctttctttctttct

SEQ ID NO: 592605 - DNA, 348 bp, Homo sapiens
gaacctctgacctcaagcaatccttctgccttggcctcccaaagtgctggaattatagtcatgagccaccacacccagcccctaagtggacatttaatccatgtacattcaaggttattattgtctatatttgatataatcaaatacttrgtcatttttaaattattttaatagtttcaaatatatttgttaaatttgctctatttgaatcaggatctaaagaagtttcaaagttgcatcagctaatatatctttttagtttttaaaaatatatatgaattcctttctcctgctttttagctctgtgtatttgctgaataatccaggatactcatcctgttgaatatt

SEQ ID NO: 592606 - DNA, 510 bp, Homo sapiens
ttttttaaattaagatgtgacagttctttttttatgtttttcacaaaatggaccaaataaatttttttttaaatttataagctaggctatattttctctcctttcttctactaaacttaggrtcacacaggaaggaacaggtgtacacaaatactaatatatttatgcctttctttgttctaagaattagcaaaagaatattttgaaagcataataactttgtatctgtattccaaaatataacacacaagttgttgaaagataaattgaggcaatgtatgtggaagttcctagacaattactaaattatatgggaatggagggcacaattttcatgagctttactaaataacttaccaacttcactatattttgtgtcattatctgagattaatctcacagttatataagatctaaaactttacactagaatgtgcatcccattttctcagctgtcttattgccgtcttcatgtctttgttcctcagtgtgtatataattgggttcaag

SEQ ID NO: 592607 - DNA, 510 bp, Homo sapiens
ttttttaaattaagatgtgacagttctttttttatgtttttcacaaaatggaccaaataaatttttttttaaatttataagctaggctatattttctctcctttcttctactaaacttagggtcacacaggaaggaacaggtgtacacaaatactaatatatttatgcctttcttygttctaagaattagcaaaagaatattttgaaagcataataactttgtatctgtattccaaaatataacacacaagttgttgaaagataaattgaggcaatgtatgtggaagttcctagacaattactaaattatatgggaatggagggcacaattttcatgagctttactaaataacttaccaacttcactatattttgtgtcattatctgagattaatctcacagttatataagatctaaaactttacactagaatgtgcatcccattttctcagctgtcttattgccgtcttcatgtctttgttcctcagtgtgtatataattgggttcaag

SEQ ID NO: 592608 - DNA, 510 bp, Homo sapiens
ttttttaaattaagatgtgacagttctttttttatgtttttcacaaaatggaccaaataaatttttttttaaatttataagctaggctatattttctctcctttcttctactaaacttagggtcacacaggaaggaacaggtgtacacaaatactaatatatttatgcctttctttgttctaagaattagcaaaagaatattttgaaagcataataactttgtatctgtattccaaaatataacacacaagttgttgaaagataaattgaggcaatgtatgtggaagttcctagacaattactaaattatatgggaatggagggcacaattttcatgagctttactaaataacttaccaacttcactatattttgtgtcattatctgagattaatctcacagttatataagatctaaaactttacactagaatgtgcatcccattttctcagcygtcttattgccgtcttcatgtctttgttcctcagtgtgtatataattgggttcaag

SEQ ID NO: 592609 - DNA, 516 bp, Homo sapiens
gtgatcacagaataaaatacagcaaggaatttatctaatgacttgatggggaatggccaggcataaataaagacacatggtccaaagaacaaaagaactactgtaatgtgagcagtcaaagtggacagagctttggacgacttatctaaagggcgatgctggatggtcattaggatgatagtgtatgagatgattagaagaacaaaagaacacacagtgagcacaccactgttagcaatgaccataatatctagcctgtaggtatctgtacaggcaagtttgattaccctaggaaggtcacaataaaaactatcgacctcattgggaccacagaagrgtaagtgcacggcaaacgccaactggctcaccgaatggagaaagccaattccccatgtgacagccataatgccgacacatgcgttgccacacataattgtagtgtagtgtaggggcttgcatattgctatatatctgtcaaagcccatggctatgaggatcaccatctcactcccacca

SEQ ID NO: 592610 - DNA, 516 bp, Homo sapiens
gtgatcacagaataaaatacagcaaggaatttatctaatgacttgatggggaatggccaggcataaataaagacacatggtccaaagaacaaaagaactactgtaatgtgagcagtcaaagtggacagagctttggacgacttatctaaagggcgatgctggatggtcattaggatgatagtgtatgagatgattagaagaacaaaagaacacacagtgagcacaccactgttagcaatgaccataatatctagcctgtaggtatctgtacaggcaagtttgattaccctaggaaggtcacaataaaaactatcgacctcattgggaccacagaagagtaagtgcacggcaaasgccaactggctcaccgaatggagaaagccaattccccatgtgacagccataatgccgacacatgcgttgccacacataattgtagtgtagtgtaggggcttgcatattgctatatatctgtcaaagcccatggctatgaggatcaccatctcactcccacca

SEQ ID NO: 592611 - DNA, 516 bp, Homo sapiens
gtgatcacagaataaaatacagcaaggaatttatctaatgacttgatggggaatggccaggcataaataaagacacatggtccaaagaacaaaagaactactgtaatgtgagcagtcaaagtggacagagctttggacgacttatctaaagggcgatgctggatggtcattaggatgatagtgtatgagatgattagaagaacaaaagaacacacagtgagcacaccactgttagcaatgaccataatatctagcctgtaggtatctgtacaggcaagtttgattaccctaggaaggtcacaataaaaactatcgacctcattgggaccacagaagagtaagtgcacggcaaacgccaactggctcaccgaatggagaaagccaattccccatgygacagccataatgccgacacatgcgttgccacacataattgtagtgtagtgtaggggcttgcatattgctatatatctgtcaaagcccatggctatgaggatcaccatctcactcccacca

SEQ ID NO: 592612 - DNA, 398 bp, Homo sapiens
ccgacacatgcgttgccacacataattgtagtgtagtgtaggggyttgcatattgctatatatctgtcaaagcccatggctatgaggatcaccatctcactcccaccaaagaagtgaaggagaaatatctgaacaaggcagcccttgaaagagatgactttgcgctggctgaaaaagtcagtaatcatcttgggggctgtgactgaagacagagacagatcaatgagtgagaggttggctagcaggaagtacatgggagagtgaaggtgggagtcagataccactgttatgacaataagaaggtttccaaacacgattcctccatagaatacaaaaaacaacataaataggaaggtctggagttcctgagaatcagagagacccagaaaaatgaattc

SEQ ID NO: 592613 - DNA, 615 bp, Homo sapiens
aggtgggcatctgtgtggagggtgagagatccctggttgagcccaaactgaaccccaggtagaagcaagcctcaggacagggaagtagctagcaagggatgatgagggagctatctcttgaccctggcttcccacccattgaccttagctacttgtgcctattaagcagattacggttcccccatcgtgaaatgtgggtaccacagttccctgatgggcatttctccaccagcccatgatggcctgagtttccttactgcagtctcctccctgagccttggcttctctatgtgtgtcctaactccaggacccacaggcctgtcaacccccagccctgggctgcttccctggcctcttctctgttccctctctgagggcctaactcccttgggtagtgctgcagaatatagagccacaggccctggctgatgatctggtggactgggcaaattggtcgtgacaggtcaggttctggttcaaagccaattcctccgatgccaaggcatgtcgaagaaggtcctttgccatgatgycccatagctgtcccacctcagcaatcgtgccgtaacctgggccctcacagtcagacaaccagctgaagaagctcaggcagtg

SEQ ID NO: 592614 - DNA, 396 bp, Homo sapiens
ggatctggattccaccggactgtatcttcacagtaagggtgaaacagaagcaaacccattcctatttccaagctcaaggaactttggtcaaagttctcttggagctgagcagaacaaggaggcaaacagaaaagatttgtgtccctgagaagtcatggccacaggctggctatcacacagattgtcaagccagttccatattgcatgggtattacagaaaayctcaaaacataaatttgtgtgtgggttgtcccagagtagcaggatctggcagaaggaaatttccttctaaccctcaaagaatccacataaatcttgttacatttgggattttacgatttgcttcaggaatgagaatggccttaattttcatatctttttctacactcagtttat

SEQ ID NO: 592615 - DNA, 399 bp, Homo sapiens
agtggatctggattccaccggactgtatcttcacagtaagggtgaaacagaagcaaacccattcctatttccaagctcaaggaactttggtcaaagttctcttggagctgagcagaacaaggaggcaaacagaaaagatttgtgtccctgagaagtcatggccacaggctggctatcacacagattgtcaagccagttccatattgcatgggtattacagaaaatctcaaaacataaatttgtgtgtgggttgtcccagagtagcaggatctggcagaaggaaatttccttctaaccctcaaagaatccacataaatcttgttacatttgggattttacgatttgcttcargaatgagaatggccttaattttcatatctttttctacactcagtttat

SEQ ID NO: 592616 - DNA, 548 bp, Homo sapiens
ctgcccgggttttggcaggattgctgaggtggggttcgccgtggggcatcatgggaaaggacctagctggtcattccttggtctctggggaattggctttgaactgtcacctgaactgtcctggacccacttctgcagtcccctagatcatcagccagggcctatggctcaatccattgcagttctatcccatggagagagggtcagccctagaggcggaacagagaggaggccaggcgagcagcctagggctgggaagggstgggaactgagaggccttttgacctggatctgggccccacatggagaacccaaggatccgggaggagactgcagtgagcaatcccaggcaatccgtgggttgggggagagaggcccatcagggacatgtaacacccacatttcaggatcggggcaccttaagccactatgatgcatatgtggctaaagtcagtgggtgacaagcagggcttaagggatagctgtctcatcattactcgccagctccctgccctgcggtaagacctgctaccacctggggctcattt

SEQ ID NO: 592617 - DNA, 522 bp, Homo sapiens
atatattatgggtttctcatataagtgtatatatacatgggcaaactcacagtgtgccagtatgtgtctatatccaaatatatacaaatccatgtccaacagttagcaagtgagaaattctcttccatttcaccattccctttcctagaattttttcataaatataatttttccatatatttgaagcctactctctggaggcatgtaatgcatgcatgcagtaaacctgtgcgayatcacaatgttggtgtcagagaaaactataacaccgatgttataaaagattaattgtgaggagaaagttatgcttcgcattactacaaatacacaagtatgatttcatccaaagctgaaatcagtcaatataatttgtttttaatgttttatttaaaatccttaatttcaacaggattactcaagaaaaataacgttattggtattaaataatgttgacgtattccctttaattgttgattatttaaaatgtcagtaaaatagtaaatggcactgtacaatgtagtt

SEQ ID NO: 592618 - DNA, 634 bp, Homo sapiens
tagttttaatttacctaatgtgactgtttttttgtttgttttccgagaatgggtcttactctgtcttctaggttggacagcagccccacgatctcagcccactgcagcccaggcaccacacacccatgtgatcctgtcaactcagactctcacacacctggcagtacaggtgcatgccacccctccaagctatgtattaattaactaaatacttactttttgaatgtgggtccatgttgccccaggctcatctggaactcctgagtgcaggcaatcctcccacctcagcttatcaaagtgctgggatgacaggtgtgacccatggccctgccatggctttgtgttttttgcttttttcttcctcctcctcacgtcttgttttgaaacatgcactgaaggtttcaattcatggactrtagtctctgtgcctggaatttctatctttcaactcatcatcagcattcattgggattttcatatatatatatatatatatatatatatatatatatatatatatgtatatatatatatatatatatatgtatataagaatacctatgtacacacatatatatgtatatacatgtatatacgtatatatgcacatttatatacgtatatacatgtatat

SEQ ID NO: 592619 - DNA, 634 bp, Homo sapiens
tagttttaatttacctaatgtgactgtttttttgtttgttttccgagaatgggtcttactctgtcttctaggttggacagcagccccacgatctcagcccactgcagcccaggcaccacacacccatgtgatcctgtcaactcagactctcacacacctggcagtacaggtgcatgccacccctccaagctatgtattaattaactaaatacttactttttgaatgtgggtccatgttgccccaggctcatctggaactcctgagtgcaggcaatcctcccacctcagcttatcaaagtgctgggatgacaggtgtgacccatggccctgccatggctttgtgttttttgcttttttcttcctcctcctcacgtcttgttttgaaacatgcactgaaggtttcaattcatggactgtagtctctgtgcctggaatttctatctttcaactcatcatcagcattcattgggattttcatatatatatatatatatatatatatatatatatatatatatatgtatatatatatatayatatatatgtatataagaatacctatgtacacacatatatatgtatatacatgtatatacgtatatatgcacatttatatacgtatatacatgtatat

SEQ ID NO: 592620 - DNA, 634 bp, Homo sapiens
tagttttaatttacctaatgtgactgtttttttgtttgttttccgagaatgggtcttactctgtcttctaggttggacagcagccccacgatctcagcccactgcagcccaggcaccacacacccatgtgatcctgtcaactcagactctcacacacctggcagtacaggtgcatgccacccctccaagctatgtattaattaactaaatacttactttttgaatgtgggtccatgttgccccaggctcatctggaactcctgagtgcaggcaatcctcccacctcagcttatcaaagtgctgggatgacaggtgtgacccatggccctgccatggctttgtgttttttgcttttttcttcctcctcctcacgtcttgttttgaaacatgcactgaaggtttcaattcatggactgtagtctctgtgcctggaatttctatctttcaactcatcatcagcattcattgggattttcatatatatatatatatatatatatatatatatatatatatatatgtatatatatatatatatrtatatgtatataagaatacctatgtacacacatatatatgtatatacatgtatatacgtatatatgcacatttatatacgtatatacatgtatat

SEQ ID NO: 592621 - DNA, 634 bp, Homo sapiens
tagttttaatttacctaatgtgactgtttttttgtttgttttccgagaatgggtcttactctgtcttctaggttggacagcagccccacgatctcagcccactgcagcccaggcaccacacacccatgtgatcctgtcaactcagactctcacacacctggcagtacaggtgcatgccacccctccaagctatgtattaattaactaaatacttactttttgaatgtgggtccatgttgccccaggctcatctggaactcctgagtgcaggcaatcctcccacctcagcttatcaaagtgctgggatgacaggtgtgacccatggccctgccatggctttgtgttttttgcttttttcttcctcctcctcacgtcttgttttgaaacatgcactgaaggtttcaattcatggactgtagtctctgtgcctggaatttctatctttcaactcatcatcagcattcattgggattttcatatatatatatatatatatatatatatatatatatatatatatgtatatatatatatatatatatatgtatataagaatacctatgtacacacatatayatgtatatacatgtatatacgtatatatgcacatttatatacgtatatacatgtatat

SEQ ID NO: 592622 - DNA, 628 bp, Homo sapiens
aagatcctttccacatggtttgggcttacccctttgactgagagcatgccactttttactagatgtaaaaatgccataaaggtctaagtcacaggaaagtaacacgggttggccacacctgattctttcttaactcttacaccttgaaggcagaaagactagaataaaacccaagcatttggatgttaccagaaatatctayaatatttccttttagaaatataaatgaaaattttagtatatacaacaatgtttgggaaattaaaaacaaaagtatgctaattaaaatattaacactgtactcaataaatcatgtttagagggctttttttcagttttttccctttttattggtggtgaggagtgggggaataagacgatgcaggacaaagggaaaagagagaggaagaaaaataaaagtctgaaaggtaacacagtaaaatgtaaaatggtggctactctggggatagtacaatgagggtgagatttttttcttagtttgttatacttctgggggctgcaaacttccttcaacatgattctattattttcataatttaaaaagcattattgagtggcatcagcaaaacggcaaattaaaaagctcgcagactcattccctcacaga

SEQ ID NO: 592623 - DNA, 628 bp, Homo sapiens
aagatcctttccacatggtttgggcttacccctttgactgagagcatgccactttttactagatgtaaaaatgccataaaggtctaagtcacaggaaagtaacacgggttggccacacctgattctttcttaactcttacaccttgaaggcagaaagactagaataaaacccaagcatttggatgttaccagaaatatctataatatttccttttagaaatataaatgaaaattttagtatatacaacaatgtttgggaaattaaaaacaaaagtatgctaattaaaatattaacactgtactcaataaatcatgtttagagggctttttttcagttttttccctttttattggtggtgaggagtgggggaataagacgaygcaggacaaagggaaaagagagaggaagaaaaataaaagtctgaaaggtaacacagtaaaatgtaaaatggtggctactctggggatagtacaatgagggtgagatttttttcttagtttgttatacttctgggggctgcaaacttccttcaacatgattctattattttcataatttaaaaagcattattgagtggcatcagcaaaacggcaaattaaaaagctcgcagactcattccctcacaga

SEQ ID NO: 592624 - DNA, 628 bp, Homo sapiens
aagatcctttccacatggtttgggcttacccctttgactgagagcatgccactttttactagatgtaaaaatgccataaaggtctaagtcacaggaaagtaacacgggttggccacacctgattctttcttaactcttacaccttgaaggcagaaagactagaataaaacccaagcatttggatgttaccagaaatatctataatatttccttttagaaatataaatgaaaattttagtatatacaacaatgtttgggaaattaaaaacaaaagtatgctaattaaaatattaacactgtactcaataaatcatgtttagagggctttttttcagttttttccctttttattggtggtgaggagtgggggaataagacgatgcaggacaaagggaaaagagagaggaagaaaaataaaagtctgaaaggtaayacagtaaaatgtaaaatggtggctactctggggatagtacaatgagggtgagatttttttcttagtttgttatacttctgggggctgcaaacttccttcaacatgattctattattttcataatttaaaaagcattattgagtggcatcagcaaaacggcaaattaaaaagctcgcagactcattccctcacaga

SEQ ID NO: 592625 - DNA, 628 bp, Homo sapiens
aagatcctttccacatggtttgggcttacccctttgactgagagcatgccactttttactagatgtaaaaatgccataaaggtctaagtcacaggaaagtaacacgggttggccacacctgattctttcttaactcttacaccttgaaggcagaaagactagaataaaacccaagcatttggatgttaccagaaatatctataatatttccttttagaaatataaatgaaaattttagtatatacaacaatgtttgggaaattaaaaacaaaagtatgctaattaaaatattaacactgtactcaataaatcatgtttagagggctttttttcagttttttccctttttattggtggtgaggagtgggggaataagacgatgcaggacaaagggaaaagagagaggaagaaaaataaaagtctgaaaggtaacacagtaaaatgtaaaatggtggctactctggggwtagtacaatgagggtgagatttttttcttagtttgttatacttctgggggctgcaaacttccttcaacatgattctattattttcataatttaaaaagcattattgagtggcatcagcaaaacggcaaattaaaaagctcgcagactcattccctcacaga

SEQ ID NO: 592626 - DNA, 542 bp, Homo sapiens
taaaggaaagcacgtcattccagccaaagccttggcaaaataactaatttctccaacagtgtcctgttgcagaagaaaacattattttgcacttatacaaattatattgccataagttaagaatactcacaaatagtttccaaattctggagaaaacagatagaaacaaatgtgctccaaattttgtttacagaaatatattttactcaattgctaaaagctgtaaatagctcaaaataaaagtttccaggactctgaaaaacaaaacaatggatcaccaatattttaagcaaagtcaaaaagattactttagtcttacattagttcactccacgcagttatctcctgttctgcttgataytgatgaacatttcagctctccatgagagttctgaaagttttttctttattctattgccaaaatttccaaagttatcagaaacctgcatttaagagcacctgtcaacgtcctaaacctgattataaatcacctttcaaagagcgttaaaacaagacaacaattgtctgtggatgacaaagaa

SEQ ID NO: 592627 - DNA, 542 bp, Homo sapiens
taaaggaaagcacgtcattccagccaaagccttggcaaaataactaatttctccaacagtgtcctgttgcagaagaaaacattattttgcacttatacaaattatattgccataagttaagaatactcacaaatagtttccaaattctggagaaaacagatagaaacaaatgtgctccaaattttgtttacagaaatatattttactcaattgctaaaagctgtaaatagctcaaaataaaagtttccaggactctgaaaaacaaaacaatggatcaccaatattttaagcaaagtcaaaaagattactttagtcttacattagttcactccacgcagttatctcctgttctgcttgatattgatgaacatttcagctctccatgagagttctgaaagttttttctttattctattgccaaaatttccaaagttatcagaaacctgcatttaagagcacctgtcaaygtcctaaacctgattataaatcacctttcaaagagcgttaaaacaagacaacaattgtctgtggatgacaaagaa

SEQ ID NO: 592628 - DNA, 576 bp, Homo sapiens
ttttaaaattttaaatatttttctatggaatttgaaaataatatgtatgctctttatactacttaataatgctatccatttgttcatataataactaatcaaactgtcttaaatgttaatgaacactctttatgtttacttatttgttgtatataaaaaaagtttattttttgacagtttaatgtcacctaatattatttttaatgtttcaatttctcatttacatgaatgtttgtgttgtttattttagtcttacaggtrttatttaaactgtctgtgcaaatgccttggaatagtgcgtaacacatcgtgaattctatgtacgtgttcagggctgtttcatcacattttaatctgtcatacccttcttcatttaccgtcattttgtgtttgtccttattcaaattatgtttgtgccttgacttgactacatattcatggaagagagaaggtagactcagacttccatccggattaagcacaaagttaactaacatatcttcttagctcactttagatagaatattatatttgttttataatataaatatgaattttaagtactgcatgaagaat

SEQ ID NO: 592629 - DNA, 545 bp, Homo sapiens
atgaacaaataaacaaggcagaattttatcaagaccatgaatgaaataccccaaagagaaagaatttcaggaaaccgagaaatcacaccagcctggaaaggaggtcacatttcaatgaggctttgaaagatggagtatcatttcaataagcatttcaactttctgggatatctgcagatacaagggrccacttttaccattttgtagcaattgtatagaaaagaaagcaaaggatttttagaaacagaatctttaagtcctttcagaatgttttaccatgttagagttgaggcaagaggaaagcctcagaggagctggtgataacattgtggagcttttctatcttgttcctctaactccttccttcgtttttctcctgggttttgaaatcaattttgttcaaattcaaatcctagttcaatcacatacaagtatgtgaccttgatcaagatacttactctattaattaaatgcactgggcttgacattttaaaaagcacctcaaatgaaacctattattaagagatgagacagtaacaaactac

SEQ ID NO: 592630 - DNA, 531 bp, Homo sapiens
aatcctagttcaatcacatacaagtatgtgaccttgatcaagatacttactctattaattaaatgcactgggcttgacattttaaaaagcacctcaaatgaaacctattattaagagatgagacagtaacaaactacagttcttaaytaaaatacatattagtgtcatcccaggagctgtttcaaaatagatgaatattccatccttgacccaaagcccagaatatctaggcaagtgtttccaggactactttgaagaagcttcccaaaatgatttgaaaggtagatgaaattaagaaattcttatgttcatgttgtcctctccataaaaagaaaattaagaaattctagtaaataaaggatgacatagggcaatatgccagattacatcaacatttaaaggtggcccataggaaaggatcctaataaagcagcttcaacacaaccaggtaaatcaggaggcaacagcacaaaaagtgaggaagagtttcaaggaaaaatagtcaataatgccaaataagttaaagaaaaa

SEQ ID NO: 592631 - DNA, 517 bp, Homo sapiens
caagtgaaactatctactgagcttttcttcatagaaaaagtttaatctctaattgttttggttctattcatatattctacttattcttgaacttactgtaataacgtatgcatattakccactaatcaatttctaatttgtagcatactatctttttatattttcattgcaataaaaagtaaagggaagaataatgtggaaagacaaagattttggcaatccatgtttccctagtgtctcagggtcctctgttgtagggaggagattattgtacttgttgtacttaatactcacatatgttcatgaagtagatgggacccatcatctaaagtaaattagagaactttgcaaaatgtaaccaaaataaaagtttgtgcctacctctcttttaatcaatatttagacgggacaggaatataaatttcaagaaaaacaaatacatatttcttggaggctttgttgatttctttttactgtttttttctctaaacttctcttcttgcttcatttcattcat

SEQ ID NO: 592632 - DNA, 557 bp, Homo sapiens
agtctcactctgttgcccaagctggagtgcagtggtatgatcttggctcagtgcaacctccacctcccgggttcaatcgattctcctgcctcagccccctgagtagctgggactacaggcatgagccaccatgactggctaatttttgtatttttagtagagacggggtttcccatgtggacctggcaggtcttgcactcctcacctcaggtgatccacccacctcarcctcccaaagtgctggaatggtaggcatagcactgcacctggccggacatgtccatttttgagtgctatatttacatcatatagaataagttgtgtatatttctcagatagaagagtcatgatgaattggaagatacctctcaagtcttagtatgtgcaataactaaagatcttgtgagattttgtttcaggagatttcggaggaagtctgaatttctgaatttttagcaagctcaccaatgtttctagcctagtaagaatattttgtcaaatatccagtaaatggcagagtttgggtttttcccagtttctctcacctgtaaataaag

SEQ ID NO: 592633 - DNA, 477 bp, Homo sapiens
tcaagtcttagtatgtgcaataactaaagatcttgtgagattttgtttcaggagatttcsgaggaagtctgaatttctgaatttttagcaagctcaccaatgtttctagcctagtaagaatattttgtcaaatatccagtaaatggcagagtttgggtttttcccagtttctctcacctgtaaataaagataagagccttcatttttaaaagacaaatataagcaaaagtcatctaaaaggaaaggacagcttccagattaaatgcaacggtttatgcacttcagctagtaaatctcctaagtgtccttaataattaagagaataagaattaactctagagtggaaaaaaatgtcatagagatcttgaaccaagtgaataaaattgttatcaactttattaggacacatttttattatgtgctgatgcaccacaacacagcatcactgctgtggcatttctctcctctcagaaaagt

SEQ ID NO: 592634 - DNA, 477 bp, Homo sapiens
tcaagtcttagtatgtgcaataactaaagatcttgtgagattttgtttcaggagatttcggaggaagtctgaatttctgaatttttagcaagctcaccaatgtttctagcctagtaagaatattttgtcaaatatccagtaaatggcagagtytgggtttttcccagtttctctcacctgtaaataaagataagagccttcatttttaaaagacaaatataagcaaaagtcatctaaaaggaaaggacagcttccagattaaatgcaacggtttatgcacttcagctagtaaatctcctaagtgtccttaataattaagagaataagaattaactctagagtggaaaaaaatgtcatagagatcttgaaccaagtgaataaaattgttatcaactttattaggacacatttttattatgtgctgatgcaccacaacacagcatcactgctgtggcatttctctcctctcagaaaagt

SEQ ID NO: 592635 - DNA, 477 bp, Homo sapiens
tcaagtcttagtatgtgcaataactaaagatcttgtgagattttgtttcaggagatttcggaggaagtctgaatttctgaatttttagcaagctcaccaatgtttctagcctagtaagaatattttgtcaaatatccagtaaatggcagagtttgggtttttccmagtttctctcacctgtaaataaagataagagccttcatttttaaaagacaaatataagcaaaagtcatctaaaaggaaaggacagcttccagattaaatgcaacggtttatgcacttcagctagtaaatctcctaagtgtccttaataattaagagaataagaattaactctagagtggaaaaaaatgtcatagagatcttgaaccaagtgaataaaattgttatcaactttattaggacacatttttattatgtgctgatgcaccacaacacagcatcactgctgtggcatttctctcctctcagaaaagt

SEQ ID NO: 592636 - DNA, 477 bp, Homo sapiens
tcaagtcttagtatgtgcaataactaaagatcttgtgagattttgtttcaggagatttcggaggaagtctgaatttctgaatttttagcaagctcaccaatgtttctagcctagtaagaatattttgtcaaatatccagtaaatggcagagtttgggtttttcccagtttctctcacctgtaaataaagataagagccttcatttttaaaagacaaatataagcaaaagtcatctaaaaggaaaggacagcttccagattaaatgcaacggtttatgcacttcagctagtaaatctcctaagtgtccttaayaattaagagaataagaattaactctagagtggaaaaaaatgtcatagagatcttgaaccaagtgaataaaattgttatcaactttattaggacacatttttattatgtgctgatgcaccacaacacagcatcactgctgtggcatttctctcctctcagaaaagt

SEQ ID NO: 592637 - DNA, 567 bp, Homo sapiens
attgaggctactaacccgattccattctttacccgggtatgccaccacttacaaaaagttagccaattggtaattcagtctatttcctttgagctgcgggtttccttagtatcatccttttgtaattcactgaaaagaagcttccagaaatggccccarttcagaaatgaagattgggttcttggatctcgtacaagaaataatttagaaccaggggtagtggcttatgcctgtaatcccggcaatttgggaggcagaggcgggaggatcacttgaggtcaggagttcgagaccagccttgcaacatggtgaaaccaatctctactaaaaataaaaaaattagccaggcatggtggcgcatcgtgctaatcccagctactccagaggctgaggcaggagaatctcttgaactcaggaggcagatgttgtagtgagccgagatgggccactgcactccagcctgggtgacagagcaggatcgtgtctcaaagacaaaaaaaaaaaaaagatagaagaaagagttttgggtgagtctgcagtacaaagcaaaagcaaatttattgggaa

SEQ ID NO: 592638 - DNA, 585 bp, Homo sapiens
tctccaagatcgtagcccaacatagaatagaagtgtctccacttcagaggacaaccrgtttgtccttttccttttacacccctttcagcaagcagtatttctcagctttgtgtttgtgcaaactcttgagtagcacaaactcctgagctaagagacactccactctgtttgcaattgagggcaaaggctgggatgcttgggcacagctccaggctcctttcccagaagtctggggtggcagaaaaaaaaaaaagaatttatttttcacacactgagtagagatgtggctcatcacgtagaggtaaattgtttttttcttgagatagagttttgctcttgttgcccaggcgggagtgcagtggcaccatctcagttcactgaaacctccccctcccgggttcaagctattctcccacctcagcctcttgagtagctgggattataggcacctgccatgacacccagctaaattttgtatttttagtagagaaggggtttcaccatgttggccaggctggtctcgaattcctgatctcaggtgatccagccgcctcagcctcccaaagtgctgggattcaagtgtga

SEQ ID NO: 592639 - DNA, 585 bp, Homo sapiens
tctccaagatcgtagcccaacatagaatagaagtgtctccacttcagaggacaaccagtttgtccttttccttttacacccctttcagcaagcagtatttctcagctttgtgtttgtgcaaactcttgagtagcacaaactcctgagctaagagacactccactctgtttgcaattgagggcaaaggctgggatgcttgggcacagctccaggctcctttcccagaagtctggggtggcagaaaaaaaaaaaagaatttatttttcacacactgagtagagatgtggctcatcacgtagaggtaaattgtttttttcttgagatagagttttgctcttgttgcccaggcgggagtgcagtggcaccatctcagttcactgaaacctccccctcccgggttcaagctattctcccacctcagcctcttgaktagctgggattataggcacctgccatgacacccagctaaattttgtatttttagtagagaaggggtttcaccatgttggccaggctggtctcgaattcctgatctcaggtgatccagccgcctcagcctcccaaagtgctgggattcaagtgtga

SEQ ID NO: 592640 - DNA, 254 bp, Homo sapiens
tttgtttgtttgttttgaaatggagtcttgctctgttgcttaggctggagtgcagtgrcatgatgtcggctcactgcaaactttacctcctgggtccaggcgattctcctgccttcagtctgccaagtagcagggattacatgcacattccaccacgcctggctaatttttgtatttttagtagagatggggtttcaccatgttggccaggctggtctttaactcctgatctcaggtggtccacccgcctcagt

SEQ ID NO: 592641 - DNA, 254 bp, Homo sapiens
tttgtttgtttgttttgaaatggagtcttgctctgttgcttaggctggagtgcagtgacatgatgtcggctcactgcaaactttacctcctkggtccaggcgattctcctgccttcagtctgccaagtagcagggattacatgcacattccaccacgcctggctaatttttgtatttttagtagagatggggtttcaccatgttggccaggctggtctttaactcctgatctcaggtggtccacccgcctcagt

SEQ ID NO: 592642 - DNA, 254 bp, Homo sapiens
tttgtttgtttgttttgaaatggagtcttgctctgttgcttaggctggagtgcagtgacatgatgtcggctcactgcaaactttacctcctgggtccargcgattctcctgccttcagtctgccaagtagcagggattacatgcacattccaccacgcctggctaatttttgtatttttagtagagatggggtttcaccatgttggccaggctggtctttaactcctgatctcaggtggtccacccgcctcagt

SEQ ID NO: 592643 - DNA, 254 bp, Homo sapiens
tttgtttgtttgttttgaaatggagtcttgctctgttgcttaggctggagtgcagtgacatgatgtcggctcactgcaaactttacctcctgggtccaggcgattctcctgccttcagtctgccaagtagcagggaytacatgcacattccaccacgcctggctaatttttgtatttttagtagagatggggtttcaccatgttggccaggctggtctttaactcctgatctcaggtggtccacccgcctcagt

SEQ ID NO: 592644 - DNA, 275 bp, Homo sapiens
agatggagatgtgaaacttatttttaaaatggaagcagaacataaaagtttggaaastttgcacctgaccatgaggtagaatataaaaccccattttttagaaagaaaatcaagccactgcagaaatttacaaaagtaaagagaagctgaatgttaatagccaagacaatggggaaaatgtcttcaggtcatgtcaaagatctgagacaggttcttctatcacaggccaggaaccctaggaggaagaaatggtttcatggtcgaggcccagggag

SEQ ID NO: 592645 - DNA, 275 bp, Homo sapiens
agatggagatgtgaaacttatttttaaaatggaagcagaacataaaagtttggaaactttgcacctgaccatgaggtagaatataaaaccccattttttagaaagaaaatcaagccactgcagaaatttacaaaagtaaagagaagctgaatgttaatagccaagacaatggggaaaatgtcttcaggtcatgtcaaagatctgagacagkttcttctatcacaggccaggaaccctaggaggaagaaatggtttcatggtcgaggcccagggag

SEQ ID NO: 592646 - DNA, 577 bp, Homo sapiens
ctacatttctgccttcaacatattactttcagtaaggagaataggaggatctcattgcagaggaaaaagaagggatctcatttatgcaagaaataatcacccctcatctgggacagcttaagaaaaacagagaacagatcatgacctcatcaatgggaaataaaggcaacttggttgaaagggctccctggcgttatgaagcaatgtctacacagctgaagtaaatgatcagcctctgggataccaatagtctaccaacaaggccgtattcattttcattctgattgcattagcacttctgcacyattctggtaactcggatttacatatttcatgacaaagatagctgcagggtgcggtggctcatgcctattatcctagaactttgggagggtgaggtgggtggatcacctgagattgtgagttcaagaccagcctgatcaacatggagaaaccccatctctactaaaaatataaaattagccgggcatggtgctgcatgcctgtaatcccagctactcaagaggctgaggcaggagactggcttgaaccctggaggcgaaggtttcagtgagcc

SEQ ID NO: 592647 - DNA, 541 bp, Homo sapiens
ctgcctttttatttgctattacctgagctcaataagaatcaacaaaatgaatctttattttaccacaagaattttattcrtgcatatgcttaatttgctgaaaacatgttagctttccatgaaagatttatacttttattgtgtcattctttgccaagaagtggctgtcctggcagaaaactgctatttctgagctctgctcactttgactctgctcagcatagtgactggaagtgatgtgtggataaaaagcaaatgtgtcttctttgcatcttttttgatctattggctttagaaacaggagaatgtggatagaaaatttagaaaaaaatctaatctccaaataatcatgaagaagtttttttaaccagaagtaaaccaaaggggaaggtggtgtgtgcataaaatgtattattttgctaagcctttgaaattgtagggtttattagtatgacaacctgcattgctttaacaaacatattagtcttttagttttaattcttctggatatgattcaatttcctgatgaatctgaactgag

SEQ ID NO: 592648 - DNA, 541 bp, Homo sapiens
ctgcctttttatttgctattacctgagctcaataagaatcaacaaaatgaatctttattttaccacaagaattttattcatgcatatgcttaatttgctgaaaacatgttagctttccatgaaagatttatrcttttattgtgtcattctttgccaagaagtggctgtcctggcagaaaactgctatttctgagctctgctcactttgactctgctcagcatagtgactggaagtgatgtgtggataaaaagcaaatgtgtcttctttgcatcttttttgatctattggctttagaaacaggagaatgtggatagaaaatttagaaaaaaatctaatctccaaataatcatgaagaagtttttttaaccagaagtaaaccaaaggggaaggtggtgtgtgcataaaatgtattattttgctaagcctttgaaattgtagggtttattagtatgacaacctgcattgctttaacaaacatattagtcttttagttttaattcttctggatatgattcaatttcctgatgaatctgaactgag

SEQ ID NO: 592649 - DNA, 541 bp, Homo sapiens
ctgcctttttatttgctattacctgagctcaataagaatcaacaaaatgaatctttattttaccacaagaattttattcatgcatatgcttaatttgctgaaaacatgttagctttccatgaaagatttatacttttattgtgtcattytttgccaagaagtggctgtcctggcagaaaactgctatttctgagctctgctcactttgactctgctcagcatagtgactggaagtgatgtgtggataaaaagcaaatgtgtcttctttgcatcttttttgatctattggctttagaaacaggagaatgtggatagaaaatttagaaaaaaatctaatctccaaataatcatgaagaagtttttttaaccagaagtaaaccaaaggggaaggtggtgtgtgcataaaatgtattattttgctaagcctttgaaattgtagggtttattagtatgacaacctgcattgctttaacaaacatattagtcttttagttttaattcttctggatatgattcaatttcctgatgaatctgaactgag

SEQ ID NO: 592650 - DNA, 541 bp, Homo sapiens
ctgcctttttatttgctattacctgagctcaataagaatcaacaaaatgaatctttattttaccacaagaattttattcatgcatatgcttaatttgctgaaaacatgttagctttccatgaaagatttatacttttattgtgtcattctttgccaagaagtggctgtcctggcagaaaactgctatttctgagctctgctcactttgactctgctcagcatagtgactggaagtgatgtgtggataaaaagcaaatgtgtcttctttgcatcttttttgatctattggctttagaaacaggagaatgtggatagaaaatttagaaaaaaatctaatctccaaataatcatgaagaagtttttttaaccagaagtaaaccaaaggggaaggtggtktgtgcataaaatgtattattttgctaagcctttgaaattgtagggtttattagtatgacaacctgcattgctttaacaaacatattagtcttttagttttaattcttctggatatgattcaatttcctgatgaatctgaactgag

SEQ ID NO: 592651 - DNA, 348 bp, Homo sapiens
ggcattgcattgatgacaaggccggctasccattctctgccaatgccagccaaggaccatacatataagaaaaagagtcctagatggatttagtgagcctgattaggtggagagaaagagggaaggttttttttgtttttgtttttgttttttattgttgtggtggtggttgtttagatggagtcttgctctgacttgcccaggctggagtgcggtggcgtgatctcagctcactgaagcctctgcctcccgggttcaagcaattctcctgtgtcagcctcctgagtagctgggactataaacttgtgccaccatgcccggtgaatttttgtaattttagtagagacg

SEQ ID NO: 592652 - DNA, 522 bp, Homo sapiens
ccaacagccacagcagttgcagcagcagcagcagcaacagcagcagcaacagcagcacagggggaaatgtgtgaacaggtaaagggacttagaaaaggcccaaacagtaactacaacatggatcaaacagatactcggagcaatctaattaggaggcctccggagatgtgcaagtcagacatggggtggaggcaggattcactggttcccaggaatcttgcctcacagtggatcagcaagaatgccagtggggtggaagaatcctgccttcctcaggtgaacagcttgcctagtcctggctcaggcacactttggaaggaacaattgttttatagtgaggtggctgtcctgagaaccaaagtgaatgactgatgctggtgtggagcatcagaaattagccaccacttcagggcctgtggaagggggtccaaggtctccgtggagagtgtgcaggtgaactctakataaggccaggactgtgcacaccctttcttgtgtctctctacattttacctccctaga

SEQ ID NO: 592653 - DNA, 596 bp, Homo sapiens
  misc_feature 344, 426, 596: n = A,T,C or G
cagctaattttgtatttttagtagagacggggtttctccatgttggtcaggctggtctcgaactcccgacctccggtgatccacctgccttggcctcccaaagtgctgggattataggggtgagccaccatgcctggccagacttgtcattcttagttatctcattactgctacattccatacatagcctctggaggygaggcacttcagagagtaaacaccaacaactatgcccacctgacacaatgggctttgatctaatgcctggaagttagagttatggaaattaatgataagggtctaagactcagggtacatatacttgctgggaccactcgtgatgncccctgatgttctagtatcaatcccttattcctatggtcctttcaccttggcaggctgctctcttagacagattcctatttncaatgctccttgcctggcatttctaccatggactgtacatctggtccctgagacatgcctttttgacccaatgtgggagtgaattgcattacatcccagctgcagcatctctatgctcccatgactgcttgcatttatcagttgagtctagttcctgatgacaagcctcn

SEQ ID NO: 592654 - DNA, 580 bp, Homo sapiens
gatgattcaagatgtttagtctgtacaattgaaagatggagttgtcattgattatttaatcaatgacaaggctgtgagtagaacagatttggaagtaaaatgtagggtttagttttaaacataacaaagatgtggaagaggcagccgaatataagagtctgctgttcataaaagtgagatctaaactggagatataagtttgggagtgtcagcatatagactgtatttccatcaaagtcctggcaggaaataaagggtatattcaaattgagtaattgagaagagaaatattttcaaagatgtggataggacttaaggaaatccacaaggaatggtagagtagtctagagctattaacgtccctagtataaaaaggcaaggtaaggaacactcatcagatcygaagagggtggctttataaggagggtgacctgacaagaaatgtaaccttcaatagaggaatgcagccaatctgttgcaattgacagagaataaacactccaatctgtctttccttctaccctcctatcacatcccagggctcttaagggccaagcccagatgaaaattaaaggccaag

SEQ ID NO: 592655 - DNA, 566 bp, Homo sapiens
tattccattcaataatgataatatacctagttaaaatacctaagaataagctcagtaagaaatccacaaacctatcgtaggacacactacaaatttttattcatagaaataaaagatatgaatatatgaatagatataagatgttcctagataagtttgaagttcacaacatgccgattctttacacattattaattaaatataattttttccctaagcctcaaagatctcttttactcttttggttttttggggtttgtttgtttgtttgttttgagacaaagtctcgctctgtcgcccaggctggagtgcagtggggtgatctcggctcgctgccacctccgcctcctgggttcaagcaattctctgcctcagcctcctgagtagctggaattacaagcttctgccaccrtgcccggctaatttttttgtatttttagtagagacagggcttcaccatcttggccaggctggtcttgaactcctgacctcatgatccatccgccttggcctcccaaagtgctggcattacaggcgtgcagccacgcccaacctcttttggtttt

SEQ ID NO: 592656 - DNA, 566 bp, Homo sapiens
tattccattcaataatgataatatacctagttaaaatacctaagaataagctcagtaagaaatccacaaacctatcgtaggacacactacaaatttttattcatagaaataaaagatatgaatatatgaatagatataagatgttcctagataagtttgaagttcacaacatgccgattctttacacattattaattaaatataattttttccctaagcctcaaagatctcttttactcttttggttttttggggtttgtttgtttgtttgttttgagacaaagtctcgctctgtcgcccaggctggagtgcagtggggtgatctcggctcgctgccacctccgcctcctgggttcaagcaattctctgcctcagcctcctgagtagctggaattacaagcttctgccaccgtgcccggctaatttttttgtatttttagtagagacagggcttcaccatcttggccaggctggycttgaactcctgacctcatgatccatccgccttggcctcccaaagtgctggcattacaggcgtgcagccacgcccaacctcttttggtttt

SEQ ID NO: 592657 - DNA, 621 bp, Homo sapiens
aagtaaaatttggaaaatataatcyataatgaggagaaaaatcaactgaaactgaactaaaaattatacaaataatagaattagtaaacaaagatattatgttcaagaagcttaagaaatttaattgtgaatagaaacatgggagatggtttttaaaactcaagtcaaatcaaacttctagaaataaaaaaatacaatgtctgagacaaaaaatacaatgcatgggattaaaagcagaatagatatgacaaaagaaaagattagtgaaactgaatacatgttaatagaaattattcaacattttcatatgttatagaaaagacagatcagtagtttgcacctgatttaaccaattatgcagtttgcttttagctacataaccagtggcttatcaaagacctcttggtaaatttgactccctgagaccaaagtaacttgctctatcttggtgattcaaaatctgaagcttaaacacatcttgtccaaaaaaagatctgtgatgtttcctaaaaaattaaatatagaattaccaagtaatccagcaattccacttataagcatataccaaaaacaaaaattgaaagcggggccttgaaaagatatttttatgcttgtgttcat

SEQ ID NO: 592658 - DNA, 605 bp, Homo sapiens
ctctgagtccaacatccctgacttttttttttttttttttttttgagacggagtccgctctgtcgcccaggctggagtgcagtggcgggatctcggctcactgcaagctccgcctcccgggttcacgccattctcctgcctcagcctcccaagtagctgggactacaggygcccgcacttacgcccggctaattttttgtatttttagtagagacggggtttcaccgttttagccgggatggtctcgatctcctgacctcgtgatccgcccgcctcggcctcccaaagtgctgggattacaggcgtgagccacccgcgcccggccacatccctgacttttaaaatttaaatattcttgtcttggacttgccattggtcctttgattgggggaagatacataaaaaggacacacaaaaaaatctaaggatgttacccatgagagtgtttctctggaaaattagtaaactattttaatctataatattacccttacactcacacaaaagggttcttactctgctttggttctccatttgccatcatgttctccattatatggagagtctgtgggtccagtggaacatgcctatgcaacatttgcacc

SEQ ID NO: 592659 - DNA, 605 bp, Homo sapiens
ctctgagtccaacatccctgacttttttttttttttttttttttgagacggagtccgctctgtcgcccaggctggagtgcagtggcgggatctcggctcactgcaagctccgcctcccgggttcacgccattctcctgcctcagcctcccaagtagctgggactacaggcgcccgcacttacgcccggctaattttttgtatttttagtagagacggggtttcaccgttttagccgggatggtctcgatctcctgacctcgtgatccgcccgcctcggcctcccaaagtgctgggattacaggygtgagccacccgcgcccggccacatccctgacttttaaaatttaaatattcttgtcttggacttgccattggtcctttgattgggggaagatacataaaaaggacacacaaaaaaatctaaggatgttacccatgagagtgtttctctggaaaattagtaaactattttaatctataatattacccttacactcacacaaaagggttcttactctgctttggttctccatttgccatcatgttctccattatatggagagtctgtgggtccagtggaacatgcctatgcaacatttgcacc

SEQ ID NO: 592660 - DNA, 574 bp, Homo sapiens
ttaaaagttttttgcttattggaaaactgccttgctagtaataacattattttctctgtctatccttctccttatttgttatgattctgctatagtaaattcatagggaagaggtccagtatagggcctgttaaatccattctttaagacagtcctgggacctaagaaattcagaagctttctcctcagaatrgcattctttggatacattttgccttcagtcacttattaaaaaccttatgaaaactttacccacacttaccttgttttgtctagtgagagtctgactgtggaaaagatctcctcttcaaaccttttgtctactaggaaatgcatatttttcagactataggcagcccaccaattaggttgtggagtctcgaaacatgaagagcataagcaatgcgttcaactgattgttgcctagaatatgacatcttactagaggaaaaatctgccgggcagaacttatcatggtcaccagagctttgccaactagtgagtaataatagagttaagacatatactgagagtagtatgcctttggagtagtccatgattttggaatactgaa

SEQ ID NO: 592661 - DNA, 574 bp, Homo sapiens
ttaaaagttttttgcttattggaaaactgccttgctagtaataacattattttctctgtctatccttctccttatttgttatgattctgctatagtaaattcatagggaagaggtccagtatagggcctgttaaatccattctttaagacagtcctgggacctaagaaattcagaagctttctcctcagaatagcrttctttggatacattttgccttcagtcacttattaaaaaccttatgaaaactttacccacacttaccttgttttgtctagtgagagtctgactgtggaaaagatctcctcttcaaaccttttgtctactaggaaatgcatatttttcagactataggcagcccaccaattaggttgtggagtctcgaaacatgaagagcataagcaatgcgttcaactgattgttgcctagaatatgacatcttactagaggaaaaatctgccgggcagaacttatcatggtcaccagagctttgccaactagtgagtaataatagagttaagacatatactgagagtagtatgcctttggagtagtccatgattttggaatactgaa

SEQ ID NO: 592662 - DNA, 574 bp, Homo sapiens
ttaaaagttttttgcttattggaaaactgccttgctagtaataacattattttctctgtctatccttctccttatttgttatgattctgctatagtaaattcatagggaagaggtccagtatagggcctgttaaatccattctttaagacagtcctgggacctaagaaattcagaagctttctcctcagaatagcattctttggatacattttgccttcagtcacttattaaaaaccttatgaaaactttacccacacttaccttgttttgtctagtgagagtctgactgtggaaaagatctcctcttcaaaccttttrtctactaggaaatgcatatttttcagactataggcagcccaccaattaggttgtggagtctcgaaacatgaagagcataagcaatgcgttcaactgattgttgcctagaatatgacatcttactagaggaaaaatctgccgggcagaacttatcatggtcaccagagctttgccaactagtgagtaataatagagttaagacatatactgagagtagtatgcctttggagtagtccatgattttggaatactgaa

SEQ ID NO: 592663 - DNA, 574 bp, Homo sapiens
ttaaaagttttttgcttattggaaaactgccttgctagtaataacattattttctctgtctatccttctccttatttgttatgattctgctatagtaaattcatagggaagaggtccagtatagggcctgttaaatccattctttaagacagtcctgggacctaagaaattcagaagctttctcctcagaatagcattctttggatacattttgccttcagtcacttattaaaaaccttatgaaaactttacccacacttaccttgttttgtctagtgagagtctgactgtggaaaagatctcctcttcaaaccttttgtctactaggaaatgcrtatttttcagactataggcagcccaccaattaggttgtggagtctcgaaacatgaagagcataagcaatgcgttcaactgattgttgcctagaatatgacatcttactagaggaaaaatctgccgggcagaacttatcatggtcaccagagctttgccaactagtgagtaataatagagttaagacatatactgagagtagtatgcctttggagtagtccatgattttggaatactgaa

SEQ ID NO: 592664 - DNA, 595 bp, Homo sapiens
tcaactaaacactctgatagttcttgaacattgccttataacaacatgatctataaaactgaacaatgtctctcaaattggttgtttataagatttaactggggtgcttcttaacatctagatttccaggtcctcttctaggaaattctcatttcagtaacaaaaatttctcttcagaaagggagctagaaataaatatttttaaagaagcaccatacacgattttatgattaggcaagttggggaatgttgactgaaagcaagcctgaaaataataccataactataattttaagaatacttaaattaattaagcaatagttaattgaactttaacccaggagttttatcaagactttctttgttttcccagggaaaatgtctaaattcataaccacttattgtttccccaatttgtttaactattttaccagagaatacatattaattgcatctgaagcactacccttttaactttgaaaggcacttactctataaatttccctcacctcatgtatagagtgatagcattctttgaactcccaaaattatttttgaaaaatttacraatgtaacaaagtaatcaagaagcaat

SEQ ID NO: 592665 - DNA, 620 bp, Homo sapiens
gtgtggataggatgtgggggtcatcaagttgctcacgtatggggagcttttgagccaggatgagccaggagaaggaatttcacaagataatgtcatcagttaaggcaggaacaggccattttcatttcttttgtggtggaatgtcatcagttaaggcacgaaccggccatctggatgtgcacgtgcaggtcacaggggatatgatggcttagcttgagctcagaggcctgacaagttcagcaaaacttgtttytaaagacacagtttacaaaaaccctgctgataaaacaaaatgatgtaaagaagccagcagaaaccagtcagaatcaagatggtaacaaaagctacctctgaatgttctcactgctcattatgcactaattataatgcataagcctgctaaaagaaactcctaccattgccaccgcaatttgcaaatgccatggatacatttggaagttacacggtccaaaagggcaggaaccctcagttccactccctgcttctttcccagaaaactgatgaataatctaccccatattttgcatataatcaagaaataaccataaatatggccagccaacaacccatgagggctaatctgcctatggagtagccac

SEQ ID NO: 592666 - DNA, 620 bp, Homo sapiens
gtgtggataggatgtgggggtcatcaagttgctcacgtatggggagcttttgagccaggatgagccaggagaaggaatttcacaagataatgtcatcagttaaggcaggaacaggccattttcatttcttttgtggtggaatgtcatcagttaaggcacgaaccggccatctggatgtgcacgtgcaggtcacaggggatatgatggcttagcttgagctcagaggcctgacaagttcagcaaaacttgtttttaaagacacagtttacaaaaaccctgctgataaaacaaaatgatgtaaagaagccagcagaaaccagtcagaatcaagatggtaacaaaagctacctctgaatgttctcactgctcattatgcactaattataatgcataagcctgctaaaagaaactcctaccattgccaccrcaatttgcaaatgccatggatacatttggaagttacacggtccaaaagggcaggaaccctcagttccactccctgcttctttcccagaaaactgatgaataatctaccccatattttgcatataatcaagaaataaccataaatatggccagccaacaacccatgagggctaatctgcctatggagtagccac

SEQ ID NO: 592667 - DNA, 503 bp, Homo sapiens
aaatgacatgtctcagtgccttttaccagagattgtaaagctagcaaaagtcaagaaagaattttctccttgtttctctttgccaaggacagaagggtctcctgcctgagcgctgaagtctgccacctgcagaaacatttgagcagtaatataattaagccttccctttgaactcatagtttggtgcaattttttaattaataaactttatttttagagcagctttaggttcacagcaaaattgatttggaaagtacagarttcacatatatctcctgttcccacacaagcacaatctcttccgctatcagcatcacacacaagaatagtacattagttacatctgatgaatctacattgacacgtcgttattacccaaagcccatagtttatattagattccacttttgatgttgtacattatattggtttggacaaatgtacaataacaactattcactactgtagtatgatacagaataattttactgccctaaaaaaaa

SEQ ID NO: 592668 - DNA, 606 bp, Homo sapiens
gctccctttggatcagctttagataggaacaaaacaaatgtacaataaaaagaatcagagcagtagttgcatcttgggtgagggtcaggaatttatctgaagggatcctgagagagttttcttggggtgacagtaatgtctttatcrtaaccaggcttgggtagcagggtgtgagcatttattgaaatccacttatttaatggcttacttaagatttgtgcacttcattgtatgtgaacattatcccccaaattaaaaaaaaaaaaaaaaccataaacaaacactgaagtcaagttaatgacatgtggaaataaattggtgtttgtatctttgaaatgcatcaaaaataatcggatgggttgatgaagcggtggaggaatgatagatgggggggtaattaataaagtatagtgaaaccttaattgtacaattgagatggggaatatatgaaagttcactgggaaatgctttatacttttctacatgtttgaacagtttcataataaaatatgaggaaacaaataatttcttatcaaatgatgggcacttagaactagcttatatcattagttttataatcactctctgagataaatagcaatattg

SEQ ID NO: 592669 - DNA, 606 bp, Homo sapiens
gctccctttggatcagctttagataggaacaaaacaaatgtacaataaaaagaatcagagcagtagttgcatcttgggtgagggtcaggaatttatctgaagggatcctgagagagttttcttggggtgacagtaatgtctttatcataaccaggcttgggtagcagggtgtgagcatttattgaaatccacttatttaatggcttacttaagatttgtgcacttcattgtatgtgaacattatcccccaaattaaaaaaaaaaaaaaaaccataaacaaacactgaagtcaagttaatgacatgtggaaataaattggtgtttgtatctttgaaatgcatcaaaaataatcggatgggttgatgaagcggtggaggaatgatagatgggggggtaattaataaagtatagtgaaaccttaattgtacaattgagatggggratatatgaaagttcactgggaaatgctttatacttttctacatgtttgaacagtttcataataaaatatgaggaaacaaataatttcttatcaaatgatgggcacttagaactagcttatatcattagttttataatcactctctgagataaatagcaatattg

SEQ ID NO: 592670 - DNA, 655 bp, Homo sapiens
gacgtgcagctggggcagtgtggccagtgacttcagttgcccttccgtcaggccaccttgagagtgctttggtagaacttagacctgtcctgaggaagcctgtgggtagttttgatgatactgtcactttgcacactgtaacatgcaaaactcgcagcacgccctgggaagcaggcaggcatggagagcctaagtaacgggaaggagagcarccggctgcaccggggtggaggttgtttaggagacaggctggcagccatcaggcactttgccctttatttctgtcagatgctgctgaaaagaaggcaaggggtcaacgttgagcgtggatgcagaaaagagcccagggatcaggctgagcccagaatgctggaaccgtaacagaataggaaacagcatgtacacaacaaagtcccaaaccatctccatatgatgatcctgctattacaggagcaaaactcttgttaaatcaggaagagggcagggtgtggtggctcccgcctgtaatcttagcactgtgggaggccaaggcaggcagatcacctgaagtcaggagtttgagaccagcctggccaacacggtgaaactccatctctaccaaaaaaaaaaatgccaaaaaattagctgggtatggtcgtgtgtgcctgtaatacca

SEQ ID NO: 592671 - DNA, 594 bp, Homo sapiens
caaatgttttggccttaagatctttccctgttgcttgtctttagggtaaaaatgcttatgagatcatgaagaggcacgtgcctagttctctctcttccaaactggtcagtaagtccagctctgctgggcaggtgaccctcctccattgacctctgatctgctctattgcttcacacctgttttcttgtccacttcgtcatgctcacccctcctcactcagtagcctcactccttatttcactgagagaatgaagttgattggaagagggcctgttcatttctgcaccatcgagtctgtccaccctragactgagccctctttttgctccctgtggttacggggaacatacatgtgcctccttgtctatggcaacaactgccctgatgcgctgggtcccaaatcctccggcctaatggcaaatttgactgtgctaatatcccctctcttttcccttttcactgaggcacaaaacaagctagaaagtctctctctctctttatttttttttgtttttttttgcttcccttcagtttctgcaattcccagaaaaaacttttctgcatttcctttctgagctctatcctatctcaaat

SEQ ID NO: 592672 - DNA, 594 bp, Homo sapiens
caaatgttttggccttaagatctttccctgttgcttgtctttagggtaaaaatgcttatgagatcatgaagaggcacgtgcctagttctctctcttccaaactggtcagtaagtccagctctgctgggcaggtgaccctcctccattgacctctgatctgctctattgcttcacacctgttttcttgtccacttcgtcatgctcacccctcctcactcagtagcctcactccttatttcactgagagaatgaagttgattggaagagggcctgttcatttctgcaccatcgagtctgtccaccctaagactgagccctctttttgctccctgtggttacggggaacatacatgtgcctccttgtctatggcaacaactgccctgatgcgctgggtcccaaatcctccggcctaatggcaaatttgactgtgctaatatcccctctcttttcccttttcactgaggcacaaaacaagctagaaagtctctctctctctttattttttttkgtttttttttgcttcccttcagtttctgcaattcccagaaaaaacttttctgcatttcctttctgagctctatcctatctcaaat

SEQ ID NO: 592673 - DNA, 594 bp, Homo sapiens
caaatgttttggccttaagatctttccctgttgcttgtctttagggtaaaaatgcttatgagatcatgaagaggcacgtgcctagttctctctcttccaaactggtcagtaagtccagctctgctgggcaggtgaccctcctccattgacctctgatctgctctattgcttcacacctgttttcttgtccacttcgtcatgctcacccctcctcactcagtagcctcactccttatttcactgagagaatgaagttgattggaagagggcctgttcatttctgcaccatcgagtctgtccaccctaagactgagccctctttttgctccctgtggttacggggaacatacatgtgcctccttgtctatggcaacaactgccctgatgcgctgggtcccaaatcctccggcctaatggcaaatttgactgtgctaatatcccctctcttttcccttttcactgaggcacaaaacaagctagaaagtctctctctctctttatttttttttktttttttttgcttcccttcagtttctgcaattcccagaaaaaacttttctgcatttcctttctgagctctatcctatctcaaat

SEQ ID NO: 592674 - DNA, 596 bp, Homo sapiens
tcatttctgcaccatcgagtctgtccaccctaagactgagccctctttttgctccctgtggttacggggaacatacatgtgcctccttgtctatggcaacaactgccctgatgcgctgggtcccaaatcctccggcctaatggcaaatttgactgtgctaatatcccctctcttttcccttttcactgaggcacaaaacaagctagaaagtctctctctctctttatttttttttgtttttttttgcttcccttcagtttctgcaattcccagaaaaaacttttctgcatttcctktctgagctctatcctatctcaaatcctctccactcttgctctgtttccatcgcactattgcccaggatgccagcaaagctcaggaccctcatccagcaattccttcacggtcctcctcagccttgggttcattttctttgcttggctccccatgagatttcttctgacttctctgagcactctgtttccaactccttgattggttccttatgttccagatctcccttaaatactgagaaggtcgagggcctcagggcctgtttctcagttctcttcttaatcttcagtcactcttatgca

SEQ ID NO: 592675 - DNA, 507 bp, Homo sapiens
ctttctgagctctatcctatctcaaatcctctccactcttgctctgtttccatcgcactattgcccaggatgccagcaaagctcaggaccctcatccagcaattccttcacggtcctcctcagccttgggttcattttctttgcttggctccccatgagatttcttctgacttctctgagcactctgtttccaactccttgattggttccttatgttccagatcycccttaaatactgagaaggtcgagggcctcagggcctgtttctcagttctcttcttaatcttcagtcactcttatgcaatctccatcccatctcccactgggggcctccaaattttgtctcttgccccgactcccaccctaaactccgtatttacatatttcttatttccacctggatgtctaataggtccagttgagcattctaagctgaaggaatttgaaaacaatggcagaagcaggaatgtcactctgacctttccccacccttctcccctgaagagg

SEQ ID NO: 592676 - DNA, 507 bp, Homo sapiens
ctttctgagctctatcctatctcaaatcctctccactcttgctctgtttccatcgcactattgcccaggatgccagcaaagctcaggaccctcatccagcaattccttcacggtcctcctcagccttgggttcattttctttgcttggctccccatgagatttcttctgacttctctgagcactctgtttccaactccttgattggttccttatgttccagatctcccttaaatactgagaaggtcgagggyctcagggcctgtttctcagttctcttcttaatcttcagtcactcttatgcaatctccatcccatctcccactgggggcctccaaattttgtctcttgccccgactcccaccctaaactccgtatttacatatttcttatttccacctggatgtctaataggtccagttgagcattctaagctgaaggaatttgaaaacaatggcagaagcaggaatgtcactctgacctttccccacccttctcccctgaagagg

SEQ ID NO: 592677 - DNA, 507 bp, Homo sapiens
ctttctgagctctatcctatctcaaatcctctccactcttgctctgtttccatcgcactattgcccaggatgccagcaaagctcaggaccctcatccagcaattccttcacggtcctcctcagccttgggttcattttctttgcttggctccccatgagatttcttctgacttctctgagcactctgtttccaactccttgattggttccttatgttccagatctcccttaaatactgagaaggtcgagggcctcagggcctgtttctcagttctcttcttaatcttcagtcactcttatgcaatctccatcccatctcccactgggggcctccaaattttgtctcttgccccgactcccaccctaaactccrtatttacatatttcttatttccacctggatgtctaataggtccagttgagcattctaagctgaaggaatttgaaaacaatggcagaagcaggaatgtcactctgacctttccccacccttctcccctgaagagg

SEQ ID NO: 592678 - DNA, 626 bp, Homo sapiens
gcaccaggggcgtttggatgcggaattagtgcaggggtctttaccaggcactaagcaagagccctgagttaggaatatgacagaagaccagttgtcacaactgggaaacaagtccatggcctggccaacagccctgctaacttaatgttgagccccagaatatgaagccagtgattcttcaatccacttctctgtttcaggatgagtcctaaagaatgaaccaagatggatcccactatcctgggtgactgagagcctgtcaaaggtctccagttgtgtgagtggaaggcttaaggcttttgtgagtggaccaggcatggcctagtagtgtgctgttttgtggaaattcctcaygtatgaaaattttgcaaaagtgaggcatgataatgaaaatactgtggtacagaggagagagaattttggattcataaaccctgagttcagccttggtgccaagttgcatttattgtgtgacactgagtttggtcatgtggcttcttcgagcctcaattttctcatttgtaacatgggcataaccgcaccttaatttcttccatctcagggtagcgtttctgatgctgtatgaaacaatggcctgctggctaatatgtgttatgaaaaatggg

SEQ ID NO: 592679 - DNA, 597 bp, Homo sapiens
aactcctatttcaaaaacaaaaggctccaggggaaaagatgattcagggctaaatcttttgagaatgtaaggacagatgtttctactataatcttcctctggttttatcctgaacttggcttgatattttgtacctatagactaatgaataaagctaacagtagcaacgtgatttatataaaagacagtgacatgggagagggcaaaatcaaacgcactgacagatgtaagtgtgtggccaagcaggagataggatgaggtaggcacaattgtcyttgcttctgcacctcttgtagatttctttaataagtgcattttcaattgttgtaggcatatcaatagaaacagaatgtccctgaattagtggcatttgattccatctcgcttttgagcaagagaaaggcttctcgtttcctgacaccaccagcatcatcgttagcagaggcttttcacccactcttatcagggtaaaagaagaacaagtccactcaaagcagctgtgtggctggtatggaagctttctgtccttatagatagtgttgtctgtcagtgttacctctcattatttgatgctgtaactggcacctgtcatataat

SEQ ID NO: 592680 - DNA, 582 bp, Homo sapiens
gctgtaactggcacctgtcatataayactaagtgtattctccatttaatcaatcatttatagctatttcaagtgatgaacgttgtgtgctataaaacattctgtggctccagtatgtctacttttctgcatctttcttgtggaaattccagccaccagcatcttccacctagattaccagcatgggtttccactgtgctccctgtcgtggtcttcaggctgtctgttcctacagttccacaagcgtgatcttcctgaagtgcaatcctttgctgttcctctgctaacaaaccttccatgaacatccattgccctctctatgaaatccatatttttggagaatggcatggaaaaacccttcatggtttatatctgaactcgtgttttatcatttcctgcctcaaagtagatgctccaccttgtctctactagttgtaatatcctgagtatgcctttctttcttatttttttaaaaaaattttactattgtggttaagaaagcccttctttctgtctgaaatgtcttctatgctcttcccctcattcctttccagattaattctcactcctcatttggctgtta

SEQ ID NO: 592681 - DNA, 538 bp, Homo sapiens
tcctgcctcaaagtagatgctccaccttgtctctactagttgtaatatcctgagtatgcctttctttcttatttttttaaaaaaattttactattgtgkttaagaaagcccttctttctgtctgaaatgtcttctatgctcttcccctcattcctttccagattaattctcactcctcatttggctgttagcttacttgtcactcctttcagaaagctctctctcatttcccagcaatatagtgcagggcccaataaatatttcctaaatgaaaaacttaacaaagtacaaagagaactggaagagcccaggtcacagcgtcacctgtgttcctagacataagtgaatggagttgagaggtttcaggtgggaataatcaacagtgttaaatatgacaaaaaaatctgtgccaaggaacagatccagaaaagtctctactgcacttcttaattagaggcatcagtgaaagtcatttcagtagaatgatctggagggaactctgattattgaggactggggtaggattggaaattaagga

SEQ ID NO: 592682 - DNA, 576 bp, Homo sapiens
tggttggccagcaagggaatatatcttcaggccatgcaacttatttcgactaatgctgtgtagtaatcccaaaccaaggcttccgagaagcatgacacctacgctatgcacttattctcctcctggcagctggatgaaaatgacaaggccctggagaatggtagaggcaaaagatagaagaatgctgaattatggcatgarggagagctgcccaccaaccaggacactctcatttgatgttatttgagcgaaggaatccaaatgttagagagaaagagatgctagagtggatttataatatttgaacattcatccctcccttattttgttaaagcactgaaatttgggggtttatgttattactgcagcctcatctgccataattaagatagtctatgaacagaacaagatgcaggatgatggaaggccatgggtgcttcagtctctgtttaacaagcttgccatgtacatcaagggagatttcaggtttagtcttaagttcctcacctgtttcagctctaggaactctattcgattaaacctcactcccttccccagcactccctaggatcagtc

SEQ ID NO: 592683 - DNA, 622 bp, Homo sapiens
gcagagtcaaaataatgcattttcaagcccctcgagataattctgctctgtatggtcgtaccactaacatgaattatggttagcttctatttgttttggatagttttacaacttttagggatttttagaaaatatgtttagtttattttggtttgtgtttgtaaaatatttacacggttctaaagtcaaaactaaaacaaggcacactcagaagtctggcttccttctcagccccctctctcagttcttttactaccctgaaagacaatgtccatttgattcgtttttggtttatctttatactgtttttaagtttataaagtgtacacatgyatattatagtacatgtgatatataatgcatagtgtatacaaacacattcatgtggatttttacatcgttaacacagagggcagcctgctatacgcaccagtctgcactctccttttcctttacagcacagactggaaaaccacactccagatgtacgtggcgagggcgctcttcctgcttataactgcatggggctgcatgggggtgggcatggccaatgtaatcccctggcaatggatgtgagggttggctccagccatttgcctcactatgctatgatgtccagctt

SEQ ID NO: 592684 - DNA, 417 bp, Homo sapiens
caggtaatgtgattcctccaattttgttctttttgcttaggatagctttgactattctgggccttttctgattccaaataaactttaggattgttttttctatttctgtgaagaatgacattggtattttgaaagagattgcattgaatctgtagcttgtttggggtaatatgaacattttaacartattgattcttccaatccatgaccatgggatatttttccatttttcagtgtcctcttcagtttatttcatcagtgttttatattttcattatagagatttttcatttctttggttaattcctaggtctttaattttatgtgtggctattgtaaatgggattacttttttatttctttttcatgttgtgcactgttggcatataaatgctactgaatgttgtatattgattt

SEQ ID NO: 592685 - DNA, 454 bp, Homo sapiens
acacaccacagttacagcaytaccatattctgtgtttttctgtgtacttactattatctgtggtttttgtatcttcagatgattttcttattgctcattaacatccttttctttctgattgaagtactccccttagcatttcttgtaggacaggcccggtgttgatgaaattccttagtttttgcttctccgggaaagtctttatttctctttcatgtttgaaggatatatttttgccagatgtactataatattctagggtaaaagctttttccttcagcactttaaatatgtcatgcctcagtctcctggcctgtaaggtttccactgaaaagcccactgctagacatattggagctccattgtatgttgtttgtttcttttctcttgctgcttttaggagcctttctttatccttgacctttgggattttgattattaaatatcttgaggt

SEQ ID NO: 592686 - DNA, 611 bp, Homo sapiens
ttctgtgtacttactattatctgtggtttttgtatcttcagatgattttcttattgctcattaacatccttttctttctgattgaagtactccccttagcatttcttgtaggacaggcccggtgttgatgaaattcctyagtttttgcttctccgggaaagtctttatttctctttcatgtttgaaggatatatttttgccagatgtactataatattctagggtaaaagctttttccttcagcactttaaatatgtcatgcctcagtctcctggcctgtaaggtttccactgaaaagcccactgctagacatattggagctccattgtatgttgtttgtttcttttctcttgctgcttttaggagcctttctttatccttgacctttgggattttgattattaaatatcttgaggtagtcttctttggcttaaatctgtttgatgttttataaccttcttgtacttggatattgatgtctttctgtaggtttgggaatttctctgttatccctttcaataaactttctacccctatctctttctgtgtctcctctttgaggccaataactcttaaatttgccattttgtggctattttatagatcccgta

SEQ ID NO: 592687 - DNA, 611 bp, Homo sapiens
ttctgtgtacttactattatctgtggtttttgtatcttcagatgattttcttattgctcattaacatccttttctttctgattgaagtactccccttagcatttcttgtaggacaggcccggtgttgatgaaattccttagtttttgcttctccgggaaagtctttatttctctttcatgtttgaaggatatatttttgccaratgtactataatattctagggtaaaagctttttccttcagcactttaaatatgtcatgcctcagtctcctggcctgtaaggtttccactgaaaagcccactgctagacatattggagctccattgtatgttgtttgtttcttttctcttgctgcttttaggagcctttctttatccttgacctttgggattttgattattaaatatcttgaggtagtcttctttggcttaaatctgtttgatgttttataaccttcttgtacttggatattgatgtctttctgtaggtttgggaatttctctgttatccctttcaataaactttctacccctatctctttctgtgtctcctctttgaggccaataactcttaaatttgccattttgtggctattttatagatcccgta

SEQ ID NO: 592688 - DNA, 611 bp, Homo sapiens
ttctgtgtacttactattatctgtggtttttgtatcttcagatgattttcttattgctcattaacatccttttctttctgattgaagtactccccttagcatttcttgtaggacaggcccggtgttgatgaaattccttagtttttgcttctccgggaaagtctttatttctctttcatgtttgaaggatatatttttgccagatgtactataatattctagggtaaaagctttttccttcagcactttaaatatgtcatgcctcrgtctcctggcctgtaaggtttccactgaaaagcccactgctagacatattggagctccattgtatgttgtttgtttcttttctcttgctgcttttaggagcctttctttatccttgacctttgggattttgattattaaatatcttgaggtagtcttctttggcttaaatctgtttgatgttttataaccttcttgtacttggatattgatgtctttctgtaggtttgggaatttctctgttatccctttcaataaactttctacccctatctctttctgtgtctcctctttgaggccaataactcttaaatttgccattttgtggctattttatagatcccgta

SEQ ID NO: 592689 - DNA, 559 bp, Homo sapiens
attaaatatcttgaggtagtcttctttggcttaaatctgtttgatgttttataaccttcttgtacttggatattgatgtctttctgtaggtttgggaatttctctgttatccctttcaataaactttctacccctatctctttctgtgtctcctctttgaggccaataactcttaaatttgccattttgtggctattttatagatcccgtagacatgcttcattgtttttaattcttttttcttttgtctccttactgtgtatattcaaatagcctgtcttcaaggtcattaattctttcttctgtttgatcaattctgctagtaaaggaatctgatgcattcgttrgtatgccaattgccttcttcagctccagaatttttgctttattccttttatttcaatctctttgttaaatatatctcatagaattctgaattccttctctacgttatcttgaatttcttttgagttttcttaacacggtgattttgaattctctgaaaggtcccatgtctctgtttcttcaggattggtctctggtgccttatataatttat

SEQ ID NO: 592690 - DNA, 559 bp, Homo sapiens
attaaatatcttgaggtagtcttctttggcttaaatctgtttgatgttttataaccttcttgtacttggatattgatgtctttctgtaggtttgggaatttctctgttatccctttcaataaactttctacccctatctctttctgtgtctcctctttgaggccaataactcttaaatttgccattttgtggctattttatagatcccgtagacatgcttcattgtttttaattcttttttcttttgtctccttactgtgtatattcaaatagcctgtcttcaaggtcattaattctttcttctgtttgatcaattctgctagtaaaggaatctgatgcattcgttagtatgccaattgccttcttcagctccagaatttttgctttattccttttatttcaatmtctttgttaaatatatctcatagaattctgaattccttctctacgttatcttgaatttcttttgagttttcttaacacggtgattttgaattctctgaaaggtcccatgtctctgtttcttcaggattggtctctggtgccttatataatttat

SEQ ID NO: 592691 - DNA, 559 bp, Homo sapiens
attaaatatcttgaggtagtcttctttggcttaaatctgtttgatgttttataaccttcttgtacttggatattgatgtctttctgtaggtttgggaatttctctgttatccctttcaataaactttctacccctatctctttctgtgtctcctctttgaggccaataactcttaaatttgccattttgtggctattttatagatcccgtagacatgcttcattgtttttaattcttttttcttttgtctccttactgtgtatattcaaatagcctgtcttcaaggtcattaattctttcttctgtttgatcaattctgctagtaaaggaatctgatgcattcgttagtatgccaattgccttcttcagctccagaatttttgctttattccttttatttcaatctctttgttaaatatatctcatagaattctgaattccttctctaygttatcttgaatttcttttgagttttcttaacacggtgattttgaattctctgaaaggtcccatgtctctgtttcttcaggattggtctctggtgccttatataatttat

SEQ ID NO: 592692 - DNA, 565 bp, Homo sapiens
tttcccaagctgaaatacatgagtatctaggttgaatactctgcttgaatgtccagcaaagtggataaaaatagatctttactaagtagcaaatggtgaaatttcagaataatggggacaaaatgattgtaaaaacctccagacacacacacattaatgttctcactaacagacatgcaggttactttcacagagtcaargtagaaatgagaccatactcctccagaatggcctgggaagctagcagaaatatgcactaggaacaatgagaaatgtcatcaatgttctcagggaaagtgacttaaaaattagagtttcataccccatctgatgttcaaccaagtgtgggagtagattaaggatatttccaggtctataaatctcaacattttagctttcctctcttctcaagaagctcctagccaacgtgttccaccccattattaggggtgtgagcagtagtgaggaaggcataggctgtggagaaatagatgagggtgtattcatctgccagggctgctgtaacaaagtaccttagactgggtggctgacacaacaacaattt

SEQ ID NO: 592693 - DNA, 565 bp, Homo sapiens
tttcccaagctgaaatacatgagtatctaggttgaatactctgcttgaatgtccagcaaagtggataaaaatagatctttactaagtagcaaatggtgaaatttcagaataatggggacaaaatgattgtaaaaacctccagacacacacacattaatgttctcactaacagacatgcaggttactttcacagagtcaaagtrgaaatgagaccatactcctccagaatggcctgggaagctagcagaaatatgcactaggaacaatgagaaatgtcatcaatgttctcagggaaagtgacttaaaaattagagtttcataccccatctgatgttcaaccaagtgtgggagtagattaaggatatttccaggtctataaatctcaacattttagctttcctctcttctcaagaagctcctagccaacgtgttccaccccattattaggggtgtgagcagtagtgaggaaggcataggctgtggagaaatagatgagggtgtattcatctgccagggctgctgtaacaaagtaccttagactgggtggctgacacaacaacaattt

SEQ ID NO: 592694 - DNA, 565 bp, Homo sapiens
tttcccaagctgaaatacatgagtatctaggttgaatactctgcttgaatgtccagcaaagtggataaaaatagatctttactaagtagcaaatggtgaaatttcagaataatggggacaaaatgattgtaaaaacctccagacacacacacattaatgttctcactaacagacatgcaggttactttcacagagtcaaagtagaaatgagaccatactcctccagaatggcctgggaagctagcagaaatatgsactaggaacaatgagaaatgtcatcaatgttctcagggaaagtgacttaaaaattagagtttcataccccatctgatgttcaaccaagtgtgggagtagattaaggatatttccaggtctataaatctcaacattttagctttcctctcttctcaagaagctcctagccaacgtgttccaccccattattaggggtgtgagcagtagtgaggaaggcataggctgtggagaaatagatgagggtgtattcatctgccagggctgctgtaacaaagtaccttagactgggtggctgacacaacaacaattt

SEQ ID NO: 592695 - DNA, 537 bp, Homo sapiens
atccttactttttgtttctttagtttgggccccagagactgcgcagccactcattcatggttagcattggtaccagcagattataaatgtacagctctgactagtttttctgaaacaaatctggggttaatgtgtgactgtgctttgccttcctttttcatttaattccctccggcatagaatgagtcatctcaaaaaaggagtttgataaagtacctgtaattaaaaattaccttgcgggttcctgccctttctctgtgtttggttaatagaaggtttctgtcaagctcacatgaaggttcagtcatcagtatttcaaacctgctcgtatatctgtgtactyggcggaattgtgaattccttagagaccttcactattttcaatttgtcattctcattattatttcatgagcaaggtgaaaaggagaggatgcacaacagaggaggttaaaaggagggtgagggaaggcagtgtactaggcagaggagagaggagaagggagaggggaggtggatgatgggcgcataagaaatgtt

SEQ ID NO: 592696 - DNA, 588 bp, Homo sapiens
ggttcttttctcagctccagatggtgacctttactgggctaagtcaccaaaaggtcagaaacatggagaggtaattactggaacaaaattgtattcagtttgaaaatttagccacaccgcaggtgtacataatgcttaaaacacacttagggacaatggacaagaatatttttattgggctaataataaagtcactctgggaagggaatccctgggaagtcctatagacaatctccacaatattgtaaaagcagttttgttcttgctgctttcatttatgtagttagagtgtaaacactctagaatttcratctctatttctatcattgttttattttaaaaattctattatgaagaaattcaaacatatgggaaagttagaagtacacatttttatgtccagcacctgttttcctcaattaacatttcactccactacctttaatatccctccaccctctatccatttgtcagtctctctctttctcttttttttttccacttcacatagaattctggctggcatgcattttttttttcttccttagtttactaagaactcatttactttcattagtgattacagta

SEQ ID NO: 592697 - DNA, 654 bp, Homo sapiens
ttctctcttgctgcttttagaatcctttctttatctttggcctttgggagtttgattattaaatgccttgaggtagtcttctttggcttaaatctgcttagtgttctacaaccttcttgtacttggattgatatctttctttaggtttggaaagttctttgttattatccctttgaaaaaactttctacccctatctctctctctacctcctcttataggccaaaaccttttagatttgcccttttgaggctattttctagaccttgtaggtgtccttcattttattttattttttctcttgtctcctcttgactgtattttctaatagcctgtcttcaaactcactaattctttcttttgcttaatcarttctgcttttaaaagactccgatttttaaagactctgctttcaaaagatttttcagtatgccaattgcattctttaactgcagaacttctgcttgattctttttaattgttccaatctctttgttaaatttatctgctagaattcagagaactctttgtgttatcttgaacttgtttgagtttccttaacatagccattttgaattctctgtctgacaatcacatatgtatctctctttctccagtattggttcctggtgccttacttagttcttttggtaagg

SEQ ID NO: 592698 - DNA, 596 bp, Homo sapiens
ctattttctagaccttgtaggtgtccttcattttattttattttttctcttgtctcctcttgactgtattttctaatagcctgtcttcaaactcactaattctttcttttgcttaatcaattctgcttttaaaagactccgatttttaaagactctgctttcaaaagatttttcagtatgccaattgcattctttaactgcagaacttctgcttgattctttttaattgttccaatctctttgttaaatttatctgctagaattcagagaactctttgtgttatcttgaacttgtttgagtttccttaacatagccattttgaattctctgtctgacaatcacatatgtatctctctttctccagtattggttcctggtgccttacttagttcttttggtaaggtcatgttttcctggatggtacygatgcttgttgatatttgtcagtgtctgggcattgacgaattaggtatttattgtagtcgtcagagtctgggcttatttgcacctgttcttgtttggaaggctttgcaggtgtttgaaaggacttgggtgctgtgatctaagccatatctgcattaaggggcatgcaaga

SEQ ID NO: 592699 - DNA, 351 bp, Homo sapiens
ccttctcagctaaatttattcctcagtattttatcatttgtagttattgtaamtggaattgctttcttgatgtctttttcaaacagcttgctattggcatatagaaacactactgatttttgtatgtttattttgtatcctgcaactttacagtttattagtactaacagtttgtgtgtgtgtgtgtgtgtgtgtgtgtgtgtagaccttagggttttctatgtatataatcatgtcatctgcagagagagacaatttgactttctctttttcaatctggaggccttttatttctttctcttaccagatccatctggctagaacttccagtactatgttgagtggaaatgg

SEQ ID NO: 592700 - DNA, 351 bp, Homo sapiens
ccttctcagctaaatttattcctcagtattttatcatttgtagttattgtaactggaattgctttcttgatktctttttcaaacagcttgctattggcatatagaaacactactgatttttgtatgtttattttgtatcctgcaactttacagtttattagtactaacagtttgtgtgtgtgtgtgtgtgtgtgtgtgtgtgtagaccttagggttttctatgtatataatcatgtcatctgcagagagagacaatttgactttctctttttcaatctggaggccttttatttctttctcttaccagatccatctggctagaacttccagtactatgttgagtggaaatgg

SEQ ID NO: 592701 - DNA, 351 bp, Homo sapiens
ccttctcagctaaatttattcctcagtattttatcatttgtagttattgtaactggaattgctttcttgatgtctttttcaaacagcttgctattggcatatagaaacactactgatttttgtatgtttattttgtatcctgcaactttacagtttattagtactaacagtttgtgtgtgtgtgtgtgtgtgtgtgtgtgtgtagwccttagggttttctatgtatataatcatgtcatctgcagagagagacaatttgactttctctttttcaatctggaggccttttatttctttctcttaccagatccatctggctagaacttccagtactatgttgagtggaaatgg

SEQ ID NO: 592702 - DNA, 551 bp, Homo sapiens
aaatgttcattgaatatcaaaaatgtgccaggcactgatctgtgcattttccacacagaaaataaagtatggccttaagccctagtaaatttcaacagactcagctgggaggtagagagagctggcacaggaagttgttaccacttgcaaagccaagttatcctcaggagtattctgactcctggaggtgtttcaagaagactcaaatctgctgcctgtggtagtgggaaagttagataagctgtcttaggctgcttccccatcagtaaagtggggatattaacacatttgcaagaactgctgtgaaaatttaatgagataatatgtgmaaaggaatagccatggtcaggaccaccaggaccttgacaaaagatagcacctctgccctctctggagccgctttcctagttagacaatcctcactgcctgtattgtccacactcccgagctttccaatttccagcaattctagcagcacgaccctgcagcccagagataagatgtgatggaattacctctgctagtctgatctttggtcccaatttgatgta

SEQ ID NO: 592703 - DNA, 523 bp, Homo sapiens
ggcttttttctcagctgcacagctcttttgtgttttcctcaagttagcatagtgctctttagggggtggggtagagatgaccccctcaccttstccactcctgagccttggaagagccccctctgatcactgactccacgcctgtgtttcttttattaggtgttcttgtccatggggcttcctcatgtaggggccacagttggcaaacaggtcatatcctttctggaatggctgtacagagggaggcacaacccactcctccactgacctgtgaacttgggcatctcacttcttttagtgatgcaagagtgaggattcccccactgcttgggcaccacccaagccagcaagaactgcttggctaggagttgcagggatgagtggggtcacctaatctgctgtccagctgcttcgcaggggaacatggagttgcccccacctgcagagttcatataaaagcaggactgctgggctggaagctctagcaggtgtgggctgctggctgtgagcagtggcagtgggt

SEQ ID NO: 592704 - DNA, 564 bp, Homo sapiens
gaattccaagatcaaggtgtgggcagggctggttcctcctgaggcctctgtcctgggcctgtagatgctgtcttctccctgtgtccttacatggtcttcccttgtgtgtgtatctgtgtcctaatctcttataaggacaccgttcaggttaggactcactataaagacctcaatttaacgtaatcacctctttaaagccccatctccaaatacagtcccattctgaggcgctggggttaggacttcaacatacaaatttttgagaacacaacttagcctgcagcagtgcagtactcagtacagctgtgggagcccactagacgacttctcccccatcttggggagggcacggaaaatagtctcgtgtgagaagctgtgtggtcttctccttgctgtagaacagaatgagggcaatggaagcaggcatcagatgttggcctggacatcccattgtgayacagatgtcacatcccagtaggtgttaaagacacatgtgggctttgtgctggtactagggtggataagagatgagtaaggtgtactgatgcccgttgtggagcaact

SEQ ID NO: 592705 - DNA, 530 bp, Homo sapiens
ttcacttccttggttagatgaattcataggyatttcatttcctttgtggctattgtaaatgggattgtgttcttgatttggttctcaggtagaatgttattgatgtataaaaatgctattgatttttgtacattgattttgtaccctgaactttactgaatttgtttatcatttccaggagccttttggcagagtctttagggttttcttggtgtagaataatattggcaaagagagagtttggactccttcttttcctattcatatgcattttctttctttctcttgcctgatttatctggccaggacttccaatactatgttgaataggagtggtgagagtgggaatccttgtcttcttccagttctcaaagggaatgtttccagcttttgcccattcggtatgatgttggttgtgggtttgtcatagatggctcttataattttgaggtatattccttcaatattatatgttgaactctcagcataatatgttgagagtttttatcatgaagggatgttggatttta

SEQ ID NO: 592706 - DNA, 530 bp, Homo sapiens
ttcacttccttggttagatgaattcataggcatttcatttcctttgtggctattgtaaatgggattgtgttcttgatttggttctcaggtagaatgttattgatgtataaaaatgctattgatttttgtacattgattttgtaccctgaactttactgaatttgtttatcatttccagragccttttggcagagtctttagggttttcttggtgtagaataatattggcaaagagagagtttggactccttcttttcctattcatatgcattttctttctttctcttgcctgatttatctggccaggacttccaatactatgttgaataggagtggtgagagtgggaatccttgtcttcttccagttctcaaagggaatgtttccagcttttgcccattcggtatgatgttggttgtgggtttgtcatagatggctcttataattttgaggtatattccttcaatattatatgttgaactctcagcataatatgttgagagtttttatcatgaagggatgttggatttta

SEQ ID NO: 592707 - DNA, 530 bp, Homo sapiens
ttcacttccttggttagatgaattcataggcatttcatttcctttgtggctattgtaaatgggattgtgttcttgatttggttctcaggtagaatgttattgatgtataaaaatgctattgatttttgtacattgattttgtaccctgaactttactgaatttgtttatcatttccaggagccttttggcagagtctttagggttttcttggtgtagaataatattggcaaagagagagtttggactccttcttttcctattcatatgcattttctttcyttctcttgcctgatttatctggccaggacttccaatactatgttgaataggagtggtgagagtgggaatccttgtcttcttccagttctcaaagggaatgtttccagcttttgcccattcggtatgatgttggttgtgggtttgtcatagatggctcttataattttgaggtatattccttcaatattatatgttgaactctcagcataatatgttgagagtttttatcatgaagggatgttggatttta

SEQ ID NO: 592708 - DNA, 174 bp, Homo sapiens
ctaggctatgtaggccttgcaaccacatagctgcgtgatcgggtttgtgtggctgtggatgaggagacccctgccaattgttattrgctatataatcagtttatttttcaatatagtaatcaaatatatttcatcatatttgatggtctcaaatatgtgtgggttttggaattc

SEQ ID NO: 592709 - DNA, 625 bp, Homo sapiens
tttatccaagattggtgtcatattggctaaatctaatcaatacttgaacaaatgcaaaattagagcttctttatcatgaaacactatgtcattctttaagaagatgcctttttttttttttttttttttttaagatagagtcttgctcttgtcgcccaggctggagtgcagtggtgcgattttggctcactgcaacccttgccttctgggttcaagcaattctcctgccttagcctcccgagtagctggrattacaggtgcccgccaccagatgatttttgtatttttagtagagatggggtttcaccatgttggccaggctcacctcgaactcctgaactcaagtgatctgcctgcctcagcctcccaaagtgcagggattacagacatgagccaccactctgggcctccatttcttttttgtagtctttaataaacagctgctatgattgcagatttgctatttaggcacttaggaatttttcactagaaggcatgtaaagaaagaccacgggcctttgtaatgaatttagcattcattctttgactacgtgactgtccacagagctataactttactaatgaattttttagaagccacttagctagcaactgagcctaatca

SEQ ID NO: 592710 - DNA, 625 bp, Homo sapiens
tttatccaagattggtgtcatattggctaaatctaatcaatacttgaacaaatgcaaaattagagcttctttatcatgaaacactatgtcattctttaagaagatgcctttttttttttttttttttttttaagatagagtcttgctcttgtcgcccaggctggagtgcagtggtgcgattttggctcactgcaacccttgccttctgggttcaagcaattctcctgccttagcctcccgagtagctgggattacaggtgcccgccaccagatgatttttgtatttttagtagagatggggtttcaccatgttggccaggctcacctcgaactcctgaactcaagtgatctgcctgcctcagcctcccaaagtgcagggattacagacatgagccaccactcygggcctccatttcttttttgtagtctttaataaacagctgctatgattgcagatttgctatttaggcacttaggaatttttcactagaaggcatgtaaagaaagaccacgggcctttgtaatgaatttagcattcattctttgactacgtgactgtccacagagctataactttactaatgaattttttagaagccacttagctagcaactgagcctaatca

SEQ ID NO: 592711 - DNA, 462 bp, Homo sapiens
gccaggtgtggtggctcacactggtaatcacaacactttgggaggctgaggcaggaggatggcttgaggccaagagtttgcgataggccttggaaacaaagggagtcaccatccctacagaaaaatacatgaattagcctagtgtggtggcatgttcctgtagtcccagctacttgggaggctragctgggaggatcacttgagcccagggaggctgagactgcagtgagtcatgatcagacctctgcactccagcctgggtgacacagtgagaccttgtctcagaacaacaaaaaagtagcagctaacatcaactgaccttttaccaggtgcctattgataccatagtttaatttcttataactgtttcttatttcacttaccaactctgtcttcagttactcccagatttttactgtttgtacagatgaccttttgtttagattgaattgtctccccaga

SEQ ID NO: 592712 - DNA, 462 bp, Homo sapiens
gccaggtgtggtggctcacactggtaatcacaacactttgggaggctgaggcaggaggatggcttgaggccaagagtttgcgataggccttggaaacaaagggagtcaccatccctacagaaaaatacatgaattagcctagtgtggtggcatgttcctgtagtcccagctacttgggaggctaagstgggaggatcacttgagcccagggaggctgagactgcagtgagtcatgatcagacctctgcactccagcctgggtgacacagtgagaccttgtctcagaacaacaaaaaagtagcagctaacatcaactgaccttttaccaggtgcctattgataccatagtttaatttcttataactgtttcttatttcacttaccaactctgtcttcagttactcccagatttttactgtttgtacagatgaccttttgtttagattgaattgtctccccaga

SEQ ID NO: 592713 - DNA, 424 bp, Homo sapiens
gacactgttaaaaatggtaagkgagatttattcaaaactattgtaagaggggtcatgacttagcaataaagaagagaaattgagctcaactccaaatacaataaagacaggagttggaagttacagccaacaagcacaatgaagccatcagtggatgcaaaattactaagaggagagggcagagggattcttgctaaaggcaggctaaggatttagacatcaagggtgagaagtgaagaacttgatcagatatcaagggtgaaggattctcactaaactgaattagcaggattcttattaaagacagaccaaagtagaggcttagtcaagaaggctcagaggagcttaactaaaatttggtaaaggaggaaatctttgtcactcgtgcacccaagaaagacagccattagccctggagttcttg

SEQ ID NO: 592714 - DNA, 459 bp, Homo sapiens
tttttgtgcccttcatattcaagaaaaattattcagacactgttaaaaatggtaagggagatttattcaaaactattgtaagaggggtcatgacttagcaataaagaagagaaattgagctcaactccaaatacaataaagacaggagttggaagttacagccaacaagcacaatgaarccatcagtggatgcaaaattactaagaggagagggcagagggattcttgctaaaggcaggctaaggatttagacatcaagggtgagaagtgaagaacttgatcagatatcaagggtgaaggattctcactaaactgaattagcaggattcttattaaagacagaccaaagtagaggcttagtcaagaaggctcagaggagcttaactaaaatttggtaaaggaggaaatctttgtcactcgtgcacccaagaaagacagccattagccctggagttcttg

SEQ ID NO: 592715 - DNA, 467 bp, Homo sapiens
ttgtgcccttcatattcaagaaaaattattcagacactgttaaaaatggtaagggagatttattcaaaactattgtaagaggggtcatgacttagcaataaagaagagaaattgagctcaactccaaatacaataaagacaggagttggaagttacagccaacaagcacaatgaagscatcagtggatgcaaaattactaagaggagagggcagagggattcttgctaaaggcaggctaaggatttagacatcaagggtgagaagtgaagaacttgatcagatatcaagggtgaaggattctcactaaactgaattagcaggattcttattaaagacagaccaaagtagaggcttagtcaagaaggctcagaggagcttaactaaaatttggtaaaggaggaaatctttgtcactcgtgcacccaagaaagacagccattagccctggagttcttgaactctcccat

SEQ ID NO: 592716 - DNA, 459 bp, Homo sapiens
tttttgtgcccttcatattcaagaaaaattattcagacactgttaaaaatggtaagggagatttattcaaaactattgtaagaggggtcatgacttagcaataaagaagagaaattgagctcaactccaaatacaataaagacaggagttggaagttacagccaacaagcacaatgaagccatcagtggatgcaaaaytactaagaggagagggcagagggattcttgctaaaggcaggctaaggatttagacatcaagggtgagaagtgaagaacttgatcagatatcaagggtgaaggattctcactaaactgaattagcaggattcttattaaagacagaccaaagtagaggcttagtcaagaaggctcagaggagcttaactaaaatttggtaaaggaggaaatctttgtcactcgtgcacccaagaaagacagccattagccctggagttcttg

SEQ ID NO: 592717 - DNA, 426 bp, Homo sapiens
actgttaaaaatggtaagggagatttattcaaaactattgtaagaggggtcatgacttagcaataaagaagagaaattgagctcaactccaaatacaataaagacaggagttggaagttacagccaacaagcacaatgaagccatcagtggatgcaaaattactaaraggagagggcagagggattcttgctaaaggcaggctaaggatttagacatcaagggtgagaagtgaagaacttgatcagatatcaagggtgaaggattctcactaaactgaattagcaggattcttattaaagacagaccaaagtagaggcttagtcaagaaggctcagaggagcttaactaaaatttggtaaaggaggaaatctttgtcactcgtgcacccaagaaagacagccattagccctggagttcttgaactc

SEQ ID NO: 592718 - DNA, 459 bp, Homo sapiens
tttttgtgcccttcatattcaagaaaaattattcagacactgttaaaaatggtaagggagatttattcaaaactattgtaagaggggtcatgacttagcaataaagaagagaaattgagctcaactccaaatacaataaagacaggagttggaagttacagccaacaagcacaatgaagccatcagtggatgcaaaattactaagaggagagggcagagggattcttgctaaaggcaggctaaggatttagacatcaagggtgagaagtgaagaacttgatcagatatcaagggtgaaggattctcactaaactgaattagcaggattcttattaaagacagaccaaagtagaggcttagtcaagaaggctcagaggagcytaactaaaatttggtaaaggaggaaatctttgtcactcgtgcacccaagaaagacagccattagccctggagttcttg

SEQ ID NO: 592719 - DNA, 561 bp, Homo sapiens
caattttttttaattaatggaggttggatttaagaggttagatgaagtatggccaggacgtgtctgatccatatctgaagaattgctgaagggcagctcagctcagagcaggcggattcccatgctttctatggttctattctttgattcagcagaagttcctgtaggtagctgaaacttcaccaggttcttatgacaccctgtttttgtgaccattcctcggttatctgggccagacccctcagtcaaaggtagccccctttcctcaggtggccacatggccagcctggatccctgctgccgggtccttcatgaagtgatggaatgcccgcattcacaaacctgaaatctcaggactgggaaccaagaccaycctgtatgacatcatgacataactatttgtagcaggaaattattttccaagaacatcagtctatacaccaaccaataattcaatgtttgccttaggaacttcctgtaaaccaatttctacgggaaaagaatttgctcatctggacaatagctattctctcaagtctagtcagcaaactactcctttgc

SEQ ID NO: 592720 - DNA, 553 bp, Homo sapiens
acaaggaagaggaccgaggcatgatgcatttcatccagcacatggctctatgtgcccggatgcagcacctatgcttacrtaatgagaaaaggtgtgagaggaacttttgtttcatggagcattgcccagcccacaccacagtcctgtaagtgcccatcctgtttactttgccattgctgcactgatggacagccatctatggagacaaagccagagcaggggatgcaaagctgggctggaccagaagggttgcctcagccatctagagatggggaggggacataaatctctgaatcattctctagggggctaaggtcactgatgggaagagcacacaatgagccgcatccaaggggtgggagggaaacagaagaaggggtcaaggcagaggctgagagagtcaaagtggatacatcagggtggggtgaggagcccacagaggggagaggtttaggttggagctacacctctaaatgtgtggggtcaggctggtcctaagaatagaaacaaagcagctaaatagaatccagccactagtgggaacaggcatgat

SEQ ID NO: 592721 - DNA, 552 bp, Homo sapiens
ttgagatgctgactaacatcctgttggatatattaagtacgatatgaaatatgcataccttttaaagtccatgaattctgaattctaaaaatgcatctaaactaagggctatgggtaagggaccatctgcctgtgactacccagcttttatcaagtaccatgtgtcacgggaagtgttaagtgatttattttcaaaatctacaataactttacagagttgtcttttacagataagaaaattgagtaattaaggcttaaaatattgacttgcccaataaaaagacaagacaaaatttgaatccaggtctcttaattcttaattattgcaggtcactgtctctattaaaacaaagatacataaaatgggtgagagttgcataagaaatcaaatgaaataggaggaaaaaaggcatgtgttgatcattagtagaattggtatgccacaatattaattaaaatgaaatggaggsggggcctgaagttatggcacaggtgaaagaaaacggcagtggaagggccctgtgattagtgattggtttacataaagcaagt

SEQ ID NO: 592722 - DNA, 446 bp, Homo sapiens
ccagtttctttgacataaaaataaagtttggatcatgtcgaccttaatataaattctggaatacwcattcacttaattctaaggataagaaaaataaaaagtgacaatttgaccataacaacagatctagagaaatatgtattttaatatcctggagaaaatataacctttaccttccaattatttcttcaatatggcattgggtttttaatgtgcacaaatgactaataattttataacagtcccacaaaatgtaaaaagatatttgtaacttgtcatatgtttgggaattaaatgtaaaaatgatgtaactgcacattatttttgaataaatatgaatttattcaatataaaaaattacaagctgcatttttttgtttgtaaagaagtgccttttaataaaaattaaaaatgattccaaaatagcaacttttcaataactaaaa

SEQ ID NO: 592723 - DNA, 446 bp, Homo sapiens
ccagtttctttgacataaaaataaagtttggatcatgtcgaccttaatataaattctggaatactcattcacttaattctaaggataagaaaaataaaaagtgacaatttgaccataacaacagatctagagaaatatgtattttaatatcctggagaaaatataacctttaccttccaattatttcttcaatatggcattgggtttttaatgtgcacaaatgactaataattttataacagtcccacaaaatrtaaaaagatatttgtaacttgtcatatgtttgggaattaaatgtaaaaatgatgtaactgcacattatttttgaataaatatgaatttattcaatataaaaaattacaagctgcatttttttgtttgtaaagaagtgccttttaataaaaattaaaaatgattccaaaatagcaacttttcaataactaaaa

SEQ ID NO: 592724 - DNA, 446 bp, Homo sapiens
ccagtttctttgacataaaaataaagtttggatcatgtcgaccttaatataaattctggaatactcattcacttaattctaaggataagaaaaataaaaagtgacaatttgaccataacaacagatctagagaaatatgtattttaatatcctggagaaaatataacctttaccttccaattatttcttcaatatggcattgggtttttaatgtgcacaaatgactaataattttataacagtcccacaaaatgtaaaaagatatttgtaacttgtcatatgtttgggaattaaatgtaaaaatgatgtaactgcacattatttttraataaatatgaatttattcaatataaaaaattacaagctgcatttttttgtttgtaaagaagtgccttttaataaaaattaaaaatgattccaaaatagcaacttttcaataactaaaa

SEQ ID NO: 592725 - DNA, 595 bp, Homo sapiens
attatttttgaataaatatgaatttattcaatataaaaaattacaagctgmatttttttgtttgtaaagaagtgccttttaataaaaattaaaaatgattccaaaatagcaacttttcaataactaaaagtgttaaacctgagaaagtgatcacataatatgatgttctttaatcatttttgttaagtctttattttaacactttcttcccaagttcttagtttcatattttctactgtgtgttagacatttatacctgaaattcactctaaatttactgtatctaaaattactattatcctattaatacttccaaaactatcttctcctaattcccatatatctggaaatagaacctacatccttctcagagactcaaatctctctgataccacttatttgtcctgccagcattcaatcacctttcatttctttccaacaggcttcccaaagaaaatgtctgattacagcaatctcctattgattaaccttttgtgtccccctgtgaaaaaacacccatattctttctgtcctattgcctatgcgccaagcacatctgtttcaaattctttctggctttatattccatgtttct

SEQ ID NO: 592726 - DNA, 446 bp, Homo sapiens
ccagtttctttgacataaaaataaagtttggatcatgtcgaccttaatataaattctggaatactcattcacttaattctaaggataagaaaaataaaaagtgacaatttgaccataacaacagatctagagaaatatgtattttaatatcctggagaaaatataacctttaccttccaattatttcttcaatatggcattgggtttttaatgtgcacaaatgactaataattttataacagtcccacaaaatgtaaaaagatatttgtaacttgtcatatgtttgggaattaaatgtaaaaatgatgtaactgcacattatttttgaataaatatgaatttattcaatataaaaaattacaagctgcatttttttgtttgtaaagaagygccttttaataaaaattaaaaatgattccaaaatagcaacttttcaataactaaaa

SEQ ID NO: 592727 - DNA, 277 bp, Homo sapiens
ttcactttgctctgatcaccagccatgtaactactactccacaaacccaaagacaaggacaggtgaaacacaaaggctctatgtatagaaataactggtcgtggaaggcagggctgagatgccagtcatttgctcaataaatatttmatgaaagcactctaagtgccatctcaaaataacacttcctaagtggagttgcacaaatttccatcagaacctcctctccaaccccatccttccctatctcagttaatgaaattccagttgctcggatcaa

SEQ ID NO: 592728 - DNA, 277 bp, Homo sapiens
ttcactttgctctgatcaccagccatgtaactactactccacaaacccaaagacaaggacaggtgaaacacaaaggctctatgtatagaaataactggtcgtggaaggcagggctgagatgccagtcatttgctcaataaatatttcatgaaagcactctaagtgycatctcaaaataacacttcctaagtggagttgcacaaatttccatcagaacctcctctccaaccccatccttccctatctcagttaatgaaattccagttgctcggatcaa

SEQ ID NO: 592729 - DNA, 277 bp, Homo sapiens
ttcactttgctctgatcaccagccatgtaactactactccacaaacccaaagacaaggacaggtgaaacacaaaggctctatgtatagaaataactggtcgtggaaggcagggctgagatgccagtcatttgctcaataaatatttcatgaaagcactctaagtgccatctcaaaataacacttcctaagtggagttgcacaaatttccatcagaacctcctctccaaccccawccttccctatctcagttaatgaaattccagttgctcggatcaa

SEQ ID NO: 592730 - DNA, 577 bp, Homo sapiens
caatatttatactgactctaaagggtatgccttccatatcctgcaccaccawgctgttatatgggcagaaataagtttcctcactatgcaagggtcctccatcattaatgcctctttaataaaaacacttctcaaggccgctttacttccaaaggaagctggagtcattcactgcaagggccatcaaaaggcatcagatcccattgctcagggtaatgcttatgctgttaaggtagctaaaaaagcagctagcattccaacttctgttccccatggaagtttttctccttctcatcagtcactcccacctactcccccactgaaacttccaactatcaatctcttcccaaacaaggcaaatggttcttggaccaaggatctccttccagcgtcataggcccaatctattctgtcgtcatttcataacctcttccatgtaggttacaagctggtagcccgcctcttaaaacctctcatttcctttccatcatggaaatctatcctcacggaaatcaattcttagtgttccatctgctattctactactcctcagggattgttcaggccccctcccttc

SEQ ID NO: 592731 - DNA, 570 bp, Homo sapiens
tctgtttacaactccatttagtttatagttcacaatgtagagagaaacctttaggctgaacttaaaatatgtaggagacaactttcagctaaacttgatttaacaatatattaagagtttatattatagaaattgctttattgctaactttgtcatctgggttagattataaactcaagattattgggtagatagttggcacmtaatctgtgtgcaaggcactgagaaaacaaaagataaaaagctgttgttcttcagctagttggcagcattgatattcctccaatgtacttgtgcctgctttgaaaacaatgcctctgcctctatttggattggctccctcacggtgaaagaaaaaggagtgattgtgatcctgaatttctgaaataaggagcatgtttaacggacaatctagcatctgttttctgtacctttcccaccctgttgacaaattctcctccatctgcatcgcttaaagcttagtcagaaagtaacagaaacctcctcatggagagaaaggaaggagagaacagaaacctagatagggaacactaaagtgtcagagaaaga

SEQ ID NO: 592732 - DNA, 392 bp, Homo sapiens
gggataagtctctaacaatttcccctggatcatagggcttggatatggagaatgtcctgggcatatttcacaatggtcactctcctcctccctgtaacagagtaaggagagtatctttctgagttcttcaccataaaaacctggtggagttcctggaggtaaagccccaaacatgtggaagttcccttaagacagcagcacccrggaatttcccactatcatcactagtctagactcagtctccagccattcatcgaagtgtttcagtgttcctaccactttaggaatccagctgctcctgcccctggtaagaagatctcagctatgttcctctggatgaacccatctctccacttttgaggatggcagtttgcccgcaacttcaattttct

SEQ ID NO: 592733 - DNA, 392 bp, Homo sapiens
gggataagtctctaacaatttcccctggatcatagggcttggatatggagaatgtcctgggcatatttcacaatggtcactctcctcctccctgtaacagagtaaggagagtatctttctgagttcttcaccataaaaacctggtggagttcctggaggtaaagccccaaacatgtggaagttcccttaagacagcagcacccgggaatttcccactatcatcactagtctagactcagtctccagccattcatcgaagtgtttcagtgttcctaccactttaggaatccagctgctcctgcccctggtaagmagatctcagctatgttcctctggatgaacccatctctccacttttgaggatggcagtttgcccgcaacttcaattttct

SEQ ID NO: 592734 - DNA, 584 bp, Homo sapiens
actaaaaattatctaaaatgtgatttccttttttggtaaaatacatgtagagtgttgtggatgcatattttaaaaactagatataacaaaagcatagagcaattacatgtgattttttcttttctcctttttgtttgtattttctctgttttacataacaaacaagtactgcttttgtaaaagaagaaaaccataaaagttaaaacaaaaggactagtttataaaatcataggactttaataaaatttggggtttattgtcaagccagtttctaatttcttctgttgaggaaactgaagcacagaaaaactaatcttcttaaatcttctaatttctcayttttgcctatcagaataataaccatcactaaaggcactgctcacatatacaagctttggcatttctaatacagcatatgttatgtctcatcaattttaaagtttttccagtatagtcataatacttaggagggggaagaagagaagagaggagctgtgagaaagataatagcttttatgtactatttggcaagcacttaactgtgtattttgtgttattttaattaatccttacattaccttcat

SEQ ID NO: 592735 - DNA, 584 bp, Homo sapiens
actaaaaattatctaaaatgtgatttccttttttggtaaaatacatgtagagtgttgtggatgcatattttaaaaactagatataacaaaagcatagagcaattacatgtgattttttcttttctcctttttgtttgtattttctctgttttacataacaaacaagtactgcttttgtaaaagaagaaaaccataaaagttaaaacaaaaggactagtttataaaatcataggactttaataaaatttggggtttattgtcaagccagtttctaatttcttctgttgaggaaactgaagcacagaaaaactaatcttcttaaatcttctaatttctcacttttgcctatcagaatamtaaccatcactaaaggcactgctcacatatacaagctttggcatttctaatacagcatatgttatgtctcatcaattttaaagtttttccagtatagtcataatacttaggagggggaagaagagaagagaggagctgtgagaaagataatagcttttatgtactatttggcaagcacttaactgtgtattttgtgttattttaattaatccttacattaccttcat

SEQ ID NO: 592736 - DNA, 584 bp, Homo sapiens
actaaaaattatctaaaatgtgatttccttttttggtaaaatacatgtagagtgttgtggatgcatattttaaaaactagatataacaaaagcatagagcaattacatgtgattttttcttttctcctttttgtttgtattttctctgttttacataacaaacaagtactgcttttgtaaaagaagaaaaccataaaagttaaaacaaaaggactagtttataaaatcataggactttaataaaatttggggtttattgtcaagccagtttctaatttcttctgttgaggaaactgaagcacagaaaaactaatcttcttaaatcttctaatttctcacttttgcctatcagaataataaccatcactaaaggcactgctcacatatacaagctttggcatttctaawacagcatatgttatgtctcatcaattttaaagtttttccagtatagtcataatacttaggagggggaagaagagaagagaggagctgtgagaaagataatagcttttatgtactatttggcaagcacttaactgtgtattttgtgttattttaattaatccttacattaccttcat

SEQ ID NO: 592737 - DNA, 578 bp, Homo sapiens
gacagtgtgatggagtctgtgtacacatgctcatgctagtggtggtggaatggctgggtctccatgcacataggcaccagcaggggctgggttatggtggtgagttccacatgcatgcatctgtggtactgggtgatatgttttggctgtgtccccacccaaatctcatattgaattgtaatccccactggctgggggagggacctcatgggaggtgattagatcatgggartggtttccccatgctgttcttgtgatagtgagtgagttctcatgagatctgatggttttataagaggcttcccccttcactctgcactcattctctctcctgccaccatgtgaagaaagatatgtttgcttcttcttccatcatgattgtaagtttcctgaggcctccccagccattcaaaactgtgagtcaactaaacctcttttctttataatttacccagtctcgggtatgtccttatagtagtgtgagaatgaacaaatagactggggttgtgaggttcacagagtgcacaccatagcatagtagtaggaacaggccatgggcaggtgcttgggggcaaagc

SEQ ID NO: 592738 - DNA, 578 bp, Homo sapiens
gacagtgtgatggagtctgtgtacacatgctcatgctagtggtggtggaatggctgggtctccatgcacataggcaccagcaggggctgggttatggtggtgagttccacatgcatgcatctgtggtactgggtgatatgttttggctgtgtccccacccaaatctcatattgaattgtaatccccactggctgggggagggacctcatgggaggtgattagatcatgggaatggttyccccatgctgttcttgtgatagtgagtgagttctcatgagatctgatggttttataagaggcttcccccttcactctgcactcattctctctcctgccaccatgtgaagaaagatatgtttgcttcttcttccatcatgattgtaagtttcctgaggcctccccagccattcaaaactgtgagtcaactaaacctcttttctttataatttacccagtctcgggtatgtccttatagtagtgtgagaatgaacaaatagactggggttgtgaggttcacagagtgcacaccatagcatagtagtaggaacaggccatgggcaggtgcttgggggcaaagc

SEQ ID NO: 592739 - DNA, 544 bp, Homo sapiens
gtcaactaaacctcttttctttataatttacccagtctcgggtatgtccttatagtagtgtgagaatgaacaaatagactggggttgtgaggttcacagagtgcacaccatagcatagtagtaggaacaggccatgggcaggtgcttgggggcaaagcagtggaggaggctgctggcaggtgcatgtcagccaggcctgtctgctaaagctctccgatggttaggtagggtccacaccaagtagctatggtggcagctgctgcaaaatgcctctgttggkgatctcaggctgcggtgcaaatgggtgtggccagggaggtgccccagagaaggaccagcaaacgggggtgtgttcagatcagactggccccgtcccatggacaagatagctctgctctgttcaggtctgacagtcaacaaaggccaaagccacctaggggagtgtggtaagccttggaggatgtgcatccctggctgtgctctactgtagtcatgctgtgccaacaccccccagttccccaaaggctggagtcttgtccctgac

SEQ ID NO: 592740 - DNA, 544 bp, Homo sapiens
gtcaactaaacctcttttctttataatttacccagtctcgggtatgtccttatagtagtgtgagaatgaacaaatagactggggttgtgaggttcacagagtgcacaccatagcatagtagtaggaacaggccatgggcaggtgcttgggggcaaagcagtggaggaggctgctggcaggtgcatgtcagccaggcctgtctgctaaagctctccgatggttaggtagggtccacaccaagtagctatggtggcagctgctgcaaaatgcctctgttggggatctcaggctgcggtgcaaatgggtgtggccagggaggtgccccagagaaggaccagcaaacgggggtgtgttcagatcagactggycccgtcccatggacaagatagctctgctctgttcaggtctgacagtcaacaaaggccaaagccacctaggggagtgtggtaagccttggaggatgtgcatccctggctgtgctctactgtagtcatgctgtgccaacaccccccagttccccaaaggctggagtcttgtccctgac

SEQ ID NO: 592741 - DNA, 571 bp, Homo sapiens
cttgccaaaattctatattgttcatgtttatcttattgttttatgagttcttttcttaatagcaatgtaagaaattattcttatgacttcatgttcatcttccaatttttatgtttcataatcatgattataaggcatattcttatgatttctagtttttcaattagaaataagtaacaaagatgttacaatttagtcagtagttgtgatattcaaataactgtgctaggcactttcatgtatgttaactcatttaataatcgacatgttaccaatatgagaataagtactattcatartgtcaaaggaggaaattggttgaaatggggtaaacaccttcccaagtttacatgtctgctcagtagtttaggtaatttatcttggatttgagtttagttattcctaggtgattcttattataaatttaattgttatattttactcaattatgttgaagtgtaataaccaactccttgctactaaacagttttgatttagcttttgtcatcattttgtttaatattgtaatacatatcttggttcatataccattttatttatcttaggttat

SEQ ID NO: 592742 - DNA, 544 bp, Homo sapiens
aacttgattctctcttctacgtaaacactctttccttatggtttctgagcagtaactcacctgtaggygttttcttcctgtctgctttttccttcttggcatttccaaaaggttcaactcttctatctctagatgttgaaggttttttagtttgggttctctaaggcagatgtttgcatgcaggtggtttttagaaagtgtttgtaaaatttgttctcactcataagtaggagctaaataatgtgtacatatggacgcagagtttggaatgatggacaatgaggaatccacggggttgaggagtgggaggaggatggacaatggcaggtttcttggtgggtacaatgcacattgctccagtaatgaatgcactgaaggctctgacttcaccacaatgaactatgtcaatgtagcaaaaattgcacttctattccatgattataaataaataaaaattcaaataaaggaaataataaaagaagaaaaggaaaaatgcttgcagaactaatatctctaatggcgtaagagaagtacggagtgaaag

SEQ ID NO: 592743 - DNA, 544 bp, Homo sapiens
aacttgattctctcttctacgtaaacactctttccttatggtttctgagcagtaactcacctgtaggtrttttcttcctgtctgctttttccttcttggcatttccaaaaggttcaactcttctatctctagatgttgaaggttttttagtttgggttctctaaggcagatgtttgcatgcaggtggtttttagaaagtgtttgtaaaatttgttctcactcataagtaggagctaaataatgtgtacatatggacgcagagtttggaatgatggacaatgaggaatccacggggttgaggagtgggaggaggatggacaatggcaggtttcttggtgggtacaatgcacattgctccagtaatgaatgcactgaaggctctgacttcaccacaatgaactatgtcaatgtagcaaaaattgcacttctattccatgattataaataaataaaaattcaaataaaggaaataataaaagaagaaaaggaaaaatgcttgcagaactaatatctctaatggcgtaagagaagtacggagtgaaag

SEQ ID NO: 592744 - DNA, 544 bp, Homo sapiens
aacttgattctctcttctacgtaaacactctttccttatggtttctgagcagtaactcacctgtaggtgttttcttcctgtctgctttttccttcttggcatttccaaaaggttcaactcttctatctctagatgttgaaggtttttyagtttgggttctctaaggcagatgtttgcatgcaggtggtttttagaaagtgtttgtaaaatttgttctcactcataagtaggagctaaataatgtgtacatatggacgcagagtttggaatgatggacaatgaggaatccacggggttgaggagtgggaggaggatggacaatggcaggtttcttggtgggtacaatgcacattgctccagtaatgaatgcactgaaggctctgacttcaccacaatgaactatgtcaatgtagcaaaaattgcacttctattccatgattataaataaataaaaattcaaataaaggaaataataaaagaagaaaaggaaaaatgcttgcagaactaatatctctaatggcgtaagagaagtacggagtgaaag

SEQ ID NO: 592745 - DNA, 544 bp, Homo sapiens
aacttgattctctcttctacgtaaacactctttccttatggtttctgagcagtaactcacctgtaggtgttttcttcctgtctgctttttccttcttggcatttccaaaaggttcaactcttctatctctagatgttgaaggttttttagtttgggttctctaaggcagatgtttgcatgcaggtrgtttttagaaagtgtttgtaaaatttgttctcactcataagtaggagctaaataatgtgtacatatggacgcagagtttggaatgatggacaatgaggaatccacggggttgaggagtgggaggaggatggacaatggcaggtttcttggtgggtacaatgcacattgctccagtaatgaatgcactgaaggctctgacttcaccacaatgaactatgtcaatgtagcaaaaattgcacttctattccatgattataaataaataaaaattcaaataaaggaaataataaaagaagaaaaggaaaaatgcttgcagaactaatatctctaatggcgtaagagaagtacggagtgaaag

SEQ ID NO: 592746 - DNA, 375 bp, Homo sapiens
ataccatatgctctcactaataaatgacagctaagccataygctatgcaaaggcatatagagtggtgtaatggacatttgagactcagaaggtgggaggatgggaacagggtgagggataaaaaagttacctgttgggtataatgtatactgtttgggtgaggggtacacttaaaacccagacttcaccattatacaatttatccatgtaaccaaaaactacttgtacccctaaaaattattgaaaaaaattactttctcttccaaacttccacaacttaataaatggcacctgtacccaggttatttctcacacaataaacttggaagtcttctgtgatatagtttcccacacatctaatctatttgcagtagt

SEQ ID NO: 592747 - DNA, 516 bp, Homo sapiens
gtctttggtggttctttctaaagacctttgccataggtacatttcccctcctcttttgttagagagaaataagcaccatgacctcaaatattagactttaattaaatactctattctgactcagtctactccaaatgagagccactttggaaataaatatttctcctttcttctttatccctccaacatttccttttctgtagttgcaccctctaaggaagactgtgctataaagagatggggggaggctctgtctacaaascatttctcaagctaggtcctgaactctatatattaggtggtttttactctttcaacagatatgcattgattatgcaccacatactgtgctatgaattcatctttcaaagggctcatggagcttatggtctatgaggagaacagatattaattaaacaaataatttaatgactggtgttgaagagtgtacatgggatggatgctcataaaaggaaaggtcaggaaacttaatctaatagggaagggttagtgaag

SEQ ID NO: 592748 - DNA, 414 bp, Homo sapiens
ttaaaaatgtatagcacctgcccctttgctctcttcctcctgctcctgtcatgtaagacatgcctgctttcacttcacccctccatcgtgattgtaattttcctgaggcctccccagctatgctccttgtatagcctgcagaactgcaagccaatcaaacctcttttctttataaattacccagtctcaggtagttctttatagcattgtgagaatggactaatasagttcaggatttgcaatttaaggaaacatgcggtgcattctatcatactctgtattattagtagatcttttataatacggtacatttcaaatgtgttcctccccaaccacaaagccttttatttacctaaacggtcttgccatgtcaaaggcaaggctactgttcagtaaactcctctaaatcagaat

SEQ ID NO: 592749 - DNA, 584 bp, Homo sapiens
tgcaggcttatcattatatatttgcctactgattaaatgtattttaatcctttatggaattaccataagagatgctatggataggctagaacaaactttgaaagagaggtggtgtcttcgtttcctagagctgctgtgttagggttcttcagggagagagaactgataggatatatatatatataatctattatatgtgtatgtgtgtatatatatatgatctattatatgtgtatgtatatatatatatatacacatatatatatatakagagagagagatgagatgagatgggatttttttaggggaattagctcccatgacaggctttctgcaacctggaaacactgaaatgctgatagcatcgcttagtccaactctgaaaacctcagaaccaggtaaacaaatggtgtaactcaatctgaggctaaaggcctgagaactcagggagttgctggtgtaagttctggagtccaaagaccagagagcttagagttctgatgtccaaaggcaggagaagaagggtgtcccagctccagaagagagagagaaagagggagagcaaatttgcctttcttctggct

SEQ ID NO: 592750 - DNA, 549 bp, Homo sapiens
cccaggctggaatgaagtggtgtgatctcagttgactgcaacctctgcctcctaggttcaagccattctcctgcctaagcctcccgagtagctgagattacaggcacatgccaccacgcccagctaatttttgtatttttagtagaggtgacgtttcgccatgttggccaggcttgtcttgaactcctgacttcaggtaatccactcgccttgtgctagaattttttttctccttatgccttcttcccagaacctccattatgtttyctttggtttagggctgtgattatacttatttgcccatatgatcatttatttattcaattaataaatatttattatggtttactatgttgtagggtagatgctagatcctaagtaagcaagggcaacaattagttgattagacatgtaagctcttgctgtctaccctgttcttggccaaattgtctgtatttcagtgcagcagatgtcttcacaaaggtttttttagcacacaaactgtttgttgagtcctataaattagcaaacaatgctagtttacttttt

SEQ ID NO: 592751 - DNA, 607 bp, Homo sapiens
agatctctaaaattctattgatttttagcaataaaggtttatctttgcaaaacaagccttcytcctgaggaattttttgttttgatttttaatatacctttttaggaggttgctattggtgtgctgcgttaaagatattcaattcctaagatacctggttaaaacaaaacaaaacaaaaccatttcctctttccaaacatgtatagaactgggtatctctttcctcattttcttttgaaaaactcaggagatgcatactgctattctcacttactgataaaaaggatattggagggaaaataaattaagaatgtcgcagagcctctgcttaagagcctaacccagctcctttcgaagaaatgtggagggagtgcattgtaaatgagatttggcaccttagcttctgcaatcttaccatagtcaacactcccactggctttagcttggagagtgctgtgtgggtggtgattgtattttatgtctttatttaagtgagtgagagagactataatgtgataattctggaaatgatagaggggaagatcctcctcaaatgtttggatggcaatgacagcacattaatagtgtaaatatttttttgtgctag

SEQ ID NO: 592752 - DNA, 607 bp, Homo sapiens
agatctctaaaattctattgatttttagcaataaaggtttatctttgcaaaacaagccttcttcctgaggaattttttgttttgatttttaatatacctttttrggaggttgctattggtgtgctgcgttaaagatattcaattcctaagatacctggttaaaacaaaacaaaacaaaaccatttcctctttccaaacatgtatagaactgggtatctctttcctcattttcttttgaaaaactcaggagatgcatactgctattctcacttactgataaaaaggatattggagggaaaataaattaagaatgtcgcagagcctctgcttaagagcctaacccagctcctttcgaagaaatgtggagggagtgcattgtaaatgagatttggcaccttagcttctgcaatcttaccatagtcaacactcccactggctttagcttggagagtgctgtgtgggtggtgattgtattttatgtctttatttaagtgagtgagagagactataatgtgataattctggaaatgatagaggggaagatcctcctcaaatgtttggatggcaatgacagcacattaatagtgtaaatatttttttgtgctag

SEQ ID NO: 592753 - DNA, 607 bp, Homo sapiens
agatctctaaaattctattgatttttagcaataaaggtttatctttgcaaaacaagccttcttcctgaggaattttttgttttgatttttaatatacctttttaggaggttgctattggtgtgctgcgttaaagatattcaattcctaagatacctggtkaaaacaaaacaaaacaaaaccatttcctctttccaaacatgtatagaactgggtatctctttcctcattttcttttgaaaaactcaggagatgcatactgctattctcacttactgataaaaaggatattggagggaaaataaattaagaatgtcgcagagcctctgcttaagagcctaacccagctcctttcgaagaaatgtggagggagtgcattgtaaatgagatttggcaccttagcttctgcaatcttaccatagtcaacactcccactggctttagcttggagagtgctgtgtgggtggtgattgtattttatgtctttatttaagtgagtgagagagactataatgtgataattctggaaatgatagaggggaagatcctcctcaaatgtttggatggcaatgacagcacattaatagtgtaaatatttttttgtgctag

SEQ ID NO: 592754 - DNA, 607 bp, Homo sapiens
agatctctaaaattctattgatttttagcaataaaggtttatctttgcaaaacaagccttcttcctgaggaattttttgttttgatttttaatatacctttttaggaggttgctattggtgtgctgcgttaaagatattcaattcctaagatacctggttaaaacaaaacaaaacaaaaccatttcctctttccaaacatgtatagaactgggtatctctttcctcattttcttttgaaaaactcaggagatgcatactgctattctcacttactgataaaaaggatattggagggaaaataaattamgaatgtcgcagagcctctgcttaagagcctaacccagctcctttcgaagaaatgtggagggagtgcattgtaaatgagatttggcaccttagcttctgcaatcttaccatagtcaacactcccactggctttagcttggagagtgctgtgtgggtggtgattgtattttatgtctttatttaagtgagtgagagagactataatgtgataattctggaaatgatagaggggaagatcctcctcaaatgtttggatggcaatgacagcacattaatagtgtaaatatttttttgtgctag

SEQ ID NO: 592755 - DNA, 448 bp, Homo sapiens
tatttagtctatttgttagagatacgtattatttaactactaaaattttatrttagagaataataaaaactgcttggaatttgttaccattattgcagtgcataaataaaaaagaactagatgaatatgtttttcgttttactgtgaatataaattaaccacttaaaattattatttcaaattggtaatatcttttttctttccttccttattcatcactgcttttgcaaatccatgtaggaattttagataactatgtgtaaagtgtctaataaaagaagaatgtacattgtccagtgtggactgaacatctattcagaggtcacctgtttagcaattgacatctatcaattactgctcttaatgaggttgctggtttcaccgatgacaagtcatgaaaagactaaggcaaactgataaatctctgcctgataataagcatatttgt

SEQ ID NO: 592756 - DNA, 448 bp, Homo sapiens
tatttagtctatttgttagagatacgtattatttaactactaaaattttatgttagagaataataaaaactgcttggaatttgttaccattattgcagtgcataaataaaaaagaactagatgaatatgtttttcgttttactgtgaatataaattarccacttaaaattattatttcaaattggtaatatcttttttctttccttccttattcatcactgcttttgcaaatccatgtaggaattttagataactatgtgtaaagtgtctaataaaagaagaatgtacattgtccagtgtggactgaacatctattcagaggtcacctgtttagcaattgacatctatcaattactgctcttaatgaggttgctggtttcaccgatgacaagtcatgaaaagactaaggcaaactgataaatctctgcctgataataagcatatttgt

SEQ ID NO: 592757 - DNA, 582 bp, Homo sapiens
agttattatggcaactagtatattgattcccatgccaaaggaattagcttttaaatcttaactattttattatattgtagactggcacatttttgtttggggtctttatgcatctctgtggctaaaaattctgaaagaaaaaaaacccatgcctcttattttactttattttattttatttatttwttttttttttgagacatggtctttctgtgttgctcaggctggtctcaaaagtctggcctcaagtaatgctcccacctcagcccctaagtgctgggtttacaggcatgatccagcatgctcagacccagctctcctgaattgttttatttcactttttagttcttcaatttttcacttaaatatatggggtgaaaaatactattgaataattacatctctcttatatggaatccaaattcttctcctccataatatttacatattttcaatatgttaataaatacaatgtcctatataactatgatctttaagatataaagttttttttacctttatattttttgtttgccaacttccaattttgtttgccaacttccaattttttattcattggat

SEQ ID NO: 592758 - DNA, 582 bp, Homo sapiens
agttattatggcaactagtatattgattcccatgccaaaggaattagcttttaaatcttaactattttattatattgtagactggcacatttttgtttggggtctttatgcatctctgtggctaaaaattctgaaagaaaaaaaacccatgcctcttattttactttattttattttatttattttttttttttttgagacatggtctttctgtgttgctcaggctggtctcaaaagtctggcctcaagtaatgctcccacctcagcccctaagtgctgggtttacaggcatgatccagcatgctcagacccagctctcctgaattgttttatttcactttttagttcttcaatttttcacttaaatatatggggtgaaaaatactattgaataattasatctctcttatatggaatccaaattcttctcctccataatatttacatattttcaatatgttaataaatacaatgtcctatataactatgatctttaagatataaagttttttttacctttatattttttgtttgccaacttccaattttgtttgccaacttccaattttttattcattggat

SEQ ID NO: 592759 - DNA, 456 bp, Homo sapiens
tgtgccaagaacagcaaaactgtttgattgggctggcctgaagaactttactgtatagtaacaacattcactactctaaggacctagagcatggtacagttatgtccacttgaatgttatgacargagaagggattaacgacatttatttgcctggtgttaggaccctaaattataagcagccccattccaacacacacacacacacacacacacacacacacaatctgatttttgtttattttgaaccccttttacaatgtctacctctttaaccatctgatttgctttgcatgacataggggcatggagtgagctaggtaggtttctgaaccctgtgctttgactatacttagttaatctcttacctgaatgaaagccttaggtttctcatctgtgtaatagaaataaaaatacttaccttgtatgattattttgttttgaagtttaaatgaga

SEQ ID NO: 592760 - DNA, 456 bp, Homo sapiens
tgtgccaagaacagcaaaactgtttgattgggctggcctgaagaactttactgtatagtaacaacattcactactctaaggacctagagcatggtacagttatgtccacttgaatgttatgacaagagaagggattaacgacatttatttgcctggtgttaggaccctaaattataagcagccccattccaacacacacacacacacacacacacacacacacaatctgatttttgtttattttgaaccccttttacaatgtctacctctttaaccatctgatttgctttgcatgacataggggcatggagtgagctaggtaggtttctgaaccctgtgctttgactatacttagttaatctyttacctgaatgaaagccttaggtttctcatctgtgtaatagaaataaaaatacttaccttgtatgattattttgttttgaagtttaaatgaga

SEQ ID NO: 592761 - DNA, 619 bp, Homo sapiens
tgttagcaatatgaaagccctcagcatggayggatagtgtggcaggagagagacagtgcagaacagttaataacatgccttcagccagacaggtctgtgtttgtatctcacctctacctcaactaaatgtgtgattttaagggcatgctatttagtctctctgagccacattcttttctgcgtcaccgagttaacaatacacgtctcataggaatataataagaattaaataatataatatttgcaaaagctatgaaagaacctcttaggcacttaattagtaggtactattatctttgacaaagatgtgatactcactgtttagtgggaatcaccatatgggaaattgctttgttttacttcaagggaactcttaagacaactatgcagtgaaaatgtttgaaagcacgcattttacatttctaagtgccaaacagaagtaattggaccgagaaggaaatggcaggaagagactgtaaattagcataatagcataatgtaaaatctagcttagaaatatttgccctactcaaattcatttctaggtagcagcaagtttgcctattttccacttatgaaaacaaaaactcccttgggggatagtacaaatgagcgagct

SEQ ID NO: 592762 - DNA, 350 bp, Homo sapiens
aagaagatttgaaacaactagagtgaggctttaaaaagtgaccattaagacaagttttagttggaggcctcaaagggatgtgaaagataaagtgtgtaattttaagagaacagtaagccacataggcttctgcacgtcccaaagtttgcatgtgtcctgggatcagggctaaccatgcaacacatattcaaaattgtcaggtttccaaattataaatattattttatgttcttattatattatataaaagtaagtggtaaacaacatgcctagcataatgcatytttaaacatatgtgctatacatatttaacatatatacacatatgtatgtatattatgcatatacat

SEQ ID NO: 592763 - DNA, 474 bp, Homo sapiens
caaattaaaatactattactgtaatgtatgcaatgagcaattgggcagggtgtagatttctacaatacgagtatttcttgaagtatattttcaaaaatttgtcttagacttggctttggatttctggacctttgtgcctgtactgtgctgaaagactttacaggtatatgcggagcaataagccagtcaccatcattttggtcacaagtcatccctcagatgtcatggaaatccsaatggtcaaagaaaattttaaagcaagacctggtcaggtgagtcagtggtcagcaactttttaaatagcctttatccttatgtaatttttggaatttagcaaacatagcatcgttgaaatagttgcaattcttaattggtcatttaaaacttatccgttttttgctttttagtatattactctacattgtcccagtatatctgcattagaaaatcatccatttaccctcacaatggtaa

SEQ ID NO: 592764 - DNA, 474 bp, Homo sapiens
caaattaaaatactattactgtaatgtatgcaatgagcaattgggcagggtgtagatttctacaatacgagtatttcttgaagtatattttcaaaaatttgtcttagacttggctttggatttctggacctttgtgcctgtactgtgctgaaagactttacaggtatatgcggagcaataagccagtcaccatcattttggtcacaagtcatccctcagatgtcatggaaatccgaatggtcaaaraaaattttaaagcaagacctggtcaggtgagtcagtggtcagcaactttttaaatagcctttatccttatgtaatttttggaatttagcaaacatagcatcgttgaaatagttgcaattcttaattggtcatttaaaacttatccgttttttgctttttagtatattactctacattgtcccagtatatctgcattagaaaatcatccatttaccctcacaatggtaa

SEQ ID NO: 592765 - DNA, 474 bp, Homo sapiens
caaattaaaatactattactgtaatgtatgcaatgagcaattgggcagggtgtagatttctacaatacgagtatttcttgaagtatattttcaaaaatttgtcttagacttggctttggatttctggacctttgtgcctgtactgtgctgaaagactttacaggtatatgcggagcaataagccagtcaccatcattttggtcacaagtcatccctcagatgtcatggaaatccgaatggtcaaagaaaattttaaagcaagacctggtcaggtgagtcagtggtcarcaactttttaaatagcctttatccttatgtaatttttggaatttagcaaacatagcatcgttgaaatagttgcaattcttaattggtcatttaaaacttatccgttttttgctttttagtatattactctacattgtcccagtatatctgcattagaaaatcatccatttaccctcacaatggtaa

SEQ ID NO: 592766 - DNA, 474 bp, Homo sapiens
caaattaaaatactattactgtaatgtatgcaatgagcaattgggcagggtgtagatttctacaatacgagtatttcttgaagtatattttcaaaaatttgtcttagacttggctttggatttctggacctttgtgcctgtactgtgctgaaagactttacaggtatatgcggagcaataagccagtcaccatcattttggtcacaagtcatccctcagatgtcatggaaatccgaatggtcaaagaaaattttaaagcaagacctggtcaggtgagtcagtggtcagcaactttttaaatagcctttatccttatgtaatttttggaatttarcaaacatagcatcgttgaaatagttgcaattcttaattggtcatttaaaacttatccgttttttgctttttagtatattactctacattgtcccagtatatctgcattagaaaatcatccatttaccctcacaatggtaa

SEQ ID NO: 592767 - DNA, 545 bp, Homo sapiens
agctaaataatggacaccatcaaatatgattagmtagtcagcatatcatttaatattattataaaaatagcatgagttcattataaacatttagacaattcacagatataaaataaaatagaaacttaaaaaaaattttccccactttccaatccttttctctactgtttgacatatatctttccagatattttcccataagcttctgcatacatgagtttctaatatttatttgctggatcatattgttttgtaactggctcctttcactcaactacatgtgatggacatctttccatattactgtatgtgcctcattcatgttaatgaccgtataatatttcacagtaggaaagtactgtaatttatttaatattctcactaatgttggatatttggactttattcattttctaagaaagataattgagagcagagaccacatgtttaaatgtatatttaagaaagatagcaaaactattttatatatatggtatgtatacatgcatacagatggaaacatgttgtaaagcatgttgtaaaac

SEQ ID NO: 592768 - DNA, 568 bp, Homo sapiens
gaatataagatttatctcctttgtcacacattggtttatgatggagatattgaaagtctagtcacattcatgaacagtaaaacctgtattttaccttttaactaagaggaaatatgatattcttattcaaacttaagtttagaatccagaatattacagttgcactttttggtatcctgagtttccatagggaactattgggtttaaagttactgttggaactacactgtgtgatcttataaacttatgttccctggctatcatattcttggctcagaacaatattccccattactatcttaagaattaaggcattcatggctcacacctgtaatcccggcactttaggaggccaaggtgggtggatcacgaggtcagtgttcaagaccagcctgaccaagttggtgaaaccccatcactactaaaaatacaaaaattaggcgggtgtggtcgtgggcgcctataatcccagctactcgggagactgaggcagagaatcgcttgwacccggtgggcagaggttgcagtgagccaagattgcaccactgcgctccagcctgggtgacag

SEQ ID NO: 592769 - DNA, 576 bp, Homo sapiens
cactatttttaactataaagaaatataagtaatctaaatataaagaattagggtagtagcagtcatgttattcatactctagaatactttgaggtacaattacacagaaattgtccacgatcgaaagaagcacatcattaaaaagttagttggttcttcctagcaaagccaagaaaaaaataaaacaacaagaacaacaaagtaagctgaagaattacttggcatagattcaatttttgttaaaaaactaaggttttgattttaaatatatatcacacacacacatacaaacatatgtttacatatactttcataagtacacacacacacactctcacacaaacttacaaaagcttctgtaagaatacataacgaagagttaccaatcattacctctgggccaggagtgtttaatgcaatttaaatttgtattctacatagtatactaacctaatgcctactggtaatcattttctgaatgcctactggtaaaaatatgtaatcattttctgaaagttaaaaartgttgcccaacacatgatattttaaaatcttaacttatatgcctgtcttccc

SEQ ID NO: 592770 - DNA, 606 bp, Homo sapiens
ttaattgttagaactaattgttagaactaatctccttgaatgccattctgacaaatggctaattttcttagatttcagttagtcgtttcatctttaaagaactgcaatgtaagacaaagaatgaattctaattggtcaatctcaaaaaggctcagcacatggatttcaattgaagtattttggcaccacagatacagttgtcatatttggctcattatgtaagtaaaatactacaaattgtcatcgtaaatttggggaaatgatcctagacaagacagctcacaacagcagaactccaaaattgggtctatcaacaaatggctgtgaacgggcttctgtttgcaattaagagagcattagatctaaatcaatgtgaagagtcagagtgaactgcggagaaaggaggaagtatctgagtcccaggcaggcaaactgagaaccagatacaaattatgcttcataccttaattatcgcaataccaggaggaaaagtgatattgacttacttcatgagactggtaaaatgaaatactttttacayaccaagtagggtagaaatatgactgggaaaattagagttagattagttttgaggtaactgaaaac

SEQ ID NO: 592771 - DNA, 594 bp, Homo sapiens
tcatatatttttaaatttcagttgataactaatgaaaagatcctttatgaaggattgtgtatctaagataattctaaggataagagatatcttcttccctgacccactcaaaagtatataaacattttttgacatttaagtttctcctttgaaagtagaatttatttacattttaaaaaactgatttaaaccttttattaagcttaatgagtttcaagctacgtttctgttttatgtggctgagtgtgaatatacttgttaaagcttttaacatggtgcctgaacatagtaagaacctgataaatattagatatttaagaataatataataaatattatactattattaaaagtaaaggtttgtaatttacaacatttaatgttcatataagtgtaaattttygaaaaatatttgccttttaaaatcttctctgatcatgtgtcactttaaacagttcttttaattaataaaaaatttcaagggtctggtgcagtggctcacacctgtaatcccagcagttagggaggctgaggcaggaggattgcttagggccagaattttgggcccagcctgagcaacaaaatgagaccctt

SEQ ID NO: 592772 - DNA, 565 bp, Homo sapiens
taatcatgctaacaaaattatactccaataaccattatgaatggatacatttaatataagattttttaacaaaggaaggacttcaggctactttgtcgactgacaatctctgcccaaaaaaaaaaaaaaaaaaaaaaaaaacaaaaaaccccaaataaacaacaaaaatccctcaaacctaaaaactaaagagtctgaaaagatgtatggcagctgaatgcaggatggggtaacaaagaaagaaaatgtctctcaaaggcactagacggagaattacctgtgcttaatctatctccaraaagtggctacatccccaacttgttctgaaattttagccacctaacctccagctatagactcagcttggccctgtccttcaaccaattcttatctgagtcaggaatgagttgtgctctcagtcagcactaaggctcgtttattgcttgctcattagccttgcactaacacagcttcttgacttacatctctgagccaaaatctttacaatttaagcagtgcctcagttttacagtcctgatgacagggttttgccttgtgaatccca

SEQ ID NO: 592773 - DNA, 685 bp, Homo sapiens
aaaattatatcagatgtacttaaacattttacatgtccaagctgtatttacaaggataaaaatatattataactactctctagtctacatatgttatgaacctaaatccttcagagtttattagcaataaaacttgtttctttatctccatttgtttcctccaacctataagtcaacaatakgcattttgtattagatacacattctttttttattcctttccactcatctatctctttctgacaattatcacacctattcgtgctctgagaattttcatggaacaatgtctacaattacatcctgaggagaatggatgccctggctttggcaatgagtcaaataagagctcacaaatgtaaaaattgattaatgaacattcttgtattttagaagagtgttcccaagcaccattgcaggtgatattttttaaatgcctttcctttaaacatacacatacatacacatatacatttcagaactagtcagttctcttcatgaatatttttcacctaaataaaggacatacatttccatatttcaatatttgttagacgtctcttggtaacagaaagttaaagattatagggacactatgttgactaaatagaaaccccagtccaaatccaaactactacagctcacactaaccagtgcacaatgagttcatgttagtaatattatg

SEQ ID NO: 592774 - DNA, 529 bp, Homo sapiens
aaaacaatattgaatttaggccaattaacaactctaaaatggcctctaagtttcaagtgaaaggagagttgcatgtctcttacttcaatcaaaaattggacatgattaaacttagtgaggaaggcatgttgaaagctgagataggcataaagttaggcttcttgtgccaaacagtgagccaaattgctaatggaagggaaaaagtttttgaagaaaattaaaagtgctacttcagtgaacatatgaataataagaaagcaaaacagccttattgctgatatggagaaagttttagtggtctggatgattaaaccagccacaacacaacattctcttaarccaaagactaatccagaacaaggccctaactctgttctattccatgaaggctgacagagatgtggaagctgcagaagaaaagtctgaagctagaagaggttggttcatgaggcttaagaaaagaagccatctctataatataaaagttcaaagcaaagcagcaagtgctgatggagaagttgcagtatat

SEQ ID NO: 592775 - DNA, 598 bp, Homo sapiens
ctagctgacataatagatgaaggtgactatactaaacaacagattttcaatgtagacaagacagccatcaagtggtagatgccatctayggcattcacagctggaaaggagcagtcaatgcctggtttcaaagcttcaaaggatagactgactcttgtctatggactaatgtagctggtcactttaagttgaagccaatgctcatttaccattctgaaaaacttaaggcccataagaattatgctaaatctactctgtctgtactctataaataaaagaacaaagtccagatgaaaacacatctgtttatagatagcgtggtttactgaatattttaagcccaccagaaaaaaaaaaagaagattctatctaaagtattactactcacataggcagtaagcaaagctcacaccggaacaataacaatgaaatggattcaaactaattgtccatcaatggatgattggataaagaaaatactgtatatatacataatcaaatactattcaggaacaaaaaagaacaaaataatgacttttgcagcaatatggataaaactgtagaccattaccctgaatgaaataactcagacacagaa

SEQ ID NO: 592776 - DNA, 556 bp, Homo sapiens
agatgatgtgtacacatggacgtagagtatggaatgatagacagtggagacttgaaatgttgcaggggggctaggaagtgggtgaataatgagaaattacttattgcatacaatgtatgttattctggtgatggataccctaaaagccctgacttggctactacacaatctatccatgtatcaaaattacatatgtaccacatacatttatacaaataaatttttaaaattactgctcattgacaatgcacctagtcaaccaagagctatgatgtagatgtacaaggagatgaatgttgtttgcaggcctgctaacattacatccgttttgcartccatggatcaaagagaaattctgactttcaattgttattatttaagaaatacttttcataaggctatagctaccatagacagtgatgcctctggtagatctgggcaatgtaaatttaaaaacatcctgaaaattattcaccttctagatggtattaagaacattcatgattcatgggaggaagtcataatatcaacattaataggagtttggaagaagtga

SEQ ID NO: 592777 - DNA, 558 bp, Homo sapiens
gttgatcaacctaagctcttatacactgctggtgggagtccaaattggtacaatagcttttgaagacaatttggcwttatcatttatgttttacttttgcaaagtctgtggcccaatatttccattctcagggatacaccctcagaaactttaacatgtgtcttagacagcaagtatgagaatgttcacagtagcaccactcacagaacaacataaatggaagcagctcagttgctcattgacatgagagaatggacatttgtgcttattcacaaaatgaagtactaactgaagtgaaactgaatgattttagttacaaataaaaacctaatgaatcatattaatataatgttgagtgaaataaaatctcagcagattacatataacagaacataatttttattgagttaaaaaaactaagcaatgtattatttaagtatgatatatatgaaataaagcaaaccaattaaaaaggaaggacatgcacaattcagaataatgattatttttaggaaaggtagggggatgaaataggagagaagcaaaagggtaaatgta

SEQ ID NO: 592778 - DNA, 558 bp, Homo sapiens
gttgatcaacctaagctcttatacactgctggtgggagtccaaattggtacaatagcttttgaagacaatttggctttatcatttatgttttacttttgcaaagtctgtggcccaatatttccattctcagggatacaccctcagaaactttaacatgtgtcttagacagcaagtatgagaatgttcacagtagcaccactcacagaacaacataaatggaagcagctcagttgctcattgacatgagagaatggacatttgtgcttattcacaaaatgaagtactaactgaagtgaaactgaatgattttagttacaaataaaaacctaatgaatcatattaatataatgttgagtgaaataaaatstcagcagattacatataacagaacataatttttattgagttaaaaaaactaagcaatgtattatttaagtatgatatatatgaaataaagcaaaccaattaaaaaggaaggacatgcacaattcagaataatgattatttttaggaaaggtagggggatgaaataggagagaagcaaaagggtaaatgta

SEQ ID NO: 592779 - DNA, 599 bp, Homo sapiens
tgtgctattactctttttaatttataaaattaacatttctttcaatcaagtgactagtaaactttctgatgataaataacccttggttttcagtctacctgccaatttatggggtactcattaaatgagtaatgtgtaatgctctatcttttcaatttttttcccacttagccttttcctaaaatgaaaaatcaagccaaaacccaacagcaaacaagaactgtacatatcaagtaaagaactgttaaatcaaacagctatatgtgttatgatattccttgaaaggtaatagtataaattaaagtttagtgaatttctcccaaacttgttaaaagcaaacaaaaatcagaattcttagtgcacacaactataatataatacatccttttcayagcaataagtttttctctttttatacaaccataaaggacatatgacaataattctggagaaaagaatctctgcagatgatatattgacaggactaaaaacacatacacagatgcacacgtgtgtgcatacacacacacacagagcaaaagcagcataaaagacatcacttataaagctgtaaggaaatctatacctaatgttcctat

SEQ ID NO: 592780 - DNA, 351 bp, Homo sapiens
ttgtttaaatcaagcgaatgtcctttattaccatggtaactcaataataatrcatggtaatacagagtaatacatggtagctgaatagtaacaatatttataatagtaacaacagttgctatttaaactattggtttcagataaacatgagaggctctcaaattagtactactttacataaaccaggaaatcaagttgcaacttattaaagatataggcaggccaggtgtggtggctcatggctacattcccaatatttgaaagcttgaggccagggatttgagaccagcctaagcaacacagcaagaccctggctcttcaacaaagtttaaaaaattagccagatgtggt

SEQ ID NO: 592781 - DNA, 351 bp, Homo sapiens
ttgtttaaatcaagcgaatgtcctttattaccatggtaactcaataataatgcatggtaatrcagagtaatacatggtagctgaatagtaacaatatttataatagtaacaacagttgctatttaaactattggtttcagataaacatgagaggctctcaaattagtactactttacataaaccaggaaatcaagttgcaacttattaaagatataggcaggccaggtgtggtggctcatggctacattcccaatatttgaaagcttgaggccagggatttgagaccagcctaagcaacacagcaagaccctggctcttcaacaaagtttaaaaaattagccagatgtggt

SEQ ID NO: 592782 - DNA, 272 bp, Homo sapiens
aagaaaaaaccctatcagttgcatgctctggttatataaaactatcttttttgcaaatattaaggccatgtcaaagyaatataaaaaacagaattttatactgtcttacataagggaaaaaaaatccctaaacccatacatgtaattttcagaagatgagatgtgtgtacaaccagagctaatgaatgaataagaacactaataggaaaacaaaataagcaacataaaaatcctctacttgacatgtattctccatagtattcctgtaatat

SEQ ID NO: 592783 - DNA, 272 bp, Homo sapiens
aagaaaaaaccctatcagttgcatgctctggttatataaaactatcttttttgcaaatattaaggccatgtcaaagtaatataaaaaacagaaytttatactgtcttacataagggaaaaaaaatccctaaacccatacatgtaattttcagaagatgagatgtgtgtacaaccagagctaatgaatgaataagaacactaataggaaaacaaaataagcaacataaaaatcctctacttgacatgtattctccatagtattcctgtaatat

SEQ ID NO: 592784 - DNA, 470 bp, Homo sapiens
atttaatggatccttttatttccagggggagcagagtgataaaagtctatttctgtgatactcattattttgcttcttacttgtttaacacactattttaaaaaaatcaaaagcagtttttgaaagaactacagacagacttcttggcccctaaatacatcaatgaatcaatacctaggactggatttcttataaaatataaattctcttttattgccacagaggctaaactataacaaaaaatgmaagagggtgggaaaaaaaaacagtttcaaagaaagtgaaggcaaataacagacattgttgggtaaacacattattgttactaagctttctacaatccaccttttaagaaaaatgttatattttcatttgtcacatcaaatgcattgttttaaacaatgttggctttcgtcaaaagaaacacctcagactgatcaagactcagctccatactaattcagttcctg

SEQ ID NO: 592785 - DNA, 614 bp, Homo sapiens
tgattattagccaaagttaatagtttcaatattatcttccacaaatgactaatcattgtaattcactagtcatggcaagagtaacaacaaaaagagtacttccaggcactcctttgggtatacagcagttgataatgaatatttgttgtaagcttaaagtttacattgtatgaatatgaattatgtaaaatctgtgagattccatatatccaaatatgatttatttatttatttatttatttattggcttcttgcagcaaccaaaagccattcacagtgatatctagtgcaaggtggttgatgtaattggcctaaaatatgttgtcataataaagtaataacattaatataaattagtgtggttataatctgactttaaaggagtttccaaaaatgaaaagaaaaatactttaaacamgtaacacatgttctgtttaaatcttttcatgaaaaatctgaataaagcctataacacgactggctcctacagtgatatagaaacaaataagagagttatcgactcttttgtggcccagtccttaactaaccctatatttaagattacttgcactgtgagaagtcaatatattatgtgactgaggcaaatccacaat

SEQ ID NO: 592786 - DNA, 614 bp, Homo sapiens
tgattattagccaaagttaatagtttcaatattatcttccacaaatgactaatcattgtaattcactagtcatggcaagagtaacaacaaaaagagtacttccaggcactcctttgggtatacagcagttgataatgaatatttgttgtaagcttaaagtttacattgtatgaatatgaattatgtaaaatctgtgagattccatatatccaaatatgatttatttatttatttatttatttattggcttcttgcagcaaccaaaagccattcacagtgatatctagtgcaaggtggttgatgtaattggcctaaaatatgttgtcataataaagtaataacattaatataaattagtgtggttataatctgactttaaaggagtttccaaaaatgaaaagaaaaatactttaaacaagtaacacatgttctgtttaaatcttttcatgaaaaatctgaataaagcctataacacgactggctcctacagtgatatagaaacaaataagagagttatcgactcttttgtggccyagtccttaactaaccctatatttaagattacttgcactgtgagaagtcaatatattatgtgactgaggcaaatccacaat

SEQ ID NO: 592787 - DNA, 348 bp, Homo sapiens
tgtttgcccattaaatcctatgttgcagatttccttccttttwtttaagtctccaattccaagctggctaccctttctaaagacattacattttatacataccattattattttttttaactctatgaaataacctccttatataaactattgttctcctcatttcaaaacacatctttcttattatccaacatcttatccttccctggtttttacagaaattagattcttccttctaatgctaccttcttaacttgtgttcacaaatccattacttccaatttccaccctcacccctcctctgcctccttcccctctgcctttaagtaccttcaagtcttcctttga

SEQ ID NO: 592788 - DNA, 348 bp, Homo sapiens
tgtttgcccattaaatcctatgttgcagatttccttccttttatttaagtctccaattccaagctggctaccctttctaaagacattacattttatacataccawtattattttttttaactctatgaaataacctccttatataaactattgttctcctcatttcaaaacacatctttcttattatccaacatcttatccttccctggtttttacagaaattagattcttccttctaatgctaccttcttaacttgtgttcacaaatccattacttccaatttccaccctcacccctcctctgcctccttcccctctgcctttaagtaccttcaagtcttcctttga

SEQ ID NO: 592789 - DNA, 348 bp, Homo sapiens
tgtttgcccattaaatcctatgttgcagatttccttccttttatttaagtctccaattccaagctggctaccctttctaaagacattacattttatacataccattattattttttttaactctatgaaataacctccttatataaactattgttctcctcatttcaaaacacatctttcttattatccaacatcttatccttccctggtttttacagaaattagattcttccttctaatgctaccttcttaacttgtrttcacaaatccattacttccaatttccaccctcacccctcctctgcctccttcccctctgcctttaagtaccttcaagtcttcctttga

SEQ ID NO: 592790 - DNA, 348 bp, Homo sapiens
tgtttgcccattaaatcctatgttgcagatttccttccttttatttaagtctccaattccaagctggctaccctttctaaagacattacattttatacataccattattattttttttaactctatgaaataacctccttatataaactattgttctcctcatttcaaaacacatctttcttattatccaacatcttatccttccctggtttttacagaaattagattcttccttctaatgctaccttcttaacttgtgttcacaaatccattacttccaatttccacccycacccctcctctgcctccttcccctctgcctttaagtaccttcaagtcttcctttga

SEQ ID NO: 592791 - DNA, 529 bp, Homo sapiens
tagatgtctgcacttaatccaagaaattatctgcatttcaatgttgtgaatatctttaatgataacaaataacagactgtgtaagcagaccctttcacctccctgacaaattcaaccaaattggtgatacataaccgtctacaaacccatatgccatatgctctatgcagcattccttttggggctggacactaactagtcgggatttattaggctctcatctttttctgagttttcaatttctttgttatttattctttaccagtcctgaagaatagggcttgattgctactcccattttgccgggaaggcagtgagaggcgaggtaatttaccaaaagtggaagaatgagatggtggcaggcccgaaatgaaagcccatagtcccaggggggaatttagattccaccacctttgtragcgggtgccagtgatgtgtttatcacacactttcatccaaggttgctgaagcatttcatgaacagaaatccttttcctcctggtctctatggctcctacagggtgtatca

SEQ ID NO: 592792 - DNA, 622 bp, Homo sapiens
gagctgaagaaaatgaaaaagatcaaggaaaagcaggaactcctggaatttcttctgaggagactcctatatggagggaaagatgwttcagaggaaagaccaaacagatcttttataccatcctcaggactttgtgtgttgatggtcatctacagggagggttgctttctttggaaatgagctagctatgccttagatgggaggctccctctctggtgctgtttcctcttctttctactgccccatcataccaagatcccagctttgtcttttccattcctctcctctcccaactacatcttcaaggctcaactctgacttggtggaggaagactaccactgtgctttaataagtaagcataggtccagctggtgtggactaatatcctcgctcagctgctccatatccctgacactagaaaaaaagccaaggtgacaatttccatcagtccagggaaaaaaggccatggagttgaaaagcaatttgagttatagaaaatatagtactgtttcttgcacacttatgttggtggactattattcatacttgctagctttgtacatttttatttctttttcattagatacatattaagaatatagaaaagcatacaaatgccac

SEQ ID NO: 592793 - DNA, 622 bp, Homo sapiens
gagctgaagaaaatgaaaaagatcaaggaaaagcaggaactcctggaatttcttctgaggagactcctatatggagggaaagatgtttcagaggaaagaccaaacagatcttttataccatcctcaggactttgtgtgttgatggtcatctacagggagggttgctttctttggaaatgagctagctatgccttagatgggaggctccctctctggtgctgtttcctcttctttctactgccccatcataccaagatcccagctttgtcttttccattcctctcctctcycaactacatcttcaaggctcaactctgacttggtggaggaagactaccactgtgctttaataagtaagcataggtccagctggtgtggactaatatcctcgctcagctgctccatatccctgacactagaaaaaaagccaaggtgacaatttccatcagtccagggaaaaaaggccatggagttgaaaagcaatttgagttatagaaaatatagtactgtttcttgcacacttatgttggtggactattattcatacttgctagctttgtacatttttatttctttttcattagatacatattaagaatatagaaaagcatacaaatgccac

SEQ ID NO: 592794 - DNA, 598 bp, Homo sapiens
attctttttaatttacttaaatatagaratgatataatatgtttatttacttctgtaattgaacaatttaaaaatattatttaagtaccctgagtgtggggtactaaggtgggctgtaggaagtgtgtgtgtgtttgtgtgtctaaaggtaagcttaattcttacccttgaggaactgattaattgattaactacgtgtcagaaatacagaaatgaaaaagatgaaaatattctaaaaagaaatacataactacacgtaaacagtttagcctaaacagaattatttcttaaaaataggttaagttttggggaaaataagttatcttttttcaaggaatgagatcatgtcctttgcaggaacatggatggtactggaagccattatcctcagcaaactaacacaggaacagaaaaccaaacacagcatgctttcactcataaatgggagctgaacaatgagaacacatggacacagagaagagaacaacacacatggggcctgtcatggggtgtcgggagagggagagcatcagaataaatgtctaatgcacacagggcttaatacctaggtgaagggttgataggtgcagcaaagcac

SEQ ID NO: 592795 - DNA, 598 bp, Homo sapiens
attctttttaatttacttaaatatagaaatgatataatatgtttatttacttctgtaattgaacaatttaaaaatattatttaagtaccctgagtgtggggtactaaggtgggctgtaggaagtgtgtgtgtgtttgtgtgtctaaaggtaagcttarttcttacccttgaggaactgattaattgattaactacgtgtcagaaatacagaaatgaaaaagatgaaaatattctaaaaagaaatacataactacacgtaaacagtttagcctaaacagaattatttcttaaaaataggttaagttttggggaaaataagttatcttttttcaaggaatgagatcatgtcctttgcaggaacatggatggtactggaagccattatcctcagcaaactaacacaggaacagaaaaccaaacacagcatgctttcactcataaatgggagctgaacaatgagaacacatggacacagagaagagaacaacacacatggggcctgtcatggggtgtcgggagagggagagcatcagaataaatgtctaatgcacacagggcttaatacctaggtgaagggttgataggtgcagcaaagcac

SEQ ID NO: 592796 - DNA, 598 bp, Homo sapiens
attctttttaatttacttaaatatagaaatgatataatatgtttatttacttctgtaattgaacaatttaaaaatattatttaagtaccctgagtgtggggtactaaggtgggctgtaggaagtgtgtgtgtgtttgtgtgtctaaaggtaagcttaattcttacccttgaggaactgattaattgattaactacgtgtcagaaatacagaaatgaaaaagatgaaaatattctaaaaagaaatacataactacacrtaaacagtttagcctaaacagaattatttcttaaaaataggttaagttttggggaaaataagttatcttttttcaaggaatgagatcatgtcctttgcaggaacatggatggtactggaagccattatcctcagcaaactaacacaggaacagaaaaccaaacacagcatgctttcactcataaatgggagctgaacaatgagaacacatggacacagagaagagaacaacacacatggggcctgtcatggggtgtcgggagagggagagcatcagaataaatgtctaatgcacacagggcttaatacctaggtgaagggttgataggtgcagcaaagcac

SEQ ID NO: 592797 - DNA, 530 bp, Homo sapiens
ctcaaacacagtaattattccctgtatatctgtgtcccctgatagtgctaaaaaagctctttgaacacagtaggttcctcattcactgagacatagtctcagtgctcataaaatattcacatagttccctatatttttcaaccaccattgcagttgtattggggccatgtgactgtttctgaccaatagacagggaatgtttgtctgagctgagacacttaagagtgagtgtgctcctgttcaccatagcaaaaacttgtaaccaacccaaatrcctatcaatgacagactggataaagaaaatgtggcacatatacaccatggaatactatgcagccataaaaacagatgagttcatgttctttgcagggacattgatgaagctggaaaccatcattctcagcaaactaaaacaggaacagaaaaccaaacaccacatgttctcactcataagtgggagttgaacaatgagaatacatggacctagggaggggatcatcaaacactgggacctgtcaggggttggggag

SEQ ID NO: 592798 - DNA, 514 bp, Homo sapiens
atgagcattcaatgaatgctcatcaaaaagaggaatagtctatgggacttctggagccagatagtttggatgagacttctgactctatcactttctagctttgtgaccttgggtaaattgcctagcctctctgtgcctcagtttattcacccacctcaaaaagtcattgtgagcatagatggagctcataaaatgcacttaacacaatgcctggaacatggtaagtttyatatatgtgttttctattattattattgctcttatatttaataggatcactcatgtccttttgccagagtcttgttgctttaggaatgggttagaaagaaagcactaatacccttaaagtttcatcagatcccctcttctatcccatgttctacagagtgttcatgtagggagacttactactacctggaacttgcccagggtattaggagattgtgctggttaatttatgtgttaacttgactgggccatggagtgcccagatatttggtcaaacattatggtt

SEQ ID NO: 592799 - DNA, 564 bp, Homo sapiens
tcttctttacagcaaacttgggcacattgacaaggtagtccagagcttatagtgatggggaaaagtactgctgacataaacccaaacagatgagggccaggcctaattagttttccagcatgaagatgaattagtgaggctgtcccttaataaacagatgccacattttggtggccgtgcaaaaccaggaggcccaaagtgttgacaagaataagtggaatgtacatgttctagagagggattagcacacttattgaatatctactatgggccaagctctggcccaacgattttttaaaattgtggtattacttccatctactcttctaaacgcagatttaatktttgccattttatgaacaacaggtatatgaaaaaatgttcaacataactaatcattagggaaatgcaaatcaaaaccacaacatgatatcatcttaccccagttagaatggttattatcaaagagacaaaaaaataacaaatgccggcaaggatgtggagaaaaggaaactcttatacactgttggtgggaatgtaaattagtacaaccactatggaaaa

SEQ ID NO: 592800 - DNA, 647 bp, Homo sapiens
gggatgattgcccttctaaaaggggcccaagaaagctgccttgtccgcttccaccatgtgagaacacagcaagaagtgccatttatgaacaaagaagtggccctcaccagatgctaaatatgtgggtgttttgatcttgaacttctcagcctcccaaatggtgagaaataaatttctgttgctaataagccacagaattttgtggcttgcttgtggtatttcattatagcacactgaatgaactaagacataacatctttatttattaatttactcatttacataacattactgtgttctagaagacctrggctttgggtaggttcggtgaccacttcaaggttagcttctggaagatctgagatcagatcttgattcagtactcactttattatttattacatatttaatattttatcacatcacagcaataattataatttggtgatcataatttcattttttaatgttttcattttaatgtataggattgcctaggctgctttaactttttaattctctaggatttttatgaaattaaaaaaaaaatctcaacccgtaacttccttatgtgagtgttttctcctaaaccctcatgctacgtagtagaacacttgttctggtttcagtttacaaactagagaacc

SEQ ID NO: 592801 - DNA, 559 bp, Homo sapiens
tggttcctgaccccgagtagcctaactaggaggcacctcccagtaggggctgactgacacctcatatggccaggtgtccctctgagacgaagcttccagaggaatgatcagacagcaacatttgctgttctgcaatatttgctgttctgcagcctccgctggtgatacccaggggaacagggtctggagtggacctccagcaaactccaacagacctgcagctgagggtcctgactgtttgaaggaaaactaaaaaacagaaaggacatctgcaccaaaaccccatctgtacatcaccatcatcaaagaccaaaggtagataaaaccacaaagatggggagaaaccagagcagaaaagctgaaaattctaaaactcagagagtctcttctcctccaaaggaatgcagctcctcaccagcagyggaacaaagctggatggagaatgactttgacaagttgagagaaggcttcagaggatcagtaataacaaacttctccaagctaaaggaggacgttcaaacccatcgcaaagaagctaaaaaccttgaaaaaagattag

SEQ ID NO: 592802 - DNA, 591 bp, Homo sapiens
ttgtagcttaactttacatcctcttcacatggtcwtgcatagaagaaaagttagttttgaagaggttcaatttattaatttttttatggactgtatttttagcaagtctaagtacaatttgcctaaccctagatcctgaagattttctcatatattgtttcctaaaagttttacagtgttatgttttatatttaagtccatgatccattttgagttgcattttatatatgatacaaggtatggatcaaagttttttttttttgcatatggatatttgatcctttgagaacatttagacagagtcttactctgtcacccaggctggaatgcagtggtgcgatctgggctcactgcataccctacgtcccaatctgcttcaagtgattctcatgtcatgcctcagcctcctaagtagctgggattacaggtgtgcgccaccacgcctggctaatttttgtagttttagtagagatggggtttcactatgttggcagggctggtcttgaactcccgacctcaggtgatccacccgcctcagcatcccaaagtgctgggattgcaggtgtgagccactgtgcccggcctgagaac

SEQ ID NO: 592803 - DNA, 516 bp, Homo sapiens
agaacctaagtttattttgccttttggtttttttttttttaaagcatctgtcattctgctgtgcatattaagctcattggccgctaataycttactttatttttaacacaagtcactgttctagtgagtctctgagcctgtatcagtcaagcaacaatttttttttttttaacaaacctatgtttaatttcttattgttcctgaaagtcggttacatacatcagggaaaaaggattggtaaaggacagcaaaagagggaaaaatctcagggaggtaaaaaataattcagaaataatatgatttattaaatctgtctcataaaaatattaaattggatatagaggaaaatataaaatatagaagtgataacctttggcataaaatggtaatacaattaccaactgaaaatgggctgacaatgaagtgctcttttccagaaatgacttttaaaccctccttaggttaacgcgtgtgctgaattattaagcaatattgtatttctttgccatattacta

SEQ ID NO: 592804 - DNA, 620 bp, Homo sapiens
tattgcccaggctggtcctaaacttctgtcctcaagcaatcctctgacctgggcctcccaaagtgctggaaattcaggcatgagccactatgcctggcctgtttatcttttcgattatagccatcatagtgggtgtgaagaggtatctcattgtcattttggtttgcattttcataatgactaatatgatgctcacatcatttcatgtattcattggccatttgcatatcttctttggagaagtgtgtatttggatcctttgtttatttctatttttactactgagttaaaagtatttttcatatattctggatrcaagccctttgtcagataaatgaattgaaaatatgttctcccatcctctgggatgtcttacattttaaattttgatgaagtccattttatcttttgtcacacttgtgtttttggcatcatatctaagaaatcactcattatttgactcaaggtcatgaagatgtactcctatggttttaacagttttatagttttagctattccttaaaggtctatggccaattttgagtttgtttttgtatctagtgtaaggaacaggtacaacttcatacatttgtatgtagctatcagttgtccctgcatca

SEQ ID NO: 592805 - DNA, 559 bp, Homo sapiens
cgagggcctggaaagaacaaaaagggagaaaaagaatgaatttgctgcctcttctggagctgggacatccatcttctcctgccctcagacatcagagctctaggtcctcaggcctctagactctgggacttgcrccagtggcctccccgcttttcaggccttcaaactcagaaagaattacatcaccagtttctccagttctccagcttacaaatggcatatgtggtacttcttggcttctataatcttgtgagccaattcctataacaaagcatctcttatagattctatatatcctattggttctgtttctctggagcaccgtaatacaatgaccatgtctggtcatcctgtcactgcagcaaccctttatcccttatgtagatgtcatggctggcatgcagaacacttcccttctacacatctggctttgttctccattctaaccttttggggagcattttcattctgaaggggttagaatgccacaaattacatttctagtgagttatgcatgcaaattaagttctgccaattagatgcacttattgtgatttga

SEQ ID NO: 592806 - DNA, 396 bp, Homo sapiens
cccaaatgagaaggaaccagaaaaccaagtctggtaatatgacaaaacaaggctctttaacacccccagaaaatcacattagttcaccagcaatggattcaaaccaagagaaatacccgatttacctgaaaaagaattcaggaggttagttattaagctaatcagggaggcaccagagaaaggtgaagyacaatgcaaggtaatccaaaaaacgatacaagaagtgaagggagaaatattcaaggaaatagatagcttaaagaaaaagcaataaaaaattcaggaaactttggacacaattttagaaatgcaaaatgctctggaaagtctcagcaatagaattgaagaaatagaagaaaaattcacagctcaaagacaaggtattcaaattaaccc

SEQ ID NO: 592807 - DNA, 396 bp, Homo sapiens
cccaaatgagaaggaaccagaaaaccaagtctggtaatatgacaaaacaaggctctttaacacccccagaaaatcacattagttcaccagcaatggattcaaaccaagagaaatacccgatttacctgaaaaagaattcaggaggttagttattaagctaatcagggaggcaccagagaaaggtgaagcrcaatgcaaggtaatccaaaaaacgatacaagaagtgaagggagaaatattcaaggaaatagatagcttaaagaaaaagcaataaaaaattcaggaaactttggacacaattttagaaatgcaaaatgctctggaaagtctcagcaatagaattgaagaaatagaagaaaaattcacagctcaaagacaaggtattcaaattaaccc

SEQ ID NO: 592808 - DNA, 374 bp, Homo sapiens
aggaaaacttccccggccttgctagagacccagacatccaaatacaagaagcacaaagaacccctgggaaattcatcacaaaaagatcatcattgcctaggcacattgtcatcaggttattcaaagttaagatgaaggaaataatcttaagagctgtgagacagaagcaccaggtaacctacaaaggaaaacctatcagattaacagcagatttctcagcagaaatcctataagctagaaaggattagggccctatcttcagcctcctcaagcaaaacaattatcagcaaagaattttgtatccagcaaaactaagcatcayatgtaaaggaaagatacagtctttttcagacaaacaaatgctgagagaattc

SEQ ID NO: 592809 - DNA, 284 bp, Homo sapiens
aagtaaaaccataacacttctagaagaaaacaggagaaaaatctttgtgaccttgattaggcaactcctattcttaatttacaaatgaggaacaaggcatagataggttaaagatcttgcrcaactagttagtagtggaactagtctttaaacccttaaacttatgcttagatgctttttttttttcattatactttaagttctagggtacatgtgcacaacatgcaggttagttacataggtatacatgtgccatgttggtttgctgcacccatcaactcgtc

SEQ ID NO: 592810 - DNA, 284 bp, Homo sapiens
aagtaaaaccataacacttctagaagaaaacaggagaaaaatctttgtgaccttgattaggcaactcctattcttaatttacaaatgaggaacaaggcatagataggttaaagatcttgcgcaactagttagtagtggaactagtctttaaacccttaaacttatrcttagatgctttttttttttcattatactttaagttctagggtacatgtgcacaacatgcaggttagttacataggtatacatgtgccatgttggtttgctgcacccatcaactcgtc

SEQ ID NO: 592811 - DNA, 529 bp, Homo sapiens
accttaaggtaataaaagccacctatgacaaacctacagccaacattatacttaataaggaaaagctgaaagcattccccctgagaactgcaacaagacaaatatgctcacttttcaccacttctattcaacatagaactggaggtactaggcaaagcagtcagacaagagaaagaaataaagggcatccaaatcactaaagaggaagtcaaactgtcactctttgccaatgatataatcatatacctagaaaaccctaaagactcatccaaaaagctcctggatctgataatraattcagtaaagtttcaggatacagaatgaatcaatgtacacaaattagtagcactgctatacaccaacggtgatcaagctgagaatcaaatcaagaactcaacccctttcacaatagctgcaaaataaactaagttcttaggaatatacctaaacaaagaggtgaaagatctcttcaaggaaaattataaaacagtgctgaaagaaatcatagacaacacaaacaaatgaaaac

SEQ ID NO: 592812 - DNA, 410 bp, Homo sapiens
aatgcagctgccagcatggccagaataaaaaccaagcagaagaacatgaaaagactaaactagcttagcctcccagcctacatatttctcccatgctggatgcttcctgtcctcaaatatcagactccaaattcttcagcaytgggccttggactagcttccttgctcctcagcttgcagatggcctattgtgggaccttgtgatcatgtgagtaaatactccttaataaactcccctttatatatacatttatcctattagtttctgtccctctagagaactctgactaatacagatattggtaccaggagtggttctagaggaacataatattaaggatggagttctttcattgcttttggggtttctggagttggctgcttaatatgattagatccaaaaatgctaa

SEQ ID NO: 592813 - DNA, 609 bp, Homo sapiens
ggagtggagagagcattagggaaaagagctaatgcatgctgggtttaatacctaggtgacgggttgttaggtgcagcaaaccaccatggcacacgtttacctatgtaacaaatatgcacatcctgcacatgtaccccagaacttaaaaaaaaacataattcaaaaacatagtctaatatttgcagtttcagatagctcaacctaacagttgagaaagccaaaactctgaatgattaaataatttgcacaagccgacagagttggttttaggagagcaagctttaatccagtatgtctatgtgtaaatctgtcagccactccactttcagtgttcagtcctgttcattgtctcagtgacatctccagctttgtggcagttacgctgcagttaaagcagcttgaacttagaagcacttcctcatttgggtggaacacagcaacagattatgatcacttcatgcctgaaccattccaacctgcctcgatttactttcctccctttgaaaatcttgtcyttatattctgagtgaggatggaaacagtcagatgagaactcatcccagttcatttagaaactgaccagtgtattcagcagtctatgcaagaaaa

SEQ ID NO: 592814 - DNA, 570 bp, Homo sapiens
gtaatcagattgcacatgggacagatttaactaacaaatgagttttatttggtctgcacagtgttagatcaccaagtagttttttaactttttaaattcactcccaactaacttcacctaaaactatgatgtctagttcttctcaacattaagtgatctgacaacactggttctgtatttcctgtccttaccacactggctggaatggagtggcaggtgccctctttagatcaagcatgccctcttcatttccaactcattatttctgttggctccatgatcatttaccctttcctgacacctgtagttgtttgaaatggagctctgaattagactatcatgtaactttgagcatcatccagtcaacaggctactgtcctgcttgggtgtctcaagctcatcctagtctaggcatgggcttaggagggaataagasagacagacaatcgttggtgtttctgcatttccagtgctcagctggttgacttcctgcctgacaacaatgagtgtgcaagaatttaagcatcagcctcttttgtggtaaatctgtatctcaaataataaaaaaac

SEQ ID NO: 592815 - DNA, 570 bp, Homo sapiens
gtaactaatttctagcccttctggtacccgttttatacgaaaatttattctgactcactccattgctgctgccagtagaaataatagaaatgctraaaagtcaataaagaactggaaaccactcactaaggatcattgcctctatgagctcagcatgagcttctcacagatatgagcttttctgccagtggctactcaagagccaagcaaaactttagggtgcccattaaaagaagtccccctttggctgcctgacaagaagatttctaaggaatttggatgaaatggaatctttcacgcatttttttacttgagcctagacttttaagcttacccaaatttaataaaattctatgtagagattgtgttgatacatctcttttttttttaagtcaacatgtcgaattcctatgaaaaacatatttttattgtgtctcttccaagttttggtatcagggtcatgctggcctcatagaatgagttagggaggagtccttcctcctcaatttttggtaatagtttcagtaggaatgctaccagcttttccttctacatcgggtagaatttagc

SEQ ID NO: 592816 - DNA, 592 bp, Homo sapiens
tattgttattatcaagtagcttatttgtaaatgagaaaactcaggcttagagaagttaagtaacttgtgggtgatgtaaagttttaaaatggcccagcacagattcaaaccttgaaggaattgactctaacagaaaagaattatttatgtagtgagcaaataggaaactgggattcaaacctaggttagttatatcctattagttcattaaagcagatcagctactatcattagctaaaagtaagttccaagttagttcaagtgatttttgcagatgcaaatagtgacatttccttagaaacatttttgaatcaagaactgggtaatttaagataatcaccaatagtttactagaatttcacgtctgagcaaaatttttaaaattctctatagttttgaatgcctttgatttcaggyattgtgaaaaagtcagactaaataattaacacaaagattagtgctcaaaaccagagaacaaagaattctatcaaatgccgttttcctttaaatctgtgctcttccatttttacctaggtatctttataattccattcaaactaaggcccaaagaaaataggccattcaactccag

SEQ ID NO: 592817 - DNA, 635 bp, Homo sapiens
acacatgtgctccatcaaattttttcatctttaccatttcaatgcagtatagttttgatttgcatttctcaagttatcagtgaggttgaatatcttttaatacttttgagactcacttttattttcatttatgtgaatctgttgtttctattgttttattctttgtttttatgttaatcatttattcattgcttatatttttgagtctctggcccttttcttattgatttgtagaaactttttctattaggagagcacccatatttctgcaaatattattactgtttgtcagctttctcttttactctgtacttgttgactttgccatcaagattttaaaaatatattatatattcaaatatatcaatcatttacaaatgtttcctaagctttttattacagttagaaaggctgtgaaatctagagaattatataaaaagttcagttatgatttcttctagatttacaaattttcatttactaaatgtacrtacatatttattagggatatttcctattgtagtatgggagatacaaatccaattttaattttttcaaattagattctactagaatttactagttccaatattacttattggataatccatccctttcccctgccacacactgac

SEQ ID NO: 592818 - DNA, 524 bp, Homo sapiens
acgataataaccagcattttgtttatctgtctgaaagagtgttatggggtatttgtcctctggtgaaaattacacactggtaagtttcaatgttttttttgcttgtctctgtaaagtttgtatttcttatgaggcactttttttccaagttatttttatggatggattggaaagataaaaagaagatggtagaccaagggcaaggtataaatacaagctaacgagctagaaaaactgatttccttatataattttcaccttcccttttcccttccccactaggatatatatataaaatttataataaaatcaggctagaatgtctgccaaagatagaatataaatttcattacagtaaagctaaaaatctagatacatagttatgcaaagatttaactaagtgtaatccactgccatcaactttgaagacagcgtcaygttccccaggataaataatgagggtttgcattaatacattgaatgagaaaatgctcctttgcattaaattgatttttatttttgtc

SEQ ID NO: 592819 - DNA, 594 bp, Homo sapiens
agctactcttaaagaatgacgtcttaacacagtattttttagatgcttcaagcratttttaaaagaaaatgagaaataatccagttaggaggtaattcagagtaaatggtattgcataaatagaaagcacacaaatgatctttaaatgcatgcttagaaaacgaagcatttacatttatgggaaagagtagatgactccagtaaaattgctcttattgtatagcacttatttggtactttacattttagaactgtgctactgttattgaattaagcaagagttccaacactttatatgaattacttttacccacaaattatgcaggactagaaagtacatgagaaagttgcaaaaaaaaaaatgctgttgataagcttcatttcatcactaagaaagtttgtaaatctgaagaactgaatgttgactttggagaactatggaatgggggccagaagcaaaaacagatcttttcaattggattacaaataatgacacaagaacccatctgcctatgttttgtggtgaagaatgccatgattatttgatgagtaggagggaaagtttggtgggatgaaaaatggaacaaaaccagg

SEQ ID NO: 592820 - DNA, 323 bp, Homo sapiens
caaggcactcacttgatagctaaagaagtgtgacggtgggctcaggctcrttgaattcactggtcttaccatgttccccatcatcctgaagcagctggattgatagaacggtgaaatggcctttgaagtcacaattacaatgccaactaggtgacaatactttgcagggctggggcaaagttctccagaaggccctgtatgctctgaatcagcgtctgatatatggtactgtttctccacagccaggattcaggggtccaggaatcaaggggtgcatgtggaaatggcaccattcaccatctctcctagtgatccactagcaa

SEQ ID NO: 592821 - DNA, 545 bp, Homo sapiens
ctttgccttctaccaatgtaagtttcctgaggcctctccagaaatggagcagttgccagaatcatccttcctgtacagcctgtggaactgtgagccagttaaacctcttaaaaaaaaattacccagtctcagatatttccttatagcagtgtgagaacagactaacagagtggtagagccaggactccaacctgagatatgcttggtttcaaagcccatgggtttggccatgatcttatctaagagagaacccctgaggaacctgagcctagtcaccactatgctgatgtgacaaacaacycttggtgccatccatggctttttgtgtatgccatgggtctcttttttcctgagacaattgaactggtgtgatgcagaaggtttcctattctttacttgtactttgctttataagcctggtgataacacctcacatttaagtttactcatttattcaagaaataacatgaacaaaatgtgtagcctgtaggaatgaaagatgaatatgccactgactttatggagctcacattttagtacatgtt

SEQ ID NO: 592822 - DNA, 588 bp, Homo sapiens
aatagtgtgactatcctggtttccctcactctgtcctagtcaatgactgcctttttaagttcttaggaataacatcccttttcactctcccgaatgtgatggtttggatgataaactatatggtcactctagctaaagcacaacatgagaaggcatgagcagttttatgctttgtagattattatcctataratctttgtagattcttagcttatatggggtacaatgtatgtgtatatatcatatataaaaaaatataattcttgccaacacttgttatctgtcttttttttggtaaaagccattctaattggtgtgaagtgattgctctatgcggttttaatttgcatttcccaaataattagtgatgctgaacatttttctcatgtatctgttggccattgcaggtcttcttttgaaaaatattgttcaggttctttgcccattttaaaaattgcggttatttgttttcttggtattgagttgtttggggttacatatatattttggagaatatatgtaaaatatatataaatagatatacttacggggtacaatgtgtgtgtggatatagatcgcgatatgtgt

SEQ ID NO: 592823 - DNA, 548 bp, Homo sapiens
gaattccaatgcgtgattggaggtcgtgatgacccatgggagcaatcggagaagtagagtaaggagcgtgaagccagattatagtaggttgggaaaaaaatgataagtgaggagtagaaacaatgggtataaatcactctgattttgagaagaatttagattagaaaatgccaaggacaagagagtcacagggctttttcagaaaaaaaaaaaatcatcctacatgtattgtttatgaaaacattgaatatgggactcaaatgttctatttaacagttaaccatgtacgaaatggtaaattccttccaaattacttccacttactaatcagctttcatctcctaattacagaaaggatcacaatgaagcacattaactgcattagtaaatactcaagtgatcaagtgatttccatatgcctctgctgtcagagtccccatgagaatgccctaggccaaytgagtacttgactgactttcatgagaaaggtcttggcttcccctagaacatgtatttcacaatgaagagtaaaatgaggattgataaat

SEQ ID NO: 592824 - DNA, 644 bp, Homo sapiens
tgaaggctgattttgagtgcctggaatgaatagactgcttggtggtctaaccaaatagcaattaatttcctaacacgatggaaagtagggaggcagtgcaaggcagaatcagcagcttccctgtcattaatatcccagtctctctagtcttcatgcttggtgatccttatcacatagttctcagaatcaaggcttgcctcatcgttgaaatatggctgtgctactattagcctcatctcagcatttctagttggtagaaaaagaaagtgattagtaggaaaaaaatgtggttttttttcctactaacacgtctagaaataaaagcaaacacgtctagaaatcccaagcaggtgttgttcctatctcattggmcaggatcacatggctcccctagttgaaagtgagaacaggaaatgtagcattttacttggacacaatgccaacccagaaaatggcggggggagggttactacaaattagaatgaagaagaaagtagatactgagtagacaatgaatgcacctgccacactctgtccataattttgcattagatgtctttgaggccgaagccttgcaagcattctagtcatctcagtatttaaagattgaacactaacaacactaacaacgtgtaaagtccaaa

SEQ ID NO: 592825 - DNA, 644 bp, Homo sapiens
tgaaggctgattttgagtgcctggaatgaatagactgcttggtggtctaaccaaatagcaattaatttcctaacacgatggaaagtagggaggcagtgcaaggcagaatcagcagcttccctgtcattaatatcccagtctctctagtcttcatgcttggtgatccttatcacatagttctcagaatcaaggcttgcctcatcgttgaaatatggctgtgctactattagcctcatctcagcatttctagttggtagaaaaagaaagtgattagtaggaaaaaaatgtggttttttttcctactaacacgtctagaaataaaagcaaacacgtctagaaatcccaagcaggtgttgttcctatctcattggcmaggatcacatggctcccctagttgaaagtgagaacaggaaatgtagcattttacttggacacaatgccaacccagaaaatggcggggggagggttactacaaattagaatgaagaagaaagtagatactgagtagacaatgaatgcacctgccacactctgtccataattttgcattagatgtctttgaggccgaagccttgcaagcattctagtcatctcagtatttaaagattgaacactaacaacactaacaacgtgtaaagtccaaa

SEQ ID NO: 592826 - DNA, 589 bp, Homo sapiens
gaaatcccaagcaggtgttgttcctatctcattggccaggatcacatggctcccctagttgaaagtgagaacaggaaatgtagcattttacttggacacaatgccaacccagaaaatggyggggggagggttactacaaattagaatgaagaagaaagtagatactgagtagacaatgaatgcacctgccacactctgtccataattttgcattagatgtctttgaggccgaagccttgcaagcattctagtcatctcagtatttaaagattgaacactaacaacactaacaacgtgtaaagtccaaaatatgtgagatgtcacataattggccacagcctttgggttcaaatttcatgacagtttgtgctgtggaggcatgcaacattttcttggtacaggtgaaataaaaaactaataagacatagggctgacacattatgaaacttgaaattgagcaggagtttaatgcacaacagtttttaacaagacaagacagtgtatgacaaaggtatgtgtatgttaaatgtttagatggtccatgcccgttagcattagagattaagagaattagggaaattgattttat

SEQ ID NO: 592827 - DNA, 514 bp, Homo sapiens
atgtcaagactatattatacctacagatgtacctttagcccaaatcttctctaaagcctgagcaccttgaatctagacatctactttggtgaaagccaagtacagtcataatttcgaaactattaggttccagcgatcaaaatcctaaatcrtactttggtcacaactaaaccttttcattcttatccaaatatctttcttttcctctgtaccctcagtccactctggtaaatgtctcctcatcttgtcactgatatttgacacatttggttaattctttctccttgaaatacttaatgtagctgtcttgacaccacacttttctgactttcctcccactgaactggccgctacatcctagtctggttggcaggatctttctaatttacctgaccactaagcagaataaatcaggtctcaattttcctatatcatctctatctggacccactttctaggtaaactccaccagacccgtggctttaaatagcatctctacaccaattacttccaa

SEQ ID NO: 592828 - DNA, 509 bp, Homo sapiens
agtgctcagaaagttttgaattttggagcatttcgaatttcagatttttacatttaggatactcaacctacaattcacaaaactgtttaaaaatacataaaaataatctttaacaggtgtcttttcaggatatctatacccaatccatcagcaattcttgttgtttctacctttaaatgtacccaaatccaccatttacaaccatttctactcctacttctctagttcaagacatcamaatctcttaaccagaaaagtgaaccctctcgataagtctctttaccggtcattactccttctgctcttcattcccatttctacaaatcaccaaaagtatctcttttaaaaagtacatcagatcgtatcatttctctgcttaaaacaccctaatgtcttcttacctgaattaaaacaaaattcaaagtttttaccatggctatcagcctctgcatacctggcttctgcctatctttttgatacatgtttctctagtttgttctgttctatcc

SEQ ID NO: 592829 - DNA, 509 bp, Homo sapiens
agtgctcagaaagttttgaattttggagcatttcgaatttcagatttttacatttaggatactcaacctacaattcacaaaactgtttaaaaatacataaaaataatctttaacaggtgtcttttcaggatatctatacccaatccatcagcaattcttgttgtttctacctttaaatgtacccaaatccaccatttacaaccatttctactcctacttctctagttcaagacatcacaatctcttaaccagaaaagtgaaccctctcgataagtctctttacyggtcattactccttctgctcttcattcccatttctacaaatcaccaaaagtatctcttttaaaaagtacatcagatcgtatcatttctctgcttaaaacaccctaatgtcttcttacctgaattaaaacaaaattcaaagtttttaccatggctatcagcctctgcatacctggcttctgcctatctttttgatacatgtttctctagtttgttctgttctatcc

SEQ ID NO: 592830 - DNA, 528 bp, Homo sapiens
cttaaaaacagcatttcatctcctaaattataacatggaaaatgtacatcttcaagaattcaaaagcctgttcattttaaacaattgccctgattttaaagtagatgtttatggtacatagtcagaaatctttttctgtacaacataatctaaaagagcacaacaagccacaaaatttcagcagttmcgctccacaaaattaaatcaaggcaatgtgaaacattcccaggtaacagggaccagatactgtttggaaattttaacaaaaccttagtgtaatctcgctttcctcaccggaaagctatattgcaaaagcagctgtctttaatttttaatttttgttttattatgggtaagaacacttagatgagatctaccctcttaacaaatgtttgagtgtataacacagtattgttgactacaggtcagtgcgtgcttttacatccatatgatattctttagccttgaaggccattttctgtcttttctgcctgaaaagcttctactcacccttcaatacctagctca

SEQ ID NO: 592831 - DNA, 528 bp, Homo sapiens
cttaaaaacagcatttcatctcctaaattataacatggaaaatgtacatcttcaagaattcaaaagcctgttcattttaaacaattgccctgattttaaagtagatgtttatggtacatagtcagaaatctttttctgtacaacataatctaaaagagcacaacaagccacaaaatttcagcagttacgctccacaaaattaaatcaaggcaatgtgaaacattcccaggtaacagggaccagatactgtttggaaattttaacaaaaccttagtrtaatctcgctttcctcaccggaaagctatattgcaaaagcagctgtctttaatttttaatttttgttttattatgggtaagaacacttagatgagatctaccctcttaacaaatgtttgagtgtataacacagtattgttgactacaggtcagtgcgtgcttttacatccatatgatattctttagccttgaaggccattttctgtcttttctgcctgaaaagcttctactcacccttcaatacctagctca

SEQ ID NO: 592832 - DNA, 528 bp, Homo sapiens
cttaaaaacagcatttcatctcctaaattataacatggaaaatgtacatcttcaagaattcaaaagcctgttcattttaaacaattgccctgattttaaagtagatgtttatggtacatagtcagaaatctttttctgtacaacataatctaaaagagcacaacaagccacaaaatttcagcagttacgctccacaaaattaaatcaaggcaatgtgaaacattcccaggtaacagggaccagatactgtttggaaattttaacaaaaccttagtgtaatctcgctttcctcaccggaaagctatattgcaaaagcagctgtctttaatttttaatttttgttttattatgggtaagaacacttagatgagatctaccctcttaacaaatgtttgagtgtataacacagtattgttgactacaggtcagtgcgtgcttttacatccatatgatattctttagcyttgaaggccattttctgtcttttctgcctgaaaagcttctactcacccttcaatacctagctca

SEQ ID NO: 592833 - DNA, 645 bp, Homo sapiens
tcgtagaatatgtgtgttgcttccctcagctccaaagtaggcttattgattcttgtcccatgttaccatccaaaataatttggttacgtaattcatgcctaaatgattcagcttatgctatctcctttgctaatgtgacttgttcagcagtgtgtctaagcttgtccaagctatgtgaaactcagtatattagtattctatggctgttgtaacaaattaccataatttaatgtcttacaaatatgaattttattatcttacagtagttctgtaggtcagatgcctgacacccatctcaatgggccaagatcaagatgtctgtagggctgcatttctatctggaggttcagttttcttgccttttccagcttctaaaggctgatcacattccttggcttgtgagtcctttcatcmatcttcaaagccataaatattgcatctctttgaccatttttctttggccacatctccctttgattatagctgggaaaggctctctgctcttaaagacccatgcaattaggtagggcccatttgaatcatccaggatagtttttccatttcaacatccttagccttaatcacatctgcaaagtttctttgctatgtaaggtaatatattcatagtttctaaaggttagaaca

SEQ ID NO: 592834 - DNA, 576 bp, Homo sapiens
ttcagttttaaaaagctgtgagtcactcaagtggtgatttcaagagggcagctcagagttgcccggagctcagaaggtaaatctgaaataaagctataaatttcaaackcattagcatttggaaaggcgtttaaagccacagtaacggatgagcaagaaaaagtcttgggacttaagatcttgaataatcaaaatttaagcagaagagaagttaaggagtataaacatgactaaaaaggaaagcaaaggtgactaaaaatgagaccagtgacatgaaagaaaggagaaaatagagtttcaataaggaaaagatggcaagacatgcgaaataatgctgagattccacgtaacagtagctggctggagtaatatataaacagattattatgccaaatggatactctgcatgaacaaatgctatacctgactagtactatcttccttaagtggcagatatgaatctagtgatagacatccaggtacttgccacccgtcataatgaccagcccaaataattggccttaacaatatacagttaatgtatcaggctcctcccatcaaaaccaagcactttct

SEQ ID NO: 592835 - DNA, 432 bp, Homo sapiens
ctaatttttatttctaactcaaaagtcatttattttgtaaaggaraaaacccttttagtaatgaaataattaccctttatatttggttccaaattttagattgttaaatttggcttatatattgtaccaaaagtcagatcaaatgctgatactcatttaggtttatgattgtgttgtgttctttcactgtctgctttagtgtgtttactttgtggatttggttttatttttaggtgcctcctttaattcctaagactgattcagaccctgaacatcgccgagtttcggctcaacttgacgataatgtgagttaattttattcttggtagtatttagtttaagtcatacttggcatatctttttaactttttaatgaagtgttctatgtatcattaatgtgcacatattataagtgttaagcttgatgaattc

SEQ ID NO: 592836 - DNA, 369 bp, Homo sapiens
agtgtgggcctcactatttcattagtagaaaccttttattcagggagaaaaacaaagaaagagaggccgctaacaaaatcaggtatgcatagcctatcattttatcagcagggtggaggttggggtgaaaagtaggaactctacttcatcttttataaaatgttagaccttaagttaaggcacacatttagcttatcataagcttcaaactggactgttgctaggagttcacaacaaacagttcctttttaccaagatgcagaaagtgaaatatcaaaagactaatcagccatttccacatctttacatttggatttraccccaaatatttaattttatttcaatctcatacagcttgtgaggacagac

SEQ ID NO: 592837 - DNA, 369 bp, Homo sapiens
agtgtgggcctcactatttcattagtagaaaccttttattcagggagaaaaacaaagaaagagaggccgctaacaaaatcaggtatgcatagcctatcattttatcagcagggtggaggttggggtgaaaagtaggaactctacttcatcttttataaaatgttagaccttaagttaaggcacacatttagcttatcataagcttcaaactggactgttgctaggagttcacaacaaacagttcctttttaccaagatgcagaaagtgaaatatcaaaagactaatcagccatttccacatctttacatttggatttaaccccraatatttaattttatttcaatctcatacagcttgtgaggacagac

SEQ ID NO: 592838 - DNA, 577 bp, Homo sapiens
acttgttctatctcctaaccaaagttcccacagacatgtaaaattgaatatattccatactcagtttatcatctcaccaaatatttttctcctgtaatatagcctgtattgaagaataaatgtgaaagaacaaaatttacaacttccttttactttctcctatattcaaccataattcaaatgttcctgattctctctcaaatattgattcttccttcctttctatcaytgtgtttttatatttagcatattttattatttcttctaaattagccatttagagttttaccttaaaacaggtgttttcaggaacactgactattacattccctgtggagttaagaaataaattgtaaaaatccagcaactatgacttaacatgtaaacttggtttttcagccacagtgaacaagggaagcaactgagggaccatttgccttgttaatgacagaactcagtagatttcccattgttctccactgggctcctaagtctcattcagacaggagacctgtagggaagatactcagcttggctgagaacagcacagtagtaattggagggaggagaaaagtaa

SEQ ID NO: 592839 - DNA, 484 bp, Homo sapiens
gcttacatgcctttcttagttttgaatatgattttatgaaacttttatatttaaaatgtttcagtaaattacatttcaggataaaggatcttatttcmccactatttttttctatcagttaatatgttttcctgaaaaactagaaagaaagtgaaatatatgttaagctcatatttaagaaatctaaacttcaaatatattttgaatgccaatataatagtaatgctcaaaagaacttgcaattagaaattaaatgatggagaggtattttgacttcaacaatggtaatgcaatattctaaaggaatagcaacaattagaattgaaaataattgaatagcctcaaattttttcatattaaatattttcttctacaaggtattatggcaaataatacatagaacctaatagtaatgaacattaattgattttagccactggtttaaattaattatatcttttaatctttataacaggctttttgg

SEQ ID NO: 592840 - DNA, 590 bp, Homo sapiens
gatttcacaatgttggccaggctggtctcaaacttttgaccttgggtgatccacctgcctcggcctcccaaaatgctggtattacatacgtgagccactgtgcccagtctggaagtaatattttttccatcccttccctttcagctatgcatatctttaaaggttaggtaagcctcctacaggcagcatctagttgagtcttgttgttttaaaaaattcagtgcagccactctgtctttttatcatattgattttgtatcctgaggagactgcttaagttgctyatcagcttaaggagattttgggctgagacaatgaggttttctaaatatacaacatgtcatctgcaaacagagacaatttgacttcctcttttcctaattggatgccatttatttctttctcttgcctgattgccatggtcagaacattcaataacgtgttgaataggagtggtgagagagggcatccttatcttctgccagttttcaaaaagaatacttccagcttttgcccattcagtatgatattggctgcgggtttgtcataaatagttcttattatctacaaccatctgatctttgacaaac

SEQ ID NO: 592841 - DNA, 561 bp, Homo sapiens
tttgctgaccctgatctaattcatttatatagtacttgctttcataatatttcacattgtaaattgggcttcttatgattaaaaaggaggttactgaagagagaaacaatataataattgagctagaagcaagacttggagaaagggagatacaattagccttttgggactggtggaaatgttagaatatatgagcaaaggtaagtgcaaaaaatgagtatgactataacatattacacattggacattaatatcaaatataagcagggcccatctagaaataaatagttttcttgagagtacttctaaatacctttatcgcctggctctgtgccccaaaactctcattaccccagtttatctcctcttctatgactattttttctctctcttcatctacaactcttcaaaaaaaggtaattggtgattgctgcttcccttcttctttctctgttcttactaaaccattgctgttttaataaattagaaacaaaatactctgytcttctcaactatatttagtgagctacaaatatttgataagattcctctaagtgtgga

SEQ ID NO: 592842 - DNA, 573 bp, Homo sapiens
ggaaatacagacttcaagaaggttcacttagtaagacagacaagtttctcaaaaaacagtgatatacactagtctcacctccctttgaatgtgtgaagcactgctagtttgttttagcaaacattttattgaactgtaaattataatctacatatagaaagtgcacaattagtaattgtatatttctatgaattatccaaaaacaaatacactccwttcagtgtattcagctgtataaattcagctcagaagcaacatacaaaaattgcctgtgtgcccacctgcagttattattaccctgctgtgtgtaacaattattcagcctgttataaaatagtttttgagctttatatgaagtagaatatatattgttattttatttctgtctttttaaaaataggcaccattaagtttataatatacatacatgctgtggagtagagtggcaggttgtttattctaattgttatatagtactaaatttcattgaatataccatgatgcatttattctttccacagttgacatgcaattggcttgtttctagattttggtgaatatagttagtggtac

SEQ ID NO: 592843 - DNA, 611 bp, Homo sapiens
catgagcacagagtgctctggttttgtcttgaatcrtatgggcagggagtgaccttaccgatgttaatattcagtgaaactgtgtgttcaacaaaagaacatcaggacctaactacaagtacaaggctagatcccatgttatggtgttgcttttctctttctcattaatgcatgtaagatttctctcagacaatttatacatcccattccaggtattggtaaagaatgtcaagtgaaagtatctttctgattaaatcttatgtcagtgggttcaagggagtcttttgatgcagtatatacgtcaaactcctaaggtcagagcagagaatggtggacaaagagtttgcaagaggacttgagactatctaactaagaaagttactttgtctgacttccaaaaagaaaaaaaagtatagtagcaataaactaataaatgaggaagttttgaataattattttagaagtgcttttgtattggtgagtttttattggtcttttgctaaaagttttatcttaaaaaacattttctgcaacatttaatgatttaaattttttaaatcatgaataaatataaaaatataaatatgctcatacatatataaaagctagat

SEQ ID NO: 592844 - DNA, 587 bp, Homo sapiens
agcacatcctatatatgtggaacaaagtctttcaaacaaaatcatcgtgtgtacatacttcaacattttatttcactttgtgtgtgtgtgggtgsggggggtgggtgggtgtgtttgtgtgtgtattgaaaaggtccttttctgacaagttctacattacctagctttcacatgccacattctgatgcataatatacatgttcttgtggcggggggaacttttgaagtgtaaaaagcatttaaagaaatttttttgttttgttttagagataggatttctctctatcacctaggctgaagtatattcgtgcaattatagctcactgcagccttgaacttctggaatcaagtcatccactgaccttggcatcccaagtatctgggactatcagcccgtgtgaccatgcttagctaatatttcaaactgtttttagagatggtaactcgctatattgcgcaacttggtcttgagctgttgaccttcagcaatccttctgcctcagcgtccaagtaaaaaagtttgtaagagtttgaatgtaaatccttctaggtttgtttctcactttctctaatattaatggttaatg

SEQ ID NO: 592845 - DNA, 587 bp, Homo sapiens
agcacatcctatatatgtggaacaaagtctttcaaacaaaatcatcgtgtgtacatacttcaacattttatttcactttgtgtgtgtgtgggtgcggggggtgggtgggtgtgtttgtgtgtgtattgaaaaggtccttttctgacaagttctacattacctagctttcacatgccacattctgatgcataatatacatgttcttgtggcggggggarcttttgaagtgtaaaaagcatttaaagaaatttttttgttttgttttagagataggatttctctctatcacctaggctgaagtatattcgtgcaattatagctcactgcagccttgaacttctggaatcaagtcatccactgaccttggcatcccaagtatctgggactatcagcccgtgtgaccatgcttagctaatatttcaaactgtttttagagatggtaactcgctatattgcgcaacttggtcttgagctgttgaccttcagcaatccttctgcctcagcgtccaagtaaaaaagtttgtaagagtttgaatgtaaatccttctaggtttgtttctcactttctctaatattaatggttaatg

SEQ ID NO: 592846 - DNA, 580 bp, Homo sapiens
ctaccgtcaacatcctgcctcagaatgtggtacatttggtacaatcaatgaacctacatcgacacatcattactgctcaaagtccatagttaacagtagggttcactcttggtgtgtacattctatgtgtttggatacatttataaggacacatatccaccatacggtatcatacagagtagtttcgttccctwaagaatcctctgtgccctttctgttcatcctacctccctctttaactcctggcaactcctgatctttttaatgtctccatagttttaccttttccagaatgtgatacagttggaattatacactatgtagccttttcagattagattctttcacttggtaatacgcatattaagtttcctttatgtctttgcatgtcttcatagatcatttctttttagtgctgaataacattccattgtctagatgtaccacattatccattcaccaactgaaggacatcttggttgcttccaacttttggcaattatgaataaagctgctgaaaacacccctgtacaggtttttgtcaggcatatattttcagttcacttggataagtaccaag

SEQ ID NO: 592847 - DNA, 580 bp, Homo sapiens
ctaccgtcaacatcctgcctcagaatgtggtacatttggtacaatcaatgaacctacatcgacacatcattactgctcaaagtccatagttaacagtagggttcactcttggtgtgtacattctatgtgtttggatacatttataaggacacatatccaccatacggtatcatacagagtagtttcgttcccttaagaatcctctgtgccctttctgttcatcctacctccctctttaactcctggcaactcctgatctttttaatgtctccatagttttaccttttccagaatgtgatacagttggaattatacactatgtagccttttcagattrgattctttcacttggtaatacgcatattaagtttcctttatgtctttgcatgtcttcatagatcatttctttttagtgctgaataacattccattgtctagatgtaccacattatccattcaccaactgaaggacatcttggttgcttccaacttttggcaattatgaataaagctgctgaaaacacccctgtacaggtttttgtcaggcatatattttcagttcacttggataagtaccaag

SEQ ID NO: 592848 - DNA, 504 bp, Homo sapiens
gataaaaatttttaaagaacttattttgccctctgtgacctatttagatawgtaaatatgtatgtgtatacacacacacacacacacacacacacacacacacacacattgtcttagtctgttttgtgcttctgtaacagaatacctgagacaggatcatttataaacaatagaagatttttggctaatggttctggagactaggaagtcccagattaaggggctgcatctgatgagggacttcttcctgtgtcataacatggtggaaggcatcacatggcagaaactgagcatacctgaaagaagaaaggagcccatctcatccttttatcaggaacccatctcatccttttatcaggaacccattcctgaggtaactactctactcccacaataatggcatttatccattcatgagggcagagctgtcatgacctaatcacttcttaaaggtcctacctctcaacactgttgcattgggaatcatgtttccaacacacgaac

SEQ ID NO: 592849 - DNA, 504 bp, Homo sapiens
gataaaaatttttaaagaacttattttgccctctgtgacctatttagatatgtaaatatgtatgtgtatacacacacacacacacacacacacacacacacacacacaytgtcttagtctgttttgtgcttctgtaacagaatacctgagacaggatcatttataaacaatagaagatttttggctaatggttctggagactaggaagtcccagattaaggggctgcatctgatgagggacttcttcctgtgtcataacatggtggaaggcatcacatggcagaaactgagcatacctgaaagaagaaaggagcccatctcatccttttatcaggaacccatctcatccttttatcaggaacccattcctgaggtaactactctactcccacaataatggcatttatccattcatgagggcagagctgtcatgacctaatcacttcttaaaggtcctacctctcaacactgttgcattgggaatcatgtttccaacacacgaac

SEQ ID NO: 592850 - DNA, 504 bp, Homo sapiens
gataaaaatttttaaagaacttattttgccctctgtgacctatttagatatgtaaatatgtatgtgtatacacacacacacacacacacacacacacacacacacacattgtcttagtctgttttgtgcttctgtaacagaatacctgagacaggatcatttataaacaatagaagatttttggctaatggttctggagactaggaagtcccagattaaggggctgcatctgatgagggacttcttcctgtgtcataacatggtggaaggcatcacatggcagaaactgagcatacctgaaagaagaaaggagcccatctcatccttttatcaggaacccatctcatccttttatcaggaacccattcctgaggtaaytactctactcccacaataatggcatttatccattcatgagggcagagctgtcatgacctaatcacttcttaaaggtcctacctctcaacactgttgcattgggaatcatgtttccaacacacgaac

SEQ ID NO: 592851 - DNA, 485 bp, Homo sapiens
atgttctaaattagatcttctctaggagaagaccatgctgtctgaaaagagagtaagttggtggttatattcaggttgaatattcgcccaaggttccacccatgatggctatgtgaaagagggtcataagtaatatgtgtacaccccctgcagtgagttcagcaaagaaggtttaggtcatggactgatgtggtccccactctattactttatcgtaaacattttctacgccgctgctagactacatgtgttacgttatttactgttacattatcaatatctataagtgcccaacacatattaagtagtaaaaatgtatttattaagtaataaaaacaaatatttctgagaacatataattatttgcaaatatcagaaacttatgaaatttgtttccaactgaccatttttaagtatttgttttaaagtgaagaaataaaattccttctgtrgtagatataattggttgtttacctgatatttag

SEQ ID NO: 592852 - DNA, 568 bp, Homo sapiens
gaaacattagttaaatttaggcctttgaaaaaacaactatatatatgagataatctaatatgaacttttattttgatgttttaaacggatgaaaataaagtcacatgggtatgtttaaagttttcgacaaccactttattaccatctttgctacttaaaatatgaccttgatgcttaaattgcatgtttaataaaatgtttcttctaaatatcatttaatgaattattattttataagattttgtactaaagggggttttctagaaaagtattcatcttttcataacaaagatgactcatcattttgtattattcatatttggccaggcaggagaaaaatataatgkagactaatggaatagctggaatcatgttgccttttgaacaaagaacttttaatctcaccactcacaaataagttggccacaagttttattagacaagaatgttgttcccaaattattttgtcttttactcaaacatatatcaaaatccaattgtattatgttggctgttatgttcttgcctctttagaacaagaaagttttcaaaagagaaacaagtataa

SEQ ID NO: 592853 - DNA, 667 bp, Homo sapiens
tcattttcatctggaaattaaattaaccatgaaaaatatctctatgttttctcttttatatatacacttgtgtttcttcttcatataaagtctaactttttttttctttaaaatactgttcagtggttattcttagagcacattgttaatctcttatataaatactaaaaaatgaggtgtaactctcatctaccacatagaaaacaacataaatattttaaaaaaacttacctgtagcacaaactggaagtgtttgagcatagacacagttagtgtatatatagctaaagagctccaagcaaacaatacaggaggatatttctacataattagaaaggaatttgattcaggaaatgactttttatttgaaaaatcattagcatcattagataattcacttgctaataaatcatccctttccatttttaagtgattaaaaaaagatatttccttatattaaccaaaagtcatttggattttcaatattgtacaatcaacaagaattctttttagttttatwaaaagcaatacaggctttaaaaataagtccagaaatatctcctttgacctaatttctccactaggtactatattctcttctttatagataagcttcttgaaagggtattattgcttcttatctcccctttatttcttacgtccccag

SEQ ID NO: 592854 - DNA, 632 bp, Homo sapiens
cataaaacaataaaaactaagaaaagcttctagagtgcacaggaagttaatcaattttttaaaaatggaaaatagtaacagacagaatggagtacacctggaaccaaccaatattggttgaataactagcatctccataaagaaaagagataataagaataagtccatgattaaaaaaaaaaaaaactaaaagaaaagcattttagacataaggaaagcctccatcagccattgaacaatcataaaacaagcaaaatgcataccaaagcaaatctagatttaaggaatgcattgaatagtcaaacaaactaatgtaaagatagyatggtgtgaaatattttgaaaagtgttgaagcaaggagaaaagaaatcccatgcaacaggataaaaatcaaatgaaattcaactgaggatattgaaaagataatttccaacgtgtgatttccagtgaagttgtttgtaatttataagaacattaaagaaatattgtcagtaaatacataatccatcaacttattattcattaaatatgaaataatgtttccaaattaccaaaaaaagtttaaagatctcaacatagaaaaagttgataatttttaaaaactaccttgcagaagtaaagcaactgtaaa

SEQ ID NO: 592855 - DNA, 454 bp, Homo sapiens
accctagaacttaaagtataacaaaaaaaaaagaaaaaaatctaggcaatttatcaacatatctaaattaagtattaataagcagagggtgtatgcagaatgagagaagagatcagaatctagggaaacaatgctatttgaatggagactataggggcagaggggacagttttcaacagaaaactatgcattgccccattcaggaaaatcttccaagcattacttaattctagctttttattgagtgagctaattttcaactctataagttgtaggtctctaatagacctgtaaattacatcttgcatagtagaggttcaacaygcttcccttgcactctgtattaagaccagttttgccaccctttatgtatttctttcaacattcctgatctataaatgtgcctgcttataccatcccctttgaaccagttataacatgtgtatggtaacca

SEQ ID NO: 592856 - DNA, 454 bp, Homo sapiens
accctagaacttaaagtataacaaaaaaaaaagaaaaaaatctaggcaatttatcaacatatctaaattaagtattaataagcagagggtgtatgcagaatgagagaagagatcagaatctagggaaacaatgctatttgaatggagactataggggcagaggggacagttttcaacagaaaactatgcattgccccattcaggaaaatcttccaagcattacttaattctagctttttattgagtgagctaattttcaactctataagttgtaggtctctaatagacctgtaaattacatcttgcatagtagaggttcaacacgcttcccttgcactctgtattaagaccagttttgccaccctttatgtatttctttcaacattcctgatctataaatgtgcctgcttataccrtcccctttgaaccagttataacatgtgtatggtaacca

SEQ ID NO: 592857 - DNA, 479 bp, Homo sapiens
agaaaattctgtgaggaattatttgtatttgtgaaagtgttctgcaattttctttcctcataatattcttgtcatgtttttttgtattaggttatgctttccacatgaagcaagcttgtaagttcttccttgcattaagtaacttaaaccttkcacaaattattttatagcaggttagtttttaccttctaattcgaagtggggactgaagagggcttaattaataagtttaaggcaaagaataattgtagcacgtctgtagttttttaaccaaaaaagcttactcttccgatgtaaaacgtgattccaaaaagtcttggctatatagtctacctattttactggtaccatcatgtccctagtttgaacaagttgtattactctatcacattgaaaacacacatttgtttcaagtatatgtgtagatgaggaagagcaaaggagtctctctgacagatatatggatgttgggagagaga

SEQ ID NO: 592858 - DNA, 610 bp, Homo sapiens
caacatcactaatcatcagggaaatgcaaatcgaaatcacaaagagagattatcttatacctattagaaaagctattattaaaaagacaaaaagtacattgctggcatggatgcagagaaaagggaactctcatacaatcctggtgggaatgtaaattaatgcagctactataggaataagtatggtgatttctcaaaaaactaaaagcagcactaccatatgatatagcaattctactactgcatgtttacccacaggagaaaaatcaatatatcaaaggaatacctgtatttgcatgtgtattgcagcactattcgcaatagtaaagaaatggaatcaaactaagtacccatcatcagataaatggataaagaaaatgtgatctatatacacagtggaatactactcagccatataaaagaataaaatcatatcatttgcagcaacatggatagaactggaagtcatcatgttaagtgatacaagcagagcacagawtaacaaatattacgtgttctcactcatatgtgggagctaaaactgttgatcccatgaaggtagagagtagaatgatagatatcagaagctgagaatggtgtgtgtgaggga

SEQ ID NO: 592859 - DNA, 469 bp, Homo sapiens
cagagccataaacttgggggcaagatcagaaaacatggtcaggagagtgagcacaggcgttgtgtggcaaaagaagtcagccctacctgagcccacaccaggatatcccctactattcaaatcctcacaggagtccggttttgcctttatgacactgtgcttgattgtaattgttsgtaaaaatatgtgcataataatgtctaatcatttgctaaattgtattttcaggtagaatactatgcctgacacattagaagtattcaataagtactttcaaaggattccaagttgaatactcaggaaaagggaaactaaacagaaaaaaaaaattataagcaattcctaaaactttgcaaaagacaaattattttcaaaaagaagttgcaaattttaatggtgtcatttgtctgctgatctttcactgtgctttttaacttggcagtaagttatgagactgcaagagagatat

SEQ ID NO: 592860 - DNA, 447 bp, Homo sapiens
gggtgtcttaccaatgccttctaagttgcattgcagttgcatgggcaccttggtctccagtgctcccaatgatcactgggtgcacagtaccaatggtgtataatggaccctggcaaagtagaactttagcagagctaattttatgttttaatttcagttgaatttatgctccctatgctacatatgagactaagccaaggttccaaaataatctgaatgacatgctgtcccttccattaaaaaggtattattgaattacagtcaccatgccaccctctgaagaatgaaatgtaccaagaagttcctcaggctacctgtaaattgttatttagtgggtagtacagagagtcctctcrattagcttgaaagacatgttcaaacatatctaaagcttacttgaatggaaaactgctacaaagaatagcatatacaggttagaactttgtc

SEQ ID NO: 592861 - DNA, 519 bp, Homo sapiens
ttgttgaatagggtgtcctttacccactttatgttttkgtttgctttgtcaaagatcagttgggtgtaactatttgtgtttatttctgggttctccattctgttctgtttgtctatgtccctatttttataccggtaccatgctgttttggtgagtgtggccttattgtgttgtttgaagttgggtaatacgaagccttttgatttgtttcttttgcttagtcttgctttggctatgcaagctttttttttggttccatatgaattttaggattgttttttcatagttatttgaagaataatgtcagtactctgatgggaattgtattgaatttgtagattgcttttggcagtatggtcatttttagagtattgattctacccatctatgagcatgggatgtgtttttatttgtgtcatctattgctttcagcagcattttgtagtttttcttgtagaggtctttcacttccttggttaggtatattcctaagtattttattttttgtgcagctattgt

SEQ ID NO: 592862 - DNA, 519 bp, Homo sapiens
ttgttgaatagggtgtcctttacccactttatgttttggtttgctttgtcaaagatcagttgggtgtaactatttgtgtttatttctgggttctccattctgttctgtttgtctatgtccctatttttataccggtaccatgctgttttggtgagtgtggccttattgtgttgtttgaagttgggtaatacgaagccttttgatttgtttcttttgcttagtcttgctttggctatgcaagctttttttttggttccatatgaattttaggattgttttttcatagttatttgaagaataatgtcagtactctgatgggaattgtattgaatttgtagattgcttttggcagtatggtcatttttagagtattgattctacccatctatgagcatgggatgtgtttttatttgtgtcatctattkctttcagcagcattttgtagtttttcttgtagaggtctttcacttccttggttaggtatattcctaagtattttattttttgtgcagctattgt

SEQ ID NO: 592863 - DNA, 459 bp, Homo sapiens
gaccagactcactcccaccatgctctgcaccaagagcaccgagttttctttcaggcagtgggtgagcagggctgagaacttgcccaaggctaccagcytcctagctgcaaaagcgagcaggccttttgtgcctgctgactttgcagtctgcacacctgattcatgccctcctgcaaattctggccaggtgaattcatgtttggttagaattgttagaaagttcagctggaagtttccttctccctgtggtcttttcccacttcccttgacagccctctccaaggacccctttgaaacaagtctttaaaagctttcctgaagacccagagagcccacagggcttcttctgcttcctctacctctgtatttagctcatctctctaaattgactcagctcgaggtaaggtcaggtccttatcccatgatctagactttcaggttcccaagtgagggtgtgtg

SEQ ID NO: 592864 - DNA, 444 bp, Homo sapiens
  misc_feature 388: n = A,T,C or G
tagctagcaccacacctcaggtccaattctcctgtctttatatgcagcaggtccacasgacaaggcctccctcagaaaaagctaccccaatctaggacaaaaacaaactcttttccctccccctccctccatgtgcccagaacccctttctccttcctccctaggctaacctgctaagtcttccggatagctcactacactatctgatagctaactgggtgtgacaaaccacgtcctcacaccttagaaggcaaaacactccaggaacttacttctggaataccaataccttcacagtaatttccctgcctttccaaagagtgctctaaacaggtaaaagctataatacaaactctatatatttgtgtcacagatacagaaactggcnacatcgtttgcatattttaaaatctgggtgatatgggtatcactctatcaatatta

SEQ ID NO: 592865 - DNA, 453 bp, Homo sapiens
  misc_feature 410: n = A,T,C or G
ttcccagatctgtgtggcgctttagctagcaccacacctcaggtccaattctcctgtctttatatgcagcaggtccacaggacaaggcctccctcmgaaaaagctaccccaatctaggacaaaaacaaactcttttccctccccctccctccatgtgcccagaacccctttctccttcctccctaggctaacctgctaagtcttccggatagctcactacactatctgatagctaactgggtgtgacaaaccacgtcctcacaccttagaaggcaaaacactccaggaacttacttctggaataccaataccttcacagtaatttccctgcctttccaaagagtgctctaaacaggtaaaagctataatacaaactctatatatttgtgtcacagatacagaaactggcnacatcgtttgcatattttaaaatctgggtgatatgggtatcac

SEQ ID NO: 592866 - DNA, 444 bp, Homo sapiens
  misc_feature 388: n = A,T,C or G
tagctagcaccacacctcaggtccaattctcctgtctttatatgcagcaggtccacaggacaaggcctccctcagaaaaagctaccccaatctaggacaaaaacaaactcttttccctccccctccctccatgtgcccagaacccctttctccttcctccctaggctaacctgctaagtcttccggayagctcactacactatctgatagctaactgggtgtgacaaaccacgtcctcacaccttagaaggcaaaacactccaggaacttacttctggaataccaataccttcacagtaatttccctgcctttccaaagagtgctctaaacaggtaaaagctataatacaaactctatatatttgtgtcacagatacagaaactggcnacatcgtttgcatattttaaaatctgggtgatatgggtatcactctatcaatatta

SEQ ID NO: 592867 - DNA, 444 bp, Homo sapiens
  misc_feature 388: n = A,T,C or G
tagctagcaccacacctcaggtccaattctcctgtctttatatgcagcaggtccacaggacaaggcctccctcagaaaaagctaccccaatctaggacaaaaacaaactcttttccctccccctccctccatgtgcccagaacccctttctccttcctccctaggctaacctgctaagtcttccggatagctcactacactatctgatagytaactgggtgtgacaaaccacgtcctcacaccttagaaggcaaaacactccaggaacttacttctggaataccaataccttcacagtaatttccctgcctttccaaagagtgctctaaacaggtaaaagctataatacaaactctatatatttgtgtcacagatacagaaactggcnacatcgtttgcatattttaaaatctgggtgatatgggtatcactctatcaatatta

SEQ ID NO: 592868 - DNA, 627 bp, Homo sapiens
aaagtaattaaagttaaatacaatttgaaattcaattttttcagtttgcactagccatattccatcaagtgaccaatagccacatgtcactaatggctgctctattaaacaatgcagatatggaaaaatcttcttcacctcagaaagttctattagacagtgctggcttcaaagaaaaggaagttgttaaatcagtaagcaacagtatctgttatattccctatgtagcaggcaataatctttatgcatattatttcctttaacttcccaaccgctctatgaggcaactattattataatgtactagtctggactctaggttgctagctaaaaatgggaaaacataattaggagaaccttgaactatctcacatatctacargaaaagcctggttaaggtcctcatcaccatcagaactctttccatctgccacctttattctgttgcacaagtcagtattattcttccaggtcagcttcccccttgtggtggaaacttcccagcctcatatctcacagcctcaaactactgcctcccaccccctgagagagaatgatcctcctcctttcactcccattttagatattactcggaaggactctgataatttagctttagtgaagagc

SEQ ID NO: 592869 - DNA, 266 bp, Homo sapiens
ctgcctgttgattggattttaatctgctcacatttaatattataattggtataattctatttgtctgccattttactatttgttttgtatatttctcaaatatttttctttattgctttattttgcaatgaatgaatattttctaaaatagggaactttagattactaacgaawtattttactatatatttttgagaatttttgttgttgttgtaagtttaccatgtaggtatatggaaaattaattactcaaatcatcttccaat

SEQ ID NO: 592870 - DNA, 537 bp, Homo sapiens
gctcctaaccttacaacaatgaaagaacccaactaacttcaaagtcatgactttatttttatagcaaccaggttgccaagaactgagtcaaaatgtgagggaaaacaagcacctgcaaggagaaagaggacagatgcacttacataggacagatgcaaatagacaccactatgacaagtaaagctggaataatcaataaattcctgaagacaaagtggggcyggtcagattgggagaccgctgacagctgcagaagttgggaaagatccatcatcttgaaaacttttccccccaaacccactgtgatctctcaagcaattggtaaggaatccaagagagtctgtatatgatacagatcagggagagcagaacacttgggaggtgaccaggtcttggggccgagcccttatgaatgggattagtgcctttataaaagaagctcaatggagttcttgtgtgccttccactatgtgaggacatagaaagaaggcaccatctatgaaccatgaaatgggctctcatcaacactgaatttgt

SEQ ID NO: 592871 - DNA, 537 bp, Homo sapiens
gctcctaaccttacaacaatgaaagaacccaactaacttcaaagtcatgactttatttttatagcaaccaggttgccaagaactgagtcaaaatgtgagggaaaacaagcacctgcaaggagaaagaggacagatgcacttacataggacagatgcaaatagacaccactatgacaagtaaagctggaataatcaataaattcctgaagacaaagtggggccggtcagattgggagaccgctgacagctgcagaagttgggaaagatccatcatcttgaaaacttttccccccaaacccactgtgatctctcaagcaattggtaaggaatccaagagagtctgtatatgayacagatcagggagagcagaacacttgggaggtgaccaggtcttggggccgagcccttatgaatgggattagtgcctttataaaagaagctcaatggagttcttgtgtgccttccactatgtgaggacatagaaagaaggcaccatctatgaaccatgaaatgggctctcatcaacactgaatttgt

SEQ ID NO: 592872 - DNA, 444 bp, Homo sapiens
tttttacattgttttattttcctccagttagggcttgaggtttgtctctggagagtgactgtcaattggagccctgcctttctggggttctggkcagggggttgtggatgcttaacatgtgcctttcacaggacacttccttaccccagcaatggccaggtgtccatcccacaaccaggcctccctctcacagaacatctgttgagactaggagatgcctggtgactgttgcctgacctgtgtcctgtgtatttctgacaagagccactctcagagaccctggccaggaggagagttaggttccagtataggtcagatcagacacatggaggccacaggaccaaacatgggaaatcacagaagtagtttaattactcacagatccagagagaagagggtagctgagaagagggtttagctgtgtccccagccaaatctcatctt

SEQ ID NO: 592873 - DNA, 444 bp, Homo sapiens
tttttacattgttttattttcctccagttagggcttgaggtttgtctctggagagtgactgtcaattggagccctgcctttctggggttctgggcagggggttgtggatgcttaacatgtgcctttcacaggacacttccttaccccagcartggccaggtgtccatcccacaaccaggcctccctctcacagaacatctgttgagactaggagatgcctggtgactgttgcctgacctgtgtcctgtgtatttctgacaagagccactctcagagaccctggccaggaggagagttaggttccagtataggtcagatcagacacatggaggccacaggaccaaacatgggaaatcacagaagtagtttaattactcacagatccagagagaagagggtagctgagaagagggtttagctgtgtccccagccaaatctcatctt

SEQ ID NO: 592874 - DNA, 444 bp, Homo sapiens
tttttacattgttttattttcctccagttagggcttgaggtttgtctctggagagtgactgtcaattggagccctgcctttctggggttctgggcagggggttgtggatgcttaacatgtgcctttcacaggacacttccttaccccagcaatggccaggtgtccatcccacraccaggcctccctctcacagaacatctgttgagactaggagatgcctggtgactgttgcctgacctgtgtcctgtgtatttctgacaagagccactctcagagaccctggccaggaggagagttaggttccagtataggtcagatcagacacatggaggccacaggaccaaacatgggaaatcacagaagtagtttaattactcacagatccagagagaagagggtagctgagaagagggtttagctgtgtccccagccaaatctcatctt

SEQ ID NO: 592875 - DNA, 426 bp, Homo sapiens
atcataaccttagcagcacttggaagtctgaaactgcaacacctgggtgcaatagagtgcactggaccaagtcacagagacctgggcttccttgctgttaactggaaattgaactaggtggtctcttgggtcactgacatgacttaatgatggttataacccctctgctgagtaaataagcatttcacagtcaatcgagtttataaaagcctaatatagtcatacagttattttatcttttcctgataaaaatgcctcatgtaaaaatacctatttattttcccagtatttatggagaccacagattttacaggtaagccagcaaagattagtagtgattacctaattttctattccattcaaaataaattcccacttccaggagactaaaatatacaatgaaygctaagtctagacttctgcaat

SEQ ID NO: 592876 - DNA, 622 bp, Homo sapiens
tggtcttgaactcctgggctgaagcaatcctcctgccttggtctcccagtgttgggattacaggcgtgagccaccatgcctggctgaatgctattattattaaaattactgaggcctgaacaactttcttataattccctggcacaagattaatactggtttttgtggggctttttctcagctctcatctacttggtgtttggtatgtgtgaattacctgtgttggataataaatatggaagtaatgtctgtcctgttatttagacgtatgatctgctgatgtctggtttcttcctgaggggctgttggcatatcrtagcagcatttattgcatcttgaactgtgataaagtagtagcaagctatcaatgaacaacggtgtaaaacatacgattttaagcggaccttgtggaggtacaagaattataagacaaagactctgtccttgaggaactgtccatatattcgggaaggcatgtattcataaaaagacactaaatctgcaaggcaggaaataaaggtcatatgaacagtatagataatgcttgtataaggatagataatactcggctgagtgatggctcacgcctgtaatcccagcactttgggagggcgaagtgggc

SEQ ID NO: 592877 - DNA, 435 bp, Homo sapiens
ggaaaggcaggatggagggaggaaggagaatgaggcagttgcactggagccctaaagggcccctttgctggagcttgacgcttgtttatattcccgagaggctatggaggcggggaagtgagaggaagaaaaaatgggggcttaatttgctctcaccgattccggccgcccaccggcgttattatccttgattgccctgtctctgctttctgtcaacatgggaaaccrgcaaaaaacgtgactctgctcagatttacgcagtttgctcgctgaaggcctagtccccacgtacctgctgggcctctgccgtgggacgaggtcctgcggaaggtgtctgtgcgagggcgtgtgattaactaggggctactgggaggggtgtaatgaggcaacggtgggggtggcaggacgtctttaagggattggtgagaaaagagt

SEQ ID NO: 592878 - DNA, 569 bp, Homo sapiens
tcactgatctatatatctatccctatataagtaccataatgtcttgattaccattattttcaagtaagtttcagaatccggaagtgtgagttgagtactccaacttttttttctagattgtcttggctgttctggatcccttatatttccatatgaatttaaaaatcagcttgtcaattaatgcaaagaaaagcagctggaatttgataaggattgcattgaattatgggtccatttggaaaatattgccatcttaactatattaagcctcctgatcaatgagcatgggatattttttttctattagctcttctttaattttttcaataatgttttgaagttttctgtgtacacatcttaggattattttgttaagtatattcctgtaatcccaacaatctgggaggccgaggcaggcagatcatgaggtcaagagattgagaccaccctggtcagcatagtgaaaacctgtttctactaaaaatacaaaaaattagctgggcatagtggcgtgcagctgtagttccagctacttgggaggctgagrcaggagaatggcttgaacccag

SEQ ID NO: 592879 - DNA, 459 bp, Homo sapiens
tgagtgtgaatttgattggattgaaggatgtaaactattgttcctggatctgtctgtgagggtgttgccaaaggagactgacatttgagtcagtggactcggagaggcagactcacactcaacgtgggtgggcaccatctaatcagctgccagtgtggctaggataaaagcaggargaggaacgtggaaggacttgactggcttaatctttgggactgcattcttctcccgtgctggatgcttcctgcccttcaacatcagactcagcttttggactcttggaccttcaactagagactgaaggctgcactgctggcttccacacatttgaggttttgggactcagactggcttcctttctcctcagcttgcagagggcctactgtgggacttcatgttgtgattgtacgagtcaatactacttaataaacttccctttatatatacatctatcctgtt

SEQ ID NO: 592880 - DNA, 459 bp, Homo sapiens
tgagtgtgaatttgattggattgaaggatgtaaactattgttcctggatctgtctgtgagggtgttgccaaaggagactgacatttgagtcagtggactcggagaggcagactcacactcaacgtgggtgggcaccatctaatcagctgccagtgtggctaggataaaagcaggaggaggaacgtggaaggacttgactggcttaatctttgggactgcattcttctcccgtgctggatgcttcctgcccttcaacatcagactcagcttttggactcttggaccttcaactagagactgaaggctgcactgctggcttccacacatttgaggttttgggactcagactggcttcctttctcctcagcttgcagagggcctactgtgggacttcatgttgtgattgtrcgagtcaatactacttaataaacttccctttatatatacatctatcctgtt

SEQ ID NO: 592881 - DNA, 502 bp, Homo sapiens
tccctctttggcctcccaaagtgctgggattacaggcatgagcaggtcccaagactgtagtttaaatgctcactagctttccatagtgactatttgccttagactcctatctgattaggaaaataatctgccttccctggttgagtcattattctagggtccaggtttttttgcttgcttgtctgtttgttgagattaagataatctcacttgcgtccaagtttataaatggatcctattttgaggacgccatttttacatttgaaaggcgttggttgaactctcacttccggctgttggtttgaaggcagagccacggcacaaaagaagataaaggaaaggcaagtkcttcttcttcagttcccttcttctggcccctgtctcctgaatggcattgtcagtgagggagaggacctcaagaactgtacttttctccttaaagcagccattagcaagtggcatcagctgagggctgtgattggcccttctcttatgggtgtcc

SEQ ID NO: 592882 - DNA, 502 bp, Homo sapiens
tccctctttggcctcccaaagtgctgggattacaggcatgagcaggtcccaagactgtagtttaaatgctcactagctttccatagtgactatttgccttagactcctatctgattaggaaaataatctgccttccctggttgagtcattattctagggtccaggtttttttgcttgcttgtctgtttgttgagattaagataatctcacttgcgtccaagtttataaatggatcctattttgaggacgccatttttacatttgaaaggcgttggttgaactctcacttccggctgttggtttgaaggcagagccacggcacaaaagaagataaaggaaaggcaagttcttcttcttcarttcccttcttctggcccctgtctcctgaatggcattgtcagtgagggagaggacctcaagaactgtacttttctccttaaagcagccattagcaagtggcatcagctgagggctgtgattggcccttctcttatgggtgtcc

SEQ ID NO: 592883 - DNA, 444 bp, Homo sapiens
ttaggaaccgggctgcacagcaggaagtgagtggcaggcaagggaagcttcatctgtattttcagctgcaccacaccagtctcattactgcctgagctctgcttcctgtcagatcagtgatggcattagattctcacaggagcatgaaccctattgtgaactgtgcacgtgaggtatctaggttgcgcacccctgatgagaatctaatgcctgatgatctgtcacggtttcccatcacccccaaatgggaggaaaacgaactcacagctgccactgattccacatgatagtgagttgtataattattttgttacatactacaatgtattaataatagaaataaagtgcacagtaatcataatgcacttgaattatcccaaaacyatccttacccctagttcatagaaatattgtgtttgacaaaaccagtccctggtgccaaaa

SEQ ID NO: 592884 - DNA, 546 bp, Homo sapiens
atggtgtactatctttttgatgtactattgcattcagtttgctagtattttgttgaggagttttgtgtctatgttcaaaagggatgttggcttgtatttttcttttcttcattgcatccttgccyggttttgacatcagggtaatactagtctcatagaatgaatggggagaatccccttctctccattttttttggaatagggagaattggtgttagttctttgtaaggttgatagaattattcaatgaagccatcagtcctggacttttctttttttgggagtctttttattgctgagtcagtctgattattctgattattggtttgttcaggtttctatttcttcccagttcaatattgatatgttgaatatgttcaggagtgtatgtatttcctctagatcttctagtttgttaatgtatacttgttcataagtctccgatgattttttgtatttctgtggtaccagttgcaatgcctcctgtttttttttctgatttttaaaaatttgagtctttgcttttattttcttggttagttgggt

SEQ ID NO: 592885 - DNA, 546 bp, Homo sapiens
atggtgtactatctttttgatgtactattgcattcagtttgctagtattttgttgaggagttttgtgtctatgttcaaaagggatgttggcttgtatttttcttttcttcattgcatccttgcctggttttgacatcagggtaatactagtctcatagaatgaatggggagaatccccttctctccattttttttggaatagggagaattggtgttagttctttgtaaggttgatagaattattcaatgaagccatcagtcctggacttttctttttttgggagtctttttattgctgagtcartctgattattctgattattggtttgttcaggtttctatttcttcccagttcaatattgatatgttgaatatgttcaggagtgtatgtatttcctctagatcttctagtttgttaatgtatacttgttcataagtctccgatgattttttgtatttctgtggtaccagttgcaatgcctcctgtttttttttctgatttttaaaaatttgagtctttgcttttattttcttggttagttgggt

SEQ ID NO: 592886 - DNA, 546 bp, Homo sapiens
atggtgtactatctttttgatgtactattgcattcagtttgctagtattttgttgaggagttttgtgtctatgttcaaaagggatgttggcttgtatttttcttttcttcattgcatccttgcctggttttgacatcagggtaatactagtctcatagaatgaatggggagaatccccttctctccattttttttggaatagggagaattggtgttagttctttgtaaggttgatagaattattcaatgaagccatcagtcctggacttttctttttttgggagtctttttattgctgagtcagtctgattattctgattattggtttgttcaggtttctatttcttcccagttcaatattgatatgttgaatatgttcaggagtgtatgtatttcctctagatcttctagtttgttaatgtatacttgttcataagtctccgatgattttttgtatttctgtggtaccagttgcaatgcctcctgkttttttttctgatttttaaaaatttgagtctttgcttttattttcttggttagttgggt

SEQ ID NO: 592887 - DNA, 481 bp, Homo sapiens
ttgagttttttcttttccctatttgtaggtttgctttatcagtggattgcatattttcatgtgttttcatgaaggtagatatgatcctttcacttatatgtgtaggattcccttaagcattttttgttgaactggtctagtggtgatgaattttctcagctttttcttgtctgagaaagatattatttcattttcatttgtgaagggtatctttgctatcttcactgagtatagtaagtatccttggctggtaaattttttttttctttcagcgctttcaatatgtcatcgcagtctctcctggcttataaggtttctgctaagaaatttactgttagtctgatggggsttcccttattagtggctagacacttttctcttgctgtttttaggattatcttgtttttcttgacatttgacagtgtcactataatgtgccataaagaaggtatttttgaattgtgtgtatttggggattctt

SEQ ID NO: 592888 - DNA, 548 bp, Homo sapiens
gtctgtttttccttctcacagcagttggtatatgagggggcagtcccttggctcttaatgctgagtagcaggaccagatcgagtgtcattgtcatctccaatgttactccttgccctccctcttccccatacctgatgggacattctccaaagtggttgtatcaaacaatgctctcatcatcagactgaaaattccagttgctccacattctcacccatgcgtagcattgccaatttttaccccttaattttaaccatgtgagtaggtatctcatagttctaatatacatttctctgttaaccagtgacgttgaacaattttcacttaattactggacatttggatgcygtcttttgtgaaatgatatctcaagaatttggctgcagcacattcattccagatcaggtggccagtatgcctgggcttgtttcactgtattccattggtctattgttggtctagccttgtaatcatatcaatggtcctaataagcacagttttataataatacaattttctttcttttttttttttgagacagagtctt

SEQ ID NO: 592889 - DNA, 334 bp, Homo sapiens
ccacccaccgctggtgacactaatttccagtcacctggtcatgctggaatctcccggttttctccaccagaaggacactagttctgctcttgcaattggttattgttttgtgggagcatattctgagatcrtgccagcatcctgtacatcatcaacataccatccgcctgccttagcatgcctgaatgtgcgccacaggtccactatcgcaaaggccactacaatggttgccaaatggtgactttctattttcttttcttttttttttttttttttgagagacggagcctcgctctatcacccaggcttgagtgcagtggtgcgatctcagctt

SEQ ID NO: 592890 - DNA, 334 bp, Homo sapiens
ccacccaccgctggtgacactaatttccagtcacctggtcatgctggaatctcccggttttctccaccagaaggacactagttctgctcttgcaattggttattgttttgtgggagcatattctgagatcatgccagcatcctgtacatcatcaacataccatccgcctgccttagcatgcctgaatgtgcgccacaggtccactatcgcaaaggccactacaatggttgccaaatggtgactttctattttcttttcttttttttttttttttttgagagacggagcctcgytctatcacccaggcttgagtgcagtggtgcgatctcagctt

SEQ ID NO: 592891 - DNA, 411 bp, Homo sapiens
ggattacaggcgcctgccaccacactcggctaagttttgtattttactagagacggagtttcacgatgttggccaggctggtctcaaactcctgacctcaggtgatccacctgcctcggcctcccaaagtgttgggattacaggcgtgagccactgcagctggcctacttcattcatttttattgctgagtagtattctattgtttggatacatcacagtttgtctgatcacctattgattgacatttggattgtttccagatttgggctattacaaataaggctactatgaaccctcatgatttatattgagaacatcatggtagtgtagttaccatttctgatgcttctcaytcctttgtgcagatccagatttcttattttttacttttttattttactttttgagat

SEQ ID NO: 592892 - DNA, 433 bp, Homo sapiens
tggctggtcttgaactcctgacctcaggtgatccacccaccttggcctcccaaagtgctgggattacaggcgtgagccatcacacctgccctgttgtctgtttctttagcatccaaatacaatagtgatggcacctacttggcatgtatccggccccctcccaaatatttctaagaatccttggggagctctgaacaccttttggttgccccccaccctgccccgacctcttgtgcccatacagcccccaaattcaatcccagatactactgcaggctgctcttccccctggcacagcttacctcccagcacagatgtagtcccagggcatgctacccaaggtgaccctgaattacagacttgagcatgtcagaaggaaaccacagtgcagaaaaagcrcctttacagctgtgatcttgaagatcatcactac

SEQ ID NO: 592893 - DNA, 585 bp, Homo sapiens
atctcctaatctgtgatactgtgataataaattaaggtaaaaaaattatatggccatctccttaggtagataaataatttaatatctattcttaatcaaaacacaagcaaggttatataaccaaaayagaaatataagaaagcctaaaatttcatacaactcatttataagaaacctaagacaaacattactgatgttatatattttttcattaaatccaggagcaatataaggatacctactatcattaccgctatttgaattatattgaatgctcaaactcagcgttttttaactaactttgtcacactgatattttagaccagatagttacttgttgtgagagactgtctgatattgccaaatgttggataactagtacaaactgtacccagtgtataacttccgctttaattaatgagaaaagataaggaaaaaaaatacaaagtacacagactggaaaagaataaaagctattttcagataatatgattgatataaccaattaaaatgaaagacagaaaaattatgatcctgaccaaaaccataaagtgtttgaaaatttgcttgagaaaaaaatcttcg

SEQ ID NO: 592894 - DNA, 646 bp, Homo sapiens
ataggccattgtaattcatacagaaatatatttaaacactttctccaggaggtatgcaattgtatatattgtaatattattcataatactggaagactgagaaggaagctgtggtacactgtgttttttaagatgtctgtaataatatttctcattccacatgattttacagaagcatactactctttctctaaatatataatctatctcccttccccttaaacttttcactggagtttgygacttcttcaaataatggagtcctgtggactctatatgaatcaggtggggtagcttgactaatgactgttaatctatttccagggtgtctcaaccacatggttaacaagttactgatttcccagactcagtaactaaaggtgaaatagtttcccgctagtgttctttcctggaacgcttgtccttggaacactgccatcatgccatgaggaattctaaataacagagaaagaccttcatagaaaagaactaagttatcagctgacgacacatggcatatagacaacccttcccaccaagcccaacccaaataccatatttataagctcacaatatgattgttgttgactttagccacttagtttagggtagtttgttagatgacattagatagcaagactacaac

SEQ ID NO: 592895 - DNA, 605 bp, Homo sapiens
atcattgacccctttctgcctctcacactcccagtccaatcactcagatcatcttgcccactttgtcttcaagttatatacaaaatttaaccacttcttstcatctgtactgccaccactgcagatcaagctaccttcatctcttacctggattagtaaaaagcttataagttgatatatcagcttcactacttatctccgctccaagtattctcaaaacaacagccagagtaatcttaccaggttagtcagatcttgtcactcttctgctcaatacacttcaggcatgtcttctccatcagaataaaaatcaccattgaggaagacctacagggtcatatatgatatttctgacattcattttacactaattttaccttccctcactgtgcatgagctagtgcttcctcattgttccagggatgagccatttgcgtctgccttagtttttatgcatttgctttttcttatctttagaatgcttgtcctcaagagtctacctggctcactcattcactttactggaatgtcaccttttcatgaaattgtgctgattcttcgagccatcctatctattattctacatatgatccttcctgtccctc

SEQ ID NO: 592896 - DNA, 531 bp, Homo sapiens
taggttttgtggaacttttactatgtcatctatttattggaattccccctggataccaggaccccctccagcagagcttaaagttatagttacaggaagtacaaattccktatgtggatccctggaagtgtgatgagaagaaccactgtttccaagatctatttattctatttatcaggcctataaaatcatgtaatggccatggcttcaactagactccacatcttgaatcacagaactcaacgaatggcatcaactacaagctggtattctgctatacatttaagaggccattttaatattctattagtctagcagcttctaagtgatgagggatatggggggactggaggatcccgtgctcacttccttttctgtaaaaggagctctttgatccaaggtgacatggtatgggatccaatgacaataaatcagttattctgtgaaccctgatcaaaacttgactaaacttttgacagttaggttttttcctgaccacagactcctcacctttcttttcttagaaaattt

SEQ ID NO: 592897 - DNA, 531 bp, Homo sapiens
taggttttgtggaacttttactatgtcatctatttattggaattccccctggataccaggaccccctccagcagagcttaaagttatagttacaggaagtacaaattccttatgtggatccctggaagtgtgatgagaagaaccactgtttccaagatctatttattctatttatcaggcctataaaatcatgtaatggccatggcttcaactagactccacatcttgaatcacagaactcaacgaatggcatcaactacaagctggtattctgctatacatttaagaggccattttaatattctattagtctagcagcttctaagtgatgagggatatggggggactggaggatcccgtgctcacttccttttctgtaaaaggagctctttgatccaaggtgacatggtatgggatccaatgacaataaatcagttattctgtgaaccctgatcaaaacttgactmaacttttgacagttaggttttttcctgaccacagactcctcacctttcttttcttagaaaattt

SEQ ID NO: 592898 - DNA, 561 bp, Homo sapiens
acttataaggttatgtaaagatgatatagcctaatgttaatagataaaaggcaatttcattataaattatattatcaatgcttacaaatattgatacctaatgtttgtatggctgtaggaaatgaggaattctcaaatactgggaaaatttactcctgtcatgagaaatttagtcaaaatatagattttgcatattctttgccctggcagtttcaatccataggaatcattccaacaaagtagttggatgaatttatatatatatatatatatatataatatatatatttttatataatataatatatattatataaaaatatttttatataatataaaattatattttatataatatwaaattatatatatatatacacatgaatgtttactacatagaaaatgtgtaagtgatatatcatctgccgagtaaccacttaagtatcaactggtttataaaataagagattgggaggtggaattagaaagaaaaaaggcacttaagtaaaaatactagatttcacaacattctatgtcctttgaattcttaaaaaagatcat

SEQ ID NO: 592899 - DNA, 575 bp, Homo sapiens
agaaaggattggcatggtcatttattatttcccttaacatttttttaatctaaaaactaattgaatgcctcttctgaaaaatatattatgccaataatataccttatgactaaggcagtcagcagggtaaatttccagattattatttaaaaagctattgtctgtagaaaagaaaagccatgcataaaaatcttatctcttttgatatgggtagtatgttaaagaacactgtcacagcatttcctaaatctagaaaataaaatttgttggaaatatccgtattttaggatattgtctaaaaacatgattaaagttttaaaatggaatgtatcaagtgatccagakccacttaggtaactagctaatgccatagatgaaaagcacttgcaggcagagataactagttgtgagctgattttatatattcaaaaggaatgattttatttttgatgaaataaaatttaaaaaataatgtgcaatcaattaaaaatcataatatgcaggagacagacttagtagtattacatttaataatcaaggcaatgctttctgaaatacctaacttgtagaataaa

SEQ ID NO: 592900 - DNA, 552 bp, Homo sapiens
aaacctttggtggaggagatagtggaggaaagggataatattttatttttattaaactaaaggtatattcagaggcactcctgttggcttaatggaaaaggatatgactcattagtagctttttttattggtaattttgggtactagcagaggaacagtatcacttcyattctctaagagccgaagttgatctatgctccttttgccaagagaactgctcccagggaggaaagtcttttctaccatgcctgttggcattattgctctgtcaatacagacctactttctccacatagcctctaatagccccgaacttacagatctgatagccaggttctatcacctgagacaactttggatcttttgaacttctgagtccacaatcctaaagaaaaaactattattctagggaaaaattaggtctagtcccttgggtctatcaattttagctaaagtaatatgattatataaaatcataatatctccaataggaaccagatgaatataagggggagaggagaagtcttttggcagtttgtcatgttttctaca

SEQ ID NO: 592901 - DNA, 552 bp, Homo sapiens
aaacctttggtggaggagatagtggaggaaagggataatattttatttttattaaactaaaggtatattcagaggcactcctgttggcttaatggaaaaggatatgactcattagtagctttttttattggtaattttgggtactagcagaggaacagtatcacttctattctctragagccgaagttgatctatgctccttttgccaagagaactgctcccagggaggaaagtcttttctaccatgcctgttggcattattgctctgtcaatacagacctactttctccacatagcctctaatagccccgaacttacagatctgatagccaggttctatcacctgagacaactttggatcttttgaacttctgagtccacaatcctaaagaaaaaactattattctagggaaaaattaggtctagtcccttgggtctatcaattttagctaaagtaatatgattatataaaatcataatatctccaataggaaccagatgaatataagggggagaggagaagtcttttggcagtttgtcatgttttctaca

SEQ ID NO: 592902 - DNA, 578 bp, Homo sapiens
tctagatcccattttacagttgatctttaagtgacaatttgatatatagtagcttttcayataatctatgttcatattacttcctagtcttttgtaacggtggtaggagaaatcattgtcaaccatttcaatgaactacaaagaaatagatgtacagaaaaagttaaggaaaaaatataccagaaatcttccattaaaaaacaggcagatgaatctgtacaagattgtagtacaaaactagcatgaacattgggaatcctaaatcaaaagctcttcacttagtttaagttcttgggacttaccactaatgagacttgaaattccttcaaaatttagtatagaataaaaatcagatttccaggaagacttgtcaaaaatatctaagcaattgaatcagaaacctattggattattttctcttaagtagaatacatcattttctttccataaatagacaacataaacaccacctgttaacaatgattcaattaattcaatcaatagagtcagtcttgctttgaggatcaaaactaagccaaaaccaaacaaagctcaaaacaatgttttccccacaataa

SEQ ID NO: 592903 - DNA, 615 bp, Homo sapiens
acatcattttctttccataaatagacaacataaacaccacctgttaacaatgattcaattaattcaatcaatagagtcagtcttgctttgaggatcaaaactaagccaaaaccaaacaaagctcaaaacaatgttttccccacaataatagaatatttgtaccttagcttgttataaacatactaaaagtaatatgccatattaattagtctatgatgtcacaattgttgatgactcattactttttaattttttttttactttggcctcatctttattcttacaagtctaaaactcaaaattaataagakagtggtaaatcaatgataaaaagaccaaaattataattgtttcttacatcatatacaaaaatcaactcaagatggatttaagacctaaatgtaaagcctaaactataaaaaccctggatgataacctaggacattctggacataagacctggcaaacatttcatgatgaaaatgccaaaagcaactgcaacaaaaacaaaaaaaattgacaaatgggacctaattaaagagcttctgcaccataaaagtaactattaagagagtaaacagacaacctacagaatgggaaaaaatattttcaagc

SEQ ID NO: 592904 - DNA, 390 bp, Homo sapiens
tattataaatgaatcagttgttctatttcaaattttatatttagataagcttaaaaatctacaacttctatggaagmacaattcatgaataaactgatcttaaataattaggagtaaagcagaggtatttgctaaaatagaagaaatataacaaaatatagttatacatactgtgtgatattggctcaataacattagttcaaatatgttgccatatatatcatatatatggtataatacatattatatattctatggagcagaatagaatactcagagatataatctcatcctaaaaattgaagttcagtgttcctgtaaaacattagatcataagttttatctaaaacattcaaatttctcccagcagattacatttaaaagcaaaat

SEQ ID NO: 592905 - DNA, 390 bp, Homo sapiens
tattataaatgaatcagttgttctatttcaaattttatatttagataagcttaaaaatctacaacttctatggaagcacaattcatgaataaactgatcttaaataattaggagtaaagcagaggtatttgctraaatagaagaaatataacaaaatatagttatacatactgtgtgatattggctcaataacattagttcaaatatgttgccatatatatcatatatatggtataatacatattatatattctatggagcagaatagaatactcagagatataatctcatcctaaaaattgaagttcagtgttcctgtaaaacattagatcataagttttatctaaaacattcaaatttctcccagcagattacatttaaaagcaaaat

SEQ ID NO: 592906 - DNA, 594 bp, Homo sapiens
ttaagtatggtgtaagatgagaacttacctttttttctttttcataatggatagcagggtatccaactaggagttggtgaacaacctattagtttgaaataaggcctgttacatcccatttatctatttgcttatcycagtcagtgctggcctcaaagggacttaattactgtagttttgtgatatgttttgatgttgggaggacaaatctcatctgtttgaagcaagctattctacttgcacaggtatttctttgctactttggtatatttattcttgactgtcttcctcatcaccatcttagttttcagttatatccatcccactattaggcccatttatgaaattttttaccttacaataatattttttatttttggcaactcttttttgttcctgtacctttttcacagtagcatgttctttactcattgacataatagcctctccaaacactgaaggtgttttgggaggaaaagtcttttctgtactagccttaactctgctcctcagagggctactgctttgcatgttccactcggccaacctttcagactgctagcagatttataaaggaagggcagcaactaggca

SEQ ID NO: 592907 - DNA, 594 bp, Homo sapiens
ttaagtatggtgtaagatgagaacttacctttttttctttttcataatggatagcagggtatccaactaggagttggtgaacaacctattagtttgaaataaggcctgttacatcccatttatctatttgcttatctcagtcagtgctggcctcaaagggacttaattactgtagttttgtgatatgttttgatgttgggaggacaaatctcatctgtttgaagcaagctattctacttgcacaggtatttctttgctactttggtatatttattcttgactgtcttcctcatcaccatcttagttttcagttatatccatcccactattaggcccatttatgaaattttttaccttacaataatattttttatttttggcaactcttttttgttcctgtacctttttcacagtagcatgttctttactyattgacataatagcctctccaaacactgaaggtgttttgggaggaaaagtcttttctgtactagccttaactctgctcctcagagggctactgctttgcatgttccactcggccaacctttcagactgctagcagatttataaaggaagggcagcaactaggca

SEQ ID NO: 592908 - DNA, 503 bp, Homo sapiens
aaacaatatcccaaaatgaaggcctcagaagcagccttaagagaaaaagtttctcccctgagactagccatacaaactagaatccctgttccccaaggcaggtcacagaaaccagaacccctttaccccaaagccagtcataaaaccagaacataatactctaacttttcctctacctttctgtgtaaaactggccataaaaaaagttatctgatcttccttgtttgactgtaagtcataagactcccatttcagaaagggtcctgccccatacccagaaggaaggaatgcatgctcagagagggccagaagagtttagacagacasgccttgctggatatccccagtctattagcattagatcataccctttctgtccaatcacatttctacagggctgtccatacttttttgaacctaagcatgaaaatggacaatttcccctgtatctttgggtcttccttctgaaggctcctgtatatacacattacataaatttgtat

SEQ ID NO: 592909 - DNA, 609 bp, Homo sapiens
acttctaaatatacttctagaactgatgtgtttaaaacagattgatgtctgtgtcaggagcagggcaataaaataaactcagttgctcaaaaaattagtttatttagcatttctgcattatttaaatgagtcttattctattcttttaaaaatctgtctttaaaatatccaaattaacatattaatcactaacagacagtggtggttataaataaaggctctaattatgttgcatttttaaatatattttcaaaatatattaattcctcttgaacaaacaaaaaatatgaaaacactcaccgctcccctctggtaaacaagatgccaactctagggtacggtggaaagacatactggatactttcactgtgttcagcaaatggattgaacatggagccaaaaacatgcgaagcactgggacaatctgaaaacaacaacaacaacaaaaaaaacaagctttatmatttcacaagaccttttccaggttgtaaaagcaagagaggaggcaagaaaaacagaaaatttcaaactgatttgaaaatttttaaaaagtgatagagcctgtattacataaaacttatgagacagttgactctaggaaattataac

SEQ ID NO: 592910 - DNA, 606 bp, Homo sapiens
ttgcagtctgcagtgtttgttctgtagcattgcttagcagtcttttctagggacgcttggtaactctccatgcgttgcatacctcatgccttttagagttagtgttggttactttctctttcaagtactttttacctctgtttattttttaaaaacttcctctttttttcctatttgtcttaaggtagcatctactgtgtttatttgattttacactctgttttagtctccattggaatgtagttttgttttcattgtaattctgtcttcagctttatttagtttcttcattttcctaagtctgatttatgtggttctttcacgtcttgtatcatttttctaatttcactcaatttcttttgagatgatagattatagggttgacatgttttggggrcatatctttctggcctgcttttattgcctatagggatgttattttgttccttattctcactttgttttggagacacagtcttgctctgtcacccaggctgcagtgcagtggcatgattctgactcactgcagcctcgacctcccaggctcaagccatccttccccatcagccttctgagaagctgggactacaggcttgtgccaccacg

SEQ ID NO: 592911 - DNA, 566 bp, Homo sapiens
cccagtctggagtgcagcagctccattatagctyactgccacctcgaccccgggctcaagcaatccttctacatcagccttcagagtagctgggactacccgcggggcccaccacacccggctaatctttgtggtttttgttttgtttttcccttaagagaccctgtttggggccaggcgcagtggctcaggcctgcagtcccagcacttgggacgcccaggcgggcggatcacctgaggtgaggagctggagaccagcccgaccaacatggagaaaccccatctctactaaaaaaaaaattacagaattagccgggcatggtggctcaggcctgcaatcccaacacccggggaggccgaggctggcggatcacctgaggtcgggggttagaaaccctcctgaccaacatggaaaaaccccgtctgtaccaaaaacaacaacaaaaacaaatacaaaatagctgggcatggtggctcacgcctgcaatcccagccactcaggaggctgaggaaggagaaccacctaaacccgggaggtggatgccgtggcgagccaagaccgcgcc

SEQ ID NO: 592912 - DNA, 566 bp, Homo sapiens
cccagtctggagtgcagcagctccattatagctcactgccacctcgaccccgggctcaagcaatccttctacatcagccttcagagtagctgggactacccgcggggcccaccacacccggctaatctttgtggtttttgttttgtttttcccttaagagaccctgtttggggccaggcgcagtggctcaggcctgcagtcccagcacttgggacgcccaggcgggcggatcacctgaggtgaggagctggagaccagcccgaccaacatggagaaaccccatctctactaaaaaaaaaattacagaattagccgggcatggtggctcaggcctgcaatcccaacacccggggaggccgaggctggcggatcacctgaggtcgggggttagaaaccctcctgaccaacatggaaaaaccccgtctgtaccaaaaacaamaacaaaaacaaatacaaaatagctgggcatggtggctcacgcctgcaatcccagccactcaggaggctgaggaaggagaaccacctaaacccgggaggtggatgccgtggcgagccaagaccgcgcc

SEQ ID NO: 592913 - DNA, 396 bp, Homo sapiens
gcccattctatgaattctgtccccgaggatttgaatagccagtgttattttccattaaggtagctacactcttttcatacttaccrttttgttggtatgttcttgttataccactgcagacacttgtgctttttcacaagttcttcaaaaccatttctctcttattaaaaacaaaagattgcagaattcaaaataaagcttaaaaatatgacacctactacagagccgcattgtcagactctctcactctaatataatccctggaaataatttttgggagcatgaaatttaagctcagcagaagctctagctacatcttgaaagctctagccttcattaaaccccttaggagatgttccttagcccagtatttatagagctgggatgttgggctgc

SEQ ID NO: 592914 - DNA, 600 bp, Homo sapiens
tcttgcctggcctaggctttctatttttgtttaataatttaccttcaagatattcttaacttttaacaactgtattgtataaatatattttttatttaaacaataggctaccaataacattaataacatatcttggtttatgtattttacaagattctccatgtgataaattccaacctgagaagttgctatagaacatatgaatttaacattttttaattgctgcgatctaatatgatcctaaaacatggccctagtttatattcctatgagaatgtctaatacctacactcttgctaacattgactgctattgcattttaaagactcawtaatttgattggattgatgttgaacatcttctgttactcttggccattgcatttctttttctacctattaatctcccttgtataatattgcattatttgtcttttttgtctcatttatcgacaaagattaaagttattggcagtagtgaaaatggagaaaaaaatcaaaattcaaatactgtagagtacaatattttggagaataatttgattctatatattgaaatttaaattgtctttaatctttgacccagttattctctttctag

SEQ ID NO: 592915 - DNA, 600 bp, Homo sapiens
tcttgcctggcctaggctttctatttttgtttaataatttaccttcaagatattcttaacttttaacaactgtattgtataaatatattttttatttaaacaataggctaccaataacattaataacatatcttggtttatgtattttacaagattctccatgtgataaattccaacctgagaagttgctatagaacatatgaatttaacattttttaattgctgcgatctaatatgatcctaaaacatggccctagtttatattcctatgagaatgtctaatacctacactcttgctaacattgactgctattgcattttaaagactcattaatttgrttggattgatgttgaacatcttctgttactcttggccattgcatttctttttctacctattaatctcccttgtataatattgcattatttgtcttttttgtctcatttatcgacaaagattaaagttattggcagtagtgaaaatggagaaaaaaatcaaaattcaaatactgtagagtacaatattttggagaataatttgattctatatattgaaatttaaattgtctttaatctttgacccagttattctctttctag

SEQ ID NO: 592916 - DNA, 468 bp, Homo sapiens
aattccaacctgagaagttgctatagaacatatgaatttaacattttttaattgctgcgatctaatatgatcctaaaacatggccctagtttatattcctatgagaatgtctaatacctacactcttgctaacattgactgctattgcattttaaagactcattaatttgattggattgatgttgaacatcttctgttactcytggccattgcatttctttttctacctattaatctcccttgtataatattgcattatttgtcttttttgtctcatttatcgacaaagattaaagttattggcagtagtgaaaatggagaaaaaaatcaaaattcaaatactgtagagtacaatattttggagaataatttgattctatatattgaaatttaaattgtctttaatctttgacccagttattctctttctagtaatttttctacccaaataataattcaggaagaaaa

SEQ ID NO: 592917 - DNA, 468 bp, Homo sapiens
aattccaacctgagaagttgctatagaacatatgaatttaacattttttaattgctgcgatctaatatgatcctaaaacatggccctagtttatattcctatgagaatgtctaatacctacactcttgctaacattgactgctattgcattttaaagactcattaatttgattggattgatgttgaacatcttctgttactcttggccattgcatttctttttctacctattaatctcccttgtataatattgcattatttgtcttttttgtctcatttatcgacaaagattaaagttattggcagtagtgaaaatggagaaaaaaatcaaaattcaaatactgtagagtacaatattttggagaataatttgattctatatattgaaatttaaattgtctttaatctttgacccagttattctmtttctagtaatttttctacccaaataataattcaggaagaaaa

SEQ ID NO: 592918 - DNA, 432 bp, Homo sapiens
tgtttaaatgaataaattagttattatcataaaataaatgtcatgtaaagacatttattttatggtgtataaaattagaaaaacaagttattaaaaataacatgattttttgtaaaatgcttttattttgtttttaattgacataataattgcacatgtttatggggtacagtgtggtgctttagtgcatgtgtacattgcrtaatggtcaaatttaaaaattaaatgtattgatagaagaagtgtttggatatttgtatcctaaatgctaacagtgatgatatctggaatgtggaactgctggtaatttttccctttttcttttagagatttttgtacttatttttaataataaacatatactaattttataataaaaataacaatgaagtcctttccattttgaaaaattaattccaatagaaaaatact

SEQ ID NO: 592919 - DNA, 432 bp, Homo sapiens
tgtttaaatgaataaattagttattatcataaaataaatgtcatgtaaagacatttattttatggtgtataaaattagaaaaacaagttattaaaaataacatgattttttgtaaaatgcttttattttgtttttaattgacataataattgcacatgtttatggggtacagtgtggtgctttagtgcatgtgtacattgcataatggtcaaatttaaaaattaaatgtattgatagaaraagtgtttggatatttgtatcctaaatgctaacagtgatgatatctggaatgtggaactgctggtaatttttccctttttcttttagagatttttgtacttatttttaataataaacatatactaattttataataaaaataacaatgaagtcctttccattttgaaaaattaattccaatagaaaaatact

SEQ ID NO: 592920 - DNA, 410 bp, Homo sapiens
tatctcctaacacgagtagcttgggggttaggatttcaatatacaaatttggggggacataaacagtcagtctgtgacattgccatttcatcagtaagaattttcatgaactcactattaagatttatgtttaggttttttatgcggatgttctcactttataatattgtttgtctgcatagtttaaagaaaaggacaatgcccaattagaacaggaggtgtcttttttggccagcaaaatattttaagatgccttgagtgtgaccctacatagagatcatcaaggtaacatcattttgttcttgttctagatccacatgtttcactcaagatccyagaaagaaaatgtatgaaaacacattggaagacaataatccatccttacaatgctagccaatgtttattattgc

SEQ ID NO: 592921 - DNA, 591 bp, Homo sapiens
aacggcaaacattttaaattaaaagttagcaaattaagtttagaagtctataaaaaagataatatagtatgaaaattgtgtttgttccatgaatgcaaggatttctaacaatagaaaaaaaaactatgtataattcatcacattaacaagttaaaggaggaaaagcaaatcatcattgtaggagaggcaaaaagtgaattcaataaaataaaatatttaactttgacaaatcttgtttagcaaacaagaaatagaagagctttcagtgtttgcttataaatcagaaactattcttcgtctttcaagcagaggtgatttaatacaggtgattgattacacaagtgatggaagccaaaccaggcttggtgagtcagcagcccatatttaatatatttatatattaaatatttaattatacttcaaaacttttatgtacactataatctcattattgttttctatactattatatgcaatatacaaatacagaaatacagaaatgtacctcagtttgaaagagaayttgaatatgaggcaaaaagatacccccaaattatagttacattacaagaattgaatttaagaaggaag

SEQ ID NO: 592922 - DNA, 551 bp, Homo sapiens
tatgtcataaaagaagtcaaaagtagtcttgaataatcaaagctcttttgccagattgttgaatgccaatttgttatctggcactgcttttcctatgtcttcttcctcattatctggcactggttaggaagcactcatctccatgaagtcatcttttgttaattcctctggtgtggtgtgtattagctcttaaattcctccaagatccatatcttgcaacccttcactccacacctttttttcccttcatatccatacttctttccatggttttctctaaattggrtttgtcgtaattctgtagctatgcacaacatctggacacaaattgtacttttgtccagcacgaatttattgttttgagtttcatggttttctatatcaactgatgacatcttgaaaggtgtaagccttccagacttccatgatgttctctctattgggtttctcttttgcaatgttgacaaacctttccatagagtgccatatgtagagccttaaaggtccttatgactcccttatctagaggctgaagtagagatgtgtttggg

SEQ ID NO: 592923 - DNA, 551 bp, Homo sapiens
tatgtcataaaagaagtcaaaagtagtcttgaataatcaaagctcttttgccagattgttgaatgccaatttgttatctggcactgcttttcctatgtcttcttcctcattatctggcactggttaggaagcactcatctccatgaagtcatcttttgttaattcctctggtgtggtgtgtattagctcttaaattcctccaagatccatatcttgcaacccttcactccacacctttttttcccttcatatccatacttctttccatggttttctctaaattggatttgtcgtaattctgtagctatgcacaacatctggacacaaattgtacttttgtccagcasgaatttattgttttgagtttcatggttttctatatcaactgatgacatcttgaaaggtgtaagccttccagacttccatgatgttctctctattgggtttctcttttgcaatgttgacaaacctttccatagagtgccatatgtagagccttaaaggtccttatgactcccttatctagaggctgaagtagagatgtgtttggg

SEQ ID NO: 592924 - DNA, 590 bp, Homo sapiens
tgaactcatggggttctgggtggccagggggattttccaattaacaacatacacaaaaaactttaaaagcagtccttactggcaaggtacttctgacttcagggacaaagcaytgatggaactaatccagaaaaagcattctcatagtccaggccttcttgttgtacaaccaaaagactggcaactagtgtttctcttttccctttcaagactcaggggttagcagctttatagttaaggtcagccctgatcataaacccgactacatttgcacaaagcagtagagttagcctatcccttcctgccttaaatcttggtgcttgcttctcttccttactaataaatgaccttactaataaatgattctcctgcctcagcctccctagtagctgggactacaggtgccgccatgacgcccggctaatttttgtatttttattagagacgaggtttcaccatgttggtcaggctggtctcaaactcctgatctcaagtgatccacccacctcagcctcccagagtgctgggattacaggtgtgagctaccgcgcccagcccgcacctgcagcttaatccctatttcgctggtg

SEQ ID NO: 592925 - DNA, 590 bp, Homo sapiens
tgaactcatggggttctgggtggccagggggattttccaattaacaacatacacaaaaaactttaaaagcagtccttactggcaaggtacttctgacttcagggacaaagcattgatggaactaatccagaaaaagcattctcatagtccaggccttcttgttgtacaaccaaaagactggcaactagtgtttctcttttccctttcaagactcaggggttagcagctttatagttaaggtcagccctgatcataaacccgactacatttgcacaaagcagtagagttagcctatcccttcctgccttaaatcttggtgcttgcttctsttccttactaataaatgaccttactaataaatgattctcctgcctcagcctccctagtagctgggactacaggtgccgccatgacgcccggctaatttttgtatttttattagagacgaggtttcaccatgttggtcaggctggtctcaaactcctgatctcaagtgatccacccacctcagcctcccagagtgctgggattacaggtgtgagctaccgcgcccagcccgcacctgcagcttaatccctatttcgctggtg

SEQ ID NO: 592926 - DNA, 590 bp, Homo sapiens
tgaactcatggggttctgggtggccagggggattttccaattaacaacatacacaaaaaactttaaaagcagtccttactggcaaggtacttctgacttcagggacaaagcattgatggaactaatccagaaaaagcattctcatagtccaggccttcttgttgtacaaccaaaagactggcaactagtgtttctcttttccctttcaagactcaggggttagcagctttatagttaaggtcagccctgatcataaacccgactacatttgcacaaagcagtagagttagcctatcccttcctgccttaaatcttggtgcttgcttctcytccttactaataaatgaccttactaataaatgattctcctgcctcagcctccctagtagctgggactacaggtgccgccatgacgcccggctaatttttgtatttttattagagacgaggtttcaccatgttggtcaggctggtctcaaactcctgatctcaagtgatccacccacctcagcctcccagagtgctgggattacaggtgtgagctaccgcgcccagcccgcacctgcagcttaatccctatttcgctggtg

SEQ ID NO: 592927 - DNA, 461 bp, Homo sapiens
gttctgggtggccagggggattttccaattaacaacatacacaaaaaactttaaaagcagtccttactggcaaggtacttctgacttcagggacaaagcattgatggaactaatccagaaaaagcattctcatagtccaggccttcttgttgtacaaccaaaagactggcaactagtgtttctcttttccctttcaagactcaggggttagcagctttatagttaaggtcagccctgatcataaacccgactacatttgcacaaagcagtagagttagcctatcccttcctgccttaaatcttggtgcttgcttctcttccttactaataaatgaccttactaataaatgattctcctgcctcagcctccytagtagctgggactacaggtgccgccatgacgcccggctaatttttgtatttttattagagacgaggtttcaccatgttggtcaggctgg

SEQ ID NO: 592928 - DNA, 461 bp, Homo sapiens
gttctgggtggccagggggattttccaattaacaacatacacaaaaaactttaaaagcagtccttactggcaaggtacttctgacttcagggacaaagcattgatggaactaatccagaaaaagcattctcatagtccaggccttcttgttgtacaaccaaaagactggcaactagtgtttctcttttccctttcaagactcaggggttagcagctttatagttaaggtcagccctgatcataaacccgactacatttgcacaaagcagtagagttagcctatcccttcctgccttaaatcttggtgcttgcttctcttccttactaataaatgaccttactaataaatgattctcctgcctcagcctccctagtasctgggactacaggtgccgccatgacgcccggctaatttttgtatttttattagagacgaggtttcaccatgttggtcaggctgg

SEQ ID NO: 592929 - DNA, 590 bp, Homo sapiens
tgaactcatggggttctgggtggccagggggattttccaattaacaacatacacaaaaaactttaaaagcagtccttactggcaaggtacttctgacttcagggacaaagcattgatggaactaatccagaaaaagcattctcatagtccaggccttcttgttgtacaaccaaaagactggcaactagtgtttctcttttccctttcaagactcaggggttagcagctttatagttaaggtcagccctgatcataaacccgactacatttgcacaaagcagtagagttagcctatcccttcctgccttaaatcttggtgcttgcttctcttccttactaataaatgaccttactaataaatgattctcctgcctcagcctccctagtagctgggactacaggtgccgccatgacgcccggctaatttttgtatttttattagagacgaggtttcaccatgttggtcaggctggtctcaaactcctgatctcaagtsatccacccacctcagcctcccagagtgctgggattacaggtgtgagctaccgcgcccagcccgcacctgcagcttaatccctatttcgctggtg

SEQ ID NO: 592930 - DNA, 473 bp, Homo sapiens
aatgagtaattcagtaaaataaaatttttcaaaattgtgactgctatgattatgagccaattatgaaagaaagagacacagatagaaatagggtgaccaatctttcaacttactcaggaatgaaggattttctggatgggggatttttgttgctaaaatcgggacagtaggggacatrttgggactgtggaaaaaccctacagggatttatttcctaactatgaatttctatcttggtctagagacgactgttctcataaataggtagagtagatgtggtatttctggaatgagatttaacatctttacatagcttgccctattaaaagtagacaaatgcttgtgagagaatatcatatacttttgaaagctaatgtcttaactaattcgctgtgagcaaagctcttgaagactgtgatgtaacagagattcctaggtatcagtgaagacacggagatgaaaaaagggaagtt

SEQ ID NO: 592931 - DNA, 352 bp, Homo sapiens
gaaatagggtgaccaatctttcaacttactcaggaatgaaggattttctggatgggggatttttgttgctaaaatcgggacagtaggggacatgttgggactgtggaaaaaccctacagggatttatttcctaactatgaatttctatcttggtctagagacgactgttctcataaataggtagartagatgtggtatttctggaatgagatttaacatctttacatagcttgccctattaaaagtagacaaatgcttgtgagagaatatcatatacttttgaaagctaatgtcttaactaattcgctgtgagcaaagctcttgaagactgtgatgtaacagagattcctag

SEQ ID NO: 592932 - DNA, 593 bp, Homo sapiens
ctcttcttagtgcctctgttttcctatcacttcccctatcccaatccattcttgctcttgccttagagattcttagattctgattttcctcgcaaaacatggccacaagcctaccgcctctctgtctggtagaagtayaagaatcaagagtcaaggccaaaaaggtctgagggaaggagcacaattgctcccagctgccctctcttcctgtccccaggtcctctccttcaccctcactctaggcattctacctccaaacgttcaagttaacatgtgctaaaggaatgattttctaaatcacttacctgtcactgtgaaactagattaatccacatactggtttagtaaaacctcacacaaaccagcatatacacagaagacagcaatcaagatgaagaaaacgtttgaaactgtgtcattaagaaaacgtgatgaagaaattggtaatgattattccaggaaataacagtcccttctagtctcctcagctcccttcctctcacccttctcctacctatccatcttctaaggcaccactaatattcaaagatttaggatctaagcagtgcaccaaaagtcctctgattttactc

SEQ ID NO: 592933 - DNA, 593 bp, Homo sapiens
ctcttcttagtgcctctgttttcctatcacttcccctatcccaatccattcttgctcttgccttagagattcttagattctgattttcctcgcaaaacatggccacaagcctaccgcctctctgtctggtagaagtataagaatcaagagtcaaggccaaaaaggtctgagggaaggagcayaattgctcccagctgccctctcttcctgtccccaggtcctctccttcaccctcactctaggcattctacctccaaacgttcaagttaacatgtgctaaaggaatgattttctaaatcacttacctgtcactgtgaaactagattaatccacatactggtttagtaaaacctcacacaaaccagcatatacacagaagacagcaatcaagatgaagaaaacgtttgaaactgtgtcattaagaaaacgtgatgaagaaattggtaatgattattccaggaaataacagtcccttctagtctcctcagctcccttcctctcacccttctcctacctatccatcttctaaggcaccactaatattcaaagatttaggatctaagcagtgcaccaaaagtcctctgattttactc

SEQ ID NO: 592934 - DNA, 577 bp, Homo sapiens
actctgtctcaaaaaaaaacaacaacaaaaaactatgtcctcttcatgtcaccagtcaaggatcttccaggacccttactccactcaccagtgcaggctgaaccatactagrtcataaggcaaaagaaaaaatcagtactactgatctccttatttaaaattttgataattttcaacttattttgcattaattttgattttttgaacaactacatacaaacattattttgattagtgagttttttggcactctcttaaatttcacaagagaggcctgtgccttacttgcctcaccatggtcccagccctgccattcactggcagcccctgtacagaaggccacattatagtcagtttttttcatacttggctttactctgaacctctctaagaagcccaagttaatgaactggtaattattttatgacttcccaaagaagtgtgaaataatatgataacaatattgattaactgcaactactaccacagacttgagttatctgttatatgtggtacgcataaatagcatgcaataaataactcttgaattaataaaacctgaacatattacatttta

SEQ ID NO: 592935 - DNA, 577 bp, Homo sapiens
actctgtctcaaaaaaaaacaacaacaaaaaactatgtcctcttcatgtcaccagtcaaggatcttccaggacccttactccactcaccagtgcaggctgaaccatactaggtcataaggcaaaagaaaaaatcagtastactgatctccttatttaaaattttgataattttcaacttattttgcattaattttgattttttgaacaactacatacaaacattattttgattagtgagttttttggcactctcttaaatttcacaagagaggcctgtgccttacttgcctcaccatggtcccagccctgccattcactggcagcccctgtacagaaggccacattatagtcagtttttttcatacttggctttactctgaacctctctaagaagcccaagttaatgaactggtaattattttatgacttcccaaagaagtgtgaaataatatgataacaatattgattaactgcaactactaccacagacttgagttatctgttatatgtggtacgcataaatagcatgcaataaataactcttgaattaataaaacctgaacatattacatttta

SEQ ID NO: 592936 - DNA, 577 bp, Homo sapiens
actctgtctcaaaaaaaaacaacaacaaaaaactatgtcctcttcatgtcaccagtcaaggatcttccaggacccttactccactcaccagtgcaggctgaaccatactaggtcataaggcaaaagaaaaaatcagtactactgatctccttatttaaaattttgataattttcaacttattttgcattaattttgattttttgaacaactacatacaaacattattttgattagtgagttttttggcactctcttaaatttcacaagagaggcctgtgccttacttgcctcaccatggtcccagccctgccattcactggcagcccctgtacagaaggccacattatagtcagtttttttcatacttggctttactctgaacctctctaagaagcccaagttaatgaactggtaattattttatgacttcccaaagaagtgtgaaataatatgataacaatattgattaactgcaactactaccacagacttgagttatctgttatatgtggtacrcataaatagcatgcaataaataactcttgaattaataaaacctgaacatattacatttta

SEQ ID NO: 592937 - DNA, 647 bp, Homo sapiens
tacatgccacattttctttatccagtctatcaccgttgggcatttgggttggttccaagtctttcctactgtaaatagtgctgaagtaaacacacatgtgcatgtgtccttatagtagaatgatttataatcctttgggtatatactcagtaatgggattgctgggccaaatggtatttctggttctagatccttgaggaatcgccacactgaaatttttaaaggagagaaccagtgtcttcttatttaacataaatagataagaaacatgtgcatgatggtatctacttagcaccttttagtttaagaaacacattgctgaacaataactacaccaggcactgtactaggcattaactatgcaaaaaatgcataagactaagacctcacattctagcaaaagaaacacatcaacaaatgaccataatgcaatggggttaactaccacaagagtagttaacagaataaagcaagcaactaaggcaccaaatgccacaaaaagactaaacaagatttcagtggcctactctaaggtattaagttccctcccttattatctccagttgtatctccattcttagaggagaatgcaccacatgtttttttttccyccagctagaaaaactaaatgagcagcccataataag

SEQ ID NO: 592938 - DNA, 528 bp, Homo sapiens
gcggaggttgcagtgagccgagattgctccactgcactccagcctgagtgacagagagagactccatctcaaaaaaaaaaaaaaaaaaaaaaaagctgtggtagatayatacaatggaatactattcaacctttagatataaattctgtcatttgagacaacatggatagaattggagaacattatgctaagtgaaataaggcacaggaagacaaatacagcatgttctcacttatacgtagaattgaaaaccatcaaaatcatagaagcagagaggaaaatggtggttacggaagctgtgggcctgatgatcaatgggtacaaaaagctacagttacacaagaagaatttttttgtatatgtttgagatatattgcatagagtggtgaatatagttaataatagggtattatacatttcaaaattgctaagagagtaaatttcaaaaaatgttaaatatttgagatgaaggatatactaactaccttttaattgttctacattgtattagcaaattataacatcact

SEQ ID NO: 592939 - DNA, 528 bp, Homo sapiens
gcggaggttgcagtgagccgagattgctccactgcactccagcctgagtgacagagagagactccatctcaaaaaaaaaaaaaaaaaaaaaaaagctgtggtagatacatacaatggaatactattcaacctttagatataaattctgtcatttgagacaacatggatagaattggagaacattatgctaagtgaaataaggcacaggaagacaaatacagcatgttctcacttatacgtagaattgaaaaccatcaaaatcatagaagcagagaggaaaatggtggttacggaagctgtgggcctgatgatcaatgggtacaaaaagctacagttacacaagaagaatttttttgtatatgtttgagatatattgcatagagtggtgaatatagttaataatagggtattatacatttcaaaattgctaagagagtaaatttcaaaaaatgttaaatatttgagatgaaggatayactaactaccttttaattgttctacattgtattagcaaattataacatcact

SEQ ID NO: 592940 - DNA, 371 bp, Homo sapiens
gcttgtcacccaggctggagtgcagtggtgcgatctcagctcactgcaacctccacctcctgggtttaatcacttgccttggcctcctgagtagctgagattacaggcgtgcaccmccacgcctggctaatttttgtatttttggtagagatggggtttcaccacattggccaggctggtctcaaactcctgacctccagtgatccacccatctcagactcccaaagagctgggattataggcttgaaccaccgtgctgggcctttctcagagaatttatagtttacctggaaatgtaaaccatatgtacttaaactgagggatatttacaaaagagctttctacttaacccacaagaagctgtattcata

SEQ ID NO: 592941 - DNA, 371 bp, Homo sapiens
gcttgtcacccaggctggagtgcagtggtgcgatctcagctcactgcaacctccacctcctgggtttaatcacttgccttggcctcctgagtagctgagattacaggcgtgcacccccaygcctggctaatttttgtatttttggtagagatggggtttcaccacattggccaggctggtctcaaactcctgacctccagtgatccacccatctcagactcccaaagagctgggattataggcttgaaccaccgtgctgggcctttctcagagaatttatagtttacctggaaatgtaaaccatatgtacttaaactgagggatatttacaaaagagctttctacttaacccacaagaagctgtattcata

SEQ ID NO: 592942 - DNA, 371 bp, Homo sapiens
gcttgtcacccaggctggagtgcagtggtgcgatctcagctcactgcaacctccacctcctgggtttaatcacttgccttggcctcctgagtagctgagattacaggcgtgcacccccacgcctggctaatttttgtatttttggtagagatggggtttcaccacattggccaggctggtctcaaactcctgacctccagtgatccacccatctcagactcccaaagagctgggattataggcttgaaccaccgtgctgggcctttctcagagaatttatagtttacctggaaatgtaaaccatatrtacttaaactgagggatatttacaaaagagctttctacttaacccacaagaagctgtattcata

SEQ ID NO: 592943 - DNA, 644 bp, Homo sapiens
tatcagacccagagatatttgcagtgttgaaatattttcaaaataaagttgtttacatttctatttctgtctttaatccttaaaatgcaaacaaatacaggagtgaagacagatgtattttagttatttcttctacaagataaagtggatagtaatattatgttaagaaaatacttatttagtatctagaatgatagcattatctattctttattaaaagagaaactaaaagtaatataattaaatagcttgttcttgtgacttaaataatataaaattttcatttcaattatgtgacaatgctttgtatagctgtattccaaatacayagcatggtgcctagaacatagcaggcagtcaatacatttttaccaaatgaaatgaataaattaccagttgattttatactgaggaccaaactatgacctttaattcctccaaaataaaacacacaatcccattatatgtgaaccatatccacaataccagaatctaagattcccactctgaaagagtaactagaacaacttcttttggaggcaattctgcttacttagcacattactcccccctacagttttccttcttttgtttttgtactaaggatatttgtataaaaacaggatctttgttgcttagtaatt

SEQ ID NO: 592944 - DNA, 644 bp, Homo sapiens
tatcagacccagagatatttgcagtgttgaaatattttcaaaataaagttgtttacatttctatttctgtctttaatccttaaaatgcaaacaaatacaggagtgaagacagatgtattttagttatttcttctacaagataaagtggatagtaatattatgttaagaaaatacttatttagtatctagaatgatagcattatctattctttattaaaagagaaactaaaagtaatataattaaatagcttgttcttgtgacttaaataatataaaattttcatttcaattatgtgacaatgctttgtatagctgtattccaaatacacagcatggtgcctagaacatagcaggcagtcaatacatttttaccaaatgaaatgaataaattaccagttgattttatactgaggaccaaactatgacctttaatycctccaaaataaaacacacaatcccattatatgtgaaccatatccacaataccagaatctaagattcccactctgaaagagtaactagaacaacttcttttggaggcaattctgcttacttagcacattactcccccctacagttttccttcttttgtttttgtactaaggatatttgtataaaaacaggatctttgttgcttagtaatt

SEQ ID NO: 592945 - DNA, 644 bp, Homo sapiens
tatcagacccagagatatttgcagtgttgaaatattttcaaaataaagttgtttacatttctatttctgtctttaatccttaaaatgcaaacaaatacaggagtgaagacagatgtattttagttatttcttctacaagataaagtggatagtaatattatgttaagaaaatacttatttagtatctagaatgatagcattatctattctttattaaaagagaaactaaaagtaatataattaaatagcttgttcttgtgacttaaataatataaaattttcatttcaattatgtgacaatgctttgtatagctgtattccaaatacacagcatggtgcctagaacatagcaggcagtcaatacatttttaccaaatgaaatgaataaattaccagttgattttatactgaggaccaaactatgacctttaattcctccaaaataaaacacacaatcccattatatgtgaaccatatccacaataccagaatctaagattcccactctgaaagagtaactagaacaacttcttttkgaggcaattctgcttacttagcacattactcccccctacagttttccttcttttgtttttgtactaaggatatttgtataaaaacaggatctttgttgcttagtaatt

SEQ ID NO: 592946 - DNA, 606 bp, Homo sapiens
cccattatatgtgaaccatatccacaataccagaatctaagattcccactctgaaagagtaactagaacaacttcttttggaggcaattctgcttacttagcacattactcccycctacagttttccttcttttgtttttgtactaaggatatttgtataaaaacaggatctttgttgcttagtaattcatctgcttcagctgcttgtattctgttcccaatcaaaattcttggttttcagcctcctcatcatttttataaggagttgaatgaattggccaagcttgttcctttctccctctccatggaacaccaggccccaagctccccgacactgctcctctttttatttctatctttgggttgtgtgtgcactctagaacacttgtatcagtgaagagtgtaacaaagtattgtgccacgcatagtctctcatatatcatctatcagctcatcaaaaagtgctcactgattaacagaggatcccctcctcagtttcagaattctctagctttaagttaggggagggttaccccaaagtcagagagggtacatgggagagggttgtgaaggccagtagcccagagaaaatcaagggcagctggg

SEQ ID NO: 592947 - DNA, 539 bp, Homo sapiens
tgcttcagctgcttgtattctgttcccaatcaaaattcttggttttcagcctcctcatcatttttataaggagttgaatgaattggycaagcttgttcctttctccctctccatggaacaccaggccccaagctccccgacactgctcctctttttatttctatctttgggttgtgtgtgcactctagaacacttgtatcagtgaagagtgtaacaaagtattgtgccacgcatagtctctcatatatcatctatcagctcatcaaaaagtgctcactgattaacagaggatcccctcctcagtttcagaattctctagctttaagttaggggagggttaccccaaagtcagagagggtacatgggagagggttgtgaaggccagtagcccagagaaaatcaagggcagctgggtgcatttaggtggataagaaaacaatgaattactccatcaaaagcaaaagcacaagcacatagtaaagttgatcacctactgttaatgtcaattcagtttaaagcactttattaaccacacatac

SEQ ID NO: 592948 - DNA, 539 bp, Homo sapiens
tgcttcagctgcttgtattctgttcccaatcaaaattcttggttttcagcctcctcatcatttttataaggagttgaatgaattggccaagcttgttcctttctccctctccatggaacaccaggccccaagctccccgacactgctcctctttttatttctatctttgggttgtgtgtrcactctagaacacttgtatcagtgaagagtgtaacaaagtattgtgccacgcatagtctctcatatatcatctatcagctcatcaaaaagtgctcactgattaacagaggatcccctcctcagtttcagaattctctagctttaagttaggggagggttaccccaaagtcagagagggtacatgggagagggttgtgaaggccagtagcccagagaaaatcaagggcagctgggtgcatttaggtggataagaaaacaatgaattactccatcaaaagcaaaagcacaagcacatagtaaagttgatcacctactgttaatgtcaattcagtttaaagcactttattaaccacacatac

SEQ ID NO: 592949 - DNA, 606 bp, Homo sapiens
cccattatatgtgaaccatatccacaataccagaatctaagattcccactctgaaagagtaactagaacaacttcttttggaggcaattctgcttacttagcacattactcccccctacagttttccttcttttgtttttgtactaaggatatttgtataaaaacaggatctttgttgcttagtaattcatctgcttcagctgcttgtattctgttcccaatcaaaattcttggttttcagcctcctcatcatttttataaggagttgaatgaattggccaagcttgttcctttctccctctccatggaacaccaggccccaagctccccgacactgctcctctttttatttctatctttgggttgtgtgtgcactctasaacacttgtatcagtgaagagtgtaacaaagtattgtgccacgcatagtctctcatatatcatctatcagctcatcaaaaagtgctcactgattaacagaggatcccctcctcagtttcagaattctctagctttaagttaggggagggttaccccaaagtcagagagggtacatgggagagggttgtgaaggccagtagcccagagaaaatcaagggcagctggg

SEQ ID NO: 592950 - DNA, 606 bp, Homo sapiens
cccattatatgtgaaccatatccacaataccagaatctaagattcccactctgaaagagtaactagaacaacttcttttggaggcaattctgcttacttagcacattactcccccctacagttttccttcttttgtttttgtactaaggatatttgtataaaaacaggatctttgttgcttagtaattcatctgcttcagctgcttgtattctgttcccaatcaaaattcttggttttcagcctcctcatcatttttataaggagttgaatgaattggccaagcttgttcctttctccctctccatggaacaccaggccccaagctccccgacactgctcctctttttatttctatctttgggttgtgtgtgcactctagaacacttgtatcagtgaagagtgtaacaaagtattgtgccacrcatagtctctcatatatcatctatcagctcatcaaaaagtgctcactgattaacagaggatcccctcctcagtttcagaattctctagctttaagttaggggagggttaccccaaagtcagagagggtacatgggagagggttgtgaaggccagtagcccagagaaaatcaagggcagctggg

SEQ ID NO: 592951 - DNA, 538 bp, Homo sapiens
cacaggttccttcatgcaccaattacaatgaccaagaattgggcatgggactcatgtcacttaaacattgtgaagctgagaaattcattatttggttaggagtgtgtgagagcagggaacactgaatgcttgagacaccaccacgatgtccactacatgtatttccatttcagtaaacatttccattaagataatgctagaacaaaatcagaggagtagatcttggtgtccccaacttttgttgacctaacaaagtgaagttgcttcaactggacacttctgaaccacatttatgcctatatgttcagttcaaatttattataagcaattttcaggtccatatgtttaggatatttcatttgtttggttatgcattatatgtatacatgtttttaacatacatacgcctctacatatattttggaggcctttacacaaaagtgttttccctaaagggagaagagaaaagttgaatgcagaagtagaaaaaaarattcatttgcacttgtagtatttatagctaaatattttatattac

SEQ ID NO: 592952 - DNA, 519 bp, Homo sapiens
acaatttccctcagaaatagccttgagaaagaagtcacatcactcagcaatgagtattataattactcacagcagttttcatggtactatataacatccaatttacagaattaaaggtaatgtaattcraaagaaaaatagctggttttaaggaatgaagggccatgtcaactattggaagcatctttgaactggagcctctatgttcgggtttcaccaggtttatgtttttaattaatatcctattcagcttgctgtaatttccattgaggttttctagaacaagacaagtcagaaattgatctttaattataagctaagagcaaactgccaaagaactgagagaaattttgaagaaacaggtctatcaggactaaccattttaagataataaagactaatcagacacacacacatatgcacaaaaagagggagagagagaacaaaaatcctatgaaatacattttaaaaacttaatttttttaagaagaagcatttgatctgccaaagagaagagtt

SEQ ID NO: 592953 - DNA, 573 bp, Homo sapiens
ctttaccccctccctccttctaccctcgagtagtccccagtttctattgttcccatctttgtgtccacgtgtactcaatgtttagctcctgcttataagtgagaatatgtggtatttggttttctattcctgtgttaattcgcttagcataatggcatcgagttgcatccatgttgctgtaaaggacatgattttattcttttttatggctgcaaagtattccatgacatatatgtaccatattttctttatccaagccacagttgatgggcacctargttgattccatgtcttagcgattgtgaattacactgctgattttaatagaaaccactaatttttatgccaaaaaaatcatcaatgtgcacatgctccaaggctgtgtgagcatagccctttttcttgggatgtcaacaccactgggttttatcaaaatataatttttgccaatttattagttaacaaatgctaactcagtgctacttggatttgaactaccactggtgctgagcaactgtttacatattcactggcaatttatttatctttctctgttgtttatctttttctgtg

SEQ ID NO: 592954 - DNA, 573 bp, Homo sapiens
ctttaccccctccctccttctaccctcgagtagtccccagtttctattgttcccatctttgtgtccacgtgtactcaatgtttagctcctgcttataagtgagaatatgtggtatttggttttctattcctgtgttaattcgcttagcataatggcatcgagttgcatccatgttgctgtaaaggacatgattttattcttttttatggctgcaaagtattccatgacatatatgtaccatattttctttatccaagccacagttgatgggcacctaggttgattccatgtcttagcgattgtgaattacactgctgattttaatagaaaccactaatttttatgccaaaaaaatcatcaatgtgcacatgctccaargctgtgtgagcatagccctttttcttgggatgtcaacaccactgggttttatcaaaatataatttttgccaatttattagttaacaaatgctaactcagtgctacttggatttgaactaccactggtgctgagcaactgtttacatattcactggcaatttatttatctttctctgttgtttatctttttctgtg

SEQ ID NO: 592955 - DNA, 670 bp, Homo sapiens
atgtgtgtacagtgaaaaaaatgagtaaatctagaaacctgtattgcctcaatagctagctaagtacttcaatatgcatgtttatttcaacaattttgtgttaagcttcagtggtaaataagcagagtacactgaccataatgaatacttcttttgatgagggttatcactacacaattaaaatattacatagttggctgggcacgttggctcacacctataatcccagcactttgggaggccgaggcaggcagatcacctgaggatgggagttcaataccagcctgactaacatggagaaaccccttctctattaaaaatacaaaattaaccaggcgtggtggcacatgcctgtaatcccagctactcaggacgctgaggcaggagaatcacttgaacctgggaggcagaggttgtggtgagccgagatagcgccattgcactccagcctgggcaacaaaagcaaaactccgtctcaaaaaaatatataataatawatatatatatatattatataatcaatataaatataatatataataaatatataatatgtattatacatataataaatatatatattatatataataaatatatcatatagatgatatagtttagagttaaatactgactgctcttgggaactttgaggtattctgagggatat

SEQ ID NO: 592956 - DNA, 384 bp, Homo sapiens
atattatataatcaatataaatataatatataataaatatataatatgtattatacawataataaatatatatattatatataataaatatatcatatagatgatatagtttagagttaaatactgactgctcttgggaactttgaggtattctgagggatataaataacacgaagagaatagcacattggcttgaagcagattagagtctgctacctgcgtgaatacttgcttttcatgaactatgaggatgcccttagcttttgaaccacttctacttgtgttgaaatttaccctttaattttggggtttgacaggctctgcccttctgttatgcttgagtctggcttttcctactctgactcactttgattcttgacctct

SEQ ID NO: 592957 - DNA, 384 bp, Homo sapiens
atattatataatcaatataaatataatatataataaatatataatatgtattatacatataataaatatatatattatatataataaatatatcatatagatgatatagtttagagttaaatactgactgctcttgggaactttgaggtattctgagggatataaataacacgaagagaatagcacattggcttgaagcagattagagtctgctacctgcgtgaatacttgyttttcatgaactatgaggatgcccttagcttttgaaccacttctacttgtgttgaaatttaccctttaattttggggtttgacaggctctgcccttctgttatgcttgagtctggcttttcctactctgactcactttgattcttgacctct

SEQ ID NO: 592958 - DNA, 528 bp, Homo sapiens
taatctgggatattccttagtaaatraaaactagtttaaaaaatattggtaaaataaaaatagaaacattttcagaattgtcagcatacacttgttttacctggctttgctgattagacaagtttgtgttgttactgttagatgtttaaggccataaaaccataaattcaacctaagagtagaatatgtagtaaaagtaaattgcttaattgtctggtgtatgtctgttgcaaaagtaaataagaaaagatgtctagaaggattgtgaaaatcttatcttgtatggtctaagctgactgagattggatagatttatttataaggttttattaaaacttagttttagtaatacattgattcaaaagtagaatttgatcttctccgttaaaatggtaaagttttcttggaatgttggtctgagaatgtaaagggtatttttttccttttcagtaattggcctcagaaacagagactctgtttcatcaagataatttcttgagtttcatgttgttttattaggtttttggt

SEQ ID NO: 592959 - DNA, 567 bp, Homo sapiens
tctgcaatagatcctcaatttttctagtttactacaatatttagctacaacactccaaattaatatttcatttttttcctgctattctggcttggaatcactaaaattataaacttttcatttcttgaagtccttcaaactgaaactggatgacttgacataagcttcagaaaaattaccacaacagcttgtgtgtggcccatctttatggcattcaaactgcaaactaatccaatgcctcttctcactccagctgaagatactacaagcccagcatctagaaatcttattgatcagctgccctctgggctcagaaactgtctttatagttcgttccaactattaatcttttttaattttatttttatagaaactaaacttcccacattaaaggcytgatagctcacactatccaggaaatatcctctgctaccaagtcccaacagatgattcaactggttcttaatgaataaaaggtgatcaaacaagaaaagagacttatattgtttgaaggaaagatgagtgtctcttctttccttaaacaagaagtagtactaacaaagattc

SEQ ID NO: 592960 - DNA, 567 bp, Homo sapiens
tctgcaatagatcctcaatttttctagtttactacaatatttagctacaacactccaaattaatatttcatttttttcctgctattctggcttggaatcactaaaattataaacttttcatttcttgaagtccttcaaactgaaactggatgacttgacataagcttcagaaaaattaccacaacagcttgtgtgtggcccatctttatggcattcaaactgcaaactaatccaatgcctcttctcactccagctgaagatactacaagcccagcatctagaaatcttattgatcagctgccctctgggctcagaaactgtctttatagttcgttccaactattaatcttttttaattttatttttatagaaactaaacttcccacattaaaggctygatagctcacactatccaggaaatatcctctgctaccaagtcccaacagatgattcaactggttcttaatgaataaaaggtgatcaaacaagaaaagagacttatattgtttgaaggaaagatgagtgtctcttctttccttaaacaagaagtagtactaacaaagattc

SEQ ID NO: 592961 - DNA, 567 bp, Homo sapiens
tctgcaatagatcctcaatttttctagtttactacaatatttagctacaacactccaaattaatatttcatttttttcctgctattctggcttggaatcactaaaattataaacttttcatttcttgaagtccttcaaactgaaactggatgacttgacataagcttcagaaaaattaccacaacagcttgtgtgtggcccatctttatggcattcaaactgcaaactaatccaatgcctcttctcactccagctgaagatactacaagcccagcatctagaaatcttattgatcagctgccctctgggctcagaaactgtctttatagttcgttccaactattaatcttttttaattttatttttatagaaactaaacttcccacattaaaggcttgatagctcacactatccaggaaatatcctctgctaccaagtcccaacagatgattcaactggtycttaatgaataaaaggtgatcaaacaagaaaagagacttatattgtttgaaggaaagatgagtgtctcttctttccttaaacaagaagtagtactaacaaagattc

SEQ ID NO: 592962 - DNA, 595 bp, Homo sapiens
tcagccaacatttaggccaccctcctgtattccaggcactgtacgtggcactgagaatgcaaagcaaaacgagtcatggtctactggcgggagccttctcagcggagaaaagatcaacaagaaaagtgcctgctggagacccctcctagggcataaaccaatatagaggtggggcagctacgtcagcctgaggtgtccttaggcagaacagaaagtgagaatcagagcagtatctcatttctgaaaacctggattgtagctttccctgggctgactgtcaaaggaggtggttttaaaaagcaagccaaacaggtttccatcctttaggaagaccctggaacgtgccagttgattctgacaatttctcatgaacagaaacacctaggaagggagaactggtgagtcttttcaagaggaggaagtccctcaaaaggggctgtgtttcgcaaacggcgccccaaaagggctgaaatacttcgatctggargaaaaagactcaggcactgagggaaggggagggtgcacatctggagtaatttcaaggctttttccgtgttatctgatgtggcaacaagtagagatttgttcgttttat

SEQ ID NO: 592963 - DNA, 567 bp, Homo sapiens
ttcctctaaatgggataatacttacatatgaggtacaacagacttactctcctaaagcccgtgtacagaaccacatatttgctttacgtgaaactagacctactgtattaataaagtttgatttctatttaaaatgttttagagggctggacatcagcttagttctttacttttaccttagaagatatacaagtctcttttaacccacactttcatgaggtcccatttccctttccaaattattgtttcacagctaaccttctatgactgtagcctaatttcagatattyctctttcttttccatctacttcttacttatccctctgcaacaaaactttaattctaattattgcttagaaactgttttctaaaaacaatgactttcctctagtcaagttcagtggtctcatctgaaacttcataaggaaattctctctcctatagggagaattgctaaccactccatgtaccgttttaatcattttaccttggcttctatgactccctctgtctaactcaaaacccagtgaagtcttagtctggattgctgatttctccttcttccc

SEQ ID NO: 592964 - DNA, 567 bp, Homo sapiens
ttcctctaaatgggataatacttacatatgaggtacaacagacttactctcctaaagcccgtgtacagaaccacatatttgctttacgtgaaactagacctactgtattaataaagtttgatttctatttaaaatgttttagagggctggacatcagcttagttctttacttttaccttagaagatatacaagtctcttttaacccacactttcatgaggtcccatttccctttccaaattattgtttcacagctaaccttctatgactgtagcctaatttcagatatttctctttcttttccatctacttcttacttatccctctgcaacaaaactttaattctaattattgyttagaaactgttttctaaaaacaatgactttcctctagtcaagttcagtggtctcatctgaaacttcataaggaaattctctctcctatagggagaattgctaaccactccatgtaccgttttaatcattttaccttggcttctatgactccctctgtctaactcaaaacccagtgaagtcttagtctggattgctgatttctccttcttccc

SEQ ID NO: 592965 - DNA, 567 bp, Homo sapiens
ttcctctaaatgggataatacttacatatgaggtacaacagacttactctcctaaagcccgtgtacagaaccacatatttgctttacgtgaaactagacctactgtattaataaagtttgatttctatttaaaatgttttagagggctggacatcagcttagttctttacttttaccttagaagatatacaagtctcttttaacccacactttcatgaggtcccatttccctttccaaattattgtttcacagctaaccttctatgactgtagcctaatttcagatatttctctttcttttccatctacttcttacttatccctctgcaacaaaactttaattctaattattgcttagaaactgttttctaaaaacaatgactttcctctagtcaagttcagtggtctcatctgaaacttcataaggaaattctctctcctatagggagaattgctaaccactccatgtaccgttttaatcattttaccttggcttctatgmctccctctgtctaactcaaaacccagtgaagtcttagtctggattgctgatttctccttcttccc

SEQ ID NO: 592966 - DNA, 557 bp, Homo sapiens
tatgctaattaccaactttgttttaaaaacatgcatgaggacttctagttaacttcctggtaaagaggggaaaaaaagagaagaagctctgtcatactacttcttgccattcccactctactctcaacccccccttttctcaaataaaaagaaaaaaaaaggaaatactatagcttactcagcaagaaggaaaaacaaaaagaactttaaaaaaaagtatttgtgtatagattggtgtccagaactgggacgcttgtggtaaaacacactttctagtgtagtttttctagggccttactagttgtatgtgaaggaaacaaagacaagtatacaatctctcactctcacacacgtacacacacacatacacacttttatcacaactaatacacaaagactaccaaatactgcagggcagctcatttttctactatgtaaattcagcttcctggacagascatttctgcttttcttgtagaagtatttcagaaaatgttaatcttggttcccacattaggttgcatgcttccaaattaaaagtttcccacaggaaaata

SEQ ID NO: 592967 - DNA, 583 bp, Homo sapiens
gctaattaccaactttgttttaaaaacatgcatgaggacttctagttaacttcctggtaaagaggggaaaaaaagagaagaagctctgtcatactacttcttgccattcccactctactctcaacccccccttttctcaaataaaaagaaaaaaaaaggaaatactatagcttactcagcaagaaggaaaaacaaaaagaactttaaaaaaaagtatttgtgtatagattggtgtccagaactgggacgcttgtggtaaaacacactttctagtgtagtttttctagggccttactagttgtatgtgaaggaaacaaagacaagtatacaatctctcactctcacacacgtacacacacacatacacacttttatcacaactaatacacaaagactaccaaatactgcagggcagctcatttttctactatgtaaattcagcttcctggacagagcatttctgcttttcttgtagaagtatttcagaaaatgttaatcttggttcccacattaggttgcatgcttccaaattaaaagtttcccacaggaaaakaacttcatgaggaattgtgaggctgggaat

SEQ ID NO: 592968 - DNA, 547 bp, Homo sapiens
agtgggaacacagctgctcactctacagtgtgggttgcctttgtgtctggaatgtgtctgacgtcctgatccctgtgcacatttcagggagccttgggaggacccctgaatcactgatggaattgggcagtgcatggagatggctcagcaggatgagggtaaatgcaggggcaagtccaggtcatactgagagacaatgagtggcgctgatgaggacaaagataaaatcaaaagtttgtgcttcatcttcaaaaactcaagctgataacaaacttggcctgatgagaaataataagtatttttctatttacatgagaatttaatctcaaaacagaaatcagaaaaatatgaagtccagggcataaaacctaaaactattgctcatatttattctttctaaatagagcaaagtgtacaatcttctccataagacatacattgtggttataaaaaggcaaaagtcttagtgagaatcattggtattccatagaagagtgaattaaacacagccaagggaagacccaygtctcatacttctcttgtatat

SEQ ID NO: 592969 - DNA, 551 bp, Homo sapiens
gtgaaaaacatcatatcactaaataaaaggtagaaagaatctatctctgaaacttctttgtgatgtgagcattcagcttccagagttaaaccatatttttcattcagcagcttggaaacattcttttagtagaatatgcaaaggatcatttcagagttaattgaggcctacaatgggagactgaatatcacctgataaaatctagaaagaagctatctgtcgaactttgtgawgtgtggattcagctcacagagttaacctttgttttgattcagcaggttgaaaacactcttatagtaaaatctgtgaaggtacatttcagtgtgcactgaaccctatagtgaaaatctgtaaatcctgtgaagaaaaactagaaagaagctatctgtgaaactgctttgtaatgtgtggattcatcccacagggttaaacctttccttttgttcagcaggtgggaaatattttttacatagaatctgcaaagaatcattttggagcttactgaagactacagtgaaaaataattgaatatccctagataaaaactagaa

SEQ ID NO: 592970 - DNA, 577 bp, Homo sapiens
gctcacagaattaaatctttcttatcattcagcaggttggaaaccttctatttgtagaatctatgaatgaacatttctgaacccactgaggcctatagtgaaaaccatatattatgtgatgaaaactagaaagaagctatctgtgaaattcttcgtgatatttgcattcagcttatggagttaaacctttcttttcatttagcagtttggaaacactttttgtggaatctgtgtagagacatttcacagcacagtaagactcatagtgaaaaactgaatatacagctataaaaagtagaaataagtgatttgcttctttctagtgaaatggytttgtgatgtgtgcattctgctcacagaggtaacttttattctgttccagcagtttggaaacattctttatgtacaatctgcaaatagacatttcagagtgccttgtggccaatagtgaaaaacagaatatcatacaataaggtctagaaagaagctatctgtgaaagctctttgtgatgtgcatatttagctcacagagtcaaacctttcttttgattctgccgtttggaagcactacttttgt

SEQ ID NO: 592971 - DNA, 564 bp, Homo sapiens
ggcctcactgcattctgaaatgtgttttcacagattctgcaaatagtattgccacactgctgaatcaaaagcacagtttaactctgtgagctgaatgcacacatcacatagcagttttgcagatattttccttctagtctttatctgggatgttcagattctactatgggcctcattgtgctccaaaatgtccgtccgcagattctacaaagctttctcctttttatcacgggaaatttggttattcaccttaggcctcactgcagtgcaaaatgtcccatcacacattccacaaaaagaatatttttattgcagkatattcaattattcactgcaggcctcattgcgcattgaaatatgcctttgtggattctactaaaacagtgtttccaatttgttgtatcaaaagaaaattttaactctgtgagctgaatccacatatcaaaaggcagttacatagatagcatctttctagtttttatctaggggtattcggtttttcaccataggcctcaatgagccctaaaatgtccctttacagattctacaaaaagagtatttcca

SEQ ID NO: 592972 - DNA, 622 bp, Homo sapiens
  misc_feature 585: n = A,T,C or G
tcggtttttcaccataggcctcaatgagccctaaaatgtccctttacagattctacaaaaagagtatttccaaactactgaataaaaagaaaggtttaactctgtgagctkaatggacacaacacaaagcagttttacagataactttttttaggtttatctagggatattcagtttttcaccataggcctagtggcctctgaaatgtctctttgcagattctacaaaaacaatgtttccgaactgctgagtcaaaagaaatgtttaactctttgagctgaatgcacacattacaaagcagtttcaaagacatgttctttctagtttttatcatgggatattcgaattttcactacaggctttactgcactgtgaaatgttcctttgcagattctacaaaaagagtgtttccaaactgctgaatcaaaagaaacgtttaactctgtgagctgaatgaacatatcacaaagaagtttgacagatagcctctttctagtttttatctgggacatttggttttttactataggtctcactatgctccaaagtgtccctccacagattctacacaaagagtgtttccanagggctgaatcagataaaagtctaaatctgtggctga

SEQ ID NO: 592973 - DNA, 622 bp, Homo sapiens
  misc_feature 585: n = A,T,C or G
tcggtttttcaccataggcctcaatgagccctaaaatgtccctttacagattctacaaaaagagtatttccaaactactgaataaaaagaaaggtttaactctgtgagcttaatggacacaacacaaagcagttttacagataactttttttaggtttatctagggatattcagtttttcaccataggcctagtggcctctgaaatgtctctttgcagattctacaaaaacaatgtttccgaactgctgartcaaaagaaatgtttaactctttgagctgaatgcacacattacaaagcagtttcaaagacatgttctttctagtttttatcatgggatattcgaattttcactacaggctttactgcactgtgaaatgttcctttgcagattctacaaaaagagtgtttccaaactgctgaatcaaaagaaacgtttaactctgtgagctgaatgaacatatcacaaagaagtttgacagatagcctctttctagtttttatctgggacatttggttttttactataggtctcactatgctccaaagtgtccctccacagattctacacaaagagtgtttccanagggctgaatcagataaaagtctaaatctgtggctga

SEQ ID NO: 592974 - DNA, 386 bp, Homo sapiens
aaacatcacaaagtttcacagatagcttctttctaattttaattatgagcttttcagtttttcactgtaggactgtttgctctgaaatgtcaatatgctaattctaaagaaagagtgtttacaacctgctgaatgaaaagaatgggttaattctgttagctgagcccacacatcacaaagcagcttcacacatagcttccttctagttttaatcgcagggtattcagttttcactataggcctcagtgggctctgaaatrtcccttcccagattattcaaaaagaatgtttacaacctgcttaaccaaaataaaggttaactctgtgagttgaatccacatatcacaaagcagtttcacagtagtttcttcaaagtttttatcatg

SEQ ID NO: 592975 - DNA, 584 bp, Homo sapiens
tcctttacatgtcctacaaaaagagtgtttccaacctgcagaatcaaaaaaaggtttaactttgttggctgaatccacgtatcacaaagcagtttcacagatagcatttttacagtttttattatgggatattcaatttttcactaaaggcctcagtgagctacgatatgtccttttgcagagtcttcacaaagagtgtttccaaactggtgagtcaaaataaaggtataactctctgaactgaatccacacaacacaaagcagtttcacagagagttactttgtagtttttatcatgggatattctgtttttcactataggccttttttaggttttgaaatctctcttggcagattctactaaaagattgtttcaagcctgctgaatcaaaagaaaggattaactctgctaacgcaatgcaaacattgcaaagtaatttcaaagagagcttctwtctagatcttattgcaggatatttggtttctcactagaggcctcattttgctccaaaaggtttattcacaaattctagagagagtgtttccaagctttttaatcaaaagaaaggtttgattctgtgaat

SEQ ID NO: 592976 - DNA, 589 bp, Homo sapiens
tcacaaagcagcttcacagatagcttctttctagattttaccatggaatattttgtttttcactatagtcctcactgtgttccaaaatgtcccttcacaaattctacaaaaatagtgattcyaaactgctgaatcaaaaggaagttttaactctgtgatcagaatgcacacatcacagtgtagttttacagctagcttctttccagtttttatctgcatatattctgtttgtcactatagacctcagctggctctgaaatgttccattgcagattgtacaaaaacagtgtttccaggctgctgaatcaaaagaatgttttaactatgtgggctgaatgcacacatcataaagaagtttcaaagatagcttctttctggtttttatcatgggatattcagtttttcagtataggtcttactgcgctctgaaatgtcccttcacagattctacaaaaacagtgttcccaaactgctgaatcaaaaaaagtcttaactctgagctgaatgcacacatcacaaagcattttcacagatagatagcttctttctacattttattgtgggatattcattttttcactgtaggtct

SEQ ID NO: 592977 - DNA, 483 bp, Homo sapiens
aaggagtccacgatgacccccatggatcctacagaggcgctgccaggaagacattttcttttgtgggaggaccgaggtcccctccatggccgcattttttttttccagagctgcctcaacctccactttcaagcctgatttgccatggccttccccctgggatattcttgcagcattgtagtgcccccatgggagagacatgcatcatggttgcaagcaagggactcacggccccctgtgcccactgcagggggtgctgggaagagattttcacytgctggaggatctagagctccctcctgggccgcctcattgtttttccttccagagctgcctccacatcccctttcaagcctgacttgccattcccttcccttggaggccttcttgctgctttggtgggcctgtgggtgagacacgcaccctggaggcaacccagggatgccacaacccacccggacctcgctcagggactgccagtaa

SEQ ID NO: 592978 - DNA, 513 bp, Homo sapiens
cttctgagaatttctggtctaaccagggtgttcggcatcacgtcctgtttctatggattgtttgttatccagcttttgctgcaactgttactgctgattaatatcttgttaatcataggttatggaaagactgtatttcttttttaaggctccgttagaaattactgatgcacacactatattgtaaattcttwtctctgtatactgtagttctgcatacagatgttatgttaaagaattacttcatccctatgtgaccatctcacctcataatcaaatgacccaaatccctcactaacctacttctgccctcactaaacttaataataaatgctgatatatccagtgctttggtggcatcacgggaccagaaggtggtgacccccggatgcagctttcactatcttgtgtgtgtatattatttctcgacctgccaattcacctgggaacaaagaaagagcccctttgcattgcaggatgctggccagatcccacaataagccctggcatgct

SEQ ID NO: 592979 - DNA, 513 bp, Homo sapiens
cttctgagaatttctggtctaaccagggtgttcggcatcacgtcctgtttctatggattgtttgttatccagcttttgctgcaactgttactgctgattaatatcttgttaatcataggttatggaaagactgtatttcttttttaaggctccgttagaaattactgatgcacacactatattgtaaattcttatctctgtatactgtagttctgcatacagatgttatgttaaagaattacttcatccctatgtgaccatctcacctcataatcaaatgacccaaatccctcactaacctacttctgccctcactaaacttaataataaatgctgatatatccagtgctttggtggcatcacgggaccagaaggtggtgacccccggatgcagctttcactatcttgtgtgtgtatattatttctcgacctgccaattcacctgggaacaaagaaagagcccctttgcattgcaggatgctgrccagatcccacaataagccctggcatgct

SEQ ID NO: 592980 - DNA, 545 bp, Homo sapiens
actggtgcctatagtgaaaaactgaatatcccacaataaaaactagaaagaagttatctgtgaaactgctttctgatgtgtggattcagctcacagacttaaaccttgttttggtttcaacaggctaaaaacactctttttrtagaatctacaaagggacatttcaaaggcccctgggcgtttagtgaaaaaccaaatatcctgcaataaaaactacaaacaagctatctgagaaactgatttttcatgtgtggattcagttcacacagttaaacgtttcatttgattcaacaggtaaaaaacactctcttttaagaatctataaagaaacatttcgaagaaaccacagcctttagtgaaaaactgaatatccagcaataaaaactggaaagaagctacctgtgaaactgctctctaatgtgtggatgttgctcacagatttgaacctttcttttgatttaggaggttgacacacactttttgtacattctgtgaacagccattttgaagtgcactgaggttgattgtgaaaaatggaataccca

SEQ ID NO: 592981 - DNA, 545 bp, Homo sapiens
actggtgcctatagtgaaaaactgaatatcccacaataaaaactagaaagaagttatctgtgaaactgctttctgatgtgtggattcagctcacagacttaaaccttgttttggtttcaacaggctaaaaacactctttttgtagaatctacaaagggacatttcaaaggcccctgggcgtttagtgaaaaaccaaatatcctgcaataaaaactacaaacaagctatctgagaaactgatttttcatgtgtggattcagttcacacagttaaacgtttcatttgattcaacaggtaaaaaacactctcttttaagaatctataaagaaacatttcgaagaaaccacagcctttagtgaaaaactgaatatccrgcaataaaaactggaaagaagctacctgtgaaactgctctctaatgtgtggatgttgctcacagatttgaacctttcttttgatttaggaggttgacacacactttttgtacattctgtgaacagccattttgaagtgcactgaggttgattgtgaaaaatggaataccca

SEQ ID NO: 592982 - DNA, 510 bp, Homo sapiens
gaaatgtgtagttttcaccagaagtgttcttacccagaaataaaaagtagtcacttgaaaataccrctaagaaagcccacatgttggatttactagacaaagacttttaaaattagctgttttaataaggtgaaagaactaaagaaagccacatctaaagatttaaagaaaaatgtgagaatgatgtcccacaaaacagagaatacaaatagtgctagcaattgtttttttaaaaaaactatacaaaatttctaatgttgtatactacaataactaaagtgaaaaattcactagaggaggcttcagcagatttgatcaggcagaagtaagaaaaagcaaatttaaagacaggtcaattaaaatgacccagtgcgagaaaaagaaagcaaataattgtaattataataaataaataaatacagaaaaataaattaggcttcagacacctgtgggataccatcaagcttgttatataaataatgagaattatagaagaatagggacagaaac

SEQ ID NO: 592983 - DNA, 510 bp, Homo sapiens
gaaatgtgtagttttcaccagaagtgttcttacccagaaataaaaagtagtcacttgaaaataccactaagaaagcccacatgttggatttactagacaaagacttttaaaattagctrttttaataaggtgaaagaactaaagaaagccacatctaaagatttaaagaaaaatgtgagaatgatgtcccacaaaacagagaatacaaatagtgctagcaattgtttttttaaaaaaactatacaaaatttctaatgttgtatactacaataactaaagtgaaaaattcactagaggaggcttcagcagatttgatcaggcagaagtaagaaaaagcaaatttaaagacaggtcaattaaaatgacccagtgcgagaaaaagaaagcaaataattgtaattataataaataaataaatacagaaaaataaattaggcttcagacacctgtgggataccatcaagcttgttatataaataatgagaattatagaagaatagggacagaaac

SEQ ID NO: 592984 - DNA, 495 bp, Homo sapiens
gtttgttcttctttatggcaatgttttcctagtacatgtccctcttttactattgtcccttagtcttgctccgattttccctagcaaggtctttttatattgtgccagctactttctgattattattctgcagatcctgtgttcatttcttttttcataattcatcttttaataaattcttccttgacaggctgtttgcaggacgttcgtgtagagaaggggccaaggacatgttccggaatagctggaagttttctcaggacacacactttttactttacttttccagagctgtatacagtgtcagttgtaagcttcttcccaatgcagggttcctctctcttcccctgctgcactctcatgatgcttctgaaaatatcattctckgtgaaattcattcctgatatccctgcttccattttatgctaaaggaggtgacagcacacacatccattccatcattccaaaccgtagtttggtttgccttttagtgtg

SEQ ID NO: 592985 - DNA, 598 bp, Homo sapiens
aatgctttcccatatattttcctcccaatgaataaaatctccaagcactttttagtgcttgaagcacactaggggctatacaataaataaataatattatactctgtcccatttttttatggtgtgagtttaaattttccaaaataagatatttgaacattttgtattaaagcaaatagaaattgggaagattcaacatgaccacaaattcatttccagtcctctcatcagaagtgattctatttttcaaccccttgaatctgggctggccttgtaaacagcttagaccaatggaatgagaggaagtgactgtacgtgacttttagcctaagtctaaaaaggcttggacagtttccatgctaatgctcttgtaacactactgccatgttgtatgaaacctgggctgtcctatcaaaggagttatgtggaagagattatagacttcctactaatggcccacattaacaaccaaactcatgagygatgccatcttggatcctccagccccagttgcacctccagtgactccttccacatgagtaacacaagacaaaagcagaaaagatcacccagctgagccagccctaaatacaaagtc

SEQ ID NO: 592986 - DNA, 510 bp, Homo sapiens
gaaatgtgtagttttcaccaraagtgttcttacccagaaataaaaagtagtcacttgaaaataccactaagaaagcccacatgttggatttactagacaaagacttttaaaattagctgttttaataaggtgaaagaactaaagaaagccacatctaaagatttaaagaaaaatgtgagaatgatgtcccacaaaacagagaatacaaatagtgctagcaattgtttttttaaaaaaactatacaaaatttctaatgttgtatactacaataactaaagtgaaaaattcactagaggaggcttcagcagatttgatcaggcagaagtaagaaaaagcaaatttaaagacaggtcaattaaaatgacccagtgcgagaaaaagaaagcaaataattgtaattataataaataaataaatacagaaaaataaattaggcttcagacacctgtgggataccatcaagcttgttatataaataatgagaattatagaagaatagggacagaaac

SEQ ID NO: 592987 - DNA, 387 bp, Homo sapiens
gaaacagagttggagtccaacaatgattactgtgtggaaagtgatcaccagagaagagggaaggcggaaagtatagttacacaaaaaagcaagtctaagtttcaatcaggtgatctcaaataagtcaattccaaatgtcacttaaggtacagggactccaacaaactgtgtcaaacatttaaggtgagcatatagggactgattagactggattatgaatgatatgtaaaggaagaaataccatggaatactctcccttagaccaggttggacactgtgaaatgaatgggtttcattgttgctactttttatgttcattattttagttaaataaactccttttttwaaaaaaaattgaaattatataacagagtaaaaatagaattc

SEQ ID NO: 592988 - DNA, 611 bp, Homo sapiens
caaggaaataaataactatgaatagtcaattgttgactatctaggcagactgtaaacatagggcatataatttttttttcagcaggaatgttctttatgacatctaaagatttctatttatacagcagtgctaataatagcaccttttactgagtgctactatgattatgaaatgagttaacatataaaacactcaaacagtgcatcaygcatagtaaatactcactaaatgttacccattatgtctgttgttttcttgtgtatatgcacctcaggaggtacatcatctcctaacagaagagtaggctaggctattttctgggattgtgtacttctgttgtataccagatgaatgaagtgggaaatcaaccacttactctggctcagatgtcttttcaatgagcagcatactatacctcacctccagtgtgtctcagaatcgcactcttagaggtatcatttaaggtcttggcccgtggatttttctaaccccaaagtactaataaacatgaaactgatgctccccacctctctgcacttgccatttctcctatctacatttctgtaccagggtgattttgacacaaatgccacacagtaacaaagaaaaa

SEQ ID NO: 592989 - DNA, 611 bp, Homo sapiens
caaggaaataaataactatgaatagtcaattgttgactatctaggcagactgtaaacatagggcatataatttttttttcagcaggaatgttctttatgacatctaaagatttctatttatacagcagtgctaataatagcaccttttactgagtgctactatgattatgaaatgagttaacatataaaacactcaaacagtgcatcacgcatagtaaatactcactaaatgttacccattatgtctgttgttttcttgtgtatatgcacctcaggaggtacatcatctcctaacagaagagtaggctagsctattttctgggattgtgtacttctgttgtataccagatgaatgaagtgggaaatcaaccacttactctggctcagatgtcttttcaatgagcagcatactatacctcacctccagtgtgtctcagaatcgcactcttagaggtatcatttaaggtcttggcccgtggatttttctaaccccaaagtactaataaacatgaaactgatgctccccacctctctgcacttgccatttctcctatctacatttctgtaccagggtgattttgacacaaatgccacacagtaacaaagaaaaa

SEQ ID NO: 592990 - DNA, 611 bp, Homo sapiens
caaggaaataaataactatgaatagtcaattgttgactatctaggcagactgtaaacatagggcatataatttttttttcagcaggaatgttctttatgacatctaaagatttctatttatacagcagtgctaataatagcaccttttactgagtgctactatgattatgaaatgagttaacatataaaacactcaaacagtgcatcacgcatagtaaatactcactaaatgttacccattatgtctgttgttttcttgtgtatatgcacctcaggaggtacatcatctcctaacagaagagtaggctaggctattttctgggattgtgtacttctgttgtataccagatgaaygaagtgggaaatcaaccacttactctggctcagatgtcttttcaatgagcagcatactatacctcacctccagtgtgtctcagaatcgcactcttagaggtatcatttaaggtcttggcccgtggatttttctaaccccaaagtactaataaacatgaaactgatgctccccacctctctgcacttgccatttctcctatctacatttctgtaccagggtgattttgacacaaatgccacacagtaacaaagaaaaa

SEQ ID NO: 592991 - DNA, 602 bp, Homo sapiens
cagtcacatgggtctccttgatatttttcaagcatgacagtcccacctatgtctggaatatactatctttttttgtaacaaagtcttttgcttaaacattattttcccaacaaggccttccctgattatggatcttttaacactgcattccacacctccatctcagcagtttcatttttttccatcacattatcactwaatgtatattgcacattttagcgatttaaatcattgccactagaatgtgaactctatacaagagcatagatttttttaaacctgtttcactatggctctctctagtagcaaagtggcatagtaggaatttaaaatatatttgctgggtaagtgaacaccttttcatacaggcattgtgggtgatctttatttttttcctttgtacatgcctgtatattttattagaaaggaaaaaaagctagtgcagactttaaatcaagatacacaaatgttgagttctagcccttgatatgttactttatatgtgtgccttcttgggtcagttcaaaagtctatgacttgaaattttatctttatgaataaaatatctatgtattatatatgatatatatgcataaatgtac

SEQ ID NO: 592992 - DNA, 568 bp, Homo sapiens
ccaacagtaattttgtggttttctctccctcttctctgtcagaaaggtgtgctatattgagaagaggctactcaactttttatgtgactaattagtttactgaattctgcaaaatatttacaactgtaaacagtaaagaaatcttgttaatcttgtcagatattgttccttccagttgaggaacataaatgtcagtgattagtattgtaaaatttaaaatttgaaaatatggacatattgtcaatattatcctgtatgcacatcttcayacaaacctctcagataggcttagcttacctcttgcctaatttatgtttggcatgtacatggagataacaagttgtcatacacaaaactgattttattgtcctcattcatattttatattaatggaccaatttggtgaaacctgtttatatgatatgccatcctaatgttaccggatatgagcctgcatgcttgaaaatctaattctgccaatgtagataaaaaccagcttaagatttaaatgttgaatgttgaaatatataactgagcttaagcatcaaataataagtaaattaagaaa

SEQ ID NO: 592993 - DNA, 584 bp, Homo sapiens
cggttaccaatagttagtaaagcagaactgtgttacatgaaccatagatttagcatatgtttccatttgttccagtggcagcctgactttaatgacaattaattggytcaaagtctaatcactttgattaagctgactagaagcagggaaaaacaatcaatttctgtgcctttccttccattataaaagaggaaacagggagaaagttaacattaattgaacactaccttttttaaaaaatgtgttctatgcttcgtatatattacattaaataaatttgctctattcttctattgtgcaattacatttatatttctatgaatgtataccaacttacagtactgcaaaatgtaacatgtagagctctttgtatgaatcctatggatttagtaatttatagtgtttttaaaattctgtttcacacttaatgttcatgttgtctcaactgtaaaattatgagctatctagtatcacatatattctcatgtagtccttcagtcaagctaggtctacaaacaaccactaaaatggccatttttgagtcaactcttttaatctcagctatcttataagacggtgataat

SEQ ID NO: 592994 - DNA, 385 bp, Homo sapiens
agtaagatgcaaacataaaataaattaagatacagatatctgatatcaataactattgactttggtgatggtatataatagaraaactgaataccatatttgcctctatatattccaatacagcaaggaaagttataaaaggaaattgacaaggaaacatttatattcaccaatacacagcaatatcaaatagagtttgaaaaatattgaagttaaaaatacataaattgttaaagccacccaatttcatttcaaattcagtgagaagtacaaatgaatatactgcaaagaaatattgttcttgttttgatggcaagtagcttgaacacctgatattgctttgggactctaattatttaagagaaagtgccttatacataaggaa

SEQ ID NO: 592995 - DNA, 385 bp, Homo sapiens
agtaagatgcaaacataaaataaattaagatacagatatctgatatcaataactattgactttggtgatggtatataatagagaaactgaataccatatttgcctctatatattccaatacagcaaggaaagttataaaaggaaattgacaaggaaacatttatattcaccaatacacagcaatatcaaatagagtttgaaaaatattgaagttaaaaatayataaattgttaaagccacccaatttcatttcaaattcagtgagaagtacaaatgaatatactgcaaagaaatattgttcttgttttgatggcaagtagcttgaacacctgatattgctttgggactctaattatttaagagaaagtgccttatacataaggaa

SEQ ID NO: 592996 - DNA, 585 bp, Homo sapiens
aatatactgcaaagaaatattgttcttgttttgatggcaagtagcttgaacacctgatattgctttgggactctaattatttaagagaaagtgccttatacataaggaaagattacctttttacatttttccaataraggttaataacaggcagtaagaaggaaaaagctttagaaaatgactgttgttcattaacagttcaactctaactcattatcaaaatgtccatcttaaattatgtatacgtggccatgcaaaattgaattgggaggtagtgcttggtgaatttgtccttctgtttccatggaaacagatgctggattgcatttctttaaggctagttttaaagtggaaaactacagtacattaatactccagaaagcacagaacttaatttatctgttaaatgtatcaggttttttaaacagccgttataccatataacccatgcagggcatcttttacttctactgaatttctttacttgtttgattctctcttgccctacccacctctgcctccctattttggtagaaaggcttaagagtaaaggtctttccttatttgactttgtattttcaacat

SEQ ID NO: 592997 - DNA, 585 bp, Homo sapiens
aatatactgcaaagaaatattgttcttgttttgatggcaagtagcttgaacacctgatattgctttgggactctaattatttaagagaaagtgccttatacataaggaaagattacctttttacatttttccaatagaggttaataacaggcagtaagaaggaaaaagctttagaaaatgactgttgttcattaacagttcaactctaactcattatcaaaatgtccatcttaaattatgtatacgtggccatgcaaaattgaattgggaggtagtgcttggtgaatttgtccttctgtttccatggaaacagatgctggattgcatttctttaaggctagttttaaagyggaaaactacagtacattaatactccagaaagcacagaacttaatttatctgttaaatgtatcaggttttttaaacagccgttataccatataacccatgcagggcatcttttacttctactgaatttctttacttgtttgattctctcttgccctacccacctctgcctccctattttggtagaaaggcttaagagtaaaggtctttccttatttgactttgtattttcaacat

SEQ ID NO: 592998 - DNA, 585 bp, Homo sapiens
aatatactgcaaagaaatattgttcttgttttgatggcaagtagcttgaacacctgatattgctttgggactctaattatttaagagaaagtgccttatacataaggaaagattacctttttacatttttccaatagaggttaataacaggcagtaagaaggaaaaagctttagaaaatgactgttgttcattaacagttcaactctaactcattatcaaaatgtccatcttaaattatgtatacgtggccatgcaaaattgaattgggaggtagtgcttggtgaatttgtccttctgtttccatggaaacagatgctggattgcatttctttaaggctagttttaaagtggaaaactacagtacattaatactccagaaagcacagaacttaatttatctgttaaatgtatcaggttttttaaacagccgttataccatataacccatgcagggcatcttttacttctactgaatttctttacttgtttgattctctcttgccctacccacctctgcmtccctattttggtagaaaggcttaagagtaaaggtctttccttatttgactttgtattttcaacat

SEQ ID NO: 592999 - DNA, 519 bp, Homo sapiens
tctaaggtattttggtatagcagccctaatggactaagacatagctcaagttctttttttatttttattaaatagagatgggttctcactwtgttactcagctggtcttgaactcctgggttcaagccatactactgcctcagccacttgaatagctgtgaccacgggcacctgccaacacactcagcttcatgctcttagttatttaataaaaacattttgaatgattaaaatataataaaatcatctatttctccttctagttataagaaaaagtgagccttagtgttggactagcacgtaatttatcctaacttcaatagttaactagctgtgtgacctataggccaagcacataaactttctgtgtgtcagtttccttattaaccctgcgataataaaatccaagtcatgaaagttgttctaatttctatgtaattcatctaaagcacctagaataactgttggcataggaaatcaataaatggtagatataataagtgtaactactggtatgct

SEQ ID NO: 593000 - DNA, 519 bp, Homo sapiens
tctaaggtattttggtatagcagccctaatggactaagacatagctcaagttctttttttatttttattaaatagagatgggttctcactttgttactcagctggtcttgaactcctgggttcaagccatactactgcctcagccacttgaatagctgtgaccaygggcacctgccaacacactcagcttcatgctcttagttatttaataaaaacattttgaatgattaaaatataataaaatcatctatttctccttctagttataagaaaaagtgagccttagtgttggactagcacgtaatttatcctaacttcaatagttaactagctgtgtgacctataggccaagcacataaactttctgtgtgtcagtttccttattaaccctgcgataataaaatccaagtcatgaaagttgttctaatttctatgtaattcatctaaagcacctagaataactgttggcataggaaatcaataaatggtagatataataagtgtaactactggtatgct

SEQ ID NO: 593001 - DNA, 587 bp, Homo sapiens
tgaactcggagctcacaaatgggctttttgcaaaggagcctgaattcttggcaatgcttgataaatgtcagtcagtttctttagccatctgcaaataaaggtatattagacaatgatgacttcataacagtcaaagwtgtataataattaatccagggacacctgtgcacagttccttttacaaagctatcacagtgtattatactataaaaatcataaaggattttttaaagaacagattttatctgatgtgctagcaaagctaaagatgaaataagctgcactgattattggttatcttttacagagactcacgttgcgacatgttaacagtaaccaatgtctcgatgaaccttctgaagaagacaaaatggtgcctacaatgcaggactgtagtggaagcagatcccaacagtggctgctaaggaacatgaccttgggcacatgaagatcatgtcctccaagccatgaaagtgtctacgcttttgtttttccattatttcaattgggggaaaatattaactttgctgaattgaaagttttaaaaatccttttagtattctaaaacacaattgtttctaattcgt

SEQ ID NO: 593002 - DNA, 607 bp, Homo sapiens
tgattttagaagaaaagggagtgtgatgtgagaaggctagaaatgtataaagtgtagaaacatgaataagaatggcgcggaaagtgaaggcgctgaaaattgctccaagaatccctttaggctcctatttttgtgagtcaaccttaaaggaaggcataagccccaaatgttatgggttgaattgtgtccccaaaaatgtgtattgaggttctaacctccagtacctcaggaggtaacgttatctggaaaaaaggaaagaaggtctttacaggagtaatcaagttaaaatgaagtcattagtgtggattctaatccactatgattgatatcctcataaaagtggtattttggatgcacagacagacacagagggaagatgatgtgacgacatcacagggaggagacggccacatgactagaatgtcacattcatacaagtcaaggaatgccaaggactgccggcaaatgctaaaagttggaagaggcataggattctcccctggarccatcagggagggcatggccctgttgacatctagcctctagaactgtgagagagttaacttctgttgttgtaagcctccttgtttttattactctgttacaa

SEQ ID NO: 593003 - DNA, 584 bp, Homo sapiens
cctgggcattgtggttgcagatactacctttatcaaatggctccctgacattggcctcccacttttagacttgtatgaaataacaaactctccaaattatttgaaaatagccacaatttcttttacagacrtttattggcaattgggctctctccgtgaaaagggaatattgagaaatgaacttcaatgcttcattttattgtttacttcaaggtaaataactccatttggaaattacaatggtacaaatatagtgaagttaagctatgggtcttactctgaccagggttatgttgacaaaaaattatgcttttaaaagcattgctgttgaaaagaaggccatagtagcagaggagtctgcttttatataaagaagagaacattagatttgcagtcagatgacctaacatctttgttcgggaccttcaattagtaacttattttttccaagtttcattttccagtgtacaggattggtgcgaaataaaatttaaaaagtatttgaacatattctgtgaagttctatgccagtatggagttatacatgggctatcttaattggtttaaatatatctctctaatat

SEQ ID NO: 593004 - DNA, 603 bp, Homo sapiens
tttacatgtgtgtgtgtataaatgaatagatagatgacctctccaaacccccaggtctggtcctcgactctgaaggtgtagccaatcaactatgtccatgctctcagctgggtgggtcccatccctcagggaaaatctggtagttctagttaggagttccacrttttgtactttctgtgctgtgagtctttgcgcaattggaattagaaacagagatgataagagtaacagtggaaaacagaaattaccttttcagctctgtttatttcaggctagaagcaaccagagactctttacaatttgagtattaagaatctcagcaaacagccacattaatgtaagaaatagacaaaaaaaacttgaatcaagacctaaaaccagtatggcaaagagattctggaataataccaggatgaagacattaccaagacattcctagctaaggcaactcccagtactcaagtgaggggaaactggtggttaaaactaggcctagaccctggtgctaattttctacccaaacctttaacttgacatatagacagatgtatgacctagtgacgtttagtaaatggcctcaagtttattttttagatgggatta

SEQ ID NO: 593005 - DNA, 544 bp, Homo sapiens
taacttattggtcctagaagaaaaagctgagaatgaaagagtaatttttaccactgtaattcaacaacatccatccaagtaattttttttttttttttttgagacagaatctcactctgtcacccaggctagagtacagtgctgtgatctcagctcactgcaacctctgcctcctgggttcaagcaattctcccacctcagccttgccaatagttgggactacaggcctgtgccaccacatccagctagtttttgtatttttagaagacacacggtttcaccatgttggcatgtaattttcaaatttcctatcttttaagaagaataaaaaaattcctgacgtttgtggagcttctagcaggctgtgtgctagacccttttactttctcattttgatgaggacttgaactamtcaaataatatccattaactactggtcttgaggggccttaatacatttcattttcgaatgaagccttcaaccattgctcttcatttacatctataagcaatccagctttttgaaggttcaagggagctttaa

SEQ ID NO: 593006 - DNA, 560 bp, Homo sapiens
cctgtttcagccttcagtggttttcattttccagcccccatataagggccaaggcaattgctacatttcattcttctgaaatatttgcaaaatatgaaataaacaacaaaatatatgtgggygttttacttcttcctttaaacctaatggaaggacagtaaactaatgaggtcagcaaggctcagattccaggggctggggagttctttgaatattttatcaaggaacagtggtattttttgtacatgtagcccaaatggcaaagttgaagacatatttgaaaacacaaaaacaaaaaccggaagttattctggatctttctcttacatataaggaattaaaaggtggcagcactgtgacagactgtcagacaaatttggtgacacaatgtgaagaactgctctccattttatatgagttcactctaggagaggtgaaatagagttattggaatggtattgtgagaacaaagacccactggattccacttctgcatctatcttagaagaaaatcatatgtgataaaaatatttgtaatacctgcaaagtgcagagactta

SEQ ID NO: 593007 - DNA, 560 bp, Homo sapiens
cctgtttcagccttcagtggttttcattttccagcccccatataagggccaaggcaattgctacatttcattcttctgaaatatttgcaaaatatgaaataaacaacaaaatatatgtgggcgttttacttcttcctttaaacctaatggawggacagtaaactaatgaggtcagcaaggctcagattccaggggctggggagttctttgaatattttatcaaggaacagtggtattttttgtacatgtagcccaaatggcaaagttgaagacatatttgaaaacacaaaaacaaaaaccggaagttattctggatctttctcttacatataaggaattaaaaggtggcagcactgtgacagactgtcagacaaatttggtgacacaatgtgaagaactgctctccattttatatgagttcactctaggagaggtgaaatagagttattggaatggtattgtgagaacaaagacccactggattccacttctgcatctatcttagaagaaaatcatatgtgataaaaatatttgtaatacctgcaaagtgcagagactta

SEQ ID NO: 593008 - DNA, 508 bp, Homo sapiens
atttttttttgatagaataaataagattgatagactccttgctggactaataaagaaaaaacaaaaagatccaagtaaatacaatcagaaataataaaggtgacattaaaaccaatcttacataaatacaaaagccctttggggactatttttaacccctctatgcacacaaagtrcaacacatagaacaaatggatatattcctggaaacatacaacttcccaatattgaaccaggaaaacattgaaatcctgagtagaccaataatgacgtctgaaatggaatcagtaataaaaaacctaccaaccagaaatagcccaggaccagatgtctgatagaattcagttgtgaatctgttttctctttgcttggtagatttttctccatccctttactttgagcctacaagtgtcattgcatgtgagatgagtctcttgaagttggaccttgcttctttattcaacttgccactctgagcctcttaacaggggctttagcccatttacat

SEQ ID NO: 593009 - DNA, 534 bp, Homo sapiens
tatgtcaagaccagccaggccaacatggtgaaaccccatctctactgataatacaaaaaattagccaggcatgatggcaggcacctataatctcagctactggggaggatgaggcaggagaatcacttgagcccaggaggtgaagcttgcagtgagctgagatcacactactgcactccagcctgggcaacagagggagactcagtgtcaaaaaaaaaaaaaaaaaaaaaaaagtaattccccaactcattcactcacctcttctctccatcaccacattctctcactctctctytttttttttaggtttttccaagaatatgtaaaatgagacttggagtttaattaaaatcagaacagggatacattaaacaaacaaacaaaaaatacttttctgattatcaattcttgagactcaaagcatcccccaaaacattggatatccagcttattcccgagagacatcaaccatcacaaaatgttttcactctgaactattcacatttttgtagcagaaaacagaacaaagttctg

SEQ ID NO: 593010 - DNA, 534 bp, Homo sapiens
tatgtcaagaccagccaggccaacatggtgaaaccccatctctactgataatacaaaaaattagccaggcatgatggcaggcacctataatctcagctactggggaggatgaggcaggagaatcacttgagcccaggaggtgaagcttgcagtgagctgagatcacactactgcactccagcctgggcaacagagggagactcagtgtcaaaaaaaaaaaaaaaaaaaaaaaagtaattccccaactcattcactcacctcttctctccatcaccacattctctcactctctctttttttttttaggtttttccaagaatatgtaaaatgagacttggagtttaattaaaatcagaacagggatacattaaacaaacaaacaaaaaatacttttctgattatcaattcttgagactcaaagcatcccccaaaacattggatatccagcttattccygagagacatcaaccatcacaaaatgttttcactctgaactattcacatttttgtagcagaaaacagaacaaagttctg

SEQ ID NO: 593011 - DNA, 534 bp, Homo sapiens
tatgtcaagaccagccaggccaacatggtgaaaccccatctctactgataatacaaaaaattagccaggcatgatggcaggcacctataatctcagctactggggaggatgaggcaggagaatcacttgagcccaggaggtgaagcttgcagtgagctgagatcacactactgcactccagcctgggcaacagagggagactcagtgtcaaaaaaaaaaaaaaaaaaaaaaaagtaattccccaactcattcactcacctcttctctccatcaccacattctctcactctctctttttttttttaggtttttccaagaatatgtaaaatgagacttggagtttaattaaaatcagaacagggatacattaaacaaacaaacaaaaaatacttttctgattatcaattcttgagactcaaagcatcccccaaaacattggatatccagcttattcccgagagacatcaaccatcacaaaatrttttcactctgaactattcacatttttgtagcagaaaacagaacaaagttctg

SEQ ID NO: 593012 - DNA, 573 bp, Homo sapiens
agactaagcaaaaagaacaaatctggagggatcacattacctgatttcaaactatactataaggacatagtcaccaaaacagcatggtactgacaaaaaaatagggacatagaccagtggaatggcatagagaatctagaaataaagccaaataattacagccaactgatattcaacaaagcaaacaaaaaatatgtagtcgggaaaggacaccctattggacaaatggtgctgagataattggcaagcarcatgtaggagaatgaaactggatcttcatctctcacctgatacaaaaatcaactcaagatggttcaaggacttaaatcccagacctgaaaccataaaagacatagaagataacatcagaaaaaacctcctagacattggcttaggcaaagaattcatgatgaagaacccaaaaacaaacacaacaaaaacgaagataaaaaaatgagacaattaaactaaaaggcttctgcacagcaaaagaaacaattagcagagtgaatggataacccatggagtgggagaaaatctatacatctgacaaaggactaatatctagaatct

SEQ ID NO: 593013 - DNA, 573 bp, Homo sapiens
agactaagcaaaaagaacaaatctggagggatcacattacctgatttcaaactatactataaggacatagtcaccaaaacagcatggtactgacaaaaaaatagggacatagaccagtggaatggcatagagaatctagaaataaagccaaataattacagccaactgatattcaacaaagcaaacaaaaaatatgtagtcgggaaaggacaccctattggacaaatggtgctgagataattggcaagcaacatgtaggagaatgaaactggatcttcatctctcacctgatacaaaaatcaactcaagatggttcaaggacttaaatcccagacctgaaaccataaaagacatagamgataacatcagaaaaaacctcctagacattggcttaggcaaagaattcatgatgaagaacccaaaaacaaacacaacaaaaacgaagataaaaaaatgagacaattaaactaaaaggcttctgcacagcaaaagaaacaattagcagagtgaatggataacccatggagtgggagaaaatctatacatctgacaaaggactaatatctagaatct

SEQ ID NO: 593014 - DNA, 624 bp, Homo sapiens
agtgataaaagactaaacattgggtacagtgtgcactgctcaggtgacagtagcaccaaaatctcagatatcaccactaaacaacttatccatgtaaccaaaaatcatctgtttccgcaaaacctattgaaataaaagtaaaataaaataagcaataatgataacaataaaaatagggcatgaagaaattaatttacataggatatcagaaagtgttctctgaaaagagtatttctgattgaagacacaaagttagaaagggaaccagtcataggatagcttcaggaagagccagacaggcaagaagaaaaaggcaggggcacatttcrtgtgttccaggaatatcaaggaagtcagtgagggcagaagggagtaagcaaaagaagaatggagtgagaggcttttcccatctcttaaggcagcaaggacaagatggcctggggctgtgtagatcacaggatgggctttggatttgatgtagagatggagagtcttgagcagaggagtaacatgatctgaattaggtttgaaaaggatcattctggctgctatatggcgaacaggctgaggaggcaagagcataagtttataggccaggtgggagatcagaggagagatgaccat

SEQ ID NO: 593015 - DNA, 618 bp, Homo sapiens
ccagacgacttattcaactcagagtcttgaataaagcaactagcggcaacctccaaaattcagactctttctgagtactcttacacatccaaggtcaaaggaaagggctttagtatggattttcatttctttctctctatgaaactggatttgttacctgtgatcaaagttaaagaggtatttacacttgaaggcctacaagccttctaaaaatattgtctgcaaaatttttatttaactcatttttaaacttattcattattgttaaaatagtagaaaacggattagagttgaaggcagataaactgaattctaattttagcatttcttcattcatctaagcaacatgtttgcaaatctatgtaacactgggcaagtgatggaacttccaatatgcctcgactctttcttcacaaaatgagtgagtgagattagatgatgtctaarttcattctagcaccaatattcttttataaaattaaagatgagttctattgggaaaagaataatcctactgaattgtatttatctcttaaaaaaaccaaatgtcacataaataaataaaaaatggtgtaatggtgaaacattaataaagataccaagtcagaaagaactgag

SEQ ID NO: 593016 - DNA, 590 bp, Homo sapiens
tgtatacatcttccaaatatcctgagctacagaaaagaagaaagggtcagaaagaagattctctctgctagtaggtctgaaacaatcagattcatatgtgtctttgtgtattaatatgaatatcttttcttgaataaatgagctttaaatttagaaaactttctggtttatattaagcatattaaaattttatctttttgaaggctgatttccacctcccacctcctacatctacctcacataaatttagagtaggttgagtctcacyccagcagtgagaagaaaggacggaagcgattttgagagggtgaagtagatgctgcccctcttattgtactttacctggcccagggctgcatgttggacaactccagagtgtgccattcacactgcactctttggagtccaaagtaactccatcttggatgctgatctaccacactgacttcaattaagcctgttctgggaaggcctctaagacttccagtttatctattggtccttgtgtaagagcaggtactgaccataaattctgccctcaggtcaaacagtcgtaatgcttctatacttcagtcatcctagacatccat

SEQ ID NO: 593017 - DNA, 590 bp, Homo sapiens
tgtatacatcttccaaatatcctgagctacagaaaagaagaaagggtcagaaagaagattctctctgctagtaggtctgaaacaatcagattcatatgtgtctttgtgtattaatatgaatatcttttcttgaataaatgagctttaaatttagaaaactttctggtttatattaagcatattaaaattttatctttttgaaggctgatttccacctcccacctcctacatctacctcacataaatttagagtaggttgagtctcaccccagcagtgagaagaaaggacggaagcgattttgagagggtgargtagatgctgcccctcttattgtactttacctggcccagggctgcatgttggacaactccagagtgtgccattcacactgcactctttggagtccaaagtaactccatcttggatgctgatctaccacactgacttcaattaagcctgttctgggaaggcctctaagacttccagtttatctattggtccttgtgtaagagcaggtactgaccataaattctgccctcaggtcaaacagtcgtaatgcttctatacttcagtcatcctagacatccat

SEQ ID NO: 593018 - DNA, 609 bp, Homo sapiens
cttggggaagagttgatgttgcagtcttccggcaaaatttcttcttgcccaaggacagtcagtcttctgtctattaagaccttcaactgattagataaggcccacccacattatggtgaataatctgctttacacacagcctactgatttaaatgttaatttcatctaaaaataccctcacagaaacatgtagaagaatgtttgaccaaatatcttagtaccgtggcatagcaagttgacacataatattaaccaccatggcacatatcataaggtaggaggagatgtgccytatgaaacttttcctttcctaggccatggatggtgattatgttctattcgaatgttactagcttcagtgcctgccccagtgccttgtacagagtaggcacacaatgaatatttgttagacaaaatcactttcatagatagaaataagaacggctgtcatttttgtgagtgactccaatcattgacattttatgtacactgtttcatattcttaaaataactctgcagatcaggaattattgtttcctaaatcagaaaccgatactcaaagaagttgggcaccttgcctggagtaaacagccagtaaactgtaggaat

SEQ ID NO: 593019 - DNA, 609 bp, Homo sapiens
cttggggaagagttgatgttgcagtcttccggcaaaatttcttcttgcccaaggacagtcagtcttctgtctattaagaccttcaactgattagataaggcccacccacattatggtgaataatctgctttacacacagcctactgatttaaatgttaatttcatctaaaaataccctcacagaaacatgtagaagaatgtttgaccaaatatcttagtaccgtggcatagcaagttgacacataatattaaccaccatggcacatatcataaggtaggaggagatgtgccttatgaaacttttcctttcctaggccatggatggtgattatgttctattcgaatgttactagcttcagtgcctgccccagtgccttgtacagagtaggcacacaatgaatatttgttagacaaaatcactttcatagatagaaataagaacggctgtcatttttktgagtgactccaatcattgacattttatgtacactgtttcatattcttaaaataactctgcagatcaggaattattgtttcctaaatcagaaaccgatactcaaagaagttgggcaccttgcctggagtaaacagccagtaaactgtaggaat

SEQ ID NO: 593020 - DNA, 479 bp, Homo sapiens
tttccatttcattttctttagaaaatcttacagaaaaaaaatggttcaatgaacaacgaagaaaaaacttggatgccagttaagtcagtaacaatgctattaactggcagagaaaaggcagtgtttccycaagtgtatctgtttacacaggttcctgatgcagcagtgttcacagagggctaagaggtgattattcattttggaacctcactctgtgcctccaaaattgtcacatctcctgtgcactgtccttcacaaatatgtaaaaggaaaaggggatgattttgtcaacttcactggatttgttcacaaaacaaaaatataaaagtgatgtcctcctccatgcagttaatatacctctgagatgaccctcacacacaagtgatgggggaattattatctgagatatttgaaacaagattgcacagagcacttctgaaataatttataataaaggaagacatgataggtagagtgga

SEQ ID NO: 593021 - DNA, 479 bp, Homo sapiens
tttccatttcattttctttagaaaatcttacagaaaaaaaatggttcaatgaacaacgaagaaaaaacttggatgccagttaagtcagtaacaatgctattaactggcagagaaaaggcagtgtttcctcaagtgtatctgtttacacaggttcctgatgcagcagtgttcacagagggctaagaggtgattattcattttggaacctcactctgtgcctccaaaattgtcacatctcctgtgcactgtccttcacaaatatgtaaaaggaaaaggggakgattttgtcaacttcactggatttgttcacaaaacaaaaatataaaagtgatgtcctcctccatgcagttaatatacctctgagatgaccctcacacacaagtgatgggggaattattatctgagatatttgaaacaagattgcacagagcacttctgaaataatttataataaaggaagacatgataggtagagtgga

SEQ ID NO: 593022 - DNA, 624 bp, Homo sapiens
  misc_feature 617, 618, 619, 620, 621, 622, 623, 624: n = A,T,C or G
ttgcattgtttaggaaataatgaccaaaaaaagttctatatacatgttcagtacrgatgaaactgtccctttttttttctgaaaatttttgatccatggtttattgaatccatggatgtggaacccatacatacagaaagctaactgtactcactttacttttcaaatgtacatttctgttaacaaatactacatttgttaacaacattgggctagaaaagtcccaatgtttcatttttaggagtaacaaaaaaatggaacatttttgctttattggaaatgcaacttatggagtcatcatgaccaacagataaaaccagggtaatttattttttagctttatgtttccataattaataagcagggtcaaatgagcccttggatattttatctgtggtaattattcaaatttggacaaagttataataaaacttctgaggataagttgcacatttttctagaataatttattcaaaagtagtagattaaaactgttttttatggcactaagaataaaatgcaacaaaattggggtgggaagtaggtgcaatatttaaatggaaaggcatcatttttcaaagtgttttgccacactgcaagtcactacctattagtgnnnnnnnn

SEQ ID NO: 593023 - DNA, 624 bp, Homo sapiens
  misc_feature 617, 618, 619, 620, 621, 622, 623, 624: n = A,T,C or G
ttgcattgtttaggaaataatgaccaaaaaaagttctatatacatgttcagtacagatgaaactgtccctttttttttctgaaaatttttgatccatggtttattgaatccatggatgtggaacccatacatacagaaagctaactgtactcactttacttttcaaatgtacatttctgttaacaaatactacatttgttaacaacattgggctagaaaagtcccaatgtttcatttttaggagtaacaaaaaaatggaacatttttgctktattggaaatgcaacttatggagtcatcatgaccaacagataaaaccagggtaatttattttttagctttatgtttccataattaataagcagggtcaaatgagcccttggatattttatctgtggtaattattcaaatttggacaaagttataataaaacttctgaggataagttgcacatttttctagaataatttattcaaaagtagtagattaaaactgttttttatggcactaagaataaaatgcaacaaaattggggtgggaagtaggtgcaatatttaaatggaaaggcatcatttttcaaagtgttttgccacactgcaagtcactacctattagtgnnnnnnnn

SEQ ID NO: 593024 - DNA, 624 bp, Homo sapiens
  misc_feature 617, 618, 619, 620, 621, 622, 623, 624: n = A,T,C or G
ttgcattgtttaggaaataatgaccaaaaaaagttctatatacatgttcagtacagatgaaactgtccctttttttttctgaaaatttttgatccatggtttattgaatccatggatgtggaacccatacatacagaaagctaactgtactcactttacttttcaaatgtacatttctgttaacaaatactacatttgttaacaacattgggctagaaaagtcccaatgtttcatttttaggagtaacaaaaaaatggaacatttttgctttattggaaatgcaacttatggagtcatcatgaccaacagataaaaccagggtaatttattttttagctttatgtttccataattaataagcagggtcaaatgagcccttggatattttatctgtggtaattattcaaatttggacaaagttataataaaacttctgaggataagttgcacatttttctagaataatttattcaaaagtagtagattaaaactgttttttatggcactaagaataaaatgcaacaaaattggggtgggaagtaggtgcaatatttaaatggaaaggcatcatttttcaaagtgttttgccacactgcaagtcacwacctattagtgnnnnnnnn

SEQ ID NO: 593025 - DNA, 522 bp, Homo sapiens
caaacgttttggcggtattattttctgagtcccaacattagsaagacttgtttgttcagcttctctgtgtccttgtgtcttcagagataagaatgtttctttattctgagtttaaggagggcacctcaataatggacttctgacctacttcagaaaagaagggtgagggtaaagtggggatgaccttcctaattctgctgttttcttaaatgccaatgtgccatattttggggtatgtgtccactgtcatgtctccaatgtctccttctgtgtagacatccaaacagccctctggcattccttaaactgaatcaggctcttctacctccctggtctttgcacacattgttcctgtagcccacagtgtttgcacacccctttccacctggaaaatccatttatccttcaggataggactggatgtccctgatagttggccattccctcctctctgctttctgagcatttttcattaatccatatttttaatacttacctatgttatatctatttttctgcctc

SEQ ID NO: 593026 - DNA, 522 bp, Homo sapiens
caaacgttttggcggtattattttctgagtcccaacattaggaagacttgtttgttcagcttctctgtgtccttgtgtcttcagagataagaatrtttctttattctgagtttaaggagggcacctcaataatggacttctgacctacttcagaaaagaagggtgagggtaaagtggggatgaccttcctaattctgctgttttcttaaatgccaatgtgccatattttggggtatgtgtccactgtcatgtctccaatgtctccttctgtgtagacatccaaacagccctctggcattccttaaactgaatcaggctcttctacctccctggtctttgcacacattgttcctgtagcccacagtgtttgcacacccctttccacctggaaaatccatttatccttcaggataggactggatgtccctgatagttggccattccctcctctctgctttctgagcatttttcattaatccatatttttaatacttacctatgttatatctatttttctgcctc

SEQ ID NO: 593027 - DNA, 642 bp, Homo sapiens
aatgtctcctgttccccttcccacttaaacaggttagattgaaggctcttggtgtatttctgtagagctcagtttagaggaaaacagttaaactctggctttcctagttgtttttttgagagccascctcataccttgcaattttgtcccaaatcaaatatcaacgaccaacaactgcctggctgggaagtctgggaaagggatacagaagctttgtgggcctaacaccattcatgttccttaccctctgtctctcctccctgcatcgccacctatggttcagtgttgcaagagtctgggcttggggtctttaaagccagcaaggggaaatgataaaaagagagctgctttccctttcaccttgaggtatttgtcccttggaacagagcacagtttggccaactctggtagcattaccctgtgacactgttttgaggtccccttcccttctttcctcgaggaggaatgtcttctgtctttggtattatagttcatcttcccgttcttttacttagagcatttgtgcaggtatgtttaacactgtgcatcagaaaagagcctttggtaaccagttttgttcttcttctgccactccttcttgcttgcatcttgttgctggcagagtcctcttgtacttcaaga

SEQ ID NO: 593028 - DNA, 642 bp, Homo sapiens
aatgtctcctgttccccttcccacttaaacaggttagattgaaggctcttggtgtatttctgtagagctcagtttagaggaaaacagttaaactctggctttcctagttgtttttttgagagccagcctcataccttgcaattttgtcccaaatcaaatatcaacgaccaacaactgcctggctgggaagtctgggaaagggatacagaagctttgtgggcctaacaccattcatgttccttaccctctgtctctcctccctgcatcgccacctatggttcagtgttgcaagagtctgggcttggggtctttaaagccagcaaggggaaatgataaaaagagagctgctttccctttcaccttgaggtatttgtccctyggaacagagcacagtttggccaactctggtagcattaccctgtgacactgttttgaggtccccttcccttctttcctcgaggaggaatgtcttctgtctttggtattatagttcatcttcccgttcttttacttagagcatttgtgcaggtatgtttaacactgtgcatcagaaaagagcctttggtaaccagttttgttcttcttctgccactccttcttgcttgcatcttgttgctggcagagtcctcttgtacttcaaga

SEQ ID NO: 593029 - DNA, 552 bp, Homo sapiens
acagattcatattctcttctattaatatgtgwctatctataactttatcagtaatacattatttaattatggtcatttgatagatgtttaatatctagtagtgcttgtccaaatcaatttgaatatgtttatgctactacaatgaaataaagatggggactgggctgaagttagacaaatagtatgcttttcaacctgaaaggcaaagacaaagagacagcttttcgatcttttcctttcttttttctcttcttcctgcctacctacttgtttgccttgactacaacaacactcccccaactaactgcttagacatttatgctcctggaagccctgttggaaaaccatcttcttagacttttatctgccatcccaaggtatgtttttattctttgtgttttcacaaatcttggcaacaatttaaatggcattgttaatatcacaatttacctaatgcattttcaatgtcctctttaattctcccaaaccagtggaaaggcaagatgaaaagagattcataaaattgctgtgtattatgttacttcctaactg

SEQ ID NO: 593030 - DNA, 552 bp, Homo sapiens
acagattcatattctcttctattaatatgtgactatctataactttatcagtaatacattatttaattatggtcatttgatagatgtttaatatctagtagtgcttgtccaaatcaatttgaatatgtttatgctactacaatgaaataaagatggggactgggctgaagttagacaaatagtatgcttttcaacctgaaaggcaaagacaaagagacagcttttcratcttttcctttcttttttctcttcttcctgcctacctacttgtttgccttgactacaacaacactcccccaactaactgcttagacatttatgctcctggaagccctgttggaaaaccatcttcttagacttttatctgccatcccaaggtatgtttttattctttgtgttttcacaaatcttggcaacaatttaaatggcattgttaatatcacaatttacctaatgcattttcaatgtcctctttaattctcccaaaccagtggaaaggcaagatgaaaagagattcataaaattgctgtgtattatgttacttcctaactg

SEQ ID NO: 593031 - DNA, 552 bp, Homo sapiens
acagattcatattctcttctattaatatgtgactatctataactttatcagtaatacattatttaattatggtcatttgatagatgtttaatatctagtagtgcttgtccaaatcaatttgaatatgtttatgctactacaatgaaataaagatggggactgggctgaagttagacaaatagtatgcttttcaacctgaaaggcaaagacaaagagacagcttttcgatcttttcctttcttttttctcttcttcctgcctacctacttgtttgccttgactacaacaacactcccccaactaactgcttagacrtttatgctcctggaagccctgttggaaaaccatcttcttagacttttatctgccatcccaaggtatgtttttattctttgtgttttcacaaatcttggcaacaatttaaatggcattgttaatatcacaatttacctaatgcattttcaatgtcctctttaattctcccaaaccagtggaaaggcaagatgaaaagagattcataaaattgctgtgtattatgttacttcctaactg

SEQ ID NO: 593032 - DNA, 552 bp, Homo sapiens
acagattcatattctcttctattaatatgtgactatctataactttatcagtaatacattatttaattatggtcatttgatagatgtttaatatctagtagtgcttgtccaaatcaatttgaatatgtttatgctactacaatgaaataaagatggggactgggctgaagttagacaaatagtatgcttttcaacctgaaaggcaaagacaaagagacagcttttcgatcttttcctttcttttttctcttcttcctgcctacctacttgtttgccttgactacaacaacactcccccaactaactgcttagacatttatgctcctggaagccctgttggaaaaccatcttcttagacttttatctgccatcccaaggtatgtttttattctttgtgttttcacaaatcttggcaacartttaaatggcattgttaatatcacaatttacctaatgcattttcaatgtcctctttaattctcccaaaccagtggaaaggcaagatgaaaagagattcataaaattgctgtgtattatgttacttcctaactg

SEQ ID NO: 593033 - DNA, 612 bp, Homo sapiens
ttggaaaaccatcttcttagacttttatctgccatcccaaggtatgtttttattctttgtgttttcacaaatcttggcaacaatttaaatggcattgttaatatcacaatttacctaatgcattttcaatgtcctctttaattctcccaaaccagtggaaaggcaagatgaaaagagattcataaaattgctgtgtattatgttacttcctaactgagtggtttatttgcttactaaatggtcctacatttatagtcaatcgtcaycaacagataacacatcaaaaataaacttcaatttcacattacagaggaggtgattccaatttgaatgttatttatcatagagaatatgttactaaatccagtttatggaaagattatgccatttaatttacttttagagagaggaatatgctttcacgagaaactgcattagctattagaaaagtaatgtagctgttggtctgcaccacttccagcaagcatgggtacattgcgttgacaaaaacagctggatttttttctagtgtgatctgatagaaagagcactgggctggtagtcagggttaggtcaaggcaaggttctaactagctgggtgactgtaaagag

SEQ ID NO: 593034 - DNA, 612 bp, Homo sapiens
ttggaaaaccatcttcttagacttttatctgccatcccaaggtatgtttttattctttgtgttttcacaaatcttggcaacaatttaaatggcattgttaatatcacaatttacctaatgcattttcaatgtcctctttaattctcccaaaccagtggaaaggcaagatgaaaagagattcataaaattgctgtgtattatgttacttcctaactgagtggtttatttgcttactaaatggtcctacatttatagtcaatcgtcaccaacagataacacatcaaaaataaacttcaatttcacattacagaggaggtgattccaatttgaatgttatttatcatagagaatatgttactaaatccagtttatggaaagattatgccatttaatttacttttagagagaggaatatgctttcacgagaaactgcattagctattagaaaagtaatgtagctgttggtctgcaccacttccagcaagcatgggtacattgcgttracaaaaacagctggatttttttctagtgtgatctgatagaaagagcactgggctggtagtcagggttaggtcaaggcaaggttctaactagctgggtgactgtaaagag

SEQ ID NO: 593035 - DNA, 536 bp, Homo sapiens
attgtaagcttttctcttaccactgcttcagccktgttccagagattctgatatgttgtatctttgttttcattagtttcaagtaattttttgatttctgccttaatctcattgtttaccaaaaagtcgttcagaagtagattttttttttttttttttttgagacaaagttccgctctgtcacccagcctggaatgcagtggcacgatctcagctcactgcaacctccacctcctgggttcaagcgattctcctgcctcagcctcctgagtagctgggattacaggctctaccacaccaggttaatttttgtatttttagtagaggcgaggtttcaccatgttggccaggctggtcttgaactcctgacctcaggtgatccaccctcctcagcctcccaaagtgctgggattacaggtgtgagccactatgcccggccaggagtaggttgtttaatttccttgtaattgtatggttttgagcaatcttcttatcattggtttccatttttattgtgctgtagtccaagaccgtgg

SEQ ID NO: 593036 - DNA, 536 bp, Homo sapiens
attgtaagcttttctcttaccactgcttcagccttgttccagagattctgatatgttgtatctttgttttcattagtttcaagtaattttttgatttctgccttaatctcattgtttaccaaaaagtcgttcagaagtagattttttttttttttttttttgagacaaagttccgctctgtcacccagcctggaatgcagtggcacgatctcagctcactgcaacctccacctcctgggttcaagcgattctcctgcctcagcctcctgagtagctgggattacaggctctaccacaccaggttaatttttgtatttttagtagaggcgaggtttcaccatgttggccaggctggtcttgaactcctgacctcaggtgatccaccctcctcagcytcccaaagtgctgggattacaggtgtgagccactatgcccggccaggagtaggttgtttaatttccttgtaattgtatggttttgagcaatcttcttatcattggtttccatttttattgtgctgtagtccaagaccgtgg

SEQ ID NO: 593037 - DNA, 535 bp, Homo sapiens
tacctttgactttttaaataaacttttttgaaataattttatatttacagaaaagttgcaagtataatagtttctatatgccctttacctagcttcctctcatattaacatattatataaccttgatactgagagacaggactagctggacttcctaggccgactaagaattcctaaggctagctggggaaggtgacctcactcacctttaaatacagggcttgtaactcagctcacacccgaccgatcaggtaataagagggctcactaaaatacaaattaggctaaaagcaggaggtaaagaaataatcaaatgatctattgcctgagagcacaggaggagggacaatkatagggatataaacccagggcatttgagccagcagtggcaaccccctttgggtcccctcccatcgtatggaagctctgttttcactctattaaatcttgcaactgcacactcttctgggccgcgtttgttccggctcaggctgagcttttgttcaccgtccaccactgctgaacgccgccgtcg

SEQ ID NO: 593038 - DNA, 620 bp, Homo sapiens
tagcatcatattaaactcttcctctgctcatcaacacatctttcacttaagacctttcatctgggattttttttctttctacttgaaatagttccgttggtaaagatctgtttttggcaaagtgcttctgcttttacctgaaaaatagttttacatttatccttgaaatataggtttatttggatttaaaattctaggttagcagctattttctctcagttactttaaaacatatttcactggcttctcccttctttctctgctgttgagaagtttgctgttagtctacttgttattctttttcagataatctgtcttttctctctgactgcatttatgatcatctctttttctttggttttctgcaattccactaayaaatgtctagaggtatatttatttttatttaagctgcttggaaacgtttttgggtttctgaaattaagaattcattaagtctttaagattttttatatttttaaattatttatctcaaattattatttttttaacactcaggcataattacttctaattttgcctctcacacattccattattttattttggaattctaaataattcctaataattccaattagatgcatgttagaccttct

SEQ ID NO: 593039 - DNA, 620 bp, Homo sapiens
tagcatcatattaaactcttcctctgctcatcaacacatctttcacttaagacctttcatctgggattttttttctttctacttgaaatagttccgttggtaaagatctgtttttggcaaagtgcttctgcttttacctgaaaaatagttttacatttatccttgaaatataggtttatttggatttaaaattctaggttagcagctattttctctcagttactttaaaacatatttcactggcttctcccttctttctctgctgttgagaagtttgctgttagtctacttgttattctttttcagataatctgtcttttctctctgactgcatttatgatcatctctttttctttggttttctgcaattccactaacaaatrtctagaggtatatttatttttatttaagctgcttggaaacgtttttgggtttctgaaattaagaattcattaagtctttaagattttttatatttttaaattatttatctcaaattattatttttttaacactcaggcataattacttctaattttgcctctcacacattccattattttattttggaattctaaataattcctaataattccaattagatgcatgttagaccttct

SEQ ID NO: 593040 - DNA, 447 bp, Homo sapiens
tattttattttggaattctaaataattcctaataattccaattagatgcatgttagaccttctcattctaacatgttaaaactctcctctttgaaattgtctacctctgtatctgcttgtgtagcttttgggtaattttttcatatctatttttcagttcattaacttttttcatctgtatactatttgctctttagccatttattatggttttaaattcaatttacttatttatatctcaaagatctgtttgatttattttcaggcatttttatcatattttattgtcatctaaacttatgttaatyttatattttatttattgtaacaagttaaacatacaaagtttatattcttcacttggtcattccagtatctgcagatacttcacatctgctcctactctctggcatcatgtgtatttgtccagctttgttatgctgatga

SEQ ID NO: 593041 - DNA, 556 bp, Homo sapiens
ttgttttctagacaacctgatagctccacattcttaaaatgacccatcaaaacacagccagccatataaattgtattgagactttctcagtgcagcaaagcaagttagtttgttaaagtttagcaacaaactttgtctagcaaggaaattcagtgatctagctcctacctaactttccagccatatctcttgtcaaaattactcccctacccactctcctgcccttgcatccttctcttcggcaatatagaatttcttgtaattctccgaatataagatactacatcatgccactgtggctttacaaagcctgctcttyctgcctggctggccctgacactactcattcacctagtgatctcctactgtttctttaagaaactaatccaccattttcttttctgtgaaggcttctctgatccacctgttcagatcattcttttactaatattcttctagttgcaccagtcatagtacctcgatattgcactttttcactgcatctaatgtattagttcatcttaaatgtcttcctttaccagaatataaactctct

SEQ ID NO: 593042 - DNA, 424 bp, Homo sapiens
atggttttagcaaaatggctattgcctacttayacaggcccagcttagtgaaaataaaaggatagttaaggtctgattctgactttctgggtatttgtattctgtatctatgtattgacatctacttggttgcatgaactttcaaactcaagatttgctatttgattgctcaatataattctgatttggggagatgtgatttattaaactgctatcacttcaaattagcaagcgaagccttttaagccatcattcacaactacttctggacaaaaaagaaaaaaaatgcttcttcctctccactaaaatcagatacttcattagtatatgaaccctctggcttctctactgtcagactcacacattcatctttcacctaattctcgtcaggccagtcacttccattccatttgtaaaacttctg

SEQ ID NO: 593043 - DNA, 404 bp, Homo sapiens
gctattgcctacttatacaggcccagcttagtgaaaataaaaggatagttaaggtctgattctgactttctgggtatttgtattctgtatctatgtattgacatctacttggttgcatgaactttcaaactcaagatttgctatttgattgctcaatataattctgatttggggagatgtgatttattaaactgctatcacttcaaattagcaagcgaagccttttaagccatcaytcacaactacttctggacaaaaaagaaaaaaaatgcttcttcctctccactaaaatcagatacttcattagtatatgaaccctctggcttctctactgtcagactcacacattcatctttcacctaattctcgtcaggccagtcacttccattccatttgtaaaactt

SEQ ID NO: 593044 - DNA, 404 bp, Homo sapiens
gctattgcctacttatacaggcccagcttagtgaaaataaaaggatagttaaggtctgattctgactttctgggtatttgtattctgtatctatgtattgacatctacttggttgcatgaactttcaaactcaagatttgctatttgattgctcaatataattctgatttggggagatgtgatttattaaactgctatcacttcaaattagcaagcgaagccttttaagccatcattcwcaactacttctggacaaaaaagaaaaaaaatgcttcttcctctccactaaaatcagatacttcattagtatatgaaccctctggcttctctactgtcagactcacacattcatctttcacctaattctcgtcaggccagtcacttccattccatttgtaaaactt

SEQ ID NO: 593045 - DNA, 432 bp, Homo sapiens
tggcactcaatatggttttagcaaaatggctattgcctacttatacaggcccagcttagtgaaaataaaaggatagttaaggtctgattctgactttctgggtatttgtattctgtatctatgtattgacatctacttggttgcatgaactttcaaactcaagatttgctatttgattgctcaatataattctgatttggggagatgtgatttattaaactgctatcacttcaaattagcaagcgaagccttttaagccatcattcacaactacttctggacaaaaaagaaaaaaaatgcttcttcctctccactaaaatcagatacttcattagtatatgaaccctctggcttctctactgtcagactcacacattcatctttcacctaattctygtcaggccagtcacttccattccatttgtaaaactt

SEQ ID NO: 593046 - DNA, 404 bp, Homo sapiens
gctattgcctacttatacaggcccagcttagtgaaaataaaaggatagttaaggtctgattctgactttctgggtatttgtattctgtatctatgtattgacatctacttggttgcatgaactttcaaactcaagatttgctatttgattgctcaatataattctgatttggggagatgtgatttattaaactgctatcacttcaaattagcaagcgaagccttttaagccatcattcacaactacttctggacaaaaaagaaaaaaaatgcttcttcctctccactaaaatcagatacttcattagtatatgaaccctctggcttctctactgtcagactcacacattcatctttcacctaattctcgtcrggccagtcacttccattccatttgtaaaactt

SEQ ID NO: 593047 - DNA, 601 bp, Homo sapiens
tttaaccccccaaatagcatgttgattatattaggaaacctttctgacaagtatacttagagcagaagggaaaaataaatattttatcttaacaatttgcatcctaattccttttagggagaaaaccatgtttagggaattaactcacaaatctttcaagtgggcatttcttatttttgattcccccagaagcagaccctgaaacaaagatctgagaacagttggcttatatgggaggcgaactcgtaaaacactggtaggggagtgagagactgagaagagaaataaaccagtcaaacatgtattagcaacgagagcttaaacatgctgaaggattctaagactccctttagaacayaggctcagagtcacctaaaccaagggtaagggacctgggttatctacgcatgggtatccatcaattatcggttaagaattatctgaggaggggatattgtccagtaattttggcctaagacatgcataatcatatgcatgggcgctgactgagatgaccagacaaaacactcaggcaaagagacacaggtgctatggttgagttcaggactgcatgcactaatatggtatgtatatgagaaaa

SEQ ID NO: 593048 - DNA, 611 bp, Homo sapiens
aactcgtaaaacactggtaggggagtgagagactgagaagagaaataaaccagtcaaacatgtattagcaacgagagcttaaacatgctgaaggattctaagactccctttagaacacaggctcagagtcacctaaaccaagggtaagggacctgggttatctacgcatgggtatccatcaattatcggttaagaattatctgaggaggggatattgtccagtaattttggcctaagacatgcataatcatatgcatgggcgctgactgagatgaccagacaaaacactcaggcaaagagacacaggtgctatggttgagttcaggactgcatgcactaatatggtatgtatatgagaaaagaatagggayttcaggatcagaggagagaaggataaaaaactggaatggagaaatggagaaaccacccaagcaggaactatgcattttaaaacagtgaattcacatcccctgcagcaaagtggctgatgaaattttatgaacacaaatatctaatgtttaacttttggttgcttatgttgctgagatgtaaatccttcctctgtcatcagcaccagtccaaatttttagcataatcagctttacataaag

SEQ ID NO: 593049 - DNA, 620 bp, Homo sapiens
tctaaacttgagttccccgcaagccttgccaccatgggctacagtggcagtctaggccactgggactacaactcctaggcaagccctaatgctgaactgggcccagagacagtgatagtgggctaagcggggcatgtgacctaatgacacatcagtcaggggaagctaagggagtgctggcatcaccattcccctaaccccaggctgcacagcttgtggctccaaaagagaccctttccctccacttgaggagaggagatggaataatgtggaaaactttgttttgcatcttggataagctcagccacagcaggataggacatcagtcagagtcatgaggtcccctttccaggctgtagctcctggacaacatttctatacatacctgagaccagaagagaacccactgcctygaaaggaaggacctactcctggcaggattaattatctcctaactaaagagtccttgggtcctgaataaccagcagtaatagccaggtatcatggcaagggccttgggtgagcctctgagacttgctgccttcaggtgagactcagcctattcccaaatctggtggctaggtggcaagatgcctttcacgtgaagaacagaggatgga

SEQ ID NO: 593050 - DNA, 552 bp, Homo sapiens
ctgaaaaccaatacagagaaatcaaaaatcaattcagtatatgaatgaaaaatttacaagaagatagatagtttgtttttttaagacacggtctttctctgttgcccaggccaaagtgcagaggtgtaatcatggctcactgcagccttgaacacctgggctcaagtgatcctcccacttcagcctcctgggtgggtaggactacatgtgcatgccagccacaactggctaatttttaaatttttttgtagagatagggtttcacccaagctaagatagttatcttagaaaaactgagcagaaattctagaaataamagattaattgaaggaaatacaaaataagtgtaaaagcttcaataacagactggaccaagcagaagaaagaatgtcagaagctgaagactggtcttctgaaataatccattcagacaaaaataagcaaaaaagaataaaaaagaatgaacaaagtctttgagacactgggactacataaagttactgaacttacgagttattggttctcctgaaggggaaaagggataaaaaagtt

SEQ ID NO: 593051 - DNA, 530 bp, Homo sapiens
caaaaaaaaccaaaagcaacaacaacaaaaacaactatattctcaccacctctcaactcgagattctgattctgtargtttggagatgggtctaaggtttgcaattttttaattacaaggttattctgatgtgcagctggtttgggaaccttttactagatggtaactaacattcctcccaactctgagattcacagcaaatgcccttgtttcccagtttggtggcaagggtgggatcaaggcctaggttagctaatggctaatgaaaggctagaggcttaacccagagaagaaagtcacagcagcccattctatgtcttggttggcaggatgcaaatatcaggtgccagacattttttacagatgaatttaccatttccttggagcagaattaggataacagtcacccagtgcaatgtctgggcaggcctattaattgctctgagcctcattatgtgtgccctgtctacatcacaggctactatgagaatgtatttggagctgctttataaactgtgaagcgcctactc

SEQ ID NO: 593052 - DNA, 530 bp, Homo sapiens
caaaaaaaaccaaaagcaacaacaacaaaaacaactatattctcaccacctctcaactcgagattctgattctgtaggtttggagatgggtctaargtttgcaattttttaattacaaggttattctgatgtgcagctggtttgggaaccttttactagatggtaactaacattcctcccaactctgagattcacagcaaatgcccttgtttcccagtttggtggcaagggtgggatcaaggcctaggttagctaatggctaatgaaaggctagaggcttaacccagagaagaaagtcacagcagcccattctatgtcttggttggcaggatgcaaatatcaggtgccagacattttttacagatgaatttaccatttccttggagcagaattaggataacagtcacccagtgcaatgtctgggcaggcctattaattgctctgagcctcattatgtgtgccctgtctacatcacaggctactatgagaatgtatttggagctgctttataaactgtgaagcgcctactc

SEQ ID NO: 593053 - DNA, 530 bp, Homo sapiens
caaaaaaaaccaaaagcaacaacaacaaaaacaactatattctcaccacctctcaactcgagattctgattctgtaggtttggagatgggtctaaggtttgcaattttttaattacaaggttattctgatgtgcagctggtttgggaaccttttactagatggtaactaacattcctcccaactctgagattcacagcaaatgcccttgtttcccagtttggtggcaagggtgggatcaaggcctaggttagctaatggctaatgaaaggctagaggcttaacccagagaagaaagtcacagcagcccattctatgtcttggttggcaggatgcaaatatcaggtgccaracattttttacagatgaatttaccatttccttggagcagaattaggataacagtcacccagtgcaatgtctgggcaggcctattaattgctctgagcctcattatgtgtgccctgtctacatcacaggctactatgagaatgtatttggagctgctttataaactgtgaagcgcctactc

SEQ ID NO: 593054 - DNA, 505 bp, Homo sapiens
ctacttaagacttcagcacaaagaccaaatatatagactgattaaaataaaggcaaatcagaaatggcatttaaaagtatgtaaattcacatttttaaagttccagactaatttttaaagcactctctgtcccaccccaaaaggtttggttgctggtttttgtctaaattaatccagtagcaacagactcgcgtgttcctgtgtgacctggaaattcccaagtaatcacttttgagtagcagatgtttagataagctaacatgttcttaaggaaataaatccttttatgatgatttcagaatggatctgtatatttggctcaatactttaggggaactgcattctccaacaggtgaaaataaatacatgcagagccagggcttaagtcaaaagaagagaatctggcacctattttctagtgactayataaagacaggccagggcgctgaccccaggatgcgtgtgggtcagaagggcaggaagggaatctgctagtcctcttgtt

SEQ ID NO: 593055 - DNA, 607 bp, Homo sapiens
actaagtttctcccaaagttagttcagcctatgcccaggaatgaacaaggacagcttggaggtgagaagcaagatgaggcccgttaagttagatctctttcactggctcagtcatcgttttgcaaaggcagcttcaatctcactttccattattcttatctcactcttcattggagtagtcctcccttatttgtggtttcactttccatggtttctgttacctgcaataaatggaggtctgaaaatgggtgagtgtagcgcagtaagatatyttgagggtgggcacaatggctcatgcctgcaatcccagcactttgggaggctgaggcgggaggattgcttgagtataggagtttgagaccagcagggcaacatagtgacatttctccacaaaaaataaattttaaaaaattagctgggtgtgatgatgcattcttgtagtcccagctactcggaaaaccgaggtgggatgatcactggagctcagaaagtcaaggcgtcagtgaactatgatcgcaggactgcgctccagcctgggcaacagagcaagaccctgtctctcttaaaaaaaaaaaagatattttgagagagagagagagagagactg

SEQ ID NO: 593056 - DNA, 607 bp, Homo sapiens
actaagtttctcccaaagttagttcagcctatgcccaggaatgaacaaggacagcttggaggtgagaagcaagatgaggcccgttaagttagatctctttcactggctcagtcatcgttttgcaaaggcagcttcaatctcactttccattattcttatctcactcttcattggagtagtcctcccttatttgtggtttcactttccatggtttctgttacctgcaataaatggaggtctgaaaatgggtgagtgtagcgcagtaagatatcttgagggtgggcacaatggctcatgcctgcaatcccagcactttgggaggctgaggygggaggattgcttgagtataggagtttgagaccagcagggcaacatagtgacatttctccacaaaaaataaattttaaaaaattagctgggtgtgatgatgcattcttgtagtcccagctactcggaaaaccgaggtgggatgatcactggagctcagaaagtcaaggcgtcagtgaactatgatcgcaggactgcgctccagcctgggcaacagagcaagaccctgtctctcttaaaaaaaaaaaagatattttgagagagagagagagagagactg

SEQ ID NO: 593057 - DNA, 607 bp, Homo sapiens
actaagtttctcccaaagttagttcagcctatgcccaggaatgaacaaggacagcttggaggtgagaagcaagatgaggcccgttaagttagatctctttcactggctcagtcatcgttttgcaaaggcagcttcaatctcactttccattattcttatctcactcttcattggagtagtcctcccttatttgtggtttcactttccatggtttctgttacctgcaataaatggaggtctgaaaatgggtgagtgtagcgcagtaagatatcttgagggtgggcacaatggctcatgcctgcaatcccagcactttgggaggctgaggcgggaggattgcttgagtataggagtttgagaccagcagggcaacatagtgamatttctccacaaaaaataaattttaaaaaattagctgggtgtgatgatgcattcttgtagtcccagctactcggaaaaccgaggtgggatgatcactggagctcagaaagtcaaggcgtcagtgaactatgatcgcaggactgcgctccagcctgggcaacagagcaagaccctgtctctcttaaaaaaaaaaaagatattttgagagagagagagagagagactg

SEQ ID NO: 593058 - DNA, 225 bp, Homo sapiens
cttggatggaattggagactattattctaagtgaagtaactcagaaatgacaaccaaacatcgtatgttctcactcaaaagtgggagctaaactatgaggaygcaaagacataagaatgacacaatggactttggggactcagggggaaagggtgggaagggggtgaaggataaaagacgacaaatagggtgcagtgtacactgcttgggtgatgggtgcaccaa

SEQ ID NO: 593059 - DNA, 610 bp, Homo sapiens
gctccttggcctcttttcctcagcctaagtttgggagacccctcaagcccccatctgacggcttgcaccaccagtcccatagggagtagaaagtggtgactatcaggacagccagcagcggatccataagtccccaggcatgagctctgcatgtctgactttggattggagcctccagtaggtacctccaccatcacacaggtccccccccagcacatcccaagcccctacttggaagacacagtgctcactcatatgtggcattcacggtcagcagcagcctccaactgagaaggccgggctggtggtcggcttccttgtggcccccttggaactgggccctgcaaacaccctcttacctcagggctccctccacacctccaatctgccactgcccatgacagcttcattcagtacattccctttgatgaaccaaggatatgacatatcaaaccagctcaaccccagggtttctttgaggacacaagstttggtgatgaatcttataactccagtcctgtcactgaccaagagccagctcatggaaaaatgctgatggtgccatttggaatccacagagcctgatagccttgtcagggaataagagagg

SEQ ID NO: 593060 - DNA, 610 bp, Homo sapiens
aaaatggctgcattttatgtgrgacatttatagatcatgtcttaattaaaaggtgggcttttttttaaaatcaaaaaatatattttatttacccttatagaggaaatatctataaatctgaaatacagcatcgtcaatggaattttttacctttccatacgaaaatttgtttggcagccccgtggtccaaaataaagcattcttcagacagcagcattgccattgagaaggggttttcttctgccaccacagtcactctcatggagccacttgcatctgaaacctaatataaaaaccatgacctccatgttttcatttggggatgataaggatgttctataattagattatggtaatggttgtacaactcggtaaatgtcatcaaataaaaagcattgaattgtacactttaaatgcaagaattttatggtgtataaattatatctcaataaaactgtttcaaagaaaatgaaaagaatccacaagactaattatactctaatttttttgaaagtcctttggggtaaaggaactacaaataaaaagttaagttttgacactgtgcctaaaacatcagaaaagaatagtgataataataatggctgaggtc

SEQ ID NO: 593061 - DNA, 572 bp, Homo sapiens
aaatcgaaaacatggcaaagaaagaaagaaaaaatggaagaagcccagcatctcaaattgtatcacaacaaactgtcagaaatatcaccaataaatacacagccttatgagtagactcaaatttttaaattaccaaaaataaaaaagtcagcctgggctgggtacaggggctcaygcctgtaatcccagcactttgggaggatgaggtgggcagatcacgaggtcaggagttcgagaccagcctggccaacgtggtgaaaccccatctctactaaaaatacaaaaattagccgggcgtggtggcatgtgcctgtaattccagctactctggaggcagaggcaggagaatcacttgaacacgggaggcagaggctgcagtgagccaagatcacaccattgcactccagcctgggcgacacgagcgaaactgtctcaaaataaaataacaaaaaataaggcctgaaaataaaaagggttttaattttgcttacaatttctagactttttaaagttttatgaacagttattctttaaactacattcatggtgtttgtgtgcgtgtgtgtatacaa

SEQ ID NO: 593062 - DNA, 572 bp, Homo sapiens
aaatcgaaaacatggcaaagaaagaaagaaaaaatggaagaagcccagcatctcaaattgtatcacaacaaactgtcagaaatatcaccaataaatacacagccttatgagtagactcaaatttttaaattaccaaaaataaaaaagtcagcctgggctgggtacaggggctcatgcctgtaatcccagcactttgggaggatgaggtgggcagatcacgaggtcaggagttcgagaccagcctggccaacgtggtgaaaccccatctctactaaaaatacaaaaattagccgggcgtggtggcrtgtgcctgtaattccagctactctggaggcagaggcaggagaatcacttgaacacgggaggcagaggctgcagtgagccaagatcacaccattgcactccagcctgggcgacacgagcgaaactgtctcaaaataaaataacaaaaaataaggcctgaaaataaaaagggttttaattttgcttacaatttctagactttttaaagttttatgaacagttattctttaaactacattcatggtgtttgtgtgcgtgtgtgtatacaa

SEQ ID NO: 593063 - DNA, 629 bp, Homo sapiens
attatgaactagatccacattatatggagtggcattcaatactcttctcagcctggggccaatttgcctgttcaccagcatcctcagttcccaactagaggccgcttgtgcactgtggtctttgtaaggtgtgccgtgtacagacgttcgcataggttgcaaagtgaacaagccctggagttgaggagtgatactttttttttctcaccacttcttgccttatattgcattgaatttttgwcattttatgaagctgttgtattcccttactctactgtcagtttttcaatccatttaattgttttttgcctgaaatgtattttccgttgtttgtaatctgacaaactcataggtattctttaagacccagttcaaacatttattttctgaggactaatgtaactcagaatttgtaactggctgctacattttcagtcacttgcctgtaacccctactatcaagtttactccataaaggcagaaataggtctctaactctattgttttcctattactgttacaacaaattaccacaaatatagtggcttaagaacaacatgaatttattatattgcagttccagaggtcagatatctaaaattggtgttactaggctaaaataaagttgt

SEQ ID NO: 593064 - DNA, 629 bp, Homo sapiens
attatgaactagatccacattatatggagtggcattcaatactcttctcagcctggggccaatttgcctgttcaccagcatcctcagttcccaactagaggccgcttgtgcactgtggtctttgtaaggtgtgccgtgtacagacgttcgcataggttgcaaagtgaacaagccctggagttgaggagtgatactttttttttctcaccacttcttgccttatattgcattgaatttttgtcattttatgaagctgttgtattcccttactctactgtcagtttttcaatccatttaattgttttttgcctgaaatgtattttccgttgtttgtaatctgacaaactcataggtattctttaagacccagttcaaacatttattttctgaggactaatgtarctcagaatttgtaactggctgctacattttcagtcacttgcctgtaacccctactatcaagtttactccataaaggcagaaataggtctctaactctattgttttcctattactgttacaacaaattaccacaaatatagtggcttaagaacaacatgaatttattatattgcagttccagaggtcagatatctaaaattggtgttactaggctaaaataaagttgt

SEQ ID NO: 593065 - DNA, 629 bp, Homo sapiens
attatgaactagatccacattatatggagtggcattcaatactcttctcagcctggggccaatttgcctgttcaccagcatcctcagttcccaactagaggccgcttgtgcactgtggtctttgtaaggtgtgccgtgtacagacgttcgcataggttgcaaagtgaacaagccctggagttgaggagtgatactttttttttctcaccacttcttgccttatattgcattgaatttttgtcattttatgaagctgttgtattcccttactctactgtcagtttttcaatccatttaattgttttttgcctgaaatgtattttccgttgtttgtaatctgacaaactcataggtattctttaagacccagttcaaacatttattttctgaggactaatgtaactcagaatttgtaactggctgctacattttcagtcacttgcctgtaacccctactatcaagtttactccatraaggcagaaataggtctctaactctattgttttcctattactgttacaacaaattaccacaaatatagtggcttaagaacaacatgaatttattatattgcagttccagaggtcagatatctaaaattggtgttactaggctaaaataaagttgt

SEQ ID NO: 593066 - DNA, 529 bp, Homo sapiens
tgttatgcagtgccaggatgagagtagttgcttactatataaataactgttgaattaaattgaatttttaaataatagacacttatcccttcctgttttcaacctctttgcttatttgtctcatcttgtataagcaccaaggtaaatttctttattctagctaagcaaacactattcatgatttccttaatatataccaagtgctacagtcatctaaagygatattttatttactcctataaacacatatgtttcacaatatgttacttattcttctacattatcaagcttgcttcagtcagtaactccagtttttcttcggaagttctgaatgtgttctataaaggcagcattttatttgcttatttcatttggtgtacttaccttttatatttacatttctagataggagaggtcatgtccgtttcttatcatcactctttaaatgtttttaagacaagaaactgtaaaaaataaaataccgatctttgaatataccataatcattcctcagttcaagactcctgaa

SEQ ID NO: 593067 - DNA, 529 bp, Homo sapiens
tgttatgcagtgccaggatgagagtagttgcttactatataaataactgttgaattaaattgaatttttaaataatagacacttatcccttcctgttttcaacctctttgcttatttgtctcatcttgtataagcaccaaggtaaatttctttattctagctaagcaaacactattcatgatttccttaatatataccaagtgctacagtcatctaaagcgatattttatttactcctataaacacatatgtttcacamtatgttacttattcttctacattatcaagcttgcttcagtcagtaactccagtttttcttcggaagttctgaatgtgttctataaaggcagcattttatttgcttatttcatttggtgtacttaccttttatatttacatttctagataggagaggtcatgtccgtttcttatcatcactctttaaatgtttttaagacaagaaactgtaaaaaataaaataccgatctttgaatataccataatcattcctcagttcaagactcctgaa

SEQ ID NO: 593068 - DNA, 529 bp, Homo sapiens
tgttatgcagtgccaggatgagagtagttgcttactatataaataactgttgaattaaattgaatttttaaataatagacacttatcccttcctgttttcaacctctttgcttatttgtctcatcttgtataagcaccaaggtaaatttctttattctagctaagcaaacactattcatgatttccttaatatataccaagtgctacagtcatctaaagcgatattttatttactcctataaacacatatgtttcacaatatgttacttattcttctacattatcaagcttgcttcagtcagtaactccagtttttcttcggaagttctgaatgtgttctataaaggcagcattttatttgcttatttcatttggtgtacttaccttttatatttacatttctagataggagaggtcatgtccgtttcttatcatcactctttaaatgtttttaagacaagaaactgtaaaaamtaaaataccgatctttgaatataccataatcattcctcagttcaagactcctgaa

SEQ ID NO: 593069 - DNA, 605 bp, Homo sapiens
atatttgtatttatatatattttaacttagccatttctaatatatttaacatatttcattttttacttatttaaatttaaatctactccgttagaatgtagcccccatgaggggaaggacttttgtttatgttttttacaactatatacctaacactacaattagtgttacctattaacaaaaggccaataaatatttttgaataaataaatgttgaatttatgcattagtatatcaatactttagggagtaattctattatacatatttattctgaagtttctaaagtttcagggttacagtgaagcaaaactctccctgtctggaaaatggcactaataaacgcatcacttaaattagccttttctacttaatcctaaaacatattcttccatgtcaaatcactgtttttaccaccttacatctttctgattttctgttttggcaaatttctgacagaatgagccaaatacaaagtaaatagagtattacatgtaatagcaaagtttataaagaatcagaattttrtgaagccaaagctgagtattataatgtggataaacacctttaatttgtagatcagcaactttacaattgataaagag

SEQ ID NO: 593070 - DNA, 576 bp, Homo sapiens
ctaactcaacaacagtacatgtattatacaattatttcttctaatttacaaatgagaaattaagattgaaacgtcttgttctaggttacacagtgagtaataggtgygactgagctatgtttacttgatgtaagagccaaactcttaaccattataatatcacaatcatgttgacatctatatttcattttagttcaaaaaattacagttgtcaaggtctatcatttcagaaatattatcacttattctcataaatgctgtagtccatttcatattcattcacatatttactaacaacaagtatttatttagtaccctcaatgggccatacatacacttccataagcattagagttacatcagtgtcaacaactgagaagagtctgagatttttccctactattaagttagcaagttttcctgccgcggtttcataggcgctgacagagaaagcaagacttctggggcagaggcaaaagaagttattactcatggcacaacggacaatatgaccttcatgttggttccagtttcaattgccttttaagtcatacagagtgacacagaatgactttg

SEQ ID NO: 593071 - DNA, 447 bp, Homo sapiens
ctccttgtactcaggatcttcttactctttccttctttagaactgtatccttcatttatctgcattttctttctaattcctttctctctcttttctctccaatctccctctgccttactattctggattattcccttagaataatatatatgatataatatataatgttatgtataataatatattaattataattatattttatttctcataattatattttataattatattgattatattaaaatattaatgtaaattacaataaattaatttatacaataatatattaatatacaatatattaatgatacaataatatattaatatataattwtatatatatatatatccctatcacagacataaagcactatgtgaccttgttgctgacctccctccaaaatcttatcatcttccctcattgagctacagccattttcttgt

SEQ ID NO: 593072 - DNA, 578 bp, Homo sapiens
gtcttctaggtttcttccagtaaagcaataacataagttgcttagtcatatttattaattataatcgaatgtatagagaggcatttctagtcattaggacaagcactttattacacaggcaaacaactttttctctttttaacaacctctgaagtaaataatatttctcccctttacagataagggaataggcgttctgagactttaagtaatttgtttagcgtcattggggttagatagtgacagagccagagtggaaataagttttgaatgcacacaaagctttcatgggtagtcactacatttcttaatgtgctttaatagtttgaaacatgaagtttaagttttatctgaatttgtttgctatggcattccactaaatagagatatatttaattactttaggctggcataatgcgtacgtgtgtgtgtgtatattcagaggaacccaaataattaatgctgtgtaggttttggwaattaataaaaatatttctgtgcacagcaaatttgaattttcattgttcttaagaagtttgctttttaaatcaatttttgaatattttatcctgtagcta

SEQ ID NO: 593073 - DNA, 380 bp, Homo sapiens
ctttagttctgggcctcaatcaaaactagcagctttcagaccactcaatgaatgggcctcactaatactctcaaatggggaatatgttgcctctaaaattcaaattggcccgctaagcattgaacctctgtttagattatwaaaagggcagattcgataacttattattcatcttgagggatatctcaaaattccttacatccctgggcccccagaaacttcactgagatagaaaacccttgaaattttgtaagatttatttccttcctttgacatgcaaatgtcttaccaaagagttttgaaaagtgttgcttcttgccaactagttttaatcagcataatgtgatcaatattatggactggtgtgatagcatgtggaa

SEQ ID NO: 593074 - DNA, 538 bp, Homo sapiens
agggtgccatttttccatggctaagtagaatttaygatagtgtcataaatcttaatattaaatgaaaaatctgctaaagaaatattaaacacagagcagacttggaaatggctatttgcactttagagggaccctattcttaatcaaatcactggatataatgatgagaactgaagttcctgtggacttgaagggaatattcctaagaattatggggtgagttggtaaaatgagaaaatgtttttccataacactaacttcatatcatgtgatgataggccaatttataactacctatgaggctgggtgctgtggcttacccctgtaatcccagcactatggaaggctgaggcgggcagatcacctgaggtcaggagtttgagaccagcctggccaacatggcgaaaccctgtctctactaaaaatacaaaaattagccgggcatggtggcatgtgcctgtaatcccagctacctgggaggctgaggcaggggaatcactggagctggggaagtggaggctgtagcaagccaaaatcg

SEQ ID NO: 593075 - DNA, 581 bp, Homo sapiens
aaatgagtagattttattatctgtaaattttatgtcaataaacctgaatttacaaaaagtttgcttctagaagttggagtgcaaaactgttttacttcaaatattccacaagcatattgaaacctcatgaatgtgcctggcaatggtgttgatgataatgattcggctaaatatgacaattaacatccttcaacacactttgggataaaaaggggatcttactggaaagtagaccacagtttattttcttctacttgactacgttgtcttataatttcagagcagagtctttgattacctacaattcagtagtgatacaggcttgagcatatacctttgcacagtttcacataatttttttttttaccttgggacattgtagaagaatgggggcagatcattcttttcacattgactctgaactgatgccactgactcatttcctcacttttgtttttgcttctagtaatgtctacctccgacaggtgcaaaataagacrttgaaaataaaaaagacataatcagtcatgaagaaaaacagataaagtgatcattctgtaatgatcgggcttgacaaaaac

SEQ ID NO: 593076 - DNA, 429 bp, Homo sapiens
agaatgttttagcatcagattcatagcgaaccaaggaccacaccttatagttaagagtttcctatgtaatttaatgtctaatgaacttttaatttggtagaaagggtaaatggcaaaaatgtaaataattccatcaactatttgactaayttttttatatataagaagcaattatttgaaagacaagtgtgtcatttttccatatgtcatgagattttctccctaaatggtccatgaaacatgaaattaacatgaagaacatggtatctcctaacaaaaatgcctaaattaaaaagtatgatagagaaatgaatgcaggatttagagggaaaagacttcaattcaggtccagtctctatttataaatttgcaggtgatcttgggcaaatcttactgtttacaggctataatcacttcatttgtaaaata

SEQ ID NO: 593077 - DNA, 529 bp, Homo sapiens
taacgaatttatgttaaggaaaaacataagactaaaaattagatgtagaaccagaaaaaggtcaggaactaaagaaattcagtaatagcctagaaaatcagatgtaagaacctagaaagaagattcaggaattggcagtgagtagggtgggacctggggatattcttcctgaatgtgttggrttcagtatactttggtaggggaactcaatttgtagggtcaaagttgaggaacaaagaaagcattgcgtgcaagttttgcccaggtctctagaaatctgatcatcctttaggttctgttctgatgttcttgagcttatataacaaatatatcataaagtaggtggcttataaaacacagaaatttatttctctaagtctaggatccttagaagaacaagattaaggtacagtacctttgatgccccataagtgccccgtcctcatagatggtgccttctccctgtgtcttcacatggtggaagtggcaaagaagctcccttgggcctcttttataaagactctaactc

SEQ ID NO: 593078 - DNA, 529 bp, Homo sapiens
taacgaatttatgttaaggaaaaacataagactaaaaattagatgtagaaccagaaaaaggtcaggaactaaagaaattcagtaatagcctagaaaatcagatgtaagaacctagaaagaagattcaggaattggcagtgagtagggtgggacctggggatattcttcctgaatgtgttgggttcagtatactttggtaggggaactcaatttgtagggtcaaagttgaggaacaaagaaagcattgcgtgcaagttttgcccaggtctctagaaatctgatcatcctttaggttctgttctgatgttcttgagcttatataacaaatatatcataaagtaggtggcttataaaacacagaaatttatttctctaagtctaggatccttagaagaacaagattaaggtacagtacctttgatgccccataagtgccccrtcctcatagatggtgccttctccctgtgtcttcacatggtggaagtggcaaagaagctcccttgggcctcttttataaagactctaactc

SEQ ID NO: 593079 - DNA, 538 bp, Homo sapiens
aaattcacaaatacatgtacattaaatacatttgcaaataaccaatgattcactgaaaaattaagttttataatatcttgaaagaaacaaaaatagatacataaaataccaaacttattatgccaacttattgcatgccactaaagcagctctaagaggtaaagtttawagcaataaatgcctaaatcaaacaagaagctcttaaattaacaaagctatgttttaagaattttttttaaagaacaaacgaatcgcagcattaggagaggaaataaataatggagttcagagcataacgaaatgaaatgaaatgaaatgaaatgaaatgaaatgaaatgaaatagagacagatcacgaagtgaggagatggagaccatcctggctaacatggtgaaacccgtctctactaaaaatacaaaaaaagaaaattagccaggcatggtggtgggcacctgtgatcccagctactccggaggctgaggcgggagaatggcgtgaatccgggaggcagagcttgcagtgagccgagatcacacca

SEQ ID NO: 593080 - DNA, 538 bp, Homo sapiens
aaattcacaaatacatgtacattaaatacatttgcaaataaccaatgattcactgaaaaattaagttttataatatcttgaaagaaacaaaaatagatacataaaataccaaacttattatgccaacttattgcatgccactaaagcagctctaagaggtaaagtttatagcaataaatgcctaaatcaaacaagaagctcttaaattaacaaagctatgttttaagaattttttttaaagaacaaacgaatcgcagcattaggagaggaaataaataatggagttcagagcataacgaaatgaaatgaaatgaaatgaaatgaaatgaaatgaaatgaaatagagacagatcacgargtgaggagatggagaccatcctggctaacatggtgaaacccgtctctactaaaaatacaaaaaaagaaaattagccaggcatggtggtgggcacctgtgatcccagctactccggaggctgaggcgggagaatggcgtgaatccgggaggcagagcttgcagtgagccgagatcacacca

SEQ ID NO: 593081 - DNA, 633 bp, Homo sapiens
aaatgcaatggataagctgtaattatctgcatagttgttacttagtctgttgaaagggttataaaatcagaagttttatatcctttgaggaaaaattgctaaatacaatttctatgttctaacaggacctttgtgcttgggttattagcttagaggatgaatttctggtaacttttgacctatttaaaaatctgtaactactggattttgagagttaaattagcattgctaattaagcattgacattcagttggatcttaaaattatggtggtctgaaaaaaaaattaatgcttttgaaaaggcagaaaattgaagctgtaagtttgaagtcttccagaatttgtaattcctggttcttaaattagccaatcagataaatttatagaacagaattatattcctagcaaagagtttcttcacttatcctaaggaataggaggaaaaaaaattgatatcatgaaaagaggaatgcattttctccagagaactcgaatttgagttttagctcaaccacacttgagttatgggattcacatctagacaaatwctttagccctatgagcttcaacttactattggattgtttacaggaatcagatgaaacaatatgtattgactgattgactgagtcc

SEQ ID NO: 593082 - DNA, 589 bp, Homo sapiens
ataatagaagaggaaaaactaactcatagcaggggttctcaagtagatgcagttttgctccccagggtatgtctggcaaagtctatagtaatttctggttgtcacaactggaattgtgggataagagttctgccatctcataggtacagaccagggatgatgcttaaaaatcctacaatgcacagggcagcatccctctcccccaacaagaaattacccagcccaaagtattaatattgctgaatatgagaaaccctaatatacagttataaaaaagccagtgattttctaaaggtagtggtggagagaagatggctgcaaaggacaaaagggaactgttctggagccatgaaaatgttttaattacagtggtgattactaggggcatagctggttgtcaaaattcaaagtttattcttaaaatggatgcaatgtattgtatataaaaattcattatatatatatacamacagtatagttatataccatatatatgtatatactgtatatattaatatattgtgtgtatagtatgtacattatatatgtgtttgtatagaatacaaacacatgcaatatctctataact

SEQ ID NO: 593083 - DNA, 601 bp, Homo sapiens
cagcaagcataggcaagactataaagaggatatccatggaaggtgaattattaacacttaccttttgtgatttttagcttgagcctggtttcttcacgttggtactttgggtgctcttctgggttgagggaggtaattccatcagcttcccaggcctttactcaggtataataaatccaagaatctattccagtgaggtattgtaaaagactgaggtggccactttcaggaggttctcaaagtactatctggtcccagggcctgtttctgcaccttcctgctgagtaataaatttatcctttaggattagttgtctctcagctgaaacaggagatctacaggtgtgctttaccaaggtccctcttagactctctgggaaggcaatgggattctcatcaaatccttggcctatcatggatagcttggtgtaattgaacttggtgtaattgrtatactagtccctccattatgcacacctgaaagtgtctccttttccattctcccaaattattattgggatcccatctagagtcatccaattggtactgcttctcttccagttggataaagtttgaccccttccctgacactatatgtgata

SEQ ID NO: 593084 - DNA, 553 bp, Homo sapiens
taaaagtggcagtatcctctgcactccctctctctcctgccaccatttaagacataccttgcttccccttccacttccaccatgattgtaggtgtccccaggcctcaccagccatgcagaactgtgagtcagttaaaccttttttgtttataaattatctagtctcaggtagtatctttatagcagtgtgaaaacagactaatacaatattgttctctatctgtaacacagtgttaggtagcagcttttctatttggtcagctattgttacctggtggcttccaaactttcagaataactgttggccttagttaaaattcrtgcatctgtagacaatggaaatgcatagctgtgtatcgtaaataatattggttaaacataaaatgaattaatgttaacttagagccttttaaatctgtttgtagggataggctgatgcttaatatttgtaggacctagaataatcatgtaaatagaagcaacataattgttgtctaagtatataaaagttgtaaatcacattgatgacttattaaatagaacatgttgcatg

SEQ ID NO: 593085 - DNA, 429 bp, Homo sapiens
ctacgtgagtcactctaaatggattactgctaatctccccaatgactctacatcaggtgatgaaatatgttcagaccaacagaagtacttctcccaagatcctagagataataatgacaagattcaagccttagacaactgaaatctaggatctgcccactatgtctctctgcatctggagaacactctaatacactgcaggatgctttaaggagtgtttgtgatctgaaagtaggcagacayattaggtggaaaatatttttaggattacaccaagtgagtgcttttactacattcacctatataagaaaacttttttttctctttttctaatttgaaccaaagctctctgcagtttagcaaactataatgacctcaatatgagcttacagttcagtggaaaagctccagtcctagagtggaggatga

SEQ ID NO: 593086 - DNA, 620 bp, Homo sapiens
tgtgataacatctctgttcctaacttttctcatctatatgtggatatattagtggcctatcattcaaaatgctgttatggtacaaacatgacaatacatgataaagtgctgagcaaaatatgtggcacagagaaaggacccttctgtttttggctatctctcgtgtgtttgtctgtgtgggcatacatatataaagtcatcccccagaattcgtaygggcttagttccaggatttccacagacaccagaatccatagttaccaaattttgtgtatgctcaagtccctgaaataaaatgatgaaataatatagcatcgacatataattcgcacacatcctcctgtatagtttaaattgtctctagattacttataatacctaatgcaatgtaaataaaatgcaaacagttgttctaacatattttatttgtataatttctatttttgtaccattatttgttgtatgtttttataaaatgtttttaatctgtgcttggttgactctgtggatgcagaacctgcagatacagaaggctgagtatatacacataagtaatgaatttgagccagccatttaacttctgtaatctttgtttttaatatttctaaaattaggacaat

SEQ ID NO: 593087 - DNA, 620 bp, Homo sapiens
tgtgataacatctctgttcctaacttttctcatctatatgtggatatattagtggcctatcattcaaaatgctgttatggtacaaacatgacaatacatgataaagtgctgagcaaaatatgtggcacagagaaaggacccttctgtttttggctatctctcgtgtgtttgtctgtgtgggcatacatatataaagtcatcccccagaattcgtacgggcttagttccaggatttccacagacaccagaatccatagttaccaaattttgtgtatgctcaagtccctgaaataaaatgatgaaataatatagcatcgacatataattcgcacacatcctcctgtatagtttaaattgtctctagattacttataatacctaatgcaatgtaaataaaatgcaaacagttgttctaacatattttatttgtataatttctatttttgtaccattatttgttgtatgtttttataaaatgtttttaatctgtgcttggttgactctgtggatgcagaacctgcagatacagaaggcygagtatatacacataagtaatgaatttgagccagccatttaacttctgtaatctttgtttttaatatttctaaaattaggacaat

SEQ ID NO: 593088 - DNA, 608 bp, Homo sapiens
ataagtatggtttagagcttaaattacttgataattatacctccattctttatcccactagctcctccatctttactccaataaaattccatgctagttgcacaatgacataaatctcagtatattctagttattggttctttaccaaccaccccttccctaagacttgcctctgggagtaccttaaggacagtttttttttttttaatttcatttatttagttctcagaatctgatacagtcttgcgtgtaagacattctcaataaacatacactagctaaaattatttaagtgtaaatttttagcatgtgttttattttattgagattgatagactaaataaagtttataaacagaggaatctgaatgcaaataatcgctgtatcttacagctatcttccccacagacacaagacagaacaaagtggaaaatattagatctaatacagaaatsttcaatttcctcaggttgtgaaggcccctttgaaattacttattttccgtttttttagtttgttaaaataattttaaaattttaatctttattccccattgaacaatggccagtccaagaaaatagaaactactactcagagggggaaaaaaa

SEQ ID NO: 593089 - DNA, 517 bp, Homo sapiens
actcatgactgtaatcccagcactgtgggaggccaaggctggtggatcatctgaggtcaggagttcgagaccagactggccaacatggcgaaaacccatctctactaaaaatacaaaaaatagccggctgtggtggtgtgcgtctgttctcccagctacttggaaggctgaggcaagagaatcacttgaaccmgggtggtggaggttgcagtgagctgagatcgtgccactgcactccagtctgagtgacaaagcgagactctgtttaaaaaatatatatatgctaaattgactctgccagtgctgtctcaatgaaaaaataaaacctgatgacaacacctgtgttcacagtgtggtttgctgaatattttaaactcactgttgagatctgctgctcacaagaaaagaattttttcaaaatattactgctcattgacaatgcacctgcccataaaataactctgatggagatatacaaaaagactaatatttttatgcctgctaacatacatctatt

SEQ ID NO: 593090 - DNA, 517 bp, Homo sapiens
actcatgactgtaatcccagcactgtgggaggccaaggctggtggatcatctgaggtcaggagttcgagaccagactggccaacatggcgaaaacccatctctactaaaaatacaaaaaatagccggctgtggtggtgtgcgtctgttctcccagctacttggaaggctgaggcaagagaatcacttgaaccagggtggtggaggttgcagtgagctgagatcgtgccactgcactccagtctgagtgacaaagcgagactctgtttaaaaaawatatatatgctaaattgactctgccagtgctgtctcaatgaaaaaataaaacctgatgacaacacctgtgttcacagtgtggtttgctgaatattttaaactcactgttgagatctgctgctcacaagaaaagaattttttcaaaatattactgctcattgacaatgcacctgcccataaaataactctgatggagatatacaaaaagactaatatttttatgcctgctaacatacatctatt

SEQ ID NO: 593091 - DNA, 572 bp, Homo sapiens
tactatttgtgtacatgtgtgatatgtatatatgcatatataagtgtatgtatgtgtgtgtgtgtatctgcaagagaggtaaacataagagtgtttactatatagattatagaagagatgatattcaagaatggtgtttgtggtgagatggaacaggaagcaatggagaaatgaaatgtgacatatacatggcggcaaatgctatgcaacccattggaacaataaatggcagcaacactgtagatcttaatgttgagtgggaaaaaaatagtaatgaccaaataatagtaaccaaagtaatarcatatcaattgaatacattggccatgattgggagttgaatagaagtggagatcagctatgaaggggcaagaaaataacgtgagacaggttcgcgttcttataaggagcagaagagtgactgactcaacttcctgcacttaggatcacatcgaatacctgtatgaaatataagaaaaaaaagccaaactttattcttcatcaggctttattgattgacgcattctatacatggacaattattgaaaatcccattcctaaagtttctgtaa

SEQ ID NO: 593092 - DNA, 608 bp, Homo sapiens
  misc_feature 608: n = A,T,C or G
aggtctatattttctgtgtcacactttgtgaagttgcataaaatatacatacatatatatatattatatatgtattttactcagtagtatgttagactcaggtaagagcattcttggttttggagcacrcatttagatagccctaaaagtcacaaatactcacacaaataataatgttatttagaaatgggtgtctcaggaactcagcatatggtgctcaattgtggcacaatacaccacattagccaaactatctactctcatatttaacaccatatagaccttagggaaacaattaatcccgactcttgtcctatgttcctgaaaggaaaggcagctatatctaaattgtttgaaggtttgcagataatgctaccattgatgagatggaagtctgcttttgaacaaaggaagaaaattaatttgacatttttcagagaataatagtgcaatatattcttacacatttatatgatagttgtatgatatttacgtggaatgatattacgggccagaaaacaatgtttgaactaaatatatacaatcatgcatctcttaatgacaaagattttttctgagaaagcatagttatttcatccagtgtgtgn

SEQ ID NO: 593093 - DNA, 608 bp, Homo sapiens
  misc_feature 608: n = A,T,C or G
aggtctatattttctgtgtcacactttgtgaagttgcataaaatatacatacatatatatatattatatatgtattttactcagtagtatgttagactcaggtaagagcattcttggttttggagcacgcatttagatagccctaaaagtcacaaatactcacacaaawaataatgttatttagaaatgggtgtctcaggaactcagcatatggtgctcaattgtggcacaatacaccacattagccaaactatctactctcatatttaacaccatatagaccttagggaaacaattaatcccgactcttgtcctatgttcctgaaaggaaaggcagctatatctaaattgtttgaaggtttgcagataatgctaccattgatgagatggaagtctgcttttgaacaaaggaagaaaattaatttgacatttttcagagaataatagtgcaatatattcttacacatttatatgatagttgtatgatatttacgtggaatgatattacgggccagaaaacaatgtttgaactaaatatatacaatcatgcatctcttaatgacaaagattttttctgagaaagcatagttatttcatccagtgtgtgn

SEQ ID NO: 593094 - DNA, 613 bp, Homo sapiens
aagtaatctatccttatcttcaaaaatcttctttcaggtttccaacttacaggcgctagaattgagtcgaatcagcttgaagaaaggcattccacatgtgtctttaggggctaacacttgagcaaagaagaaattagcacgtgtcaaacaagaaatgcacttaatcttgcatttctacagtggttgtatcaaaggatgtctcatgccttcattgaaggtgtaagtaactaggccaaactgttaactttctcattaactgaagactctttagtgaagtttaggaaagtatgatggttaactattttaaaaataatctgcatagtgagaaaaaaaggagagagacaaagctctaatgaatttaattttcattccttaatcattattatatcacgacatcatgtacattttcaagtyagatgttaaattaaggccaatgtctataaataagaaacttctactgaaagatgtggaacccctccctcgtaatttttatatgcataatttcctaaccatatcactcagtttcagtgccattaaactgaagtagcattcataaaattattaatcatttaaaatcaatgaaaacttcaacatctgcatttatggcagaaat

SEQ ID NO: 593095 - DNA, 593 bp, Homo sapiens
catttccagctgtaaagtcctacaaccraccaatgtaaatcaagcaaatattgggcctgaaagagaattctgaaggttactgggccttgaggcttcactggttcactctatttgtctgccatcttgcctgtcatagaatgtatccacaaaagaagatcaccactcctctgcataacatcctctttgggaagattcaacacgatgattcttttttaaaggagcttaactcttaagacctgctttgctttgtgaagtcagctggtgaggacagagatcttgttgagcaggtcctcaaccttcctttcagaagcttttattctaaaactgaagccaccagccatgtgtggctacttaaatttaaatgagtttatgttgaattaaagttaatttaaaacttggtttctcaatcacaagaaccactggctgccataatggacagtacagaatactgaacattcccagcatggaaggaagttcttacaggatagcagtggttctaagggaaacagggtgtgcttgcttcccctccctttctagaagccatccttctaatcctctcttggttcatcatcacatcgttctctgtggattca

SEQ ID NO: 593096 - DNA, 593 bp, Homo sapiens
catttccagctgtaaagtcctacaaccgaccaatgtaaatcaagcaaatattgggcctgaaagagaattctgaaggttactgggccttgaggcttcactggttcactctatttgtctgccatcttgcctgtcatagaatgtatccacaaaagaagatcaccactcctctgcataacatcctctttgggaagattcaacaygatgattcttttttaaaggagcttaactcttaagacctgctttgctttgtgaagtcagctggtgaggacagagatcttgttgagcaggtcctcaaccttcctttcagaagcttttattctaaaactgaagccaccagccatgtgtggctacttaaatttaaatgagtttatgttgaattaaagttaatttaaaacttggtttctcaatcacaagaaccactggctgccataatggacagtacagaatactgaacattcccagcatggaaggaagttcttacaggatagcagtggttctaagggaaacagggtgtgcttgcttcccctccctttctagaagccatccttctaatcctctcttggttcatcatcacatcgttctctgtggattca

SEQ ID NO: 593097 - DNA, 593 bp, Homo sapiens
catttccagctgtaaagtcctacaaccgaccaatgtaaatcaagcaaatattgggcctgaaagagaattctgaaggttactgggccttgaggcttcactggttcactctatttgtctgccatcttgcctgtcatagaatgtatccacaaaagaagatcaccactcctctgcataacatcctctttgggaagattcaacacgatgattcttttttaaaggagcttaactcttaagacctgctttgctttgtgaagtcagctggtgaggacagagatcttgttgagcaggtcctcaaccttcctttcagaagcttttattctaaaactgragccaccagccatgtgtggctacttaaatttaaatgagtttatgttgaattaaagttaatttaaaacttggtttctcaatcacaagaaccactggctgccataatggacagtacagaatactgaacattcccagcatggaaggaagttcttacaggatagcagtggttctaagggaaacagggtgtgcttgcttcccctccctttctagaagccatccttctaatcctctcttggttcatcatcacatcgttctctgtggattca

SEQ ID NO: 593098 - DNA, 446 bp, Homo sapiens
tcatgtaattaatatgttgggcaaaaagaggccgtccatgaattctgactagggagaaaggacgctgcatttgctagaaaattctccccctgcattaatctggtcatcttctcagtggctaacaaatgtaacgcttcctcttatgaaataaggcagagcatccagagtaaaaaagtcatccagctcaggtgctgggctatggatttatcattttagcccaatctcagtcaacaaagtggaagcaatgagcagaatgtggtttacacataagtcaagaaaggaaaataaaccaaacagcaattatgtaccctgtattaggagcctatgttaaatattatgagaygaaaaaaaagagcaaaaaatgtgacttctgctgttacattcaacagagctcatttagcaaggcattattacctgcggtggtgatttaaggtcaacgttttcct

SEQ ID NO: 593099 - DNA, 527 bp, Homo sapiens
catcactgagttaaagagaatgcacattttaggatttgaaaaactcccaaattgttccactaaaagaattatataatttacattctcatcagcatgtgtaagcgtgttcattctcttgtttcttaaagttttgctggtttgataggtgaaaaaacatggactttttatagtctttaccgcaagttcatgtttcctttggccttagaggctctgtctagattctggaagatgtaggaatttatcctgtcctgtgaaggtttgcctatcctgggcacagtagtgatgtaggtcacatttggtaggacagactaattgcttgaggacttagctctctgcaaggatgtaatatattcagcattrttcaagcagctaattaaagacgaatgggggggacagctaagtagcagttttaaagtacatctcctttaaaaggggaaattttgaattatatcatcctcagaaagaacagtttattctgacatttggacaagttttaatagcaagtgttgaattaaaatagttggcac

SEQ ID NO: 593100 - DNA, 449 bp, Homo sapiens
tccaactttattcttcattttcaaatttgtttttgctattctaggtccttcaatattccatgtaaattttagaatcactttgtccattttgacaaaacgtatggtaggattttggttgggattgcgttgaatatctagatatagatgaatatgtggagaatggacattttaaaagtattgcccatgaatarggtagattttaaaatttctctcagtacattttttttttttttttttagtttctatgcaggtcatttacatctccagtcagatttactgctgggtattttatatattttgttgctgtcataaatgctgtgttaaaatttttgttcctgaaaatatctattgggtactgtacttattacccaggtgatgaaattacctgtacagaaaacccccatggcaagcagtttacatatatgtatgtatatatatatacatatata

SEQ ID NO: 593101 - DNA, 591 bp, Homo sapiens
tgagactgtgtctcagaataataataataataataataataataataatrataataataatgataataaagaaagaaagaagcactgtaggaatggaaagagctcacctagtggttgagagagtatactacctctcatctttctaatgttgcaaagtcctccttgccttgtcccatctaagtatttcagtaaaaataattcaagtatttcagtaaaaataattcaccagataaatattcttgaaacttttttttttttctgagacagggtctcgctgtattgcccagactggaacgcagtggtacaatcatggctcactgcagccttgatgtcccaggctcaagagatcttcccatcagccccccaagtagaagggactacaggcgcatgccatcatgcatggctaatttattttttgtttttagagacagggtctcattatgtttcccaggctggtctccaacttctgggctcaagcagtcctcccaccttggcctctcaaagtgctgggattacatgcacaagccaccgtgcctgccgtcttaaacatttaaatcttaaaggatcctttaaaattgtggaaggatttat

SEQ ID NO: 593102 - DNA, 591 bp, Homo sapiens
tgagactgtgtctcagaataataataataataataataataataataataataataataatgataataaagaaagaaagaagcaytgtaggaatggaaagagctcacctagtggttgagagagtatactacctctcatctttctaatgttgcaaagtcctccttgccttgtcccatctaagtatttcagtaaaaataattcaagtatttcagtaaaaataattcaccagataaatattcttgaaacttttttttttttctgagacagggtctcgctgtattgcccagactggaacgcagtggtacaatcatggctcactgcagccttgatgtcccaggctcaagagatcttcccatcagccccccaagtagaagggactacaggcgcatgccatcatgcatggctaatttattttttgtttttagagacagggtctcattatgtttcccaggctggtctccaacttctgggctcaagcagtcctcccaccttggcctctcaaagtgctgggattacatgcacaagccaccgtgcctgccgtcttaaacatttaaatcttaaaggatcctttaaaattgtggaaggatttat

SEQ ID NO: 593103 - DNA, 591 bp, Homo sapiens
tgagactgtgtctcagaataataataataataataataataataataataataataataatgataataaagaaagaaagaagcactgtaggaatggaaagagctcacctagtggttgagagagtatactacctctcatctttctaatgttgcaaagtcctccttgccttgtcccatctaagtatttcagtaaaaataattcaagtatttcagtaaaaataattcaccagataaatattcttgaaacttttttttttttctgagacagggtctcgctgtattgcccagactggaaygcagtggtacaatcatggctcactgcagccttgatgtcccaggctcaagagatcttcccatcagccccccaagtagaagggactacaggcgcatgccatcatgcatggctaatttattttttgtttttagagacagggtctcattatgtttcccaggctggtctccaacttctgggctcaagcagtcctcccaccttggcctctcaaagtgctgggattacatgcacaagccaccgtgcctgccgtcttaaacatttaaatcttaaaggatcctttaaaattgtggaaggatttat

SEQ ID NO: 593104 - DNA, 591 bp, Homo sapiens
tgagactgtgtctcagaataataataataataataataataataataataataataataatgataataaagaaagaaagaagcactgtaggaatggaaagagctcacctagtggttgagagagtatactacctctcatctttctaatgttgcaaagtcctccttgccttgtcccatctaagtatttcagtaaaaataattcaagtatttcagtaaaaataattcaccagataaatattcttgaaacttttttttttttctgagacagggtctcgctgtattgcccagactggaacgcagtggtacaatcatggctcacygcagccttgatgtcccaggctcaagagatcttcccatcagccccccaagtagaagggactacaggcgcatgccatcatgcatggctaatttattttttgtttttagagacagggtctcattatgtttcccaggctggtctccaacttctgggctcaagcagtcctcccaccttggcctctcaaagtgctgggattacatgcacaagccaccgtgcctgccgtcttaaacatttaaatcttaaaggatcctttaaaattgtggaaggatttat

SEQ ID NO: 593105 - DNA, 565 bp, Homo sapiens
tggcttattaggcttgcatggaatagaatttgggagacactgagcactgaaggtaaaagggtttctaaagctgaaagtaaatatagagttgatagtamtagaaaaagctaaatcaaaagacacccccccatcagaatactgcagatatttctttttctttgcaactgtatttgcataacaaaattctgttcatttagtaatcaccattttctcagcatgtttgttttttcctttgaaaaaaaaatttcttatgttgataatcagaccccaaatatttgaatgtaagcacatccctcgcagtcatactgacaccctctggcaccagaaaaactgtcatagcattttttgagatgtctggtgggaagaaagcaacaatgccagccattaattcagtaactctgctgatctctgtgtctgatagtaggccagctgttgatgacttttaggcttttgaagtgttataaacactaaaaatgtaaagatgctgccttcctttgcttcctcggtcttgttgacaagtttctgctactgttggccttcagtaaatttacatgactaatttggg

SEQ ID NO: 593106 - DNA, 552 bp, Homo sapiens
gagcagtcatcccagatgctcaccatggaactgactgtgaacacaaagcaatgggacagtcttctacaaattgtgcccaaattattgacctaaaaagagcccttgagaaagaacacttcctatgtgggcttaatgaaggtagagttagactgttggccaaagcacagatatatacacaaacaaagacttttgcaaaaatattgtgtttattagagacaacttagaaagtgtgtaacaaggattacatgcctgtaatcccagcactttgggaaactgaggcgggcagatcacctgaggtcaggagttcaagaccagcctggccaacatgrtaaaactccatctctactaaaaatacaaaaattagctgagtatggtggtgggtgcctgtaatacaagctactcaggaggccaaggcaggagaatcacttgaaccccggaggcagaggttgcagtgagccgaggctgcaccattgtactccagcctgggtgacagagtgaaactccatctcaaaaaaaagaaagaagaaagaaaatgtgtaacaaatcaccaca

SEQ ID NO: 593107 - DNA, 544 bp, Homo sapiens
ttattgtgatgaaattataaattcttagatgactcatattctagccatctattcattcttaagcatctacagagttcctaagaaggaccaagcttgatctaaggtgtcagaggtccatgaagacttctcgagaggcctccctcatgagcaatctctacaggcaggatgatgcaccatttattttataggaattccatctagtagacacccttcccctcaaaaaaatgtgatgatcccatcaaaagcttgcaggcacttagccatggcgagaaaattaaacagcctgtatgtagtaaacgggtcacagaaagggtaggttatgcagaataaaaaataagaccaaactcaggggaaccaggtcctctgaacttttatttttaattagtacatgggcataatggggtatgatctcacacacacacacacacacgcacacacacacacacacacwctctcaaactacaaaaataaatctccctctgtcccaaccctagccttccagtccctccccagaaacaaccaatgttttctatgcacacgcaca

SEQ ID NO: 593108 - DNA, 627 bp, Homo sapiens
cttcacagttatttatatattcatagagatgggggttttccttataagaacctttgatttccatcatataagaaaaaagaaaccaaaaacaccaacttgaaatgctattttcctactggattttaacttgaattgccacaaatgtgtgaagaagtgaactgcttatttaaaaaaaaaaaaaactattgacaagtctctggcttttattagtcaactggaaaatcaaacagcaaatggggaataaacaaaattcctatgactgtaaatttcaacaagaagtgaaaatagaacagatgtggaacattttccttaatgtgtyactatttagcagtacttccctccaaggtgcaaaacatgaccatcttcttggaatgtactcaaatgggctcttttacaggctttccaagaaaacacaaaagcagcaagcttccagttgttatgcctgaaaatgactcatgccatgaaaatatgcaacttaagatagctaatgagagaagaaccattctacgacagctctaacaaagataaagttccagaaacttcaaacatttattgtacaagggatgtcataacgaccctttcaatttgcatgacgagacctcactataaatgacctgttttacaaga

SEQ ID NO: 593109 - DNA, 575 bp, Homo sapiens
ctgcatggttgggtgggaggatcaaaataaagagtttggagttgtttgagtctcgaggctcagaggagggatccctgtggcagagagctcagatgtccgagaaggtggcactggtacctcttaggatgcgatgagactgactcgggagttggagactggaaccaacttatgctgccagggcgaagggcctctgctggggacatactgacaggaacagcaaacatatgggaagtagctagtccactctgacctcccacyttcttcagttttcccctattgcagaataatcctgggaaatacagtttgtagactcctaacttgagcattgcagaagagtgtttggaagggtagatttggagccaagccactagtttaataaccagcagagatgttgatatgtgctgtggagaaagataaagcaggataggtagttcaagggtgggaggaagagcttacgatttacagtaagccattaggaagctctttaccaagaaggtgacattggagcaaattcttgaaggaagtttgggagcaagcactggggctgtcttgagaaagagtggccaactgagaca

SEQ ID NO: 593110 - DNA, 575 bp, Homo sapiens
ctgcatggttgggtgggaggatcaaaataaagagtttggagttgtttgagtctcgaggctcagaggagggatccctgtggcagagagctcagatgtccgagaaggtggcactggtacctcttaggatgcgatgagactgactcgggagttggagactggaaccaacttatgctgccagggcgaagggcctctgctggggacatactgacaggaacagcaaacatatgggaagtagctagtccactctgacctcccactttcttcagttttcccctattgcagaataatcctgggaaatacagtttgtagactcctaacttgagcattgcagaagagtgtttggaarggtagatttggagccaagccactagtttaataaccagcagagatgttgatatgtgctgtggagaaagataaagcaggataggtagttcaagggtgggaggaagagcttacgatttacagtaagccattaggaagctctttaccaagaaggtgacattggagcaaattcttgaaggaagtttgggagcaagcactggggctgtcttgagaaagagtggccaactgagaca

SEQ ID NO: 593111 - DNA, 631 bp, Homo sapiens
aaaataaatgcttattattttttaagccactaagttttggagtgatttgtgacacagcaacagataaccaaaaaaagaattcacgatagctcaaactagccgtaagggaaaagatagttcctaatgcacttatgtggaagatccttcaataatatggttaagaacttggggttttggagccagaaaaacttatatttgaacacagttgtatcacttaacaggtaacccttggcaaattaattagttttcctgaacctcagtcagttacctcatctgcaaatgggaagagtaatggggcctagtttcttgagatrttgtgaggttacaaggagataatgtaggtaaaatgctttgccccatgcctgacacttaatgagtactcaaaaaaagtgagctattaataggattgattttttaccattttaaaaatggcaccatatcattcaacattctcaaaaatggaagcttctgtggcacaactcccggatttccactacattaagaggccagatgcaaaaagagttatagtcccaggagaaacaagagccacagttgactagccatcttctatgcatcaacagtgtttattaagatgtcataggattaactgccagactgcctttcagaagcc

SEQ ID NO: 593112 - DNA, 543 bp, Homo sapiens
tatgggtgctcattccgttctctgtggcctttataaaggctgtgcagttttwcaggtcagtgccgtagattcctacatgattatcacaagctcccacagtgatggctgttcttccccaagggcgtctcacgtggccctgggcccagagctaccttcaaaaacccatctgcggggcctgggaagccttctcttctcttaccaaagcaactctgagactactactcaaaatgtcttattctgcagaaagacaaatatccttcaaatatttgtccctcaaatatccctcaaatattctgcagaaagacaactatccctcaggggctttgagcaccaaggaagagcctggcttctcagccttggaacatgagagcacagcttctttgctgaccttggtgtgtgtttatcacaggtgacacataaagctttctttcagacccaggacataggcacacagcttctcggttagcctcccaagtttctgaagccctgattgtgggtgtggggactttgtgcaagccagggttatgttcttggagggggtag

SEQ ID NO: 593113 - DNA, 543 bp, Homo sapiens
tatgggtgctcattccgttctctgtggcctttataaaggctgtgcagttttacaggtcagtgccgtagattcctacatsattatcacaagctcccacagtgatggctgttcttccccaagggcgtctcacgtggccctgggcccagagctaccttcaaaaacccatctgcggggcctgggaagccttctcttctcttaccaaagcaactctgagactactactcaaaatgtcttattctgcagaaagacaaatatccttcaaatatttgtccctcaaatatccctcaaatattctgcagaaagacaactatccctcaggggctttgagcaccaaggaagagcctggcttctcagccttggaacatgagagcacagcttctttgctgaccttggtgtgtgtttatcacaggtgacacataaagctttctttcagacccaggacataggcacacagcttctcggttagcctcccaagtttctgaagccctgattgtgggtgtggggactttgtgcaagccagggttatgttcttggagggggtag

SEQ ID NO: 593114 - DNA, 585 bp, Homo sapiens
tgcctcagcttcctgagtagctgggattacaggcacccgccacgacacccagctaatttttgtatttttagtagagacggggtttcaccatgttggccaggctggtctcgaactcctgacctcaagtgatccgcctgcctcggcctcccagaagtgctggcgttacaggagtgagccaccatacccagccttgtaacaaacctttagatacacacattttctgagcttcaccacagtggcgagaacttgcttctattgcaagyaatgggtctagggtggatggatctaacgcaaatatctaacacatcttcaaacgatgtgttagaactgttagggcacttgcaatcatctagtattgggtgtttcagaaatacttcgaaggttttttttgccaaagagaaaataaataatatgtaggcggaaaaagcatttcacattattctagtatgccaccccttttctctactgagaaccaccacagtatcatttttacacatgaagaaactgaggctcaaagtggctaatgaataggtcacattgatagcagaaaagctggcactaggacctaagtcctggcacatgctg

SEQ ID NO: 593115 - DNA, 546 bp, Homo sapiens
gttccatggattttatcatatattctgatattaatcagagtttaatttgcattctctccacagtcacatccccaggtctccctaaatgaattctatcaccccaaacagctcgttaccagagttagaaagtaatatacagtgtgctcttgcatccaatagaagtaaaagaagttgaacaatgagaacacatggacacagggaggggaatatcacacaccggggcctgctgggggctggggagctaggggagggatagcattgggagaaatacctaatgtagatgacgggttgatgggtgcagcaaaccaccatggcrtgtgtatacctatgtaacaaacctgcacgttctgcacatgtatcccagaacttaaagtatatatatatatatttaaagaagtaaaagaagcgtttcctttccatcccaggccgcctttacgtttgtaaaaggctttgggttccacagctagatgggattcaaacactaagcaaggctcacaggatccaaaatggcaaggcttagaaatctacaggtgactacaggaaaag

SEQ ID NO: 593116 - DNA, 605 bp, Homo sapiens
tccacattaactttttaaatttacctctgtttggttaaatacaagtgaaacaaagcaagaaaaagccacataatagaaacccaaccattttatccccaaacccaagctttttatgaagcaaatcataatcacagtcacgtgaagaagaaaactttcacaaagtgctcactaaagagatatcactgggctctgggttgaaattgcttcctgtgtatcaattgtacacattttatatacattttaaaagcacccagtctatgacattgtgtatggatgtgtacacatatactaaaaatacaaaaatgtrgttgggaagtataccagtgaaaggtccagccaggagaaaagaaactacactaagttttttaaatattggatatttgattcaaatacttggttataataggtgatcagttacacgtgatggaagagctgggctattgaaaggagatgaggcaactagtttagcagcagcaggaagagatcccctctcctaaggaagaaggacaaagaaagagggctgcttcctcatcccagaagctttgtctggtaggagatagaatcaaggtggaggctgcctgggaaaaagctgagcccacagagga

SEQ ID NO: 593117 - DNA, 605 bp, Homo sapiens
tccacattaactttttaaatttacctctgtttggttaaatacaagtgaaacaaagcaagaaaaagccacataatagaaacccaaccattttatccccaaacccaagctttttatgaagcaaatcataatcacagtcacgtgaagaagaaaactttcacaaagtgctcactaaagagatatcactgggctctgggttgaaattgcttcctgtgtatcaattgtacacattttatatacattttaaaagcacccagtctatgacattgtgtatggatgtgtacacatatactaaaaatacaaaaatgtagttgggaagtataccagtgaaaggtccagccaggagaaaagaaactacactaagttttttaaatattggatatttgattmaaatacttggttataataggtgatcagttacacgtgatggaagagctgggctattgaaaggagatgaggcaactagtttagcagcagcaggaagagatcccctctcctaaggaagaaggacaaagaaagagggctgcttcctcatcccagaagctttgtctggtaggagatagaatcaaggtggaggctgcctgggaaaaagctgagcccacagagga

SEQ ID NO: 593118 - DNA, 561 bp, Homo sapiens
taaagatctgagagatgtagtaatgggcatctttctggaaactggagtgggagctccatataattagcataccaaaaaaccaacctcatcaaagatcagaaaaacatataggctatcaaattttaacctattaggttgttaaggagttgaatgataacatccagaatatgaagagagaagtgatttgatataattactggtggaaatataaactgaaataatgtttttaaagggaattgrcagtaatatcagaaactaaaaatcaaagacttttaatccaaaattcagcttcctgaggtatgtaatgatatgtagacaaagatggtcaacaaagtactgctttctgataagaaaagttaaagaacaaagtaaaagttcataaacaagagaatcatcacagaaattagagaaaatccatgcaaattgatgtagtttggccatgtccccacccaaatcttatcttgagttgcagctcccataattcccatgtgtggtgggaggaacccagtggaaggtaattgaatcatggaggcaggtgttttccatgctgttgttgtgatt

SEQ ID NO: 593119 - DNA, 575 bp, Homo sapiens
ccaggctcctgtagtaagtcctttctaacactctccaacagagatgctggtactccacagttctccatcatgggcttcttcttttcgggagattcagctcatttaacaaaaggtcaattccaactcattcaattcagatacaatcctggtggcttttggctggtggctcagaccatggtcagcctagacttggaaaatagagaagggaggcagggcttttaagccacaacgaacacttgaaattggaaataagcaaggcatgtcccaagaacttgaaaattgctatgaaattgcttaaatttatcactgttgacctacagattattttcctttccagatcatcatctctcaaatgattwcaaatcaattttaacttcctacaatcctgctgtaattcttgaaagaaaaaccagcaagtgaattttcatgtcccacagaatgcccagatgagctcttggcttattcaatccagaaacagcagcaagcacacttatatatggtgatgagtgctaaataatatgtgtcccctcacgattactttccatttgaaaattagatctaaaagactgctaaaa

SEQ ID NO: 593120 - DNA, 587 bp, Homo sapiens
tataactaaatttgattttagctgtaggtttagcgtggatgccttttacctggttgaggaaatttctttctactcctgatttgctgggagtttttaagaagattgaatgttgaattttttcaaatgaatttcctgcagccatttaattattatcatcataagattattttcctttttgtttacatcttgaattacactgattaattttcaaatgtttaattagctttgtattctcaggataaccttcatgtgctcatattatgttaactcttcatataataataatgttgatttgctaatatttttggtaagaagtcttcctctgtttataaaggatctaaatctgtaatttttttctagtaatgtccgtcacagatatctgacctcaggattgtgctggccttataaaaatatttagaagtaactcrtactctcttttctcaaagaaaaatgggcaacaattctaatatttctttcattgtttgatggaattcactagggaagtcaactatatcgaactatccttgttgataggttttgttttacaatttaaatatatttttatatttaacatctatttacatatg

SEQ ID NO: 593121 - DNA, 611 bp, Homo sapiens
caaacatctacagatctctcttggatgtttaatatgacaaaaaaatctgggaaacaaagataacatgaaattagataattgagctaatacggttatgtatctcttcagattgggggtgatacattttatttttgtttaatatgcatgtttttatttaatttggcttagctgtggactataaacttggaccataattcttctcatagtattttatgtgttgtactgctcagwtgtgtcatccgcagtgtttagtgctgctattcagcccctgttccatcaaaggacccaacaaataatctttcaacaaaaagcacaacaaactctgacacgtataaaagttggaataacaaacatcagaaactccacatgtgaccaaagatggtaaacagtggtgaagatcagaattgatcatgtccccagaaggcaatggtctatcctttaaatgtgattgaagaattatcaagggaagttggcaataactgaaaccaacatgctttcctattcttgtgttaattccaaaatcaaacgtatcttactttccatggcctcaaaactctggaacaaacatcttttcctggtttttgctaaataatttattgggggcgagcaaa

SEQ ID NO: 593122 - DNA, 572 bp, Homo sapiens
accatgcccctttttaatttgtttttcctctttggactgtaactttcttgtacagcctcttttcctctgatatttttatactgccttctttttttctctgttgagaaaagtagcatgtttctttatcatgttatttattaaagacggccattgtcttaatcatacaacttatgtaatgcaatctgctttcttcctgaagactttcttcttgggatttctatgattgcttattttaaattgttttccttgttttcctgagttagatccaatgtttctcagatgccctgtcatcctctttgattcctttttgtctggagcacgttctcaagtaattttatttagaaaggttacatgggaggtaaaacttctaaatacatgtataactgagaagtatttattttgccttcacagtwttttttggagtttgtccagttacaaaagtatttttcctttgaattttgttgtgttttagcatctagtgttgctagtgaaaagtctgatttcaatctctttttccttgttttttctctctgtaaaccttaagggttttttaaaatcttatactgttctaa

SEQ ID NO: 593123 - DNA, 582 bp, Homo sapiens
gctatggccactgcatttctccctcccagaccctcagtgtggtttcgtgggaccctgagtagcagtagtctccctcaggcccaagtactttgtgtgatcaaacacgcaggcccatgattgatcctgcaagggagctcttcaaagctccatctcactgtgtatttgactgcagaactgggaccgaactcaactttttccaaatgtattgtttaaactgcactgcccctctagcatttcttgccaagtcctgaacattcactgggtgggggccgggtggggggtcctccgaaggaaggtaaccctgaacttggcatctggtcctcctcctgttcgaggctgcacaacttagcttcttcagacttataaataccacttagcatttagtgtcttactacaattcattcatttcatgaaaaggaaagtttgaattttaaaatgaattccccacagagagaaggcttcagcttactgaagaacctggggaagttgtctatcacgtgctggccatctgrcaggcattcttgaattagatgatgtggagagccgttgtcgcaagatgtgctcgctctcctggaaagggac

SEQ ID NO: 593124 - DNA, 605 bp, Homo sapiens
tatgtattgtccaattccattcatataaaactgaaaaacaagaaaagctaatttgtggtggtagaggtgctaatagtagttaaatcatggaaagagatattgtgagagagaagagtgattctgggatgctgttaattttttttttaaatcttaaattataaacatatgatatatgcactttcctgggtgattaaactcaagaaaaacatttctttcttttttttctttccttctctctttctttcattctttcttatttatttatttttttgagacagagtctcactctgttgcccaggctggagtgyagtggtgtgatctcggctcactgcagcgtccacctcctgggttcaagttattctcctgactcagcctcacaagtagctggaaccacaggcacacaccaccatccctggctaatttttgtatttttagtagagactgggtttcaccatgttggccaggctgcaacatttctttaaacatgcaaaaataacctggaaaattctgaataatgtagggtgtgagaacagtctagactatgaaatattataatgtattatggatccacattaatttaaaagagtgtagtattgacagcagaa

SEQ ID NO: 593125 - DNA, 497 bp, Homo sapiens
cgttgtgaagcagttatctggaggaggaaagggcaacagcctatgcaaaggtcctgaggcatgatcatgactggtgattcaacaagcaggaaggaaacccagcatgactggagtgatgcaagcaaatggggaagtaatagacagatgagagagattaccagaggaggtcatcatgttgggccttaaagactgggccgggtgcagtggctcacacctgcaatcctagcacgttgggaggctgaggcaggcagatcagtggcgctcaggagttcaagactagcctgaccaacataatgaaaccccatctctactaaaaatacaaaaaattagccaggagtggtggcaggctactcgggaggctgaggctagagaatcacttgaacccaggaggtggaggttgcagtgagcctagatcacaccmctgcactccagtgtgggtgacagagcaagactttgtcaaaaaaaaaaaaaaaaaaaaaaagactggagcttttcca

SEQ ID NO: 593126 - DNA, 540 bp, Homo sapiens
ctcatttgttaataactaagataaaggtccataaaacaatattgctcccatgtaacacagcttccttctcattytcagtaagaatccagactttcatcagaggaatctaagtgcttcaccaagatgtgtcaattatttcaagatgacaggtattcgattcccaaattcatcagtgggggctaaaaatgtatcggttcatcaagcaaagcacatttctggaagcactctcaccatttgggaatcaaataataattgcaataccaacaccttgactttctaatggaatttttcaggagctaaagggttttgacacattcccccaacaacccactctcagatttatcttctttgtaggcttttgcaatagtaaaggtactggttttatttttctcattttgcagaagaaactcagattctcaattcagaagttgagtgacttacataagcaaagcatgctggaggcaaaaaatagagaacagctctttcactgtgaagctccaaccacttgactatacagcttcagcaacatcactccttgaa

SEQ ID NO: 593127 - DNA, 524 bp, Homo sapiens
ttgattgactttagtcagatatcaccagttttacatacacttgtgtgtgtgtgtgtgtgtgtgtgtgtgtgtatttagatctgttcagttttatcacatgtagagttgtatgactaccgccatagtcaagacacagaacagtttcatcacaagcttccctggtgatacccttttatagccatggccagcacctttcctccttcttctccctgatcactgacaatcaatgtgttcttgatctctataattttgtcattacaaggtgctgtataaatggaatcatatrgtatgttaccttcagggatgggcttttttttcactcaacataatctcaacctggatggatctcatttccatacaagttgttgtgaatattaatggtccattccttttattgctgagtagcattctatggtatggatgtactacagattgcttcaccattcatccattgagagacatttgtgttgtttccagttttgggcaattaagaatgaagctgctataacattcatgtacatgtt

SEQ ID NO: 593128 - DNA, 606 bp, Homo sapiens
agttaatataacttgggacaaaagactaaatgtgtattttttgtttgttccgtgtacatgtgaactgcgtgtcctcctttttcatcactggaatagaaaataatgcatatcataatccttgagtcatattaatttgatctagcaacagataccatgtctaacatagcaggcatgatcagaaccacttggataagtttgtattgaagtctacagtcaatctccagaatccacctggtttcttcaggagccaaagcaattatttaaatggacctacaataggtaatacaatctgctatgytttattttgaaaaattaataaaactttattgtaacacctaatggaagacttcaattaatggaaaaacattgtgtgttcctgggtagaaggactagaaatataatatcatagttaattagatggactacagaggcaaacacctctttgaatcccagctcttctgctgattaacttcttgaacttgaaccaggattcatggaaatacaggaagacagagcataccatcaggcctcacaaaggcagaaggaagatttttcaggatccaatacagctgtggccaccagatcatctagagcagtgcttcccaa

SEQ ID NO: 593129 - DNA, 606 bp, Homo sapiens
agttaatataacttgggacaaaagactaaatgtgtattttttgtttgttccgtgtacatgtgaactgcgtgtcctcctttttcatcactggaatagaaaataatgcatatcataatccttgagtcatattaatttgatctagcaacagataccatgtctaacatagcaggcatgatcagaaccacttggataagtttgtattgaagtctacagtcaatctccagaatccacctggtttcttcaggagccaaagcaattatttaaatggacctacaataggtaatacaatctgctatgctttattttgaaaaattaataaaactttattgtaacacctaatggaagacttcaattaatggaaaaacattgtgtgttcctgggtagaaggactagaaatataatatcatagttaattagatggactacagaggcaaacacctctttgaatcccagctcttctgctgattaacttcttgaacttgaaccaggattcatggaaatacaggaagacagagcataccatcaggcctcacaaaggcagaaggaagattttycaggatccaatacagctgtggccaccagatcatctagagcagtgcttcccaa

SEQ ID NO: 593130 - DNA, 486 bp, Homo sapiens
ggatttatcggctgggaaattagctgatcctgcctcatattgattctcacctgccacccctcagttgacctcaggtacaaattgcacttgtccggagattaaccctaaaattatctgcccatgtttcagtggggaggacaagcctcgattctatcccgtaatagagttctgccagcccaatcctgttttcttggtgggaattctcaggactcgcgtatgctactgttagcattttatgagctctgaaggtttcagacaggtagggaaccacactttatcaattcagcaaggaagggtttataatgtrtggtataggcattatcatattgtgtcacttgagccaattcataagtatagatatttatagtttatctatataaatagtttttggtgctgatttgtcttgctagcattccaactttatctctgaaaaccttcaaacactatctgtacctctttgatgtaataaagactttccatggtggc

SEQ ID NO: 593131 - DNA, 586 bp, Homo sapiens
atgagtaattacattagatgtaactagacaatatatactgcattccaactaaaaagctgtgtgtgtttgtgtgctggcctgatggcacatgctgtggtcctggctatttgagaggctgaggtggggggattgtttgagcccaggagttttgatacctgcctgggcaacgcagtgaatcccccggtctcaaaaaaaacaaacaaaaaaaaaaaacaaaaaaaaaaaaacaaagactttaggtgtacagaagagaaaaaatagaagactgaatttgaaaaattaaaaacccaaaacccagctatgtgctgtttgtaatatactttaaatattaatatgcagactttttgaaagtaaaagaatggaaaataatataccatgcaaaaactgacaaaaataaagctggctttacaacataaaaatcaggaaattatgtggaagtatctacraaagctaaacatatatatatccttggatcttgcaatttcactcatagctacatattcaagaaaaatgagtgtatacgtccatccaccaaaagacacatacaagaaagttcttagcagatttatttataataacaaagctt

SEQ ID NO: 593132 - DNA, 577 bp, Homo sapiens
cattttttcaacgctttcttttagatacttacatttttggtaataaataccatattttgaaaagaagattactttttaaaagatgtaatcatatcatgcctgaatgtcaatttcaacagggtagccatgcctggctatgcaagttatctttacacaattgcaggcatgttattccaatagactgcaatagaaatgtcacctctgtggccactcggaccttttagagaaattcaagtttaaggaaaacaacctctcaatgctttttatttttattttttggaagatgttagttacctattaatatttgcataatggagaggctgaagctgagctgtgcactctactatagcacaggtggaaaggagtaattaacatcaacaattcaaactactctaggaatctaaaactgaacaaagaactttctagcaagtcagttggaaatgttttataaattagttggtcattaaaataackcctgtgttacctattaaacataaaagattattcgagataatcccaaacacacttcatagcaaggctcagcgtgagaagagggaaaatgatctagtatttagtg

SEQ ID NO: 593133 - DNA, 506 bp, Homo sapiens
tggtagacatccccatgccctgactcaccacagccaatgcaaagaaggaagtattattttcctttaattgatagggacaatccctcatcctaagcccctttcctcattcatcctcagcctagttatatttcatcctctctcactgagtaagcacacagtgtaccttcagtgtggattctatattgtttcaagaaaaggtcatattctgatttttatcttgatttcttttgggctaattttaagcacatttcttttaacacatgttggctttattaagtgcaaacatayattaaaatatcaaaaggaagaattattgtgcacatattcaaaagggtcccccagtcatccaatactgtgtggtcattttctttcagagctcagcaaaactcttgttttcctttgatttccaaacgtgagtgtccttcgctttttggcctgcatgtactacaaggcagcgcaacgtgcatctgttctcttggaagaaaatatcagtttgctgtcatctc

SEQ ID NO: 593134 - DNA, 304 bp, Homo sapiens
ccctttccttcaccctttctagcctctagtatcctctgttctactttttacttctgtgagatcaacttttcctagcttccacaaattaacgagaatgtgtggtggttaacgttctsttcctatcttattttatttaggataatgttctccagtttcatccatgttgccacaagatttcattctttttaatggctgaataatattccattgtgtatacatactacatttttttttttattttttgttgttggacacctaggcagtttccatatcttggctattggagcagtgctgcaataaacat

SEQ ID NO: 593135 - DNA, 304 bp, Homo sapiens
ccctttccttcaccctttctagcctctagtatcctctgttctactttttacttctgtgagatcaacttttcctagcttccacaaattaacgagaatgtgtggtggttaacgttctgttcctatcttattttatttagsataatgttctccagtttcatccatgttgccacaagatttcattctttttaatggctgaataatattccattgtgtatacatactacatttttttttttattttttgttgttggacacctaggcagtttccatatcttggctattggagcagtgctgcaataaacat

SEQ ID NO: 593136 - DNA, 554 bp, Homo sapiens
ggcaattcataaatcgacaactgcaggaagtctctgtcacctctagggctagagggacagcgagagaagatggtgttattagcatcaaggagctcaggctataaaacagagctggaacctgggagaagtggccacctgagaggcctgttgatgggcatggtgggagggtcatacggcagaactagaactctggagaagggaatcgctccaggagagttggagcctcagtgaggrctgcctgtctgagttggagccacagggacaggttcgcctggagagagtgcttctcagtaggaaatggaagctcaaaggaattattagctattgccagacactgattgagaaaaagagatgggaggaaatacttactctctcctccctttcagcccactaatatttatatttgtatttttatttcttgttcctttgtgtatgacgtgaggtagaatactgattttatttttctctatatagtgggaaatattcccagcctctttggctaaattatccatcatttcttcaataatttataataccacatcaccgtagttcat

SEQ ID NO: 593137 - DNA, 554 bp, Homo sapiens
ggcaattcataaatcgacaactgcaggaagtctctgtcacctctagggctagagggacagcgagagaagatggtgttattagcatcaaggagctcaggctataaaacagagctggaacctgggagaagtggccacctgagaggcctgttgatgggcatggtgggagggtcatacggcagaactagaactctggagaagggaatcgctccaggagagttggagcctcagtgaggactgcctgtctgagttggagccacagggacaggttcgcctggagagagtgcttctcagtaggaaatggaagctcaaaggaattaytagctattgccagacactgattgagaaaaagagatgggaggaaatacttactctctcctccctttcagcccactaatatttatatttgtatttttatttcttgttcctttgtgtatgacgtgaggtagaatactgattttatttttctctatatagtgggaaatattcccagcctctttggctaaattatccatcatttcttcaataatttataataccacatcaccgtagttcat

SEQ ID NO: 593138 - DNA, 554 bp, Homo sapiens
ggcaattcataaatcgacaactgcaggaagtctctgtcacctctagggctagagggacagcgagagaagatggtgttattagcatcaaggagctcaggctataaaacagagctggaacctgggagaagtggccacctgagaggcctgttgatgggcatggtgggagggtcatacggcagaactagaactctggagaagggaatcgctccaggagagttggagcctcagtgaggactgcctgtctgagttggagccacagggacaggttcgcctggagagagtgcttctcagtaggaaatggaagctcaaaggaattattagctattgccagacactgattgagaaaaagagatgggargaaatacttactctctcctccctttcagcccactaatatttatatttgtatttttatttcttgttcctttgtgtatgacgtgaggtagaatactgattttatttttctctatatagtgggaaatattcccagcctctttggctaaattatccatcatttcttcaataatttataataccacatcaccgtagttcat

SEQ ID NO: 593139 - DNA, 554 bp, Homo sapiens
ggcaattcataaatcgacaactgcaggaagtctctgtcacctctagggctagagggacagcgagagaagatggtgttattagcatcaaggagctcaggctataaaacagagctggaacctgggagaagtggccacctgagaggcctgttgatgggcatggtgggagggtcatacggcagaactagaactctggagaagggaatcgctccaggagagttggagcctcagtgaggactgcctgtctgagttggagccacagggacaggttcgcctggagagagtgcttctcagtaggaaatggaagctcaaaggaattattagctattgccagacactgattgagaaaaagagatgggaggaaatacttactctctcctccctttcagcccactaatatttatatttgtatttttatttcttgttcctttgtgtatgacgtgaggtagaatactgattttatttttctctatatagtgggaaatattcccagcctctttggctaaattatccatcatttctycaataatttataataccacatcaccgtagttcat

SEQ ID NO: 593140 - DNA, 568 bp, Homo sapiens
ccccctgtctgggccactcttggacaaacctgagcctctgtccccctgccagtgtatcacaagctcttcgatgcttcggattcctccagctacaagcacaatggaacagaactcaccctccgctattcaacagggacagtcagtggctttctcagccaggacatcatcaccgtragttgggccgccctaggtcatctgccccggaccccttctgtccccaggcctctcctgaccctccagggcccacacctgcggggaggtacactgcagcccacttggagcctggggagctgaggaacaccctactctgccacatctggctgttgctgcaaagcagcagtacctatgggggagcaagcctgggctacgggctcaccgttgggtggtttgtggatgtttttgcatctaacttgcatgtagggcttgtcctgagccccgtggctgcagtcaagtaactcgtccaagttcaccagctctgactgggctacaccctagactgaaatccagggtcagagtcaggctgagttttagggtcaggcataggttttaaggtcacagttgaggttga

SEQ ID NO: 593141 - DNA, 568 bp, Homo sapiens
ccccctgtctgggccactcttggacaaacctgagcctctgtccccctgccagtgtatcacaagctcttcgatgcttcggattcctccagctacaagcacaatggaacagaactcaccctccgctattcaacagggacagtcagtggctttctcagccaggacatcatcaccgtaagttgggccgccctaggtcatctgccccggaccccttctgtccccaggcctctcctgaccctccagggcccacacctgcggggaggtacactgcagcccacttggagcctggggagctgaggaacaccctrctctgccacatctggctgttgctgcaaagcagcagtacctatgggggagcaagcctgggctacgggctcaccgttgggtggtttgtggatgtttttgcatctaacttgcatgtagggcttgtcctgagccccgtggctgcagtcaagtaactcgtccaagttcaccagctctgactgggctacaccctagactgaaatccagggtcagagtcaggctgagttttagggtcaggcataggttttaaggtcacagttgaggttga

SEQ ID NO: 593142 - DNA, 623 bp, Homo sapiens
tccccactgaaaacacttcagtgacttcctgcatccttaggataaattgcaagctccttacaagaccccatcacccggctcccaccagttcatgttctgatcataatgaattttatgtcatgctctctcctgttaaactggatgctctgtttaggacacattttcctcctctctgtccagactcctctaagtcctcttcagttctcaacttagacatcatttcctcagggagctggtccctggccccattctgagttcagtccytctgttgaagacgacactgtaattccgctatcatagccccgacctgcttcatgttgggacatgaagtcagagactgcacatccatctggttggccactctgcacccagcaccttgcctgctgcctggcacacaccagggcacagtgaatacaaaagtgaacaaggggcaagtccagggagactgagtggaggtggagttgaggggctccagtactatctaatctccccttgcaaaaactgggggtggaaagtccatggggagagagatctggagcaggcttagggcggtgggagtctgaattgccctcatttccctttctgctcagccctggtggggaaggtgctgggaaggggagcca

SEQ ID NO: 593143 - DNA, 605 bp, Homo sapiens
agacagaaggaagctgggtgtgaggaagaaagccaggtgggcctgctgggggtgctgacatcatgagaaaagtttttcagtggctctaggcctatctaagtctgagcagatcaaccccaacccagactgattagtattattatttcttttgcttctttttaaaatttttaatatttatttattttgagacagggtctggatctgtcacccaggctggagtgcaatggcatgatcttggctcactgcaacctctgcctcccgggctctgatgatcctcccactcagcytccagaatagctgggattataggtgcacgccaccacacctggctaatatttgtattttttgtagagacagggtttcaccatgttgcccaggctaatcttgaactcctgagctcaagcaatccgcctgccatggcctcccaaagtactgggattacaggcatgagccaccgtgcccagcctattttttttttaacttcaactacattttttttcttcttagatcagactagagaaacccttccacaaacatgcttgtttggagttttgtttttaccgttctatattgttaagtatattcacattgctgtgcaaatgaat

SEQ ID NO: 593144 - DNA, 552 bp, Homo sapiens
gcgcagcagctgcctgtgtaatgcttgggactacgggactagtggactgacggcccaactaacgaggccagatactgactggctgtttctgagcccaacagagttggagagcgacagcgagagagagaaagtgtgtgtgtgtgtgtgtgtgtgtgtgcacgcatgtgtgcatgtgtctgtgcatgtttgtatgtatacaaaygcatttttttttttttgagacagagtctcactctgtcacctaggctggagtgcaagggcacgatctcggctcactgcaacctccgcctcccaggttcaagtgattctcctgcctcagcctcccgagtagctggaattacaggcacacgccaccacccccaactaatatttgtatttttagtagatatggggttttgccatgttggccaagctggtctccaacttctgacctcaggtgatctgcccgcctcagcctcccaaagtgctggaattacaggcgtaagccaccacgcccagcctacaaatgcatttttataattagttaccaatacttaaaaatcaagagataac

SEQ ID NO: 593145 - DNA, 528 bp, Homo sapiens
agtgggcctacccttgcgcagcagctgcctgtgtaatgcttgggactacgggactagtggactgacggcccaactaacgaggccagatactgactggctgtttctgagcccaacagagttggagagcgacagcgagagagagaaagtgtgtgtgtgtgtgtgtgtgtgtgtgcacgcatgtgtgcatgtgtctgtgcatgtttgtatgtatacaaatgcatttttttttttttgagacagagtctcactctgtcacctaggctggagtgcaagggcacratctcggctcactgcaacctccgcctcccaggttcaagtgattctcctgcctcagcctcccgagtagctggaattacaggcacacgccaccacccccaactaatatttgtatttttagtagatatggggttttgccatgttggccaagctggtctccaacttctgacctcaggtgatctgcccgcctcagcctcccaaagtgctggaattacaggcgtaagccaccacgcccagcctacaaatgcattt

SEQ ID NO: 593146 - DNA, 477 bp, Homo sapiens
agagacatactcaaaatggggatagagttaattattatcttgtcatcttggaagaggraagacacatccttcacctcaaacctcttctgcaccctactcccatgaacatttggaacacgggtgatagccaaacccagcagggagcgtgaaggaatgagactcactattgcctttttttggaggagggaaggcaagacaccacgctttcctccaggcctccatcctttcctcggcactcagggtgtgttggggagtcaggcgtctaaaggcttggaggactctcaggttgctggtcagagtgcttaagggaaaactcagggaaccctgtcttatcagggaaaggcaatgtcaggatgggtggtctatctcctttcctgggaagagcagtgaaggaagcagcaagctgtcagtcagagcaaggtgggggcagggtccccaaaggcacatggggacaagaggggtcttgggaagtagcag

SEQ ID NO: 593147 - DNA, 567 bp, Homo sapiens
tcgctatgttgcccaggctgatcttgaactcctggattcaagtgatcctcctgccccccaaattgttgggatcacaagggctagccactacacccagccgttttttttttctgttttttaaagaaatcattttgtgaaccaattaaatcagatttgtaatgccttaatagagaaaaattaccttttaaaaaaattcaaaaagaaacaaacaggccttccagtttgctaaatgtctgactctggatatgaaattgagaagatgacaacagctagaatatacaaaccattgaattacagcattaccaaatatttttaataaagtcgacattccctttcccttcctaaaaatttctgaatgcttatctactttttttctgaataaatatagtttttggaaatgtagtatcctgaaagatcaacttttatttgcatatcacagaagatacaagaactagacactttttgcagagcacgatgctaaaaacccatgcttgctcaactatttcaaaaacagatacttacgtaatgccttatsgttttaagcactttcatgtaaactcttatttg

SEQ ID NO: 593148 - DNA, 574 bp, Homo sapiens
caaatagaatggaatcactatcaccttctctgttccrctcaaagtgcttctactcacatggtgtaaatttgcattaactgatttggcatatatgttataaaatggacttatcaaacttatggtcaaagcctgcatcacttatatattttgctgttgcccagcttgctcttctctggtaccccacggcacttcttccagccatgtatgcaaccctgaactccaatttgctgccaaccctcagcaagcccattatttcactttattgacctccctgatcatatctaaaaaatgctccttgcgtttatcagagagctgtagtgtctgcggagatctcctttcgttgttccccctctcataaggatcacaccgtgggctacctgttatttaatacatgaaaagaaatatttttgtctaatttaggcaggcttatgattgtttagggcagttgtttggggataagaaggatactagttactcacttatggccagaggtaaaatacccctccagaaagatattttaatgtttaaaaataatttgtcgttaataaaggtaaaagtgtcattttaataaaaa

SEQ ID NO: 593149 - DNA, 574 bp, Homo sapiens
caaatagaatggaatcactatcaccttctctgttccgctcaaagtgcttctactcacatggtgtaaatttgcattaactgatttggcatatatgttataaaatggacttatcaaacttatgrtcaaagcctgcatcacttatatattttgctgttgcccagcttgctcttctctggtaccccacggcacttcttccagccatgtatgcaaccctgaactccaatttgctgccaaccctcagcaagcccattatttcactttattgacctccctgatcatatctaaaaaatgctccttgcgtttatcagagagctgtagtgtctgcggagatctcctttcgttgttccccctctcataaggatcacaccgtgggctacctgttatttaatacatgaaaagaaatatttttgtctaatttaggcaggcttatgattgtttagggcagttgtttggggataagaaggatactagttactcacttatggccagaggtaaaatacccctccagaaagatattttaatgtttaaaaataatttgtcgttaataaaggtaaaagtgtcattttaataaaaa

SEQ ID NO: 593150 - DNA, 573 bp, Homo sapiens
gagttcatgtaaattttaaagataatcaaactttcatggttgcattttatcacttttagtcctgcctccagacatctggaattcacagccttgggccactgagaatgcactgaatcatgggattaattccaaactagggcagcattcttggaccttcaaaatctacttaactatacattgtcctcacacactgcctttagtgtcagccagaccagcttgtccagttcttcccaatatatataatgtcatctttttgcttggtaatgtctctacatggaatatttcccttttccttttcttcctttcttttttttttttttttttcttgagcctcgctctgtcacccagtctggagtgcagtggtgtgatcctggctcactgcaacctccatctcccagatttgagtgattctcatgccttagcctccygagtagctggcattacagacgtgcaccaccccaccccctgcgaatttttgtatttttaatagagacggggtttcaccatgttggccaggctggtctcaaactcctgacctcaggtcatccacccaccttggcctctgaaagtgct

SEQ ID NO: 593151 - DNA, 504 bp, Homo sapiens
agagcatacatacttttcaaactacaatggagaggaagaatatatacttgtcagtttgacaattctcttgaggtttcaaaaatgttcttctggcttaggaaaatatcgataaataaatggacaattttgatgatataacaattaataatataattactataagactaatcagtatgctctaatatatatatatttcaagtattaccrtaattcaaacagagttgttaaccagcagatgtggtaggagcaattgttaaaatccagagaaagggaaatgcaaggcaatggttgtgaaagaagaatcatatcccatttagaagccataagagaatctgtgatttctttttgctaatatttgttatctccataatgcattgatcacttcccagaatatatttaattagtgaacacttcttgagcaaatacttggaaagcacagagtataaataaataaatctagtcttttaggggcatggatataatatcattggcacacattaggaa

SEQ ID NO: 593152 - DNA, 504 bp, Homo sapiens
agagcatacatacttttcaaactacaatggagaggaagaatatatacttgtcagtttgacaattctcttgaggtttcaaaaatgttcttctggcttaggaaaatatcgataaataaatggacaattttgatgatataacaattaataatataattactataagactaatcagtatgctctaatatatatatatttcaagtattaccataattcaaacagagttgttaaccagcagatgtggtaggagcaattgttaaaatccagagaaagggaaatgcaaggcaatggttrtgaaagaagaatcatatcccatttagaagccataagagaatctgtgatttctttttgctaatatttgttatctccataatgcattgatcacttcccagaatatatttaattagtgaacacttcttgagcaaatacttggaaagcacagagtataaataaataaatctagtcttttaggggcatggatataatatcattggcacacattaggaa

SEQ ID NO: 593153 - DNA, 466 bp, Homo sapiens
ataataatgataaaaattatgaaatccaagtggggagtttgaagaatgtatacgttgttgattgtgcaggctacttcaaaaaagtcaaatcaaataataattggaggaaaccaaaatcaataactggttttactttttggagattgctggtatacttcgagattgcagatttaatacagtaatatgagtgagaaaatagaatcagcaggtgtagcttmtttatttcagaacagcattccagacatttatgttccagagttgttattcagtgagatacacacacacatacacacacacacacataccccatacaagtattttgtggtgaaaatgagtttaagaaacacagaatcaagcaggtttctctattataggacttttccaacctgctaatatactaataaccatggtgactttggaggacaatgatggtatgcaatgtttcccaaatgcactagaatatagg

SEQ ID NO: 593154 - DNA, 585 bp, Homo sapiens
aacatgtagctgagaggtgcaggacagtcagagggccaaaacttcccctgccaggctgaggctgggccctcccgagctcacctgtccgcgttcaggtaactggctaagtgcccgcccggccgcgttccagracacctggccgggacagagcgaatgccagtgaatcccagggcgccctctcccgcgcgttggttctctagccctccttccctgggaggggtgggattgggagtgttctgttttcattactgcaccccttcccctaaagacaacgggactgccctcctccacagcgccttacctcaaacaggggaccgatcttgttcttctccaggtaagcctggatccgggtttgcggatgagacgccatggggaacagatgggaccgcgaagagagtgcagggagaacgcgcggctgtgcgcctccgctggggacaaccctccttttacccggactggggccgggacaggagctccggagcctcggctgccctgcgtggctggctcggcccggccgcgggcgtgggtggcagcccggggagccacgcgcgtggggcgctgagagccggaagcctgggcgcagcg

SEQ ID NO: 593155 - DNA, 543 bp, Homo sapiens
acatggacaagttattataaaatttagtgatgcatggtggcgtgagcctgtaatcccagttacttaggatgctgaactgggaggatcatcggagccccaaagtttgagagcagcctgggcaacataacaagactcaattgctaaaaaaaaaaggagaaaatttgtatggcaaaatatagactcaacaatagctaarataatcttgaaaaataataaaatgggcaaagtccctatcctggatataaagtcttactatatagctatggtaaacaagacagagtgatattgttgaaggaatagacccatagatcaatagaacagaaaggagaacccagaaataaatccatacaaatatgcacaactgagttttggcaaaattgcacaaacagttcaatggaggaaggatttaaaaaagaactttgaccaaaacttcacactttatacaaaagtcaactcaaaataggtcatgaatttaagtataaaatataagagtatcttgggaaaaagggagaaaatcctcagaatctagagcaagacaaagaa

SEQ ID NO: 593156 - DNA, 596 bp, Homo sapiens
aaatacctacatggaagacctcctggtaaaaaggatcatggcagagtcctacaggtgtggatccacagcaaaaaatgtccctttttcttttttttcttttgagacggagtctcactctgtcgcccaggctggagtgtagtggcgcgatctcggctcactgcaacctctgcctcccgggttcaagtgattctcctgcctcagcctcccgagtagctggaattacaggtgcccgccaccacacccagctaatattttgtattttcagtagagacaggatttcaccacgttggccaggctggtcttgaactcctgaacttgcgactcgcccgccttggcctccaaaagtgctgggattacaggcatgagccaccgtgcccggccaagagttaaaaatcttaagcctataaattccaaacctcaaatctaamcctatatatgcaatctctaatatatgatacctatagatcccaaacaatcctttgcttttcattatgaaaaataacataaaaaatccaagactgggatgggtgtggtggctcacatatgtaatcccagcactttgggaggctaaggcaggaagatcgcttgaagccagg

SEQ ID NO: 593157 - DNA, 628 bp, Homo sapiens
atataatttctggcttagtacctggtagagaaaaatttatctttgtgaaagattagttttatggaggggattaactccagttttctttagtggttgtcagagatcttggagctgtggatccttatctaaaagaaaaaaaagtgtagcagttcagatctgtgtaaggaaaatttgtgaaagtctgaaacctaacaaaaggattactgaatakcttcagtggaacccaggtgctggctagagcaattttcttggttactactctgtagtctgtagctttcattgtttttgatgtattttacaaccttgtaagttgtgaataacaataatacaaattattcttgcccttttacatgcaaaggatgtttgttggaagtacaatggttttctttttctcttttgtggaagaagccagttttttatctgttaagcaaattcatttcagtatttcccattgcctaagtatgtgtctgctctttggattctcatttgaaccaattggaacatcttatttgttccctaattagagttatagatagaggtgttgattttatatttgcatgagagacacagtgccacctttttgtttgtttctttcagttatcctttaacagattgaactccaaattta

SEQ ID NO: 593158 - DNA, 628 bp, Homo sapiens
atataatttctggcttagtacctggtagagaaaaatttatctttgtgaaagattagttttatggaggggattaactccagttttctttagtggttgtcagagatcttggagctgtggatccttatctaaaagaaaaaaaagtgtagcagttcagatctgtgtaaggaaaatttgtgaaagtctgaaacctaacaaaaggattactgaatagcttcagtggaacccaggtgctggctagagcaattttcttggttactactctgtagtctgtagctttcattgtttttgatgtattttacaaccttgtaagttgtgaataacaataatacaaattattcttgcccttttacatgcaaaggatgtttgttggaagtacaatggttttctttttctcttttgtggaagaagccagttttttatctgttaagsaaattcatttcagtatttcccattgcctaagtatgtgtctgctctttggattctcatttgaaccaattggaacatcttatttgttccctaattagagttatagatagaggtgttgattttatatttgcatgagagacacagtgccacctttttgtttgtttctttcagttatcctttaacagattgaactccaaattta

SEQ ID NO: 593159 - DNA, 601 bp, Homo sapiens
ggctgactgcagaccaggaagagaattagctagtcctttgatcttgaacttcccagcatccacaactgtgagaaagtaaatttcttttgtttagcgacgcaaaaacacaaatttttgttatggtagccccagctaattaatacaggatctaaatctgcatttggcatcctaggaccatgcaggccaaggctaaactgatttgaaaggacaatccatagaagaatatatcaagttgctaatggatttcataaaagcgcctctctgcctagtttgattgtaggccttgcataatgtatgttttctacaacaggataccagggagtcacaactcagacaggggaacttatacatagtttgaagaggaaagcattagataagataagctgaggaaacagagaatcagaatcagagggtttaaaaagcgaacaaaaaggaattttctgtttcaaagattttggggagacaaaacgatgtgtggtgattctatatgaccaataatgtataccactgggaaaatactgggattgggmagatgctctgcaatctttgctactctcacagcatgtttacattataatatgactattaagtcatatattct

SEQ ID NO: 593160 - DNA, 587 bp, Homo sapiens
cagcagtgctgctgcatcagagaacaggtgggtctaaatgctatctgtttcagataaagtgatgagaatgtgcaccagaatcactcccacagagagtcacaaaacaggcatttcccatgactctcaaccacattgcagccaagagacagactacagtatttttctgactaggagtcatgagcccggaaacaggggtgtgatagggaaacagatcatattcctgcctatctaagacagagcaggtgcagtccagtcaaacttccccccagagacttcaaggcactttaccaggagctcttcccaaccaccctcatcaggacaggtgtctttacttgacattaggatatttgtgcacaagccaggaaccccagctctgcccaactgtgtcccctcaaccccatggaacaggaagctcaggacaccaggcacaccactgttcagttcttcccttgaaataacagagagcacctcacagtaaacaaaaaacagactcatacccatctgcttgtgcagcagctggctcttacctgcaaacaccatctactggcctgtgggtcaaactkcaaagaccaatacgaaacctactg

SEQ ID NO: 593161 - DNA, 648 bp, Homo sapiens
ctaatagtctcagttaaaacttgtgacctttgagtctatctcacttacatattacctgtatatatttctgggttagagagttcattttccccttgtgttcagacttaggcctctgtgccattaattcaaatagcagaattaatgaattaattaaacattcgaatttaaaaagtgaataaataaggtttctcaggtcataggtccaagttaatatccattaacagtaaaaagatgggcagagggggccaagatggcctattagaagcagctgcagttggtggcgcccaccaagaagagcaaaaatggtgagtggatcctgtgccttcaactgaggtatccaggttctctcattgggactgactaggcggttggcatgatccactgagagtaagaaaaagcaagatggaacgagggcccacccaggagttgcatggagtaaggggagcccccactcccagccaagggagggagtgagtgattgtggtaccctgcctgagaaaccacgctctttccacggatctgtgcaacccatggatcaagagatccctygtgagcccacaccaccagggccttgggacccaagcacagagctgtgcaagctcttggtggctgcccaggttgcagccagtggcagcaggacagagactg

SEQ ID NO: 593162 - DNA, 542 bp, Homo sapiens
taccctagttttttttctctgtctcttactacttttttgatgccagagatatccaattgtatatttggaacactttaactactacactggaagttattgtgttaaattaattcacattattcaagccagtytctcaggcaaaacaagtgtgtgtgtgtgtgtgtgtgtgtgtgtgtgtgtgtatcactttgtagatatagtgatttctaaatatttttcattcttcatcaatattttaaaataattttatttccaaaccactctaatacaaatgaaggcaaggctaaaaatagtaattttaaaaagtctcctcttgcaactactgttatttgactaaatagagcctgggttagggaagcaatattctgtcactaactttgttttcctgggttaggcatctaagctctctgattttcagcttcctaacctgaaagataaagtatcttgtttcagtgggagtattaaatgaggcaagatagcaaacatgaaaaatatataaatgtaaaatatatatataaaaatataaatgttcttatgtaggt

SEQ ID NO: 593163 - DNA, 542 bp, Homo sapiens
taccctagttttttttctctgtctcttactacttttttgatgccagagatatccaattgtatatttggaacactttaactactacactggaagttattgtgttaaattaattcacattattcaagccagtctytcaggcaaaacaagtgtgtgtgtgtgtgtgtgtgtgtgtgtgtgtgtgtatcactttgtagatatagtgatttctaaatatttttcattcttcatcaatattttaaaataattttatttccaaaccactctaatacaaatgaaggcaaggctaaaaatagtaattttaaaaagtctcctcttgcaactactgttatttgactaaatagagcctgggttagggaagcaatattctgtcactaactttgttttcctgggttaggcatctaagctctctgattttcagcttcctaacctgaaagataaagtatcttgtttcagtgggagtattaaatgaggcaagatagcaaacatgaaaaatatataaatgtaaaatatatatataaaaatataaatgttcttatgtaggt

SEQ ID NO: 593164 - DNA, 604 bp, Homo sapiens
tggcttgaaaaaaatacaaagataactgaacaaaaatgtttttttaaattttaaatagtaaacatttgattttctctggtgcgctattggttattttactaaagaggcagcatcttcaatgctgtagttcatttctattcttgatgaggaccctggtgtttaggattttgctgatttgggatataggttatctttaaaacaatagtcagccttcagcatcttatttacactgagaaggacccagctgtgtctttttcttatattcttgtccacgaaatatgatgataagtttaagcaactttctattgttgatgatattcacttatttaatttttttatttttaattttgtgggtacttagtaggtatatacatttatgaggcacatgagatgttttgatacaggcatgcaatgtgaaataagcacatcatggagaatggggtatccatcctttcaagcatttatcctttgagttgcaaacaatccaattaccttctttwagttgttttaaaatgtacaattaaattattactgactgtagtcaccctgttgtgctatcacatagtaggtcttattcattctttcaaactataaaaagcttttc

SEQ ID NO: 593165 - DNA, 531 bp, Homo sapiens
attaaaaaataaataggacattgtatgattatatactaacttaacgttgagctgataaatmcaatatacagataaatttttataatcataatcatcttcttttatttatatcctgctcctactgagatgaatctctggttacatttacatattgaattacaaagttaaaactaatgatgggatcaattatgccccatactgagctgtgcactttggaatgactttgagaaaacaggagggtcaaaaaaaaaaaaaaaaagcatacacaggcacagtggtttcaagattatgctaacagataagcaaaggaagaactgtaatggacaataatttgtgtttgtcaaagaaatcagggttctttggtgtaaaacctaaagtacatttttaatataaacatttctgagaattataaaatgtatagaatgggtcacagaagctgctagatggtttatttagggttcatatataaggacaaatgtattatgaattcctttatgactctgtttatttgttcttataatttctttattg

SEQ ID NO: 593166 - DNA, 522 bp, Homo sapiens
gtggcagtagaccctggttggtccactcctctggctcctaaatggtgtgcaaaggtgcgcagcagccccactattggagaggtcagttttttgggcttgaagtggtagcaattcctgaggaggatggcctcgggctcctggatggcacacattggggcactggcagtggaccccagttaaactggtttgcaggttattgacattgcacatggacatgtggtggccccactgctagagggggagaggtcactgttggtgacggcagataagacaggtggctctcaagctttggtgtgcacatgcttcagctacctgtgtcctggaggcagacttcytaagggtttagatcacctattttctggagtacagggagctacatgggctcagatgctgggaacacagttgtaccaccagttccagttggtttcatgagactgtagccttctcagtggatgtaggggaatatcagtggaatactatggatgtggagatacaggggctatttggcccaagtcagaatgt

SEQ ID NO: 593167 - DNA, 573 bp, Homo sapiens
gaaagaagtatgctccaaattttgttcacatgagtatagcttactcaattattaaagactgtaaatagctcaaaataaaagttttcttgactctgaataacaaaacaaggaccagcaatgtttcaagcaaaaggttttaaaaaaagattacttcagttttctattagttcagtccattcagttaactcatgctctgcttgatattcgtgaatgtttcagctctttcatgagtcctgtacgttttccctttagtccartgttagagtctccaaagttatcagaaacttgtattggagaacacccatcaaacttttatagctgattattaaccatcttttgaaggggatcaaaagaagacaattgtttatgaataacaaaatgaccagggtagttacagtcagaaatgtgattgacaaaatgtggttatctctgtggcttacaataacttaatataacaaccttaattgtgattgatagcatacactcaaacattagaattttagaaatcccataaaattctggaacatatgttagcattattcactaaaatataacctgaagaaaattaaacat

SEQ ID NO: 593168 - DNA, 573 bp, Homo sapiens
gaaagaagtatgctccaaattttgttcacatgagtatagcttactcaattattaaagactgtaaatagctcaaaataaaagttttcttgactctgaataacaaaacaaggaccagcaatgtttcaagcaaaaggttttaaaaaaagattacttcagttttctattagttcagtccattcagttaactcatgctctgcttgatattcgtgaatgtttcagctctttcatgagtcctgtacgttttccctttagtccagtgttasagtctccaaagttatcagaaacttgtattggagaacacccatcaaacttttatagctgattattaaccatcttttgaaggggatcaaaagaagacaattgtttatgaataacaaaatgaccagggtagttacagtcagaaatgtgattgacaaaatgtggttatctctgtggcttacaataacttaatataacaaccttaattgtgattgatagcatacactcaaacattagaattttagaaatcccataaaattctggaacatatgttagcattattcactaaaatataacctgaagaaaattaaacat

SEQ ID NO: 593169 - DNA, 563 bp, Homo sapiens
gtctcactatgttgctcaggctggtcttgaactcctggcctcacagccctcttgccttgggctcccaaagtgctggaattataggcgtgaaacactgcacccagcctcaattttgttttaacagatcctagagcgagaaagcaagtagcattgtgatagagtagctgaataggaagcagttcctaaaatctgaagaaaaggaggtgtgggaagggtcaggtaacaggaactgtggtcttcttgagatgagctttgasgtcagggagccaggcggctaaatgtcctgagactactccatcccaccttttgcatctccttgaaatgtcttctttcacacactctccctgaaagaggagggcaagggagccaggacagaaagtgaggtggagaacagtagagctctggagggacaagcaggagataagcagcacaaccaaccacaccagataacacatgaagtaggagaacccatcttccactacataggcaaggtgctacgggaaatggacaccttggaaatgggtttacacagattatgacacaattctttattgttctgaaac

SEQ ID NO: 593170 - DNA, 563 bp, Homo sapiens
gtctcactatgttgctcaggctggtcttgaactcctggcctcacagccctcttgccttgggctcccaaagtgctggaattataggcgtgaaacactgcacccagcctcaattttgttttaacagatcctagagcgagaaagcaagtagcattgtgatagagtagctgaataggaagcagttcctaaaatctgaagaaaaggaggtgtgggaagggtcaggtaacaggaactgtggtcttcttgagatgagctttgaggtcagggagccaggcggytaaatgtcctgagactactccatcccaccttttgcatctccttgaaatgtcttctttcacacactctccctgaaagaggagggcaagggagccaggacagaaagtgaggtggagaacagtagagctctggagggacaagcaggagataagcagcacaaccaaccacaccagataacacatgaagtaggagaacccatcttccactacataggcaaggtgctacgggaaatggacaccttggaaatgggtttacacagattatgacacaattctttattgttctgaaac

SEQ ID NO: 593171 - DNA, 529 bp, Homo sapiens
atgcctcagcctcctgagtagctgggattacaggcctgtgccactatgcccggctaagttttgtatttttagtagagacgggattttgccttgttggccagtctggtctcaaacttctggcctcaagtgatcttcctgccttggcatcccaaagtgctgggattataggcacgagccactgtgcccagccaaacattgttgacttaaatcaacaatgcttattgctgatttctattaaagggtggaaattactgcaatgtccaccattaagtttctgataaataaattaaaaaacctttgtatatactggaatagagtaaaccatacaacaaaacagaactctgtctatatcaggaaaccttgtttaattttagggaaaatgatatacatttgaatactaaagtgcaataatcctcaagatagagcaagtgaagagattatggcacagagccattctttgattctgtttgcttctcraatatttcaaatatttgttttatgaatatataatatttccttttgaaacatg

SEQ ID NO: 593172 - DNA, 613 bp, Homo sapiens
attcttactaccctatggccggttttttttttttccttttttttttctttgttgttgttgttgaggtggagcttcacccttgttgcccaggctggagtgcaatggcataatcttggctcaccacaacctctgcttcccaaattcaagtgattctcctgtctcagcctcctgagttgctgggattacaggcatgtgccaccacccctggctaattttgtatttttcatagagatggggtttctctatgttgatcaggctggtctcaaacttccatcctcaggtgatcaacctgccttgtcctcccaaagtcctgagattacaggcataggcatgagcaccacacctggcctctcctaygggctttgaatgcctctggtgataccttgtgttgagggtaggggttggcttgcagaggatgtttctctgatgatgatttcatcctcaaccttaagttttccttttgtgctatgcctcagaaacagcatgtctcttgcaatatctcttgcaaataatatgtatcttgacagcagttagcctgatgctggggggtaggtgagaatacttttttatctggttggcagtcttaggcaagctctctgcctctgggtcccag

SEQ ID NO: 593173 - DNA, 600 bp, Homo sapiens
ttctcattcataagtgggggtaaacattgggtactcatagacttatgagtatgagactcacgccatagatggcaacagtggacactgaggcttactagagggtgagggagggaggggttgagggcagaaaatctacctattgagtattatgcttggtacctgggtgatgggatcattcacacccccaaacctcagtatcatggcagtattcctgcacatgtacgccctgaatctaaaagttgaaattacaaataaaaattaaatacacatattaaatcaaagcttactaaattaaaaaatataattaatataccctgtattctctagttagaattacaaatttccaaataaggacagataaaaaaaacaaaaaaagcagctacagatgatttctttttatggctcaaagtttttgctcttctgccaaggcrtgttctagcaatttgctcctcactttagaactcttcttactgatgtctgcatgtttcttgcctagaaatgttgacactcccatcttgtcttttcctgtgagttcctgtctctccatcgattctggaacaattggttgacctgaaacatcagtactaggatgagttaaaa

SEQ ID NO: 593174 - DNA, 598 bp, Homo sapiens
tttgttcccttttgttcttttttctctaatcttgtcttctgtctttatttcattaacttgatcttcaatcacggatatccttacttctacttgatcgatttggctattggtacttgtgtatgcttcacgaagttcttgtgctgtttttcagctccatcaggtcatttatgttctgctctacactggttgttgtagttagtaatttgtctaaccttttttcaaggttcttagcttccttgcattgagttagaacatgctcctttagctcagaggagtttgttattacccatcttctgaagcctccttctgtcartttgtcaaactcattatctgtccggttttattcccttgctggcgaggagttgtgattcttcgttggagaagaggcattctggtttctggaattttcagcttttattgtgctggtttctccccatctttgtagatttatgtacctttggtctttgatgttggtgaccttcggatggggtctttgagtgcatgtgctattcctttctgtttgttagttttccttctgacaggcccctctgctgctggtctgctggagtttgctggaggtccaatcctgaccctgttt

SEQ ID NO: 593175 - DNA, 577 bp, Homo sapiens
agccacccctttccccaggtgctctgtcccagggagacggcagttttaactataagtccctgactggggctgctgcctttttttcagagatgccttgactggaggagaaatctggcagtctgggcacagcagccttgctgagctgctgtgggctctgcccagtttgaacttctcagcagctttgtttacactctgagggtaaaaccgcctactcaaggctcagcaatggcagatgcccctccctgcatcaacctggaagttcctgggtggatctcagactgctgctgtgctggtagcaagaatttcaagctagtttgctggggtccatgggagtgggacctgccaagccagaccacttggcttcctggcttcagcacccctttccaggggagtgaacgtttctgtctcactggcattccaggcgccactggggtatggaaaaaaagaactcctgcagctaatttggtgtctgcccaaatggctgcccagcttgaaacccagggcgcttgtggggtaggaacaggaggaaacctcccrgtttgcaggttgcgaagaccatgggacaactgcagtgtct

SEQ ID NO: 593176 - DNA, 574 bp, Homo sapiens
atcattagtatagatttctgcaggagcatccatccaggtgagagttcgaataagtggaggaaaaggcacataagcccagtaagaataattttgtgtagcaggtaagtcaktgtgagaggaaactggtgagacagaaggtgtaaggaggagaatcattaaataaaacctattgtaagagagatccagtgctgaaggaggaagagaagaacagagggatgttattttcaggctaatagaaatggtgagatttttaggtttgtaaggggaaaaagaaaggtaattaggagaagtgggattagttacaggggtcttcattgccattagggaggattgaaccagacccattttgatttggtgtgccagcttctggggagttggcacagttctcaccatgtctgagggcagtctctgacatggacatcttttccctgtggttttcattgtcagtatttacacgaagtttaagtcttgtagtgggcacccggacaggggattgatgatctcctggtgaaacacaagcatatcctctttcccacgttaagcagaatcggagacaatatttaaaggtttgggg

SEQ ID NO: 593177 - DNA, 620 bp, Homo sapiens
actttgtgatgccattcaaactctctgtgggagcaggctgaggctgaactacagcagaaacttcatctttgcttaacttttcccctgtcctagagttacacgcctgtaaccctagcactttgggatgctgaagcaggcagattgcctgagctcaggagttcaagaccaacctgggcaacatggcgaaaccccatctctaccataatacaaaaaaattagctggacatggtggcacatacctgtagccccagctacctgggagggtaaggcaggagaatcacttgaacccagaaagtgggggttccagtgagccaagattgtgccactgcactcagcctgggtgacagaggaagaatctgtctcctaaataaataaataaataaataaataaataaatgtgtaggccgttttcttgttcatctgtattttgttataggagcctcagccatgaacctagggtgggtgaggaaaagattattttcctttcctacacgtacagcccttattctccactaagtagagtaatgcctgacaagaaggcackgaacacaggattgttgaaggaatgcctcaatgcagaagtgaaataaaactgcacaaaattccttctggtgtttaac

SEQ ID NO: 593178 - DNA, 589 bp, Homo sapiens
ttcttactatcacactcccaaaacacagcatgagaacttgtgagcctaacattaagtagagaagctgattcaaacactaagagacaagacttccaggtgtctgaacccaatgcatggaaccagggaggccaaaacagaaaagaggcaggggcagaatgctagccaraaagtagaggttgtgcttgaagttttgcttgttcacctggtaaactcctcttcctttggcaggaagagtttgcctgaagcaagctcaatgtgtccactgtggggagcccagaataggtttccaccatcactaggtgacaggcatcaaaaatagggtcaagctaagaagagtggtgaaatgtattaggaagccagtggtagcagtgcctgtgggaaagtgtttagagcattctctgatgtttttgtgggttctaggttaccctcctgggtgttcctaagctgcctggcctctagttattcacttggcaagcatttattgggtgcttcctatgtgccaggcattgtgcttggctttgaaaggtgtcaagagcagcagagacctgaaaaagggtagaggaggaaatgatacctttcagagaaatgg

SEQ ID NO: 593179 - DNA, 569 bp, Homo sapiens
aggatatgaacagacacttttcaaaaaaagaaatttatatgatcaacaaacatgaaaaaaagcaacatcactgatcatcagagaaatgcaaatcaaaaccacaacgagataccatctcacgcctgtcagaatggcaattattaaaaagtcaagaaatgatagawgctggcatggatatggagaaataggaattattggtgggaaagacaaactttttatgcaatcaatttttatatcaataagatgtaaaggctgatgacaattatattaaattataaatcagtgaaagttttctgaagaaaactagaatacttacacattcagtgtgttttattctactgatctgctctgacatagatccaaatcttaaactggtccctttggatagaccacaggtgtccaggatactgaaattatatgcaaactattgttttatatggtaagaaggtaactagttttcatcttattctcaaagagatccctaaaataatatttttaaccttctggaatgctggccatctacaactgcatgtattatatttacagattgtcttcaactaaataagaat

SEQ ID NO: 593180 - DNA, 287 bp, Homo sapiens
tttaattgttaatattccattacctgtcagctcttctgatttggttcattaaaaatacatgtaactcttctatctgaaattgatttgttatgaggcaaattataaatctaaatcatcctcagtagttctgtcgagtttgcccagttccatatctatgtatttatcttgcagaagtagaaagatgtgtgcacaaggatattcatagcagtacagtgtaaaatagcaaaaaaaaaatggaggtaggttacaaatagrtaatggttgaataaattagaaaatactatgaa

SEQ ID NO: 593181 - DNA, 569 bp, Homo sapiens
taacaaatcactttgcagagcattaaaaagaccataaagagacagtacgttttccccagccattgaaggtatgatgaatggtacaacctgagagtgaatggaagagccactttataaagtttaaagaaccaatacttgggcttagttatggrcttcacactaaccagagatacaaggcattttagccgaatgacagtggaccgaactaatcctataaagtgacaaggggaaacactgggaccctccactgtgacatatcttggagtgaaggcttggcaggaagtcagtcttgcataaacataaaagccaaactcttttagaaaacatattatcagagatgatttatttttatatgagaatagttcttttaaaaaatattttagatctttttcttgaatataaatattgatttactaatatgacctgtcttttttcattctctagacaacaatgatttcttaagaagaggcaaatggaactcagaataagcaatcatagaatacaagcatagaataatttcaataatttttgcatttgaacacaaaaaatgagctactaaaagcatagcc

SEQ ID NO: 593182 - DNA, 525 bp, Homo sapiens
acttcaacactattttcttttatttttcttattaatataagaaggcaggaatgtcaggcctctgagcccaagccaagccattgcatcccctgtgacttggacgtatacgcccagatggcctgaagtaactgaagaatcacaaaagaagtgaaaaggccctgccccatccttaactgatgacattccaccattgtgatttgttcctgccccaccttaactgagtgattaaccctgtgaatttccttctyctggctcagaagctcccccactgagcaccttgtgacacccgcccctgcccaacagagaacaaccccctttgactgtaattttcattaacttcccaaatcctataaaacggccccacccctatctcccttcactgactctctttttggactcagcccacctgcacccaggtgaaataaaaagctttattgctcacacacacacacacacacacacacacacacacacacgcaaaaaaaaaaaaaaaaaaaaaaaaaaattacctctgagtcttcagtc

SEQ ID NO: 593183 - DNA, 525 bp, Homo sapiens
acttcaacactattttcttttatttttcttattaatataagaaggcaggaatgtcaggcctctgagcccaagccaagccattgcatcccctgtgacttggacgtatacgcccagatggcctgaagtaactgaagaatcacaaaagaagtgaaaaggccctgccccatccttaactgatgacattccaccattgtgatttgttcctgccccaccttaactgagtgattaaccctgtgaatttccttcttctggctcagaagctcccccactgagcaccttgtgacaccygcccctgcccaacagagaacaaccccctttgactgtaattttcattaacttcccaaatcctataaaacggccccacccctatctcccttcactgactctctttttggactcagcccacctgcacccaggtgaaataaaaagctttattgctcacacacacacacacacacacacacacacacacacacgcaaaaaaaaaaaaaaaaaaaaaaaaaaattacctctgagtcttcagtc

SEQ ID NO: 593184 - DNA, 542 bp, Homo sapiens
ggagggaaggtaaacttatgtttactccattatctcaaattagaaattccagtggaggcttttagacacggaagtaacatggataactttatattttaaatatatccccgggatgtactgctaaaaatatattaaagagggcaaggatggatacacatattctcaaagatggaggatctaatttcctctctgagaacatgcagtgtttgggatctctgggagtcaggcacttcactgaaatagtccatcattcaaaatccaacaaactagagaacactttcatggtaccctagaaagaataactgaaayttgagtaatgcagaacctaaaagatctggctgatgctaaagggctcactccagcactatctattgggaagcacttcaggagcctaccttaaattctttgaattgtcatttgggataaacaaaatgattttttgttctgataaaagtagatgataggtaagtatatgcagccaaagctctggcaagtaggaacataatgatcctttggtttgctggtcggcttctttatttacc

SEQ ID NO: 593185 - DNA, 527 bp, Homo sapiens
aatccgcataatctctccaagggagggaccagayggagataattgaaccatgggggtggtttcccccatgctgttctcgtgatagtgagtgtgttctcccaagatctgatggttttataaggggctctttcctcttctcttggcacttcttcctgccaccttatgaagaagatgcctgctgcttccccttcaccttccaccatgattgcacatttcctgaggcctctccacccacgctggactgtgagtcaaataaacctctttttttttttttttttttttgcaaattacccagtcttgggcagctctttatagcagtatgaaaatggaataatacactaagcaaatcagaatctctggtgtcaggctcagacttcagtagttttaaaggtctttgggtgattccagtatgcagccaaggaaggagcccactgatatagcagtatagcagggcagcagaggatgaggcccgtctgagtttggatcctacagaattatagtggccctgttatagagtaatgagattt

SEQ ID NO: 593186 - DNA, 612 bp, Homo sapiens
gaaggtgacaagggatggtctcagagcaaataaatgagagctgggaagtaagaggctgtggtgaagagaggatttggtgaggcattgttttcagacccatgatgggatttgttatagaaagacagctcgaatyaatgatggtccagttgaagggttacagaaaaaatttattccatgcacactgtcttacatatcattttgggactgtgtgtattgattatgttttttattttctatgttttatgatgcttcaacatcttggaggccttgttggctgggagagactgctcctgtcagtgctaactagttcctaggtatgcaaacatctttaagaagggaaagttcccattgttttaactgcatagattctgtccctatgaagtggcaactttcagctgaagggaagtggctagatcaccaagagtttgcagttcctggtaaatgaatactttcccaggctttgggataactggacaagtgggaatttagaagaaggggcaaatgtgtcccctgtgagaatgtcattaagatgcaaaccaaccaatccagagctcatatactcagtcacctcctttatctaactctcacatgccaagtcaacattttccccac

SEQ ID NO: 593187 - DNA, 612 bp, Homo sapiens
gaaggtgacaagggatggtctcagagcaaataaatgagagctgggaagtaagaggctgtggtgaagagaggatttggtgaggcattgttttcagacccatgatgggatttgttatagaaagacagctcgaattaatgatggtccagttgaagggttacagaaaaaatttattccatgcacactgtcttacatatcattttgggactgtgtgtattgattatgttttttattttctatgttttatgatgcttcaacatcttggaggccttgttggctgggagagactgctcctgtcagtgctaactagttcctaggtatgcaaacatctttaagaagggaaagttcccattgttttaactgcatagattctgtccctatgaagtggcaactttcagctgaagggaagtggctagatcaccaagartttgcagttcctggtaaatgaatactttcccaggctttgggataactggacaagtgggaatttagaagaaggggcaaatgtgtcccctgtgagaatgtcattaagatgcaaaccaaccaatccagagctcatatactcagtcacctcctttatctaactctcacatgccaagtcaacattttccccac

SEQ ID NO: 593188 - DNA, 560 bp, Homo sapiens
acaattatataagtgtgtgtatatatatatatgtgtatatatgtgtgtgtatatatatgtgtatatatatgtgtgtgtatgtrtgtgtgtatatatatatatatatatttgtttgagatggagtttcgctcttgttgcccaggctggagtgcaacggtgcaatctctgctcaccgcaacctccacctcctgggttcaagcgattatcgtgcctcagcctcccaagtagctaggattacaggcatgtgtcaccacacctgactaattttgtatttttagtagagatggggtttctccatgttggtgaggctggtcttgaactcccgacctcaggtgattggcctgccgtggcctcccaaagtgctgggattacaggcatgagccactgcacccagctacaattaaatatttttgctcataaatgctagcataccataaaccttgatttatttactcattcattcaacaattttttaagactctattccatgccagacactgataggaactgggaataccatggtgagtgaagcagatggcctttcacagagtttatgttgg

SEQ ID NO: 593189 - DNA, 560 bp, Homo sapiens
acaattatataagtgtgtgtatatatatatatgtgtatatatgtgtgtgtatatatatgtgtatatatatgtgtgtgtatgtatgtgtgtatatatatatatatatatttgtttgagatggagtttcgctcttgttgcccaggctggagtgcaacggtgcaatctctgctcaccgcaacctccacctcctgggttcaagcgattatcgtgcctcagcctcccaagtagctaggattacaggcatgtgtcaccacacctgactaattttgtatttttagtagagatggggtttctccatgttggtgaggctggtcttgaactcccgacctcaggtgattggcctrccgtggcctcccaaagtgctgggattacaggcatgagccactgcacccagctacaattaaatatttttgctcataaatgctagcataccataaaccttgatttatttactcattcattcaacaattttttaagactctattccatgccagacactgataggaactgggaataccatggtgagtgaagcagatggcctttcacagagtttatgttgg

SEQ ID NO: 593190 - DNA, 497 bp, Homo sapiens
atttttcctttttaattttaaaatatgtgcttcttgggaaaaaagtaaaataattcagaagcatacaaagtaaaaagtgaaagatctttgtcctccacctcatcctctgcctctygctaattcttttcttccccccttccaaagaaatgatcactgctaatggtttggatggtatcttgtctgatgtttttcctacatttatgtattggggttagagttgggagagctggactggtagaaagagacacagagaaaaagagagagatctgcaacttgctctttcactgactatatcctgagcgtttttttcatatccctgtaaaaagatgggcatcatccttttgaagagcatcttgcattcagttggattgtcctgaaattcatttaaccatttgcctattagcacattaatgttatttctattttttcttataaataataatacaatgactatcttttcgctaccacccctaagcttgacatacacctcttcattt

SEQ ID NO: 593191 - DNA, 588 bp, Homo sapiens
aaggcgggccgggctcagaccagcgctgcctcaggatgtgaagtgtaacaagagggccaggggaggtggtgggggacaacatgggcctgtgaggcctgtgggtgcccgcgttccccagctccccccgcagcccgctccacagtggtccgctccggttggttgtcacgtgcgcattcgggttccagacccaaggctgcgtgttctccaccgcttgttgtggccagtgttactgcggtgaccgccagagcagcctcgacgctatggaggagccyggtgctacccctcagccctacctggggctggtcctggaggagctacgcagagttgtggcagcactacctgagagtatgagaccagatgagaatccttatggttttccatcggaactggtggtatgtgcagctgttattggattttttgttgttctcctttttttgtggagaagttttagatcggttaggagtcggctttacgtgggaagagagcaaaaacttggtgcaacgctttctggactaattgaagaaaaatgtaaactacttgaaaagtttagccttattcaaaaagagtatgaaggctatgaagtagagt

SEQ ID NO: 593192 - DNA, 508 bp, Homo sapiens
ctagtgaatacatatcacttttgcatcattataaagttgaaaaattgtaagttgaacaaccataagtcaggaaatgttggtaccagaagtgctagccagctcaataaaataagaaaaataaaaggtatacagattggaaaagaaggaattaaatggtctttatttgaagatgacatcaactttgatgtagaaaatcccaagaaatctacaaacgaatccctcctagaactaagtgagatcagtaaggttacaagacagtattatattcagcttttaaaaagaaggaaatcctgtcatctctgacaatatggatgaacttggaggacattatgctaaatgaaaaataaaccaggcaagcactccatgatctcacttatatgtagaatctaaaaaagttgaaatcacaaaaacagagaataaaattacrgttatcagggactgaggagttgtgaggtggggagatattgaggaaaggatacacaatttcagttatgcagtaggagaaagt

SEQ ID NO: 593193 - DNA, 563 bp, Homo sapiens
gggaaacacaattaagagagggaaaacaaacaagtgattaattagtgtgatgtcactagactgtaactccttgaagcacaggcttccagagttgtagctcactctgtgcatgctgtacacagcaagccctcaataactatttgtttcaatagatgaatgaagggcaagaaaggaggaaaatacagtcttgaagggtcagaaaagaatttagggaatgtgacacttgctttgaaccttgaagtatgggtggaattaaatgcaaagaaagaaaagagggcatttcagttctgccatgatgagagtttgaaaaggggttggcatggggaagtcattgaccatgactaagataccgtttgaagggcaagacctcaaaacccactggcagaatggatttagggcctgaagaaacagaagaggtgaggctgattccagarttcccaacttgctgttattggcaggggtcagatcatggagcaacagagaagtcttgtggggttgaatcctcaattggacatgctgagtagaaggtgagggtcaagcagccaagtaaagggaggaagtct

SEQ ID NO: 593194 - DNA, 425 bp, Homo sapiens
aaaaatacaaaaattagccaggtctggtggcacatacctgtgatcccagctacttaggagactgaggcatragaattgcttggacccaggagatggaggttgcagtgagtcgagatcgcaccactgtgctccagcctgggcgacagtcactgtgtctccaaaaaaaaaaaaaaaaaaaaaaaaagaatgtatatgtgtaatgtatttatcattactgaactgaacacttaacagtggcaaagatggtaaattatatttttgaccttaattaaaaatattaaaaaataaaatagatctttccatgaaaaagtaaaaaaaaaaaaatccaggtggagatgatggtgctaaaaagtgagttatacaaagcagcagtgtatccacccctccatctaagtggcttgtttctgtggcccatgttattatta

SEQ ID NO: 593195 - DNA, 425 bp, Homo sapiens
aaaaatacaaaaattagccaggtctggtggcacatacctgtgatcccagctacttaggagactgaggcatgaraattgcttggacccaggagatggaggttgcagtgagtcgagatcgcaccactgtgctccagcctgggcgacagtcactgtgtctccaaaaaaaaaaaaaaaaaaaaaaaaagaatgtatatgtgtaatgtatttatcattactgaactgaacacttaacagtggcaaagatggtaaattatatttttgaccttaattaaaaatattaaaaaataaaatagatctttccatgaaaaagtaaaaaaaaaaaaatccaggtggagatgatggtgctaaaaagtgagttatacaaagcagcagtgtatccacccctccatctaagtggcttgtttctgtggcccatgttattatta

SEQ ID NO: 593196 - DNA, 613 bp, Homo sapiens
ttattttcttactaatttttaggagtgactcattcattcattttttcatttrtttataattatggtaaaacatacataacataaatgtattactattttaaccatctttgattgtattcatattgtgcaaccatctgcacattcatttctagaactcctgaaattccaacataatcacgacggatctacccatttgggttaagaaaagcttctatttactagttatcttattgttagcatatcccaacggacccctgccaaagtttgcccctcagataaacaaaaattcaacactatatagcatgggaatattcattgctggctaggaacagaccatctctgacactgccaggaagcatcaaactagccagtcaaatgaaaatgtgcctacatttggaatgagtaatctcactttttggactgtctgctacagaaataaaagaagtagctaattctgatatatacagaaacacatttcctggaacagcagtaacaatctaaatgggcattaacaaaaactgttacaggccaggctcggtggctcacgcctgtaatcccagcaccttgggaggccaaggcgggtggatcacgaggtcaggagttcgacaccagc

SEQ ID NO: 593197 - DNA, 572 bp, Homo sapiens
taatgaagtgtgttttaagtcctcaatttatattctcaatatttttacatttttcacaatcttactttagaataaaattttatcttttacttttaattttatcacaagtgggtcttttttcctctgtttgtcttatttcatcatgtagcaattccattggttccattaagaaattttaattagtaatgcaaagcagaacttaatttttataactacaaatattatgctagatttttttcaatcagaggtatttttataagacccaggtgtattttcttgtgtttatttatctataaataaaatgaggttcatagaggcatgtcttattttttttaatatttgagaggagacgtacttctcttgtttgttgcttccaaatggaggtttycttgtgaatcctccttgaattatttggttttgtgtcttcactttgaggacagagagagaagtcattctttggagttcgttttagaaatagtacattcattacagacactacgtgtatctaaattaagcttaatatttaaaaagaaacagagtgttataaacatactcttttaagaaagcatgtt

SEQ ID NO: 593198 - DNA, 577 bp, Homo sapiens
caaaatacaattattaagaaaattaatcctttatcacaaacccttgtatcaaagcacatctccctatgatctgtttttattctatatataaacaagttttatacctagggtggacgtgtccttcctcttactttcaggaatgccctattctgtctttggagtagctgctcttttacaactttgctttttaaataaacttgtttttgctttgtactgtggactcaccttgaattctttcttgcacgagaccaaagaaccctctcttggggtcttgatcaggactgtattcctgtaacacaacctttgcccattacccagttctgaaattccttccacattttcagrtatctttatagcaatgtcccactcctcaccagcaattttctttattagtccattcttgcattgctataaagaaatacctggccaggcgcagtggctcactcctgttatcccagcactttgggatgccgaggcaggtggaccacctgtcaggagtttgagaccagcctggccaacatggtgaaaccccgtctctactacaaatacaaaaattagccggatgtggtggtgcaca

SEQ ID NO: 593199 - DNA, 577 bp, Homo sapiens
caaaatacaattattaagaaaattaatcctttatcacaaacccttgtatcaaagcacatctccctatgatctgtttttattctatatataaacaagttttatacctagggtggacgtgtccttcctcttactttcaggaatgccctattctgtctttggagtagctgctcttttacaactttgctttttaaataaacttgtttttgctttgtactgtggactcaccttgaattctttcttgcacgagaccaaagaaccctctcttggggtcttgatcaggactgtattcctgtaacacaacctttgcccattacccagttctgaaattccttccacattttcaggtatctttatagcaatgtcccactcctcacyagcaattttctttattagtccattcttgcattgctataaagaaatacctggccaggcgcagtggctcactcctgttatcccagcactttgggatgccgaggcaggtggaccacctgtcaggagtttgagaccagcctggccaacatggtgaaaccccgtctctactacaaatacaaaaattagccggatgtggtggtgcaca

SEQ ID NO: 593200 - DNA, 577 bp, Homo sapiens
caaaatacaattattaagaaaattaatcctttatcacaaacccttgtatcaaagcacatctccctatgatctgtttttattctatatataaacaagttttatacctagggtggacgtgtccttcctcttactttcaggaatgccctattctgtctttggagtagctgctcttttacaactttgctttttaaataaacttgtttttgctttgtactgtggactcaccttgaattctttcttgcacgagaccaaagaaccctctcttggggtcttgatcaggactgtattcctgtaacacaacctttgcccattacccagttctgaaattccttccacattttcaggtatctttatagcaatgtcccactcctcaccagcaattttctttattagtccattcttgcattgctataaagaaatacctggccaggcgcagtggctcactcctgtwatcccagcactttgggatgccgaggcaggtggaccacctgtcaggagtttgagaccagcctggccaacatggtgaaaccccgtctctactacaaatacaaaaattagccggatgtggtggtgcaca

SEQ ID NO: 593201 - DNA, 569 bp, Homo sapiens
agaaaatatccacttttattcttccacacattggtcttaggtggtcttggctcttttttttttttttcatataagtttaagaatctgcttgccaacttcaacaaaaactacctgctgggattgtaattaaaattaagttgaattaatagataagttggggcaaagcatatgtttacaatattctgggtgcatcccagcccaggccactcttgccacccgcctttcaaacatgaatttggtatatcctttcatttacttagtttttttttttaagtttcttttaatactgtcttgtaattttaaagtaatagtcttatacttaaagataaatttgcattagatatttctggtgttttcctattactaaaattgatatctagaagaaaacttttccttatgtttgtcactaatgtatatataaatacattgatttattgattaatttttgtgtgttgatcttgtgtccagccacctagttacatttaattttaattgcctattttcagtgtcttttgaattttgtatatgtactgycataatctctgcaaatagtgataacttaattcctt

SEQ ID NO: 593202 - DNA, 258 bp, Homo sapiens
atgcgttgaacatacagcatcacgtaatgtaaaaacaaagcaaaattctgactttttaaaaataaaaactgtaatcttacctcaatattttgtgtttcagcaactgggagaccaagcctgcctccctgctagacttactccctcctgcagttaatgtaggagagaagacagatgttgtaaatcaccatgactttatacctcacttctcatggctgaaggtttagcattatyatttccattggaaacaacagagttaag

SEQ ID NO: 593203 - DNA, 538 bp, Homo sapiens
tcctctgtgaggtttggagagacaaccaaccaaccaaaccacagaagcatccaaatcatttcttcagagctaaactaaatcttttagcactccaatcttagagtataattatattacaaattactacaatttaattatagaaattgctcagtgttatacaagcatttcataatttattttgcaattaatatatagtttaagggagtttttaaaactttatacaartttgttttgtaggttctatgtaatattaatatttactaatatttacctcatctttgatgtattgatgttgggtaaccagaagaacatgtctgagcagtctcccttataggagaatctgcataatgcaatataataaaaatataatgaaacactcagctgatctctgtaaaatgcagtctctctgtaaacagccaagtgttgtttgacatgatgatgaattgggaagggaatgtaaatgacttttcagtgttgaaaggggtttgtgctattggaatattacaggagcctcttcccctgcaagcaatgtttcaag

SEQ ID NO: 593204 - DNA, 538 bp, Homo sapiens
tcctctgtgaggtttggagagacaaccaaccaaccaaaccacagaagcatccaaatcatttcttcagagctaaactaaatcttttagcactccaatcttagagtataattatattacaaattactacaatttaattatagaaattgctcagtgttatacaagcatttcataatttattttgcaattaatatatagtttaagggagtttttaaaactttatacaaatttgttttgtaggttctatgtaatattaatatttactaatatttacctcatctttgatgtattgatgttgggtaaccagaagaacatgtctgagcagtctcccttatagkagaatctgcataatgcaatataataaaaatataatgaaacactcagctgatctctgtaaaatgcagtctctctgtaaacagccaagtgttgtttgacatgatgatgaattgggaagggaatgtaaatgacttttcagtgttgaaaggggtttgtgctattggaatattacaggagcctcttcccctgcaagcaatgtttcaag

SEQ ID NO: 593205 - DNA, 598 bp, Homo sapiens
caaggttatgtattgctcagttcatgaaatgtttgtgatcagaggctcacagaaacctaacccwgtaattcccccggggacaatggtttaatatttgttaattcagtgctcacaactaacactaattcatgcaactttatagagcataattacatggataatgagaatcgactgtatgaagaaagcagtaaccagtaaaatcatggtgtgattatagtactaccagaaaaatcagactttaaattattcctagacataaagagggggattttataatgatgaaaatgccaatttaacaagaagaaatcaaacaataaatttgtatgtatttaataacatcaaaatatactaaacaaaaattgtagagaaacaaggagaaatagaaatcttttcatcagtagagatttcaacacaccacaagtagcagagtgaacaatctcaatatcagtaaaacagaagatttggacaacaggattaaataatttgacctaattgacacatggagaacaccacttcccacaactgtagcattcacattcctttccagtacacatgggcacatgtgtcatttatcaaaataaactatattatgcagggc

SEQ ID NO: 593206 - DNA, 598 bp, Homo sapiens
caaggttatgtattgctcagttcatgaaatgtttgtgatcagaggctcacagaaacctaaccctgtaattccccyggggacaatggtttaatatttgttaattcagtgctcacaactaacactaattcatgcaactttatagagcataattacatggataatgagaatcgactgtatgaagaaagcagtaaccagtaaaatcatggtgtgattatagtactaccagaaaaatcagactttaaattattcctagacataaagagggggattttataatgatgaaaatgccaatttaacaagaagaaatcaaacaataaatttgtatgtatttaataacatcaaaatatactaaacaaaaattgtagagaaacaaggagaaatagaaatcttttcatcagtagagatttcaacacaccacaagtagcagagtgaacaatctcaatatcagtaaaacagaagatttggacaacaggattaaataatttgacctaattgacacatggagaacaccacttcccacaactgtagcattcacattcctttccagtacacatgggcacatgtgtcatttatcaaaataaactatattatgcagggc

SEQ ID NO: 593207 - DNA, 545 bp, Homo sapiens
gaattcaaatataatgcaaggctgtggtcagcatgaagacatcagagcagagtcctccctcctccttgggagcagggccgtggattcaggctggcctcccaggagttgggggccatgagtcagggctctgttgcttaatctgaaaggggtgggtgagtgagctatgtggggcagaattaacctcgcacgagaattaaggcaaaaaaaatggggctaaaagagggacagaaacacagttyaggatctgcattgagaaataaagttagcattaacagaaaaccaaagaaggcacctattttaaaaaaattaggagtttaccagaaagtggccaggttgttttacaaaaaagtaaaaaataaaataaaataaaatctcctttcagaaaacaaagtgaaatcagacttggtgttttgttttgttttttagagagacaaggtctcactccatcgcccaggctggagtgcaatggcaatgacatgattatagttcactgcagtctcaaactctcccaggtgacttttaaattttatttttttgtaaagatg

SEQ ID NO: 593208 - DNA, 527 bp, Homo sapiens
aaaggagctgcagacagattagcagctagtaacccattaaaatggataaaaacacttggaagctctgtgatttyaatgatgactgtgcttttaatctatgttgtttgtctttttatagtctgcagatgcggattctgactcctgcgagaagtagctcaccatgacaaagctgcccttgcttttatctctttgcaaatcaaagaagggagacgtgttggaagcaagcccccctaaaatctggccataaactggcccccaaactggccataaacaaaatctctgcagcactgtaacatattcataatggccctaacgcccaagctggaaggtcgtgggtttatgggaatgagggcaaggaacacctgtcccactcagggtggaaaaccgcttaaaggcattcttaagccacaaacaatagcataagcgatctgtcttaagggcgtgttcctgctgcagttaactcacacaacctagtcctttaattcagcccatcccttcatttcccataagggatacttttagttaat

SEQ ID NO: 593209 - DNA, 527 bp, Homo sapiens
aaaggagctgcagacagattagcagctagtaacccattaaaatggataaaaacacttggaagctctgtgatttcaatgatgactgtgcttttaatctatgttgtttgtctttttatagtctgcagatgcggattctgactcctgcgagaagtagctcaccatgacaaagctgcccttgcttttatctctttgcaaatcaaagaagggagacgtgttggaagcaagcccccctaaaatctggccataaactggcccccaaactggccataaacaaaatctctgcagcactgtaacatattcataatggccctaacgcccaagctggaaggtcgtgggtttatgggaatgagggcaaggaacacctgtcccactcagggtggaaaaccgcttaaaggcattcttaagccacaaacaatagcatragcgatctgtcttaagggcgtgttcctgctgcagttaactcacacaacctagtcctttaattcagcccatcccttcatttcccataagggatacttttagttaat

SEQ ID NO: 593210 - DNA, 612 bp, Homo sapiens
tagtgtttctcacttcttttcttacaaatttcaacttggaaaaaaaaaaagaagagaatgagaaacagaaatccaagctgtatgttcaatgacacaaactgtgtcttcagttatcccattttgcaaaatagaagaatgtgctgccaggtgcagtgaagatcaggcttgagtgtgggaagatcctgagggtgaaggytctaatgcatctcagacatgagaatggagatgagacatcaggtgtcagtgggggtgtcacctgggagccccatgcctcttggtagtattacagtgatgaagagaatgtcactgcagatggcattaggctgacttctaatctgcactaagccaccagtctatactgatgaggctgctgggcctccaaacttgtgacctctgccagctgccccaacatgagaatgaagaggagggaaggaagcctctctccaaggaagatgagagcaccaagaagtgttctgggagaaacatttggagggagtgtgaaaaggagaatgtgggaagaaaaaaggctacatctctaaagctaaaagaaaatattttaaaataaatgctataaacacatactgtatatacagttaagacattttatcctaa

SEQ ID NO: 593211 - DNA, 418 bp, Homo sapiens
tttagcaggtcacagaatacaagtcaatacagaaaaatgaattgtacttctaccttccgccagtgaataattagaagttgaaattttaaaaacgtaccattcacaataggatgaaatacatgaaataattggatattaatatcataaagtatgtgtagggtctgtacactgaaatgtagaaaatcctgatgaaagaaatcaaagacaaaacagagatataccatatccatggcctggaaaagtcactgttgctaagatgtcagttcacytgcaactctccacacactcaacacaactttaacaaaaaatccagcagcattttttagaaaaaccaaagatttaattttaaaattataggaaaataaaaaggcacatctataagtaaataaataaataagaacaaatttgaaggattcac

SEQ ID NO: 593212 - DNA, 537 bp, Homo sapiens
cctgggcaacggagcaagactctagctcaaaaaaaaaaaaaaattatttagggtggtgaaactattctgtattacactgtaatggtggatacaaaaaataatgtacctttgaaaaccaactttacagcataaagaatgaactttagttatgcaaattttaaaaatttagttatgagtttagtgatcccaggatggaatgcagaatatgaagaaagattctaactctactgcaaatgttggacacaacttcactgaatrgggtgaggaataggtgccgaactaagttaatttagaaataagtagtgtgtacgattaaaaggaaaggaaatatgcatgaggactattttcaactaaagacttgaaaaagttgtttccatgggagttaataattctgaaaccactgcatagatactggaattaaacacataaatggatagaagatggttggaagctagatttctcgctattagagtggaagattacaaataagcaagagagaaagctagaatgatccatgtgataatggattacagttgg

SEQ ID NO: 593213 - DNA, 537 bp, Homo sapiens
cctgggcaacggagcaagactctagctcaaaaaaaaaaaaaaattatttagggtggtgaaactattctgtattacactgtaatggtggatacaaaaaataatgtacctttgaaaaccaactttacagcataaagaatgaactttagttatgcaaattttaaaaatttagttatgagtttagtgatcccaggatggaatgcagaatatgaagaaagattctaactctactgcaaatgttggacacaacttcactgaatagggtgaggaataggtgcygaactaagttaatttagaaataagtagtgtgtacgattaaaaggaaaggaaatatgcatgaggactattttcaactaaagacttgaaaaagttgtttccatgggagttaataattctgaaaccactgcatagatactggaattaaacacataaatggatagaagatggttggaagctagatttctcgctattagagtggaagattacaaataagcaagagagaaagctagaatgatccatgtgataatggattacagttgg

SEQ ID NO: 593214 - DNA, 634 bp, Homo sapiens
aacaactttacacacataaactagaaaaccatatcccagataaacacagacgctgaaacccttaacaaaatactaagtaactgaatccaacaacggatcaaaaagataattcaccatratcaaatgggttttataccagggatgcagggatggtttaacatatccaagtcaataaaagtgatacaccacataaacagaattaaaaacaaaaatcacatgatcatctcaatagatgtggaaaaagcatttgacaaagtccagcatccctttatgcttaaaattctcagccaaattggcctacaagggacatacttcaataatgataaaagccatctatgacaaacccacagccaacataaaactgaataagaaaaagttgaaagcgttccctctgagaactggaacaagacaaggatgcccactctcaccactcttctttaacatagtgctggaattcctagccagagcaatcagtcaagagaaagaaataaaaggcatccaaattggtaaagagaaagtcaaactgtcactgtttgctgatggtgtgattgtttacctagaaaccctacaaactcctccagaaagctcctagaacttataaaaaaattcagcagtttccagatacaaaattaat

SEQ ID NO: 593215 - DNA, 634 bp, Homo sapiens
aacaactttacacacataaactagaaaaccatatcccagataaacacagacgctgaaacccttaacaaaatactaagtaactgaatccaacaacggatcaaaaagataattcaccatgatcaaatgggttttataccagggatgcagggatggtttaacatatccaagtcaataaaagtgatacaccacataaacagaattaaaaacaaaaatcacatgatcatctcaatagatgtggaaaaagcatttgacaaagtccagcatccctttatgcttaaaattctcagccaaattggcctacaagggacatacttcaataatgataaaagccatctatgacaaacccacagccaacataaaactgaataagaaaaagttgaaagcgttccctctgagaactggaacaagacaaggatgcccactctcaccactcttctttaayatagtgctggaattcctagccagagcaatcagtcaagagaaagaaataaaaggcatccaaattggtaaagagaaagtcaaactgtcactgtttgctgatggtgtgattgtttacctagaaaccctacaaactcctccagaaagctcctagaacttataaaaaaattcagcagtttccagatacaaaattaat

SEQ ID NO: 593216 - DNA, 560 bp, Homo sapiens
cttgtttgctaggtgattactgtattatattatacttcttgtttgttctttgccatcaactgtatgtgctctttatttatgttgaaactttattaatgtttagcacatcattttaaagaaacttggcaaactgatctttgacaaaggagcaaagacaatataatagaaaaaagaacagtcttttcaacaaatgatgccagccaggcacagtggatcaygccagtaatcccaatactttgggaggccgaggcaggtggatcacttgaggtcaggagttcgagaccagcctgaccaacatggtgaaaccccatctctactaaaaatacaagaattagtcagatgtgatggcgtgtgcctgtaatcccagatactctggaggctgaggcaggagaattgcttgaacctgggtggtagaggttgcagtgagccaagatcatgccattgcacttcagcttgggcaacagaatgagactccatctcaaaaaaaaaaaaaaaagaagaagaaaagatgcaggaacaactagatgttcatgctcaaaaaaaaaaaaaaaagagaaaaa

SEQ ID NO: 593217 - DNA, 489 bp, Homo sapiens
tcatactggagaggaaccctacaaatgtgaagaatgtgacaaagcttttaagtggtcctcaagtcttgctaatcataagagtatgcatactggagagaaaccctacaaatgtgaataatgtgataaagtccagccttcagaccttataatacataaaataatttatacttgaaaaaatcactrcaagtgtaaagaatgtggccaagcctttaaccagttccaaacctttattgtacataagataattcatattgaacaaaagtcttataaatgtaaaaaaaagtaacaaagcctttaagcagccctcaaaccttaaggaacctaagagaatttatttgagaacaaaaaatttttgagatgaagtctcactttgtcacccaggctggagtgcagtggcatgatctcagctcactgcaacctctgcctcttgggttcaagcaattctcctgcctcagcctcctgagtagctaggattacaggtgcatgcaa

SEQ ID NO: 593218 - DNA, 550 bp, Homo sapiens
cttttgtgggctgggcctaggtaaaaaaggagggtcatgtggcctaagggactgggtccagggatatgtcacaattctcctcgtgggrcccattcaggagagtcacagcacttgggtgctgagcttagaaatatgtcatgccaggcgccgtggctcatgcctgtaatcccagcactttgaggtgggtggatcatttgaggtctggagtttgagaccagcctgaccaacatagtaaaatcctgactctactaaaaacacaaaaaaattagccaggcatggtggtgcatgcctgtagtcacagcaacttaggaggctggggcaggagaatcacttgaacctggaagacagaggttgcagtgagccgaaatcacaccactgcactccagcctgggtgacagagcaagactgtgtctggcggggagaaaaaaggagtacgtcacaatgccctttgttgacaggtcccagacaaaagagtcacatcacctgatagttggggccagtgatatgtcacaattatccatgtgggcagggcagtgacagaaaaatgaca

SEQ ID NO: 593219 - DNA, 550 bp, Homo sapiens
cttttgtgggctgggcctaggtaaaaaaggagggtcatgtggcctaagggactgggtccagggatatgtcacaattctcctcgtgggacccattcaggagagtcacagcacttgggtgctgagcttagaaatatgtcatgccaggcgccgtggytcatgcctgtaatcccagcactttgaggtgggtggatcatttgaggtctggagtttgagaccagcctgaccaacatagtaaaatcctgactctactaaaaacacaaaaaaattagccaggcatggtggtgcatgcctgtagtcacagcaacttaggaggctggggcaggagaatcacttgaacctggaagacagaggttgcagtgagccgaaatcacaccactgcactccagcctgggtgacagagcaagactgtgtctggcggggagaaaaaaggagtacgtcacaatgccctttgttgacaggtcccagacaaaagagtcacatcacctgatagttggggccagtgatatgtcacaattatccatgtgggcagggcagtgacagaaaaatgaca

SEQ ID NO: 593220 - DNA, 550 bp, Homo sapiens
cttttgtgggctgggcctaggtaaaaaaggagggtcatgtggcctaagggactgggtccagggatatgtcacaattctcctcgtgggacccattcaggagagtcacagcacttgggtgctgagcttagaaatatgtcatgccaggcgccgtggctcatgcctgtaatcccagcactttgaggtgggtggatcatttgaggtctggagtttgagaccagcctgaccaacatagtaaaatcctgactctactaaaaacacaaaaaaattagccaggcatggtggtgcatgcctgtagtcacagcaacttaggaggctggggcaggagaatcacttgaacctggaagacagaggttgcagtgagcygaaatcacaccactgcactccagcctgggtgacagagcaagactgtgtctggcggggagaaaaaaggagtacgtcacaatgccctttgttgacaggtcccagacaaaagagtcacatcacctgatagttggggccagtgatatgtcacaattatccatgtgggcagggcagtgacagaaaaatgaca

SEQ ID NO: 593221 - DNA, 627 bp, Homo sapiens
ggaggggactttacaaaccgcttacaaggcaaaaatagagtagttattttcctatttcccttctgattgaattggctgctgtatcatatgcagtaaacaatgtgaacccgaaagcatttttacatccttatctcaccctttcatataatcaaaagaaaaaakgcactgtaattaaaaaaaaaaagtgcagggcagggtcagggtgggagactagaactttgtatttatttaaaagttaattaaacttgaaaggtttgtggagacaattcattttcttttgtagcctgagaccataagttttgcattccattttgccaatagaataataaaaagtaacctgatgttattttcatcctaataataaataatatataataaaactagaataaagagtttctttttaaatagaaaagtaaaaatgaaaatacatgagtcatacgagtctgaattgacttatcaaaaaactacataaatcattttaaggtatgacctatgtaattgctttactttcactcttttctggaaagatgactttgcagtaagcacacaggcttgactttgcaggcatcctagttaatcctctgaattgacaaattttaaatagatggggtatgctctttacaaaga

SEQ ID NO: 593222 - DNA, 627 bp, Homo sapiens
ggaggggactttacaaaccgcttacaaggcaaaaatagagtagttattttcctatttcccttctgattgaattggctgctgtatcatatgcagtaaacaatgtgaacccgaaagcatttttacatccttatctcaccctttcatataatcaaaagaaaaaaggcactgtaattaaaaaaaaaaagtgcagggcagggtcagggtgggagactagaactttgtatttatttaaaagttaattaaacttgaaaggtttgtggagacaattcattttcttttgtagcctgagaccataagttttgcattccattttgccaatagaataataaaaagtaacctgatgttattttcatcctaataataaataatatatartaaaactagaataaagagtttctttttaaatagaaaagtaaaaatgaaaatacatgagtcatacgagtctgaattgacttatcaaaaaactacataaatcattttaaggtatgacctatgtaattgctttactttcactcttttctggaaagatgactttgcagtaagcacacaggcttgactttgcaggcatcctagttaatcctctgaattgacaaattttaaatagatggggtatgctctttacaaaga

SEQ ID NO: 593223 - DNA, 627 bp, Homo sapiens
ggaggggactttacaaaccgcttacaaggcaaaaatagagtagttattttcctatttcccttctgattgaattggctgctgtatcatatgcagtaaacaatgtgaacccgaaagcatttttacatccttatctcaccctttcatataatcaaaagaaaaaaggcactgtaattaaaaaaaaaaagtgcagggcagggtcagggtgggagactagaactttgtatttatttaaaagttaattaaacttgaaaggtttgtggagacaattcattttcttttgtagcctgagaccataagttttgcattccattttgccaatagaataataaaaagtaacctgatgttattttcatcctaataataaataatatataataaaactagaataaagagtttctttttaaatagaaaagtaaaaatgaaaayacatgagtcatacgagtctgaattgacttatcaaaaaactacataaatcattttaaggtatgacctatgtaattgctttactttcactcttttctggaaagatgactttgcagtaagcacacaggcttgactttgcaggcatcctagttaatcctctgaattgacaaattttaaatagatggggtatgctctttacaaaga

SEQ ID NO: 593224 - DNA, 627 bp, Homo sapiens
ggaggggactttacaaaccgcttacaaggcaaaaatagagtagttattttcctatttcccttctgattgaattggctgctgtatcatatgcagtaaacaatgtgaacccgaaagcatttttacatccttatctcaccctttcatataatcaaaagaaaaaaggcactgtaattaaaaaaaaaaagtgcagggcagggtcagggtgggagactagaactttgtatttatttaaaagttaattaaacttgaaaggtttgtggagacaattcattttcttttgtagcctgagaccataagttttgcattccattttgccaatagaataataaaaagtaacctgatgttattttcatcctaataataaataatatataataaaactagaataaagagtttctttttaaatagaaaagtaaaaatgaaaatacatgagtcatacragtctgaattgacttatcaaaaaactacataaatcattttaaggtatgacctatgtaattgctttactttcactcttttctggaaagatgactttgcagtaagcacacaggcttgactttgcaggcatcctagttaatcctctgaattgacaaattttaaatagatggggtatgctctttacaaaga

SEQ ID NO: 593225 - DNA, 415 bp, Homo sapiens
cccatgtaagtataaaacaatatatggtcacagagctcataaaactagaccaaagctgacacagtcaaagttgccctagcatatacatgctcatttaggcagtgggaggatggcaaggcctccaaagctcaagcttctgttttgttccagtcccatggcatcactctctacagcatagaactgaacacaggcaacatattagctgtgtattaaaggggtgagtttagctgggyacagtggctcaagcctgtaatctcagcattttgggaggctgtggcaagctgatcacttgagtccagaagtgtgagaccagcctgggcaacatgtaaaaccccgtctctacggaaaaattcataaattagccgggcatggtggtgcatgcttgtagtgccagctactcaggaggctgaggtgg

SEQ ID NO: 593226 - DNA, 580 bp, Homo sapiens
aggtacatggaagactgagctacttttaaaaaaaggcttcatcgtgattctttttctttcttctttttcatttcttccttctttccttttttgttttgattaatgtaggcattcttttccaaaagctgatgtcctgaagtaagtactgtgtaacacttttcttcttttggtggtttgagtaaatgtttcaaattggaaaagaagaaaaagaggaaatttgtaytcagtcctcttgcctttttgcagcttcgtttgcataaatgtgcaatttttgtaggggtgatgtactgtattgagaaattcagagacagctgccagggccatcctgcagggaagctgtgctcaagttgaaatttaatttaaatatatcatttcattatcatagattacaacactagtagtaaactcacttcattggaatcagcactaatccaatccatgaaaattcaattgccccatcactccgcttagtctacacgttttgtaactaaaagcagagaactgcaaacttggcaatggagactgcctgaaagaacactggactttctacttagaagaatcctaatcccaaaacttcaga

SEQ ID NO: 593227 - DNA, 606 bp, Homo sapiens
atgccctttttcgatatttaccatcactgctacccttcatccttctcaagttgaagctccagtatgggataagaaaacatgggcaaaacaatgaggccaacaggctggactgtggaattcttggggccatatcaaggaagccaaatctcaaagacccagggagggattgtcttctcctagagtggctgactttcttcttgagacgcaatttttgaggttttgataccatgaaagaaaaacctaaacgatgcatttcaagaagagttgctttcccttagctatttttcaactgctcatcctcatgcccttaaacaatactattttttaagttcgcatcaggagagaaaatagctatgcctttgatacagaagccctagccaggaataaaatttatgtatttttagacgtcattttctatctttrgggactaagccctgctttcagcaactggggttaaggaggataaacagattcattctaggtgatagatcactaatatatgacatttcagcagaatagaagtctcccatctgagatataaaatcaacataacattcatgctggtatcccctgctcctcgcatgggaccttatgacttacagtaaa

SEQ ID NO: 593228 - DNA, 606 bp, Homo sapiens
atgccctttttcgatatttaccatcactgctacccttcatccttctcaagttgaagctccagtatgggataagaaaacatgggcaaaacaatgaggccaacaggctggactgtggaattcttggggccatatcaaggaagccaaatctcaaagacccagggagggattgtcttctcctagagtggctgactttcttcttgagacgcaatttttgaggttttgataccatgaaagaaaaacctaaacgatgcatttcaagaagagttgctttcccttagctatttttcaactgctcatcctcatgcccttaaacaatactattttttaagttcgcatcaggagagaaaatagctatgcctttgatacagaagccctagccaggaataaaatttatgtatttttagacgtcattttctatctttggggactaagccctgctttcagcaactggggttaaggaggataaacagattcattctaggtgatagatcactaatatatgacatttcagcagaatagaagtctcccatctgagatataaaatcaacataacattcatgctggtatcccctsctcctcgcatgggaccttatgacttacagtaaa

SEQ ID NO: 593229 - DNA, 412 bp, Homo sapiens
aagtctcaagtatttctttatagcaatgtgagaatggactgataaagagaagaaacactgcttcaaacaggggctggggctttaagtcattacgtagcattctatttggaaagagttgaagaaaatcatcttactggtatggagggaagaaaagaattaccttgaagctgcatttgcagatcatgcttcctcctcctcatcttcctcctcctcctcctyctcttataagattctatgttaacttgtagctgagtttggggctaaataatgaaggaatatgttggagaataaacaccatgttcctcaagggacaccttggtactcaaaccacagagcaatctctgtgtccatactttgcacacagaatttctctgcagctcaaaaagctttgtggaaataatatttaattttt

SEQ ID NO: 593230 - DNA, 409 bp, Homo sapiens
gtatatacattcttctcatcaccacatrgcaattactctaaaattgatcacatagtcagaagtaaaacactccttgctaaatgcaaaagaactgaaattataacactttctcagaccacagcacaatcaaattagaattcaagattaagaaagttactcaaaaccacattactacatggaaattcaacaaactgctcctgaatgactcttggattaaggcagaaatcaagaatttatttcaaactaatgagaacaaagagacaatgtaccagaatatcggggatgcagctaaagcagtgttaagagggaaatgtatagcactaattgcccacatcaaaaaggtagaaagatctcaagttaacaacctaacatcacaactaaaagaactagagaaccaagagcaaacaaa

SEQ ID NO: 593231 - DNA, 463 bp, Homo sapiens
tacaggccaatatctctgataaatattgatgcaaatatcctcaacaaaatacttgcaaactgaattcaacaatatatcttttaaaatcattcaccatgaccaagtagaatttatctcacgtgtgcaaggatggttccacatatgcaaataaattaatctgatatcaaaagaataaaggacaaaaaccatatgaccatttcaattgatgccagaaaagcatttgataaaattcaacatccctttatgataaaaacccaaggtcyggagttcaagatcagcctggccagcatggtgataccccatctctactaaaaatacaaaaacaaaaaattagctgggcatggtggcacatgcctgtagttccagttacttgggaggctgaggcagaagaattgcttgaacctggcaggtggaggttgcagtgagccgagatcacgccactgcactccagtctgggtgacag

SEQ ID NO: 593232 - DNA, 553 bp, Homo sapiens
agggaagaccccgtgggacaaaagaatctgaccaagagcccttggccctagaccttccctctgacagagcctatccaaatgagaaggaaccagaaaaccaactctggtaatatgacaaaaccagactgtttaaccactccaaaaaatcacactagctcaccagccatggatccaaaccaagaagaaatccctgatttacctgacaaaaaattcaggaggttagttattaagctaatcagagaggcaccagagaaaggcaaagcccaatgcaaggaaatccaaaaaaagrcaatacaagaagtgaaggaagaaatattcaaggaaataaacagcataaagaaaaagcaatcaaaactccaggaaacacttgacacactgatagaaatgcaaaatgctctggaaaatctcagcaatggaattgaacaagtagaagaaagaaattcagagctagaagacaaggttttgaattaacccaatccaacaaagaaaagaagaataagaaaataggaacaaaacctccaagaagtttgggattacattaaacaaccaaacc

SEQ ID NO: 593233 - DNA, 481 bp, Homo sapiens
attcaaagaacaattggtaccaatccttttgacactattccacaagatagagaaagagagaaccctccctaattcattctatgaagccagcatcatcctaatacaaaaaccaggaaaggacataaccaaaaaagaaaactgcagaccaatatccctgatgaacatagatcctaaaatccttaacaaaatacgagctaaccgaatccaccaacatatcaaaaagaaaatgcatgatgatcaagtgggtttcataccagggatgcagggamggtttaatacatgcaagtcaatatatgtgatacaacacataaacagaattaaaaacaaaaatcacatgatcatctcaatagatgcagaaaaagaattcgataaaattctgcatccctttatgattaaaactctcagtaaaattggcatacaagggacataactcaatgtaataaaagccatctatgacaaacctacagccaacataatactg

SEQ ID NO: 593234 - DNA, 594 bp, Homo sapiens
tgggacttagttaaactaaagagcttttgcatggcaaaaggaacagtcaccagagtaaacaaacagcccacagagtggggaaaatcttcacaatctatacatctgacaaaggactaacatccagaatctacaacgaactcaaacaaatcagtaagaaaaaaataatcccatcaaaaagtggactaaggacatgaatagacaattcgcaaaagattgtatatgaatggccaacaaacatatgaaaaaatgctcaacatcactaatgatcaaggaaatgcaaatcaaaaccacaatgagataccaccttactcctgaaagaatggccataataaaaaaatcataaaacagtagatgttggcatggatgcagtgatcaggcaacacttctacactgctggtgggaatgtaaactagtacaaccrctatagaaaacagcgtggagattccttaaagaactaaaaatagaactaccatttgatccagcaatcccactactgagtatctacccagaggaaaagaagtcattatatggaaaagatatttgcacacgcacatttatagcagaacagctcacaattgcaaaatcatggaacca

SEQ ID NO: 593235 - DNA, 594 bp, Homo sapiens
tgggacttagttaaactaaagagcttttgcatggcaaaaggaacagtcaccagagtaaacaaacagcccacagagtggggaaaatcttcacaatctatacatctgacaaaggactaacatccagaatctacaacgaactcaaacaaatcagtaagaaaaaaataatcccatcaaaaagtggactaaggacatgaatagacaattcgcaaaagattgtatatgaatggccaacaaacatatgaaaaaatgctcaacatcactaatgatcaaggaaatgcaaatcaaaaccacaatgagataccaccttactcctgaaagaatggccataataaaaaaatcataaaacagtagatgttggcatggatgcagtgatcaggcaacacttctacactgctggtgggaatgtaaactagtacaaccgctatagaaaacagcgtggagattccttaaagaactaaaaatagaactaccatttgatccagcaatcccactactragtatctacccagaggaaaagaagtcattatatggaaaagatatttgcacacgcacatttatagcagaacagctcacaattgcaaaatcatggaacca

SEQ ID NO: 593236 - DNA, 594 bp, Homo sapiens
tgggacttagttaaactaaagagcttttgcatggcaaaaggaacagtcaccagagtaaacaaacagcccacagagtggggaaaatcttcacaatctatacatctgacaaaggactaacatccagaatctacaacgaactcaaacaaatcagtaagaaaaaaataatcccatcaaaaagtggactaaggacatgaatagacaattcgcaaaagattgtatatgaatggccaacaaacatatgaaaaaatgctcaacatcactaatgatcaaggaaatgcaaatcaaaaccacaatgagataccaccttactcctgaaagaatggccataataaaaaaatcataaaacagtagatgttggcatggatgcagtgatcaggcaacacttctacactgctggtgggaatgtaaactagtacaaccgctatagaaaacagcgtggagattccttaaagaactaaaaatagaactaccatttgatccagcaatcccactactgagtatctacccagaggaaaagaagtcattatatggaaaagatatttgcacaygcacatttatagcagaacagctcacaattgcaaaatcatggaacca

SEQ ID NO: 593237 - DNA, 558 bp, Homo sapiens
ctttgactctttctctacaataggaaaaaatgagtgtcttcactacatttatttcctatgaagtatcttcacttcctttctttcctattgtagagatagaaaatttagcctttaaaataagcagtctgaacctagtaaagagtagaagtgcctatccctcgatgtaatatgaagaaagatggaccaaataagcacrttatatttatacacagcatccaaaatatcaaaattttattaaaccatctctattcattttacctatttgaagttaaaataacaacacaggagggcaaaatttttttaatctgcaaaactaaataaagatattaactattttagaaacagtcactatcagcaattctatttctatattttcataataatgacatatgagcataaggtttctgtgcaggaggaaatgtggtcaactcaatttgtattaccctaccgcaggaaagaggcattttcccatagatcagagaaaatacatgaactagctagaccactgggccataaaatccacttagaagcagcacgtcttttcatattatgaaagca

SEQ ID NO: 593238 - DNA, 478 bp, Homo sapiens
gttatcggtgaatagaaacgctactgatttttatacattgatttttctatcctgaaactttatggaagtagtgtatccaaccccataaaaaagtgggcaaaggacatgaacagacacttctcaaaagaaaacatacaagtggcctacaaacaaaaaaatgctaggagccttttggtggagtttttagtgttttatgttatagaatcatatcattagtgaagaaagataacttggctttttttcctattgggatgctttttatttatttctcttgcctgatttatctggctagaactttcarcactgtgttcaatgggagtggtgttcagtgggcatccctgttttattcagttcttaaggggtatgttcccagcttttgcttgttcagaatgacattgcctaaatgcttttcataaatggctcttactactttgaggtatgttccattgatgcctagttagtcgagagactttatcat

SEQ ID NO: 593239 - DNA, 364 bp, Homo sapiens
ttttggaatagcttcagtagaattggtaccaactcttctttgtacatttggtaaaatttggcagtgaatcagtctggtccagggcttttttcaggtggtaggatttytgttactgattcaattccagaactcaatattggtctgttcagggttttagtgtcttcttgattcaattttggaaggttgtatgtgtccaggagtttatccatttcttctagactttcaagtatgtgtgcacaaggctgttcataatagtctttgaggatcttttgtatttctgttggattcattgtagtatcacccttgtcatttctgattgtgcctatttagatcttctcttttttttctttgtaagtttaggtag

SEQ ID NO: 593240 - DNA, 372 bp, Homo sapiens
ttatactacttaatcacttagctataattttgttttaattttttaaaatgtggatttctaacttgtcccttgatgaygctaacctcacatcattatccagtgtcttatttttctgatgctttctttgcctctcttctaatcctcctctccatttcatgaaatctaaggtttttattatcagagtgcaacaaatgtctgataataacagacatttgtttttttcctacatttttatccccaaatctttgcctacattagtgtttctcaaagtatggagagagaatgacaagcattgagatcacccaggaagtaatttagtaatttttcaaaacaataaacatagacttatcatatgacacagcaattccactc

SEQ ID NO: 593241 - DNA, 545 bp, Homo sapiens
actttaaatggtgaattttatagcatatgatttcttggccaataaaatgataagaaaaaaagaaaatctgtttaaaatgcatatttctgggcccaacctcatacctactgaatcagaattttactaagaaggcagccaaagacttttttttttttttttgtaaagtaccctagaaggttcttaaggacattaaagtgtgaaagcctggtatgaaacatgyattatcttagcaaacacacaaaatctctgcccactgctcttcgaatcaacttttgcactaggctagcaaatagtagaactatttctatttcttctaagcttttacatagtggttattacccgtctgcttcattcagcctgatagcttgcatttccaccctaaagcccaattgaattttttccttcttttgatcttccaacatttttttctacatataacattgactatatatttactaggggcaattccccctttacatgtattttctgcccttcaaatattcttttattttaaatattaaacctaaaatcatgtatacatatgg

SEQ ID NO: 593242 - DNA, 545 bp, Homo sapiens
actttaaatggtgaattttatagcatatgatttcttggccaataaaatgataagaaaaaaagaaaatctgtttaaaatgcatatttctgggcccaacctcatacctactgaatcagaattttactaagaaggcagccaaagacttttttttttttttttgtaaagtaccctagaaggttcttaaggacattaaagtgtgaaagcctggtatgaaacatgtattatcttagcaaacacacaaaatctctgcccactgctcttygaatcaacttttgcactaggctagcaaatagtagaactatttctatttcttctaagcttttacatagtggttattacccgtctgcttcattcagcctgatagcttgcatttccaccctaaagcccaattgaattttttccttcttttgatcttccaacatttttttctacatataacattgactatatatttactaggggcaattccccctttacatgtattttctgcccttcaaatattcttttattttaaatattaaacctaaaatcatgtatacatatgg

SEQ ID NO: 593243 - DNA, 545 bp, Homo sapiens
actttaaatggtgaattttatagcatatgatttcttggccaataaaatgataagaaaaaaagaaaatctgtttaaaatgcatatttctgggcccaacctcatacctactgaatcagaattttactaagaaggcagccaaagacttttttttttttttttgtaaagtaccctagaaggttcttaaggacattaaagtgtgaaagcctggtatgaaacatgtattatcttagcaaacacacaaaatctctgcccactgctcttcgaatcaacttttgcactagrctagcaaatagtagaactatttctatttcttctaagcttttacatagtggttattacccgtctgcttcattcagcctgatagcttgcatttccaccctaaagcccaattgaattttttccttcttttgatcttccaacatttttttctacatataacattgactatatatttactaggggcaattccccctttacatgtattttctgcccttcaaatattcttttattttaaatattaaacctaaaatcatgtatacatatgg

SEQ ID NO: 593244 - DNA, 517 bp, Homo sapiens
tgtgttttgtaagaaaaacctggacataaaaataacatattttatgaatatgttcatagaactagtttataaaatagatacagggaggggaacatcacacaccggggcctgttgtggagtgaggggaaaggggagggagagcattaggacaaatacctcatgcatgtggggcttaaaacctagatgatgggttgataggtgcrgcaaaccaccatggcacatgtatagctatataacaaacctgtacgttcggcacatgtatcccagaacttcaagtaaaataaaatttaaaaaaagaataaaaaaatcaagctgatagaaatcagaacagcagctgtctatgggaaggtgggcacaagtgggaatggactgtagggtggcacgaggaactttctgagggagagaaaaagttctatatgctgattccatgtttgctgtctaagtgtatatactcatccaaatccattgaattgtacttttaagatctgcgcatgtcatgaacagttggtccttatta

SEQ ID NO: 593245 - DNA, 573 bp, Homo sapiens
aacatggcattggagaattgagcctaaatggataaagaattactggcataatttttgtatatttccctaaggccctataaatactataaaatgaaatacagaagttaataaaaaaaattwaaaaaatcaagagtcaattgagttggaaatgacttcaagacagagttgataacaatatatgctttatcaaagagtctattcagtgatgactgaatcagatttatactgatccatgaatttgaggtacaatcaagatgaaaccctcacctccaatgggtcagtgggtctgaaccttcacctgtggctcaggtgatagcatccaacgggatgctaatacgtggtgggacctttggaaggaaattagattcagatgatatcatgagagtgtggtcctcatgatgggattagcactcctataaaaagagaaggagactagagcttactctctgctgtgtgaggatatggtgagaagatactgtcaacaagccggaatgcaggccctctcctgacactggatctgccactgccttgatcttggattccccaactctgaactgtgaaaaaggaatgtta

SEQ ID NO: 593246 - DNA, 564 bp, Homo sapiens
aagctgctgtggataggtccaaaacaatacttagattttgagtttataatagaaatttggagagtccagtttctagtcttatctagacccatggcaagccatttcaactttgatgaaaaagatttaacctatttactwcatagaagggctttagagaaacaaaaagagaaagcatactataattcttatgttttcagactctgttgttaggtacagagcagaattttgaagatgcattaattctttcaagtcatgaaggcagtgtacaagagcaagttacaaaatggcggcctgagaccaaaagaaccaatgaattatcttacagagacttgcttgctttgcttcctcttttcacagtaagttatctcaattgtcctatttttaagtttactgattatttcttctgtctactcaaatctgctgttgaacctttctggtgaatttttcactttagttattatactttttagtatccgaatttctattttgtttttatactatatctttattgatatccttgacttgtttgtacatcattctcctagttttcttcagttctttatt

SEQ ID NO: 593247 - DNA, 577 bp, Homo sapiens
gaattatgtggcatcctctatacagatgctgtgtatattttgttagatttatagccaaatattttatatccttgctgctaatgtaaatgctattatgtttttactctttaatttgaattatttgttgttggtatatagaaaagcaattgactttcagtgttaatatttgatcttataacaggtttatttgttctaggagtatttttcttaagtctgggatttgctgcataaacaatcatgccctatctgtccacattttatattttccttttcttgtcttatttcactagctatggcttccatgttgaataggaatggtaagaaggaacatcattgctgtattagtccgttctcacactactgaaacaacatacctgagactgggtaatttatggataaaagaggtttaattgactcacagttccacaggctgtacaggaggcacagctggggaggcctcagaaaacttagaagcatggtggaaagtgaagaggaagaaagtaagtcttaccatggtggggcaggagagagagggcaagagagaatgacggggraagtgctacacattttcaaacaa

SEQ ID NO: 593248 - DNA, 409 bp, Homo sapiens
gggctcatgggaaaaatagtctctattatcctttaatttttgaactcatttgtttgcagtctttaagaattaaaaactttttgcaatatgttaaattccatggttatattttctttcctttgacatatttaacataattctatgtgacttctgctatgcaatgttggtattgaaaggctaaagctactctctttctagtaggataaccttataatttattgttcaaagtargacacttgagaatgtaaaagaaggagctgttactaataaaaataggacaacagctccctttacacacacacacatattcatttcaaaatgtttactagactttctctccacgtggaccacaccgcatcaaattttgtaggtacacaatggaccctttcactaggtgtcagcttgcatt

SEQ ID NO: 593249 - DNA, 548 bp, Homo sapiens
cattttttctttttttaatttttctttttcctcttcctttttcaaacaactctttaaawatgtacaaaattattttatgattagtaattatacaaacacaggatacaaactagaattgactcatgatctgtagttttctgacatctatacttactaaatttctctgaaagattttaaaaaattctctttctttatttctgatacttttgtctctggctttttaaaaaaaattatctactttttgtaccatgttttccatggtgtcttagccaccttggactgtgataacaaattgcagtaggatgtgcggtttaaacaacaaatgtttctttctcacagttgtgagggtggagaagtccaagatcaaggtgtcagaaaggtagatttcattctacagcttcttttcttggttggtaggtgcctgccgtcttgctgtatgtttatataactgcctctctgtgagctcgttgagagagagaacaagcacaggcattctggtttctctttttataaggacagtaatctcatcatgggcactgtctcctcat

SEQ ID NO: 593250 - DNA, 543 bp, Homo sapiens
aaaaaacatgaggcaaaaactggtaagactgtaaagatagacaaacaactattatatttggaaatttcagtatccctctgtcagaaaatgattgatcaattggacatctacagactaaataacaaataaacctatgcatagttcttacacactttcatacacacacacacacaccttccataagataacataggaaaatgtttaggtgactttgttggtttggagataacttttgagataaaccatggaaagcataattcaggaaaaaatagtaagctgtactctattaaaattaaaaacttcaattctgcaaaagtcactgttaagaaaatgaagagacaggccacatactgaaagaaaatacttgcaaaatgtatctgataaaagactttatccaaaatatacagtagtttttcttatctgtggtttttccttccatggttttcctacccacagtcaaccacagtccaaamacaataaataaaaaattttagaaataattcagaagttttaaattgcataccattctgaatagtatgataa

SEQ ID NO: 593251 - DNA, 367 bp, Homo sapiens
gatgtgtcacattatttgacattagagaattgcaaattaaatggcaatgagatctcagtacaaaacgtttagaacaaccaaaatccaaaatttcatggtaccaaatgctgtcaaggattccaatcaacaagagctctyatgctttgctggtgggaatccaaatggtacaataatttggaagacagtttggcactttcttgcaaacctaaacattgccttcatatacaatccagatactgggcttctgggtagtcagtcagctgatttaaaaacttatgtccacacaaaaacctgaatctgaatgttgatagtagttttgttcaaatgaccgaaaactggaagcaactgagatatccttcagcagata

SEQ ID NO: 593252 - DNA, 367 bp, Homo sapiens
gatgtgtcacattatttgacattagagaattgcaaattaaatggcaatgagatctcagtacaaaacgtttagaacaaccaaaatccaaaatttcatggtaccaaatgctgtcaaggattccaatcaacaagagctcttatgctttgctggtgggaatccaaatggtacaataatttggaagacagtttggcactttcttrcaaacctaaacattgccttcatatacaatccagatactgggcttctgggtagtcagtcagctgatttaaaaacttatgtccacacaaaaacctgaatctgaatgttgatagtagttttgttcaaatgaccgaaaactggaagcaactgagatatccttcagcagata

SEQ ID NO: 593253 - DNA, 560 bp, Homo sapiens
tcttcttaccactctacatttctgggcaagactgatgtaatcctagatgcttctgtagctcatagaaaatggtgtttcctactgtgtgccctgtggaacgctgctacaaggtattagaagatgttctactaaaaaaaaagaaaaaaaatgtcccatggaaattatgtgataaacaaattccaccagggttccatatacagtgtgcaatgtgagcctctaagaaggtgatataattaaacagcgttatcccaggatgtagctccaggattatgctttctccccactccagaggatatgagaayatggcatgcagaattacacagaagacagtctgggacacaatgacagagacagaagattctgctctttggcaatatggatggggggcacttaagcacctcaaaaagaatgtgagcaggtatcaagacattcgtcttgaatgtgtttcaatagattgaaatactagtaatttgagctttactctttattgattattggtaacaatttatttaggacatacctgaggacaaaggactcagaaaactcttgtcctggtgggc

SEQ ID NO: 593254 - DNA, 434 bp, Homo sapiens
ttcttcccagctgtcttgaagcaagaagtgagggtgaagagcagtgggaggggtaccctcaacctcctctctcctcagacagataaaagagcaaggtgggcatggggagggagagcctcttactggccacgcttaayagggatgtttggccatctctagggtgagaagcccttttgagcccacagcccagtaaacctgacttgtctgaacagaggggacattgtacctgaggtcaccgtggccaaacagcacgatgagaggaggcactaggcagcttccttcctggcaaccttgatttcagggccacatggagtctcacactctaactctcactctgtgtcttactcttcctctagccaattgctagaggaaaggaggattacatgttcttgggaaatttagcacatgttcttggttttctgtggctgtacact

SEQ ID NO: 593255 - DNA, 587 bp, Homo sapiens
gccaccatgcccagcctatcatttatttgtagttaattttattaagagtataatgtctatgtccagatttatatttttgcttatggctgtccatttgttccagtatcacttactgaaaaagctattttttctccattgtattacctttgctcctctatcaaaaatcagtttctgggctcattattttgtttcattgatctatttgtctattcttttaccaatatcacactaccttcattataatagtactatgctaattmttgaaattgggtagggtcagtcctaagattttgttgttcttcaatattatgttggctattctgggtcttttgcctctctatataaactttaaaattagtctgttgatatccataaaataagttgctggtattttaactgatattgctctgaataaacagatcagtttgagaagaactaatatactgactatattgagtcttcttatcaattaacatgaaatatctctcagccaggtgcagtagctcaggcctataatcctgagactttgagaggctgaagtgggcagagtgcttgagcccaggagttcaagatcagcctgggcaacg

SEQ ID NO: 593256 - DNA, 576 bp, Homo sapiens
ggagagctgttttgagtggattcagtagctggtaaaaatacacagatcttatcccctccatctttgggctgtggaagatcgacattggatggtggtgacaaccaggtggtgtcatcccctttcccccaacacagcacctgctccataggaaagatcaaaataaggcagccagtgaagaatragttactcatttccccaatcccttgttctagaatgcacacattctgcccaggggagcataggagcaagccacaaagactggtaatactctggccccaccaaggggcccacgaaggagatcaaaacatggataaatcagctagtaattggtgaagacgaatgagtaggtgtaataccaataaaggcagaccaccaataagtttaataaagaaatcaagggaagaaacaataaaagagcccgtctagaatcacggtaattaattccttttgctcaggatgtgtgtttatgcccaagtgcaccttcctctgaggagcaagtggagagggaccttctgagttataagtccctggataaacatgggtcaaactcataatatccccagacagtgaaagcaa

SEQ ID NO: 593257 - DNA, 576 bp, Homo sapiens
ggagagctgttttgagtggattcagtagctggtaaaaatacacagatcttatcccctccatctttgggctgtggaagatcgacattggatggtggtgacaaccaggtggtgtcatcccctttcccccaacacagcacctgctccataggaaagatcaaaataaggcagccagtgaagaataagttactcatttccccaatcccttgttctagaatgcacacattctgcccaggggagcataggagcaagccacaaagactggtaatactctggccccaccaaggggcccacgaaggagatcaaaacatggataaatcagctagtaattggtgaagacgaatgagtaggtgtaataccaataaaggcagaccaccrataagtttaataaagaaatcaagggaagaaacaataaaagagcccgtctagaatcacggtaattaattccttttgctcaggatgtgtgtttatgcccaagtgcaccttcctctgaggagcaagtggagagggaccttctgagttataagtccctggataaacatgggtcaaactcataatatccccagacagtgaaagcaa

SEQ ID NO: 593258 - DNA, 576 bp, Homo sapiens
ggagagctgttttgagtggattcagtagctggtaaaaatacacagatcttatcccctccatctttgggctgtggaagatcgacattggatggtggtgacaaccaggtggtgtcatcccctttcccccaacacagcacctgctccataggaaagatcaaaataaggcagccagtgaagaataagttactcatttccccaatcccttgttctagaatgcacacattctgcccaggggagcataggagcaagccacaaagactggtaatactctggccccaccaaggggcccacgaaggagatcaaaacatggataaatcagctagtaattggtgaagacgaatgagtaggtgtaataccaataaaggcagaccaccaataagtttaataaagaaatcaagggaagaaacaataaaagagcccgtctagaatcacggtaattaattccttttgctcaggatgtgtgtttatgcccaaktgcaccttcctctgaggagcaagtggagagggaccttctgagttataagtccctggataaacatgggtcaaactcataatatccccagacagtgaaagcaa

SEQ ID NO: 593259 - DNA, 551 bp, Homo sapiens
atcctaacttcagacaaaacagactttaaacttcagacaaaacagactttaaaagatcaaaaaagacaaagaagagtattacataatggtaaagggttcacttcaacaagaagacttaactatcctaaatatatatgcacccaacacaggagcactccgattcataaagcaagttcttagagacttacaaagagacttagaatccctcacaataatagcgggagacttcaacctttggtgacagtattagacagatcatcaaggcagaaaattaacaaagacattcaggacctgagctcaacattggaccaaatggacctgatagacttctacggaactttctactcaaaaacaacagaatatacattcctctmattgtcacatagcacatactctaaaatcaaccacataattggacataaaacaatccccagcaaatgcaaaagaactgaaattataccaaacacactctcagaccaaagcataataaaaatagaagtcaagactgacaaaaatgttcaaatccatgcagttacatgggtattgaacaa

SEQ ID NO: 593260 - DNA, 606 bp, Homo sapiens
aagtattcacaattaccattgaagaaatttgatgattagcatttgatatcactgaggctaggagatgcagcaagaacttcagtgggtaaatttctaggcagacaaacaatattactaaaatagaaggtatatgagccatytgcccctttttacaaggtatatgagccatctgcccctttttacaaactacagaacatttaaaattaattcaataagcagaattcctggtattattattaaatatcaacttttcaattgacctggccataaaccatctgttggttgataaagacacacatcctaaacttacagaaatagtaccattattcaactttatatgccagtggttcatttctttaacaaatatgtagcgctctccttcatgctatgctagactgaactaattgttcaggacgtcagaggacaagtttagttcttgctctgagaaaacatcatctgtatgagtttgcaagggtttccataataaaataacaaagattggcatggcataagcaacagaaatttattttctcacagttttagaggctagaagccaagatcaaagtaccctcagggttgttttctggtgagggctctcttcctggc

SEQ ID NO: 593261 - DNA, 606 bp, Homo sapiens
aagtattcacaattaccattgaagaaatttgatgattagcatttgatatcactgaggctaggagatgcagcaagaacttcagtgggtaaatttctaggcagacaaacaatattactaaaatagaaggtatatgagccatctgcccctttttacaaggtatatgagccatctgcccctttttacaaactacagaacatttaawattaattcaataagcagaattcctggtattattattaaatatcaacttttcaattgacctggccataaaccatctgttggttgataaagacacacatcctaaacttacagaaatagtaccattattcaactttatatgccagtggttcatttctttaacaaatatgtagcgctctccttcatgctatgctagactgaactaattgttcaggacgtcagaggacaagtttagttcttgctctgagaaaacatcatctgtatgagtttgcaagggtttccataataaaataacaaagattggcatggcataagcaacagaaatttattttctcacagttttagaggctagaagccaagatcaaagtaccctcagggttgttttctggtgagggctctcttcctggc

SEQ ID NO: 593262 - DNA, 557 bp, Homo sapiens
taacacaggaacagaaaaccaaatactgcatgttctcacttataagtgggagctaaatgatgtgaacacatggacagacagagggaaacacacactggggcctctcagagggtggrggatgggaggagggagaggatcaggaaaaataactaatgggtactaaggtgatgaaatacctcggtgatgaaataatctgtacaacaaacccatggcacaagttacctatgtagcaaacctctgcccttgtatccctaaacttaaaatagaagtttaaaaataagaggaaggaaaagaatatatattcaccacaagacatattcaagaatgtttctagtggcagtatttgaatttcttccaaactagaagcaacccaaatatccatctacggtaaaataggagacaatttgtaatatactcacatacacagtaatgagaatgaactatactatcttctgcataggtgaatctgtcaaatttaatattaagcaaaacaggctagacacaaaacagtatatctaatactcttaaattaagagttaaacttcataaacaggaaa

SEQ ID NO: 593263 - DNA, 588 bp, Homo sapiens
aattgacctttgacaaagatgcaaaaacaattcaatgaggaaggatagctttttcaacaaatgatattaaacaagtagacatccatgtgcaaaatgaacctcaaccaaaatctcataccttataaaaaattaactcaaaatagatgacagttctaaatataaaatataaaactgtaaaatttttaggacacataagagaaaatttttaagacctgaagtcggtaaggagtttctagacaggaaaccaaaagcacaatccatggaaaaaaaaaagtaataaactggactttatcaaaattacttatttttatttttttcagacagggtctcactctgtcacccaggctagagtgcagtggtacaatcacggctgactgcagcctcgacctcccagatcatatcatccttcttcctcagcagggctactgtagctgggactacaagtgttcaccaccacatccagttaatttttgtattttttgtagagacaggatttcaccwtgttgcccaggctggtctccaactcctagcctcaagcaatcctcctgccttggcctcccaaagtgctaggattacaaacatgaggca

SEQ ID NO: 593264 - DNA, 585 bp, Homo sapiens
atccatgctgctgcaaaggccatgatctcacttttttatagctgcatagtattccatggtgtatatgtaccctattttctttatccagtctaccgttgatgggcatttaggttgattccgtatctttgctattgtgaatagtgctgaaatgaacatatacgtccatgtgtctttgcatgcacatacatgtccaattcagcactatggtagaatgtacatggttgaatgatttatttatttatgtgcatggtaaacgatggatggattgattgatttttgagatagagtctcgatctgtcaaccaggctggagtgcagtggcacgactctcagatcactgtgatctctgcctctcgggttcaagtgatactcatgcctcagacaactgagtagctgagattacaggcacgtgccaccatatccagctaattttcatatttttagttaagatggagtttcaccatgttggccaggctgctcttgaactcctgacctcaggtcatccgcccgtctcaaactcctgacctcaggtgatcctcctgcttcrgcctctcaaagagctgagcctaaaggcatgagccactgc

SEQ ID NO: 593265 - DNA, 596 bp, Homo sapiens
gaggagactctgtctcaaaaaaaaagaaaaaaaagaaagagaagggaaaacagctctctctctagtgagaaagagaggggacttcccagagggaaagaccagcctggtggatgccgggactttatagtcaggcttgaggaggcagtgtctgatttacataggggtcacagattggttaatcagatatgacatttacatagcaggtggggaaggctggtggtccaccctaatcttattatgcaratgaactctccccttggccgcagccatcttgtcagctccttattgtacccttggctggcggagaagggaggatggagccaccattttgaacatgtctagtcctaggtagttctttcctgccggcatctacccgtgcaagcgcctggcttgctcgtctatgtctgtagcttgactgtataggttgctgtttgttagaaaatgatttggggccgggtgcaatggttcacgcctgtaatcccagcactttgggaggctgaggcgggtggatcacctgaggtcgggagttcgagaccagcctgaccaatatgaagacaccccgcctctactaaaaatacaaaaattagccaggtgtg

SEQ ID NO: 593266 - DNA, 596 bp, Homo sapiens
gaggagactctgtctcaaaaaaaaagaaaaaaaagaaagagaagggaaaacagctctctctctagtgagaaagagaggggacttcccagagggaaagaccagcctggtggatgccgggactttatagtcaggcttgaggaggcagtgtctgatttacataggggtcacagattggttaatcagatatgacatttacatagcaggtggggaaggctggtggtccaccctaatcttattatgcagatgaactctccccttggccgcagccatcttgtcagctccttattgtacmcttggctggcggagaagggaggatggagccaccattttgaacatgtctagtcctaggtagttctttcctgccggcatctacccgtgcaagcgcctggcttgctcgtctatgtctgtagcttgactgtataggttgctgtttgttagaaaatgatttggggccgggtgcaatggttcacgcctgtaatcccagcactttgggaggctgaggcgggtggatcacctgaggtcgggagttcgagaccagcctgaccaatatgaagacaccccgcctctactaaaaatacaaaaattagccaggtgtg

SEQ ID NO: 593267 - DNA, 508 bp, Homo sapiens
tataccacattttctttgtctattatatattgatagacacttgattttatatcttgcctattgtgaatagtgctacaataaatatgggggtgccaaatattccttcartatactaatttcctttccttttgataaatacccagtagtggggctgctggatcatatggtagttctatttgcagttttctgagaaacccctttactagtattcacagtggctgtactaatttacattcccatcaacggtgtataagagtttccttttctctgcatccttgccatcttttgttatttttttatctttggatagtagccattgtaactgaggtgagatgatatctcattgcggtttcaatttgcatttccctagtgatttgtgatgtcaagcatttgttcatatacttgttggccatttgtatatcttcttttgagaaatgtgtattcagatcctttgctcactttttaatgaaattatttgttgggtttttatttatttattcactttttg

SEQ ID NO: 593268 - DNA, 508 bp, Homo sapiens
tataccacattttctttgtctattatatattgatagacacttgattttatatcttgcctattgtgaatagtgctacaataaatatgggggtgccaaatattccttcaatatactaatttcctttccttttgataaatacccagtagtggggctgctggatcatatggtagttctatttgcagttttctgagaaacccctttactagtattcacagtggctgtactaatttacattcccatcaacggtgtataagagtttccttttctctgcatccttgccaycttttgttatttttttatctttggatagtagccattgtaactgaggtgagatgatatctcattgcggtttcaatttgcatttccctagtgatttgtgatgtcaagcatttgttcatatacttgttggccatttgtatatcttcttttgagaaatgtgtattcagatcctttgctcactttttaatgaaattatttgttgggtttttatttatttattcactttttg

SEQ ID NO: 593269 - DNA, 449 bp, Homo sapiens
aaattataagattcaacactttattataaaatagagtttgtgtttgatgattttgcccaactgcaggctaatgtaagtgtacattcaaggtagctagcctaactacgatgtttggtagattcagtgtattaaaaacattttcaacttaacaatattttatacttataatggtttatcaggatgcccattataggttgaggagcatgtattaatatacatggtgaggtcagggagaagcaaaatatgtagctttaatgagtcaatatgtacgaaaaagraactcaaacagactcaacttgatggcatttctgagataatgttacttagaatgtattttacaatttaaaatgtgtttggtaacacagtgttgcaattttagtagtcaaattgctttagaaaaaaagtcaaaatcaatcataaggtggtctaactggttaaaaagttactga

SEQ ID NO: 593270 - DNA, 524 bp, Homo sapiens
gtgtgtgtgtttgtgtatgcaaatagtgttaaattattattagattagaataatgggttataagatggtacttgcaagcctcatgggaacctcaaacaagaaaacatacaatggatacagaaaaaaataaaaataaaaacactagctcatgttatcagagacaaccaccttcactagaggaagacagaaaagaaagaagaaagagaaaaccacaaaacaaccagaaaacaattaacaaaatggcaggagtaagtccttccttatcaataatataataacattgtacataaatggattaaactctccaatcagaagacacagactggctgaatggatgaaaaaagactcactgatctcttgcctacaagaaacacacttcacccataaagacacagacagaccgaaaacaaaggsatggaaaaagatatttcatgaccatggaaaccaaaacagagcagaattcactgtacttatatcagacaaaacaggtttcaagacaaaaatagtaagaagagacaaagaag

SEQ ID NO: 593271 - DNA, 416 bp, Homo sapiens
agccatcttgaaagaggattttccagcacccagtcaagctgcctacttcgggttaggctctccagaagcaaacactgagatggagtgggtaatacaagtgggtaggagaaatcaacatctgtgaaagaaagaggaaacrcaggaccgagcagaggaaaaatctaaatcgtaatgaaggtctgacaaagcccttgccaaccagctatgaagctctgcagtggattttgcccatcgaatttgttcagtgtcaggttagaatgagcagaactttgtattcctgccttgctcagtcatcagatgagagctgccctggaaaggatgtgacctccagatgaagcagctctctgcatctaagacagatcccgaaaggcgtgacagctagaagtgtctgctaaccatacaccccacacacccca

SEQ ID NO: 593272 - DNA, 481 bp, Homo sapiens
cttttaaaatgtgatggtattttaggcaacataaataagggtggagttttccctaaattaaaaaaaatcttctaattttaaaatattttaagaatatgaaaaagggtgattacggaaataagaaataaattataaaatataaaataaagttttattatcggcatcgataactagttaaaatctcagctcatttaccagatagataacattggacaaaccacttaatctcttggaatttcaatttactaatctttaaaataggtctaatagcactgatttcatgttacttctataatcttagatgtgatcatacataatagcagcatgtgcattcagatcttggtatatattagtggcttgacacttgtttgttgatgataacatatttagtgtacatagtaacattaacccaatgcacagattattaataatattaaaatyggtttgttgaatcaaagcaatgtaaatttttgcataattt

SEQ ID NO: 593273 - DNA, 481 bp, Homo sapiens
cttttaaaatgtgatggtattttaggcaacataaataagggtggagttttccctaaattaaaaaaaatcttctaattttaaaatattttaagaatatgaaaaagggtgattacggaaataagaaataaattataaaatataaaataaagttttattatcggcatcgataactagttaaaatctcagctcatttaccagatagataacattggacaaaccacttaatctcttggaatttcaatttactaatctttaaaataggtctaatagcactgatttcatgttacttctataatcttagatgtgatcatacataatagcagcatgtgcattcagatcttggtatatattagtggcttgacacttgtttgttgatgataacatatttagtgtacatagtaacattaacccaatgcacagattattaataatattaaaatcggyttgttgaatcaaagcaatgtaaatttttgcataattt

SEQ ID NO: 593274 - DNA, 481 bp, Homo sapiens
cttttaaaatgtgatggtattttaggcaacataaataagggtggagttttccctaaattaaaaaaaatcttctaattttaaaatattttaagaatatgaaaaagggtgattacggaaataagaaataaattataaaatataaaataaagttttattatcggcatcgataactagttaaaatctcagctcatttaccagatagataacattggacaaaccacttaatctcttggaatttcaatttactaatctttaaaataggtctaatagcactgatttcatgttacttctataatcttagatgtgatcatacataatagcagcatgtgcattcagatcttggtatatattagtggcttgacacttgtttgttgatgataacatatttagtgtacatagtaacattaacccaatgcacagattattaataatattaaaatcggtttgttgaatcaaagcaatgkaaatttttgcataattt

SEQ ID NO: 593275 - DNA, 388 bp, Homo sapiens
gtaacaacaatggctgccaccacattgtctgcacctttgaaatcagaagcagcagtcagtgattaacacattgattctttatatttggaggacagtgtcctttttgcccttcttggctctcacaagctgtgtacaagctgctccagaaatatgtacacaactgcctgcrgtgggccttggaagtggaaggtgtgaagctgctactgtggtaattgctaaaattgacagaaattaactgcaatttaccatctaagccttcccatgaactttacaagccttcaatagagttctaaaatagttacacaaaacagatttagccagcacaattgttatctaggtggaaagacagattcttgttattttctactcttccatctttccagaattc

SEQ ID NO: 593276 - DNA, 559 bp, Homo sapiens
acaagccttcaatagagttctaaaatagttacacaaaacagatttagccagcacaattgttatctaggtggaaagacagattcttgttattttctactcttccatctttccagaattcttatggataatatatatttatgacatataatattgagaaattatagtagaacctctcaaagccttcatattttcatcttccacttactatcccaaaccatatgctatttctaggtaaaaggrgacagtctgacaaaagtcctgtaaaattgactagttgtaaaacctatggcaaaactacatgctgcctaattatggtgtataaattactataggctacagtctgagtaaaaaaaaggcataaaaattaagtttagtatacatccacactttctgttacaatgcttactaagaatggacatgttatatacctattttttttaacatggtggacactagccgcatgccattgttgggcacttgaaatgtggctattatgacagagaaactagttttgaaattttattatttcacattagtttaaatttaaatacacacatgt

SEQ ID NO: 593277 - DNA, 559 bp, Homo sapiens
acaagccttcaatagagttctaaaatagttacacaaaacagatttagccagcacaattgttatctaggtggaaagacagattcttgttattttctactcttccatctttccagaattcttatggataatatatatttatgacatataatattgagaaattatagtagaacctctcaaagccttcatattttcatcttccacttactatcccaaaccatatgctatttctaggtaaaaggagacagtctgacaaaagtcctgtaaaattgactagttgtaaaacctatggcaaaactacatgctgcctaattatggtgtataaattactataggctacagtctgagtaaaaaaaaggcataaaaattaagtttagtatacatccacactttctgttacaatgcttactaagaatggacatgttatatacctattttttttaacatggtggacactagccrcatgccattgttgggcacttgaaatgtggctattatgacagagaaactagttttgaaattttattatttcacattagtttaaatttaaatacacacatgt

SEQ ID NO: 593278 - DNA, 594 bp, Homo sapiens
ttgcattatctgctccccaatacctgccatcctcactccaggatatgctacttcttgctataattatttttccagaatgtcatcctttaatttccttaagaatgtcatgtttgttctctcattaaaacattccaaaatatattgcctttgcttggaatctttactccttctgctaacttccagcctgcctattaatactactaagtattattttatatatcacttcctttggcagagtttttcttatcaattttcttttcttttttttttttttattttgagatggattcttgctcygttgcccaggctggagtgcagtcgcccgagcttggctcactgcaacctccatctcccaggttcaagtgattctcccaccttagctttcagagtagctggaattacaggcgggtgccaccatgcccagctaatttttgtatttttagtagagacagggttttgccatgctggccaggctggtctggaactcctgacctcaagtgatccgcccaccttggcctccgaaagtgctgggattacaggcgtaagccaccgtgcccagcctcttaccacttttcaatcggccacaacctgaga

SEQ ID NO: 593279 - DNA, 573 bp, Homo sapiens
tactttagttacactcataatctgcatacttaaagtttgtgctgtggctcacattttctaggaatggttttctcattgctggctaattatttgttcattaaataatcactcattcattcatttcacatctacttattgagcatcaactttgaccaggatacattcctttcactcagggaacttatattctagtaggtaaacattgattggaatttttaattttgactgcatggagctagacattgaagacaagaacagaaagacctaggatttgaacctgcctgatgatgttacattgttgtagtgtgtagagaacacacatatgcttatgatgttatcaagattatatagttctgtctttgatagagagaggtccaggatgctgtgtaaggaacgcccagagaatgctgaaatgatcaaggcagcattgatgatggaaatgacaaatgagctaaaacttgatgtgttattaaataaataaccaaaggattataaaccatgctactataaagacacatgcacaagtatgtttattgcggcactrttcacaatagcaaagacttggaaccaacc

SEQ ID NO: 593280 - DNA, 461 bp, Homo sapiens
tgtgttccactgtgggggaggactgcactaaattctattgcaacatcccacactaacttccctttctctcccccacaaagtcattgttctctccatgttgtgctgcctgaggttggggaaggggtgatttagacaatgcaaggctatccttacccttttcaatsagacttttcttgttatagtggtaaaattaggtagtgtaacatctcacttcattctatggctcctttgaaaatgcatttttgttcaatatgatttctgttcaatatgatgttcccagatgggtgcatggtcactggagggttgtattcagccatcttgctccacctcacaatacattattcaccaattctccttgattatcaattccttcatcttcaaaacagtgtacatatgaaaacattttcatacctttgccaaaaatttaaggtgccattttttataaaatgaaaaacaaaaat

SEQ ID NO: 593281 - DNA, 659 bp, Homo sapiens
cggcgcgcgcgcgcagacaccataataggaatagcggacttaccgaatttagaaagataatcataaatatattggtgcatgtgtattaccttcgaatgagaaaaataggaagcagatgtattcctcgcagggtaatatccttgaaggttttgtttggcctatgggagcaggggcctttatagattttctggttttggcagtcatgtaacgaatctctgcaccaaattgaaagaagtttaggaaaaatccagagggacagagtttttcattgtttctatctttaaaatatgaaaaagattagagattcttcactgaaggtaatttcctagccctgattctagatacatttgacattgagacatttttggttgtcacaagtgtaagggaatgctactggaatcttgtagataaagaccaarcatgttgctaaacaccctacaatgcacaggacagaactgcacccatgaacttgcaaattgtttgcttcttgggcttatagtcagttcacatggagacctgtttgaggaaatggagtgaaattcctttggaaccaaacaactgtagtagtatattatacagcaatctatatatttatacctgaaaatctttgatacgataattcagtgtaaatgaagaagtgtgatctatggcacaaggat

SEQ ID NO: 593282 - DNA, 638 bp, Homo sapiens
  misc_feature 629, 630, 631, 632, 633, 634, 635, 636, 637, 638: n = A,T,C or G
gtcctgaagcagattaatgaatatagaaaacgtaatgtgtatgtgtgtatacactcacacacacacatacatgcaatgggatatgattcagccttataaaagaagaaaattctgtaatttgtgatgacatggatgaatttggaggacattatgttaaatgaaataagccagacactaaaggcaaataccacatgatctcacttacatctggaatctaaacatrtaccctaaaacttaaagtataataaaaaaaaattaactcatagaagtagaaaatagaatggtgattatcagaggaggagaagggtggcattgaaaagatactggtcaaatgatacaaagtttcagttgagtaggagaaattaattcaatctattgtacaatatggtgactatatttaataataatgtatgatattcttgataattgctaagagaatagattttaagtgttctcatcccataaatagtaagcatgtgagataatgcacataccaattatctagatttagccatttcacaatgtatacatatttcagaacaacacattatacaaaataaacatataaaatttttgtcagttaaaagagaaatttaaaaaacctttttatctaagaaataacttttgannnnnnnnnn

SEQ ID NO: 593283 - DNA, 638 bp, Homo sapiens
  misc_feature 629, 630, 631, 632, 633, 634, 635, 636, 637, 638: n = A,T,C or G
gtcctgaagcagattaatgaatatagaaaacgtaatgtgtatgtgtgtatacactcacacacacacatacatgcaatgggatatgattcagccttataaaagaagaaaattctgtaatttgtgatgacatggatgaatttggaggacattatgttaaatgaaataagccagacactaaaggcaaataccacatgatctcacttacatctggaatctaaacatataccctaaaacttaaagtataataaaaaaaaattaactcatagaagtagaaaatagaatggtgattaycagaggaggagaagggtggcattgaaaagatactggtcaaatgatacaaagtttcagttgagtaggagaaattaattcaatctattgtacaatatggtgactatatttaataataatgtatgatattcttgataattgctaagagaatagattttaagtgttctcatcccataaatagtaagcatgtgagataatgcacataccaattatctagatttagccatttcacaatgtatacatatttcagaacaacacattatacaaaataaacatataaaatttttgtcagttaaaagagaaatttaaaaaacctttttatctaagaaataacttttgannnnnnnnnn

SEQ ID NO: 593284 - DNA, 638 bp, Homo sapiens
  misc_feature 629, 630, 631, 632, 633, 634, 635, 636, 637, 638: n = A,T,C or G
gtcctgaagcagattaatgaatatagaaaacgtaatgtgtatgtgtgtatacactcacacacacacatacatgcaatgggatatgattcagccttataaaagaagaaaattctgtaatttgtgatgacatggatgaatttggaggacattatgttaaatgaaataagccagacactaaaggcaaataccacatgatctcacttacatctggaatctaaacatataccctaaaacttaaagtataataaaaaaaaattaactcatagaagtagaaaatagaatggtgattatcagaggaggagaagggtggcattgaaaagatactggtcaaatgatacaaagtttcagttgagtaggagaaattaattcaatctrttgtacaatatggtgactatatttaataataatgtatgatattcttgataattgctaagagaatagattttaagtgttctcatcccataaatagtaagcatgtgagataatgcacataccaattatctagatttagccatttcacaatgtatacatatttcagaacaacacattatacaaaataaacatataaaatttttgtcagttaaaagagaaatttaaaaaacctttttatctaagaaataacttttgannnnnnnnnn

SEQ ID NO: 593285 - DNA, 603 bp, Homo sapiens
ctttatttgatggagactaccactattcgactttacttcaataatttgaggaaacacatttgaattctagatcagcataaacagtttttactacacagtagtcatacataaaagggttttaaatactggcaaaggtaaaaggaagaccataatatcatatttctttggaattttttaagaagccaagagaaaatacttctcaagagtttgtgctaattagttggygttctttactaggaactttcccaaatcgaagcatatcctaattgtggtaacatattcatgacaacattatctgcaaaatatttattacagtcaagcacctccaagtgccctatgcaaaatctctgagacttactgtaggacaaaaattgccttcatgtttaatacacccttgttacacagatgtgccaatgaaagtttgaatgtcatcaaattagttttatttagtatgataatccaaggttaaatgtcagactagtgctaatgagtaccaaggaatgtgtgtgtgtgtgtgtgtgtgtgtgtgtgtgtgtgtgtgtgtgtgtctataagtttcagtgatgacttccataaatttctgcctacagatgaaaagattaa

SEQ ID NO: 593286 - DNA, 479 bp, Homo sapiens
tgaggcaattgaagctagtggagaactttagtgggatgcaaagactaatgatgcctctccattggtacctgagtgaccttgggccagctatttaataccactctgccttgcttccctcatctgcaatactagcgtaataataaaaatatctatacctcctggggaatcttgtgaagattatataaggccatgaattcaaaacattgacccttttccaagacttagaaaatgttcactaaataaagaataattattaaaggctgtcttttgcttataatgcaaaagtcttagcattttaatataccattataatgtaattttcacttttattattgtaatttttgcataatagtgcagaaagcctagattttggacattgttattatagtggtgagacagctttatcagtgaggtcaactgttccaaataagaaaatgcccttggaatatagatkatttaggaataagtaagggagtctc

SEQ ID NO: 593287 - DNA, 607 bp, Homo sapiens
atgctgaactagattgtaaacactatggacccttgcctcttgcgatttgcctgtgaacttggataaaccctaacatgaaatatggggaaagttgattgggcctattcacacgggacttgttcttttgaatagaagtctttaagacgacttatatttaaagaatggattaaaaaacttaaatactatcttaatagaatctattggtaacccagtgaatcatactggaaagagtgccttagctaaactagagttgagaatcagcccggttcccaaagttccttagcaaactctattgggttaataattttgtattatccctaggaatagtgacatctgcttcctgggtataacctactggtcaccaagaaaccagactgtttctgtgaggtgcaagaggtctctgcattgcaaacatgaagaccagacaacacatggctggttcactcttcaygaacaccttcccagtcactgcagaaaagtctcatgatttgtctagcttgaagatatccaggtgatttaaaatgggcaactcccctaagcatgtcttactgaaatggaacccaagaggtctcttggttctactatgtacacaaacacacacactcat

SEQ ID NO: 593288 - DNA, 462 bp, Homo sapiens
ttttggtgaccacagggaagaaaaacagggaagtgaggcagcttttagttttttgacactttagcatttattcagaattttatttttaagatggcagcatttaagccaggaagacagagaaatgktggtagaatactgaaggacatagctagttaggaaaatagaatcaattaggaaaaaggaagtgaatgcttagttttcttgtatgaaaccagaggcaggagtaggctatcccatctaaaaaagatgtcaggtggatcaggtttgatgtcttatgcctgtaatcctagcactttgggagaccgaggtgggtggatcacttgagtccagctgttcaacaccagcctgaggaacatggcaaaaccctgtctctacaaaaacaaaacaaaaccaaaacacacatgaaaaaacaattagctgggcgtggtggtatgggccagtaggcccaaccacttgggagac

SEQ ID NO: 593289 - DNA, 594 bp, Homo sapiens
acagctcagactgtgctttgtggattttgggagaagtgcacattaatgtatggcaggaagatcaggaacacagggccccagataatcacctgcacaatgagtaagcaaatgtcttcacaaaatgtaaggtcctttcacaatcttgcatgtatagatagtgtttcttggaaagagattaaaaaaaaatctcttctcaaattaaaccctttaatttttttattgatttgatttcattcatttattcaatcattcatttaacagtattgagcacctgccctgtactatatyctgtgtttgacatgaaagatactaaattactaatgtctttgtcagctcaggctgctgtaacgaataccataccctgggtgacttagcaatgaacattgtttctcacagttctggagattgggagtccaagatcaaggcattggcaaacatggtgtctggtgaggacctgcttcctggttcatagatggaggtctcaccactgtgtcctcacatggttaagagagaaggagcaagctctcttaagattcttatgagggcattaatcctattcataagagctccctcattacatcatctaaaattcta

SEQ ID NO: 593290 - DNA, 611 bp, Homo sapiens
ttaaaaagagtgttaacaagacataattttacctttagatcatgtaatacatatttgttgataacacactggtttacttcactacagtggaactatctataacctaaaaccaaccaaaattatgagatacacacacacacacacacacacacacasagagagagagagagagagagagagagagagagagagagagagagagacttgttccataatctatttaaaaactgtggttagatgaaactgatatttgggtcaaaagtgaaaggaaagagaatcaacttttgtaaaaccacacttaaccttggaacaggttgacagtttacttaaaaatatttgaaataaataccttatcttgatatgatttcagtttttcctttgaggcagataattttagaatcttaaaaaaaaaacctgtccataattttcaagttactttagttattagattatctcttctaaatgagggaaacagaagaaaataaggaaaataaacttcctctgaaaatttgtattagtgagatcataaataattagcctgcaaattatttgtattgtgggaaagttggcatcaagtctgttgtaatgacccttttttaagatctcagaaa

SEQ ID NO: 593291 - DNA, 452 bp, Homo sapiens
aagacttcagagccttccacagcactgaataatgactattttttatttattttatgttattcttttcagaaatgccttggatgrgttctacagagggccacatacaaattacagtcctgtgtacaaaaagaacatttttcttagtgggatatagaaaatttaactctgtgcattgttacacatagaccataaatctaaagtgtccccaatcctagcttttttcttattccttaaaatataattgattcgacatagcagataacctattcctctgaggagggatgcactcctattgttctcatggccgcattactcatttggcatgctaacgcttactgggcaaagttcttggttgccttttcttgacaatcatcatctccttaactagtctgcaaactcctattgataggaatcatgaaatccctttgttctcccctaaataatagctaact

SEQ ID NO: 593292 - DNA, 557 bp, Homo sapiens
aatgaacacatagaaacacaagaagatacaaaatgaatcaggctcaatatcctttcctctctatctgaaaatgtaaggtaagcttcttttctattgttagtaagaaaatatgagagtagaaaataggtttcacattttttgatttgttcttatattaatagatctattatttatcatagctttttcactttctgtgtgactctgagcaatttacttactctttctgtgattcagtttcctcctttccaaagtggagacaataatgttcagtttacttacaygtaggggtggcataaggattaaatgaatgaatacttataagggttagctcttttcgtctttttccttccccttttgtcttcctcatcctatttgtatttcatccttgtagactaggagttactactttctgtgcattctgcttaaatatatgcatcctaagatgatttttgagtgactgtacatggtttgtgccaaggataagaatgtcttctattctgctttcaactcactgcctgcttatcaatactctgatggcctttttgtctattagaacc

SEQ ID NO: 593293 - DNA, 474 bp, Homo sapiens
atttgggaaactcatcccaaaaagatcatcacccaggcaaatagtcgtcaggttacctaaagtcaagaaaagggaaaaaaatcttaagagctgtgagacaaaagcaccaggtaacctgtaaaggaaaacatattagattattggcagatttctcaacagaaactctacaagccagaaagtattgggtcctgtctttagcctcctgaaacaaaataattgtcaaccaataattttgtatctagcaaaactgagcttcaaaaaatgaagaaaagataaagtatttttttcagacaaacaaatgttactaccaaggctgcactaaagaaatgataaagagttctaatcttgaaacaaaatcttaaaatacaccaaaatagaaactgtttaatgtataaatctcacagtgcctataaaacaacacaaygaaaaaaaacccaaggtattcaggcaacaactgacatgacaaatagaaca

SEQ ID NO: 593294 - DNA, 575 bp, Homo sapiens
gagccactggctttggaggtaaaaatatttcagctcaaatttgcttgctactttttaatttagtgacattgagaaagcttattaatattcctaaatgtcaggaagatttaatagaaatgaatgtgtatatatatataacaacttacttccaaactgttgcttattacttatgtaaataggtttcactgttaaattggtatrtgtgtgtgcatgcaaatgtgtggggtacatgtttgttcatacacacaatttaatagatttggaagcataggcatatagagtagccactttctatgaaggagagaggttatttatttttatttatttatttatttatttatttatttatttgagacagagtctcactctattgcccaggcgggagtgcagtggcatgatcttggctcattgcaacctccacctcccaggttcaagtgattctcctgcctcagcttcccaagtagctggaattacaggcatgcaccaccacgcctggctaattttgtatttttagtagagacggggtttcaccatgttagccaggctggtctcgaactcctgacctcaggtaatct

SEQ ID NO: 593295 - DNA, 458 bp, Homo sapiens
cactctgtcacccagactggactgcagtggcacaatcttagctcacatttcatttcaccatttcatttcatttcccctgcactccactccacttcactccattcccctccactccattccattccaccgctctccattctaatccattccattccactcctttcctatgcactatgatcaactccatcaactccattccactccaatccgttctgttccattccattccattccattccattccattccrttccgttccgttccgttccattccattccattccattccattccactccactccattccgttgcactccactccactccatgttgctacatttcactccactccattccatttgactccactcctctccactccactccattctatcccattcctttcaaatccactccattccgttgcactcctctccactccacttcactccaatt

SEQ ID NO: 593296 - DNA, 458 bp, Homo sapiens
cactctgtcacccagactggactgcagtggcacaatcttagctcacatttcatttcaccatttcatttcatttcccctgcactccactccacttcactccattcccctccactccattccattccaccgctctccattctaatccattccattccactcctttcctatgcactatgatcaactccatcaactccattccactccaatccgttctgttccattccattccattccattccattccattccgttccgttcygttccgttccattccattccattccattccattccactccactccattccgttgcactccactccactccatgttgctacatttcactccactccattccatttgactccactcctctccactccactccattctatcccattcctttcaaatccactccattccgttgcactcctctccactccacttcactccaatt

SEQ ID NO: 593297 - DNA, 458 bp, Homo sapiens
cactctgtcacccagactggactgcagtggcacaatcttagctcacatttcatttcaccatttcatttcatttcccctgcactccactccacttcactccattcccctccactccattccattccaccgctctccattctaatccattccattccactcctttcctatgcactatgatcaactccatcaactccattccactccaatccgttctgttccattccattccattccattccattccattccgttccgttccgttccrttccattccattccattccattccattccactccactccattccgttgcactccactccactccatgttgctacatttcactccactccattccatttgactccactcctctccactccactccattctatcccattcctttcaaatccactccattccgttgcactcctctccactccacttcactccaatt

SEQ ID NO: 593298 - DNA, 455 bp, Homo sapiens
cattcatctcacagagttaaacctgtcttttgattgagcagttttgaaattctctttttatagaatctacaatggacatttggagtgctttgaagcctttggtggaaaaggaaatatcttcatataaaaawtagataaaaccattctgagaaacttctttgtgatatgtgcattcatctcccagatttgacacttccttttgatggaccagttttgaaatagtctttttgtggaatctgcaagtggatattttgagctccttgaggcctgtggtggaaaatgaaatatcttcacatacaaactagacagaagaattctgagaaacttctttgggatgtgtgcgttcacctcacagagttgaacctttcttttgattgagcagtttggaaacgctctttttgaagaatctgcaagtggacatttggagcgctttgaggcctatggtagaaaaggaa

SEQ ID NO: 593299 - DNA, 455 bp, Homo sapiens
cattcatctcacagagttaaacctgtcttttgattgagcagttttgaaattctctttttatagaatctacaatggacatttggagtgctttgaagcctttggtggaaaaggaaatatcttcatataaaaaatagataaaaccattctgagaaacttctttgtgatrtgtgcattcatctcccagatttgacacttccttttgatggaccagttttgaaatagtctttttgtggaatctgcaagtggatattttgagctccttgaggcctgtggtggaaaatgaaatatcttcacatacaaactagacagaagaattctgagaaacttctttgggatgtgtgcgttcacctcacagagttgaacctttcttttgattgagcagtttggaaacgctctttttgaagaatctgcaagtggacatttggagcgctttgaggcctatggtagaaaaggaa

SEQ ID NO: 593300 - DNA, 325 bp, Homo sapiens
tttattcaattccattccttcccattmtattccatctcattccattccaccccactctactccattccactccattccattcgattccattccattccactccactccattccactccattccattccattcctatccactcccctccactccactccattgcattctactccacaccactccactccactccattccattacattccattgcattcctctctactccactccactcacctctgttcaattccattccattgcattccactccactccactgcactcacctctgttcagttccattccatcccattccattccaa

SEQ ID NO: 593301 - DNA, 157 bp, Homo sapiens
tttgtagaatctgcaactatatatttgaaatgccttgaagcctatggtggaaaacgaaatatcttcagataaaayctatacagaagaaatttcagaaactacttcgtgaggtgtgcgttcatcttacagagttgaaattttcttttgattgagcagt

SEQ ID NO: 593302 - DNA, 283 bp, Homo sapiens
cctttgtgatgtgggcattcatctctcagagttaaactttttcttttgatagtgcagatttgaaactcactttttgtagaatgtgcaagtagacatttagattactttgcagyccatggtagaaaaggaaatatcttcacataaatactagacagaagcaacctaaggaacttctttgtgatgtgtgcattcatctcacagatttaaacctttcttttgatagagcagttttgaaactctctttttgtaggatctgcaagtggacatttggagtcctttttgg

SEQ ID NO: 593303 - DNA, 283 bp, Homo sapiens
cctttgtgatgtgggcattcatctctcagagttaaactttttcttttgatagtgcagatttgaaactcactttttgtagaatgtgcaagtagacatttagattactttgcagtccatggtagaaaaggaaatatcttcacataaatactagacagaagcaacctraggaacttctttgtgatgtgtgcattcatctcacagatttaaacctttcttttgatagagcagttttgaaactctctttttgtaggatctgcaagtggacatttggagtcctttttgg

SEQ ID NO: 593304 - DNA, 696 bp, Homo sapiens
actttattttgattgagcagttttgaaacactctttttgtagaatctgcaagtggataattggggagatttgaggaatattgtggaaaagcaaatatcttcctataaaaactacacagaagccttctgagaaacatctttgtgaggtttgcattcaactcacagagtagaagctatcttttgattgaggagttttgaatctctcttttttcagaatctgcaagtggatayttggagcgctttgaggcctacttttgaaaatcaaatatcttcccttaaaaactacacagaagcattctcagaaattgtttgtcatgtgtgcttcctaatcaccgagttgaacctatcttgtgattgaacagttttgaatctctctttttgtagaatctgcaagtggatatttttagtcctttgcagactgtggtggaaaaggaatgatcttgaaatcaattctacacagaagcattcagacaaacttctttgtgatgagtgcattcgtcacacagagttgatcctttcctttgattgagcaactctgaaacactcttttagagggtctgcaagtggatattttagagctttgggacaattgtggaaaagtaaatatcttcacataaaaactacacagaggcattctgagaaacttctttgtgagatgtgcattcaactcacagagttgaacctatcttttcattga

SEQ ID NO: 593305 - DNA, 449 bp, Homo sapiens
gaagaagagaaatccaaaagtttggaaaacatatttgggggaataattgaggaaaacttccctggccttgctaatgacctagaaatccaaacactagaagcacaaagaacacctaggaaattcattgcaaaaagatcatcacctaggcacattgttatcaggttatctaaagttaatacaaaggaaataatcttaagagctgtgagacaaaagcatgagataacctataaagaaaatcctatcagattaacagcagaaaccctacaaggcaaaagggatcaaggccctatcttcagcctcctcaaataaaacaattatcagctaagaattttgtatttagcaaaactaaacatcatatacaaaggaaaggtacagtctttttcagacaaacaaatgmtgagataatttgccactaccaagccaccactacaagaactgctaaaaagagc

SEQ ID NO: 593306 - DNA, 625 bp, Homo sapiens
acacatacacaaccaataacagttccaggagtgtgtgcactagcagcataagccatcctccagaggatggacctgggaaagaagcctgataatggacttggggctgtttgagctggaaatcccagggtcctgtgtatccttagagtgactgagaagagggagcacttccactggttccacaccctatagagaactgtaagtccacgggagaccagagtggggccaagacaaggacccctcttgactggaactataggcagctctagaggtggtgtaaatgatatgccattggcaatgggctactttccccaatatataaagaactccttccaatcagcaagggaaagtgatagagactcctccacagaaagtgaagagscttcatttaaaagaatatgaatggcagccgggcgccgtggctaacgcctgtaatcctagcactttgggaggctgaggcaggcggattacctgaggtcgggagttcaagaccagcctggccaacatggtgaaaccccgtctctactaaaaatacaaaaaattagccaggtgcagtggtgcgcacctgtaatcccaactactctggaggctgagacaggagaatcacttgaaactgggaggtggaggt

SEQ ID NO: 593307 - DNA, 589 bp, Homo sapiens
cgaattggttcctttaagatcagaacaaggaaaggatgcccactcttaccatttctatccagtatagtactggaartttcagcaatagcaattatgcaaggaaaataaataataagctttcaaaatagaaagaaaagtttctattgtgcctgtttgcagatgatatattcatatatatatataagaaccataactattctaccaaaaaaatattagaattaataatccagtttagtaaatgtgcaggatacaaaatcatcattaaaaataatccagtagcatttttatacactaacaagaaactatccccccaaaattaagaacacaattccattaacaatagccataaaaatataaaacagcaataaatttaaccaaggatgtgacagacctatacaaagatactataaatattgataaatgaaattgaagacaaaataatagaaatatatcctgtgttcatggtttcgaagaactaatagtatgaaaatgttcatactaccaaagtgatgtgcagactcaatgcaattccaatcaaaataccaatgacattcttcacagaaatagaaaaaaaaactatcctaaaatt

SEQ ID NO: 593308 - DNA, 589 bp, Homo sapiens
cgaattggttcctttaagatcagaacaaggaaaggatgcccactcttaccatttctatccagtatagtactggaagtttcagcaatagcaattatgcaaggaaaataaataataagctttcaaaatagaaagaaaagtttcwattgtgcctgtttgcagatgatatattcatatatatatataagaaccataactattctaccaaaaaaatattagaattaataatccagtttagtaaatgtgcaggatacaaaatcatcattaaaaataatccagtagcatttttatacactaacaagaaactatccccccaaaattaagaacacaattccattaacaatagccataaaaatataaaacagcaataaatttaaccaaggatgtgacagacctatacaaagatactataaatattgataaatgaaattgaagacaaaataatagaaatatatcctgtgttcatggtttcgaagaactaatagtatgaaaatgttcatactaccaaagtgatgtgcagactcaatgcaattccaatcaaaataccaatgacattcttcacagaaatagaaaaaaaaactatcctaaaatt

SEQ ID NO: 593309 - DNA, 589 bp, Homo sapiens
cgaattggttcctttaagatcagaacaaggaaaggatgcccactcttaccatttctatccagtatagtactggaagtttcagcaatagcaattatgcaaggaaaataaataataagctttcaaaatagaaagaaaagtttctattgtgcctgtttgcagatgatatattcatatatatatataagaaccataamtattctaccaaaaaaatattagaattaataatccagtttagtaaatgtgcaggatacaaaatcatcattaaaaataatccagtagcatttttatacactaacaagaaactatccccccaaaattaagaacacaattccattaacaatagccataaaaatataaaacagcaataaatttaaccaaggatgtgacagacctatacaaagatactataaatattgataaatgaaattgaagacaaaataatagaaatatatcctgtgttcatggtttcgaagaactaatagtatgaaaatgttcatactaccaaagtgatgtgcagactcaatgcaattccaatcaaaataccaatgacattcttcacagaaatagaaaaaaaaactatcctaaaatt

SEQ ID NO: 593310 - DNA, 586 bp, Homo sapiens
taattggatagtactttttaggagcaagtgtccagggcatagagtgccacaaacactaggtgcattctagagaaatgaggagatgatatccatgaatagcagaggatcatagacaaatgcattccccaaggtgaggggaaacaatcaatagctgaaatgagaaaagctggcttcagtggtgtgctgattgagaagagagccttcccattaagccagagtgacctgtgaygctcaattagtgaatgcaatccatgcacctttttcattgcataattaaagacctatacctgacctctccatgtcttcaaatctgcaatctttacacacacacacacacacacacacacacagagatacttgtttcccaattattaattttcttaattattcaacaatgatgcctatttaaacacctaatggattatttgattttaatagttaataataccatgtcaaatgataaagatcaattatttttcagaacaatatatttttaattaggcattttgaaaagtattatgtttaggaaactgtacccatgataatgactgaattctgttaaaaatgacgtgctgaatcagtggct

SEQ ID NO: 593311 - DNA, 552 bp, Homo sapiens
acacatataaaatacataattaggagagaagagaggtccttttctgaagcatcatgcaggacacccagtcagtgtctctgcacaagtagactgggaaaattattatgttgatttscttataacagggattgggtgagatagaaatcatcagtaaatggtagatctagggagaatttttgctaaaaatcagcatatttcctttgtcttaaagttcccccttctgactgcttatttgtaacagggagaaaaaagaagtaattacacagcaaagtaaattatgcagcaccttgaacaagcgatcaaagccaacttcaccagtaagggacatagagatatcatgtgtcttcagatgcgacagtccaagaaggacacataacctgtacaatattccagctgagaatgaaaagtctgaatctaataacaagaaaccaccagataaacacaaaattaaaagtttacattaaatgaaaaggaaagagaccaataaatgtcaatgtcataaaagacaaaggctgtggagatattccagattcaagaaagtcaaatagaaat

SEQ ID NO: 593312 - DNA, 433 bp, Homo sapiens
gtaaaatatacagttatctggagccaggtccatctgatttcaatggagaagagaagcttgttccctgattgtgggcattccatttatctaccctcattttagtgtatgttattcaacactgtttccgtattcttagcggtattttgagtttctaaaatcaggagmacagatttgtcttccaacatcaggctaaaaatgcatttaattaaatttctcttcatttgaaacaaatgtttcttaaattaaaaaaaaattttgaattgttaattttttggattttccatttaatattttcagactgtggttaacttggggtaagtgaaaccacaggacgtgaactgcagataaggggggctactgtattgtggctatgcaagagaacattgcgtaggaaatatatactgaagaatttgagagtaagaagcaattatat

SEQ ID NO: 593313 - DNA, 433 bp, Homo sapiens
gtaaaatatacagttatctggagccaggtccatctgatttcaatggagaagagaagcttgttccctgattgtgggcattccatttatctaccctcattttagtgtatgttattcaacactgtttccgtattcttagcggtattttgagtttctaaaatcaggagcacagatttgtcttccaacatcaggctaaaaatgcatttaattaaatttctcttcatttgaaacaaatgtttcttaaattaaaaaaaaattttgaattgttaattttttggattttccatttaatattttcagactgtggttaacttggggtaagtgaaaccacaggaygtgaactgcagataaggggggctactgtattgtggctatgcaagagaacattgcgtaggaaatatatactgaagaatttgagagtaagaagcaattatat

SEQ ID NO: 593314 - DNA, 426 bp, Homo sapiens
ttccatttccttctccttagtatccgttttctttggcragaccaagcctaaaggcaaacaagaaatatccacatgcaaataaaacaaaaaaaaattacataccacgacacgcacacatttcaaatctctgtttgcatcaagaccctattgactccacatataccataggatgtttctatcacttcagaactttccttgttcccatttctaggcaaacacatacaaacacacacaggcacatgcatgaacacatccacaaacactgttctgatttttttccatgttagttttgcttttactaaaactacacacaaaaggcatagtagagtatgtaatttttgatattagatttgtttgcttaatgtgttttgagattcagtcatgttgttatataaatcaacaggtatttttactcccgggtagaat

SEQ ID NO: 593315 - DNA, 425 bp, Homo sapiens
tccatttccttctccttagtatccgttttctttggcaagaccaagcctaaaggcaaacaagaaatatccacatgcawataaaacaaaaaaaaattacataccacgacacgcacacatttcaaatctctgtttgcatcaagaccctattgactccacatataccataggatgtttctatcacttcagaactttccttgttcccatttctaggcaaacacatacaaacacacacaggcacatgcatgaacacatccacaaacactgttctgatttttttccatgttagttttgcttttactaaaactacacacaaaaggcatagtagagtatgtaatttttgatattagatttgtttgcttaatgtgttttgagattcagtcatgttgttatataaatcaacaggtatttttactcccgggtagaat

SEQ ID NO: 593316 - DNA, 431 bp, Homo sapiens
gaattcgtggaaattacttacttccatttccttctccttagtatccgttttctttggcaagaccaagcctaaaggcaaacaagaaatatccacatgcaaataaaacaaaaaaaaattacataccacgacacgcacacatttcaaatctctgtttgcatcaagaccctattgactccacatataccataggatgtttctatcacttcaraactttccttgttcccatttctaggcaaacacatacaaacacacacaggcacatgcatgaacacatccacaaacactgttctgatttttttccatgttagttttgcttttactaaaactacacacaaaaggcatagtagagtatgtaatttttgatattagatttgtttgcttaatgtgttttgagattcagtcatgttgttatataaatcaacaggtatttt

SEQ ID NO: 593317 - DNA, 606 bp, Homo sapiens
tcattattcaactcccacttatgagtgagaacatgcaacgtttggttttgtgttcctgtgttagtttgctgacaacgatggtttccagcttcatccgtgtccatgcaaagaaatgaactcgtccttttttatggctgcatagtattccatggtgtgtacttgtcacattttctttgtccagtctattactgatgggcatttgggttggtttcaagccttttctattaaaaatagaagcacctttaattttaagacaattttcttagagttattattttatttggcatatcatggtatttcaccacttaacagactgtttttttaacaatacaaactgtgcctattatttttttcatgtattcctttcaaataatactataattgaacagcatagatgacattataacagtaaataaaaattgtgagtccaggcaagattttccttttcacatactatttcaatatgacatctaatgcatagaggtgaacaaatccttcctgaatttaactaaactttatgtaacttgattccatcttagatgtyccagacaacacaggtttagtaattttgacagtgcgtatgccagtcacacctctattgcctgc

SEQ ID NO: 593318 - DNA, 614 bp, Homo sapiens
ccatgttagccaggctggtctcgaactgctgacctcaagtgatctgcccaccttgccttccaaagtgttgggattacaggygtgagctccaccacacccggctcagagcatcttttatcacttattttgacagagacaggaaagaagcttaagtccatggtgctcttaattacttctctactactcccatcagcaggaacttcctaaggcagagcagccaacttaagtcaacatctagaaaattctctttggacatttaattagattaaattattgttctactaaaaaatgtattagaacatgtaaaacatgcattcttatttctacgtattggagaaaaatggcaaaggagatttctttaaaaaaagaaagcctccaacattttaaattaattaaaatactcagtttgctttgggcttcattttagttttcatttttttaagatctgaagtggtttggttttgaatgagtcagtgttttcagagcagattctctccttcagggcaatgagtacccactaacgattcataactttgtagccatgaaaggaaccatgcaaaaacaagtgagaagcccctgccttctgccaaagtctcatttataaaccgtcgcct

SEQ ID NO: 593319 - DNA, 614 bp, Homo sapiens
ccatgttagccaggctggtctcgaactgctgacctcaagtgatctgcccaccttgccttccaaagtgttgggattacaggcgtgagctccamcacacccggctcagagcatcttttatcacttattttgacagagacaggaaagaagcttaagtccatggtgctcttaattacttctctactactcccatcagcaggaacttcctaaggcagagcagccaacttaagtcaacatctagaaaattctctttggacatttaattagattaaattattgttctactaaaaaatgtattagaacatgtaaaacatgcattcttatttctacgtattggagaaaaatggcaaaggagatttctttaaaaaaagaaagcctccaacattttaaattaattaaaatactcagtttgctttgggcttcattttagttttcatttttttaagatctgaagtggtttggttttgaatgagtcagtgttttcagagcagattctctccttcagggcaatgagtacccactaacgattcataactttgtagccatgaaaggaaccatgcaaaaacaagtgagaagcccctgccttctgccaaagtctcatttataaaccgtcgcct

SEQ ID NO: 593320 - DNA, 614 bp, Homo sapiens
ccatgttagccaggctggtctcgaactgctgacctcaagtgatctgcccaccttgccttccaaagtgttgggattacaggcgtgagctccaccacacccggctcagagcatcttttatcacttattttgacagagacaggaaagaagcttaagtccatggtgctcttaattacttctctactactcccatcagcaggaacttcctaaggcagagcagccaacttaagtcaacatctagaaaattctctttggacatttaattagattaaattattgttctactaaaaaatgtattagaacatgtaaaacatgcattcttatttctacgtattggagaaaaatggcaaaggagatttctttaaaaaaagaaagcctccaacattttaaattaattaaaatactcagtttgctttgggcttcattttagttttcatttttttaagatctgaagtggtttggttttgaatgagtcagtgttttcagagcagattctytccttcagggcaatgagtacccactaacgattcataactttgtagccatgaaaggaaccatgcaaaaacaagtgagaagcccctgccttctgccaaagtctcatttataaaccgtcgcct

SEQ ID NO: 593321 - DNA, 509 bp, Homo sapiens
aatccagcagtcccactacttggtatttatccagaggaaaagaaatcagtatattaaacggatacctgcactcccatgtttactgcagtattcacaatagcaagaatgtggaatcaacctaagtgtccatcartggataaatggataaataaaatgtggcatatatacataatggaatactattcagctgtaaaaaaataataaaatcatgtcatttgcagcaatatgaatggaatgggacttatgttaagtgagataaaccgaggttcagaaagacaaatattgcatgttcttactcatacgggagagctaaaaaagttcatggagatagagagtagaaagataacagaggctatgtgtgggtgggggcaggagataaagagaggttggctaatgagtacaaacacagaaggaataagttttaatgttcaatagcagagtagggttactatagttaataacaatgtattgcatatttcaaaatagctagaagacttgaaatgttccca

SEQ ID NO: 593322 - DNA, 609 bp, Homo sapiens
agaaaattgggatgaggccaggcgcggtggttcatgcctgtaatcccagcactttgggaggctgaggtgggcaaatcacaaggtcaggagttcgagaccagcctgaccaacatggtgaaaccctgtctctactaaaaatacaaaaattagctgggcatggtggtgagcacctgtaatcccagctactcaggaggctgaggcaggagaactgcttgaactcaggaggtggaggttgcagtgagccgtgatcacgccactgcactccagcctgggcgacagagtgagactccatctcaaaaaaaaaaaaaaaaagaaaagaaaattgggatgagactccaaatgtaccagtgtcatgaacgtaagattgattatcttcatgctgaatgtataaaaatgcattactattgtttacaacaggccctgaggcaattgtctatcatttttaactttgaaaagtaattacataaatttgtgtctagattatacaaattgcgaattggagcattaccataatttgccttaatttgctttgtaaaawgcccaattatctactgtgaggttgcaaccacaatttagaactagcaactaatctccaccttccccttctct

SEQ ID NO: 593323 - DNA, 514 bp, Homo sapiens
gttctctgtctctggtgcaggggttctaaggcgacagagcagagtgtggagaaagctgcatgtccagctttgacaggccagattttaatgaactgaaaagcctctttccagacttcaaatatttctgcttttaagtcataagttggacttgaggcagagggcctgagtttgaatctaaactctatcacttactttctatgtgggctcagtttcctcatgtgtcaaatgggagagattagcatccaacttgcargtttggtgtgaagataaaagtgtaaaagataagcctctaagtggcacatagtggatactcatgaaggtgtgctgaatctgaattctgatagctgctctctctgtacaagtgtgctcctgtgttatggctttgcatctttccccaagcccagtaaatctgtagtcaattatctaagtcctagattcccatctggaatcacaagaggaagaaagaactatgcagacatacaaagggtttccccattgtgtacctctaaataaa

SEQ ID NO: 593324 - DNA, 621 bp, Homo sapiens
agtttattttagttttcatttcaagacctgaatcatgattaatccaaaagatgaaagaattccatctgtggtgaggactctgccaaaggaagacaaacaaaagttggtgtgtgccccgaagtattacatacttgtaaaattattactattattttttgtagagacagggtctcactatattgcccagactgctctcaagtaatcttgccttggcttcccaaactgctagaagtacaggtgtgagctgccatgcctagccattaaaattaaacagattaatcagaggcatgaagtttaaagaagagaagaaaacaaaatgaaataataagagtggttgtaatgaaagctggccttggactgattctaaagatgatgccattctgttgtaaaactcaagtaatgaaarcctaagagaaaatgcaaagggccaataaatatgtgaaaagatggtaggtctcaccagtggtcagaaaaataaaaattaaattgcaatttaatcgaaaagattaggaaaagtacaaagatgatcatacaagcctggcgaagatgtggggaaaaacacaatctgatgtacatttgggaactgttttgcttccagacagaatctgaacaacaggaacg

SEQ ID NO: 593325 - DNA, 636 bp, Homo sapiens
aaaggagaagcagaatggaaaaattttgaaaattttcaacctggccatgtgaagaataaaaaagcctattcaggagagcaaaccaagtgtgtgaccaagatactgttaaggagattagtatggacagaaagaatcatcaagacaataggagaatgacctcaaagtcatttagagatccttgaggctgtccctcctgttacaggaccagagctctaggagggcaggatagtttcaaaggatgatcctgagaaccctctgtgggctcactatccagagcctcctagatttctccttcccacatttcagtgcattgctcctcggctgccttagctgtggctaaggcacagtgggaccaggtgtggctcaacccaccactctacaaggtataagccataaaccytggtggcattcatgtggtgctagttctttaggcgtgagaaatgcaagagctgtgggggcatggtttctttcacctagatttcaaaggatgtcataaacagcctggggtccctgataaaaattttttgcaggggtggagtaactacagagagccccaactagggcaatgctaaatggaaatgtagggtcagagctgccacagagagtttccactagagcaatgcctagtaaagttta

SEQ ID NO: 593326 - DNA, 636 bp, Homo sapiens
aaaggagaagcagaatggaaaaattttgaaaattttcaacctggccatgtgaagaataaaaaagcctattcaggagagcaaaccaagtgtgtgaccaagatactgttaaggagattagtatggacagaaagaatcatcaagacaataggagaatgacctcaaagtcatttagagatccttgaggctgtccctcctgttacaggaccagagctctaggagggcaggatagtttcaaaggatgatcctgagaaccctctgtgggctcactatccagagcctcctagatttctccttcccacatttcagtgcattgctcctcggctgccttagctgtggctaaggcacagtgggaccaggtgtggctcaacccaccactctacaaggtataagccataaaccttggtggcattcatgtggtgctagttctttaggcrtgagaaatgcaagagctgtgggggcatggtttctttcacctagatttcaaaggatgtcataaacagcctggggtccctgataaaaattttttgcaggggtggagtaactacagagagccccaactagggcaatgctaaatggaaatgtagggtcagagctgccacagagagtttccactagagcaatgcctagtaaagttta

SEQ ID NO: 593327 - DNA, 501 bp, Homo sapiens
aattcaatgcctcttttaaaaattaattacaaaattgcatccaattgggtcaagatcctaaggagacaacctgtagctcttgaatcatagctttcttattactgatgtatatgattgaggcagatgtgatcatagggggaaaacataaagtgttatgcttactctaggtttttcctagatgtcctttattaagtgataaaatttccctctcttcctagttcggtgaagttttcattgrgaatggattttggcaaattctttttttattggttgaaatgatcatgtgatcatttggtgtacctgatcatatgatcatatgattttccttttagtttcttactggggttaattacaatgattaacagtgtaactgagaatttttaaattatacaatttgggctgggcgtggtggctcacgcctgtaatcccagcactttgggaggccaaggcaggcagaccacgaggtcaagagattaagaccatcctggccaacatggtgaa

SEQ ID NO: 593328 - DNA, 469 bp, Homo sapiens
tgtgtttcttgtaggcagcatatagttgggtcttttttgattcattcattcagcctatagcttttaattgaggaatttgaactatttacattcaaggttgttatagactggtgaggactggctcctatcactttgttagatagcttctgattgttttgcatatccttattttctttcatcttctcctattgtttatttttggatttggtggttttctgtagtgataaggtttaattccttttgcttccatattgtrtatttgctctaccagtgaattttatttatacttccatgtgttttcatgatggtagatatcatcctttcgctttcagttgtaggacttgcttaagcatttcttgtaggaatagtctagtagtgatgaaatctctcagtttttgtttgtctggtagagactcattctctttcatttctgaagaatagctttgctgagtatagtattcttggcagc

SEQ ID NO: 593329 - DNA, 572 bp, Homo sapiens
gtgtttcctgggttttcttttaggattcttaaagtttgaggtcttacatttaaatctttaatccattttgagtcaattttggtatatggtaaaaggtagaggttcagtttcatttttctgcagatggatagccagctctcacagcaccatgtattggatagggagtcctttccctattgcttatttttgtcaactttgttgaagatcagatgactgtaggtgtgtggctttatttctgggttctctaaactgtttcattggtctgtgtatctgtttttgtaccagttccatgctgctttggttattgtagccgtatagtatagtttcaagtcaggtaatgtgatgccyctggctttgttctttttgcttagaattgctttggctattcaggctcttttggttccatatgaatttcggaattgttttttttccagttctgtgaaaaatgaccttggtagcttgataggaatagtgttgaatctgtagtttgcttaggagagtatggccaagcatttttaattatattgactcttccaatccatgagcatggaatgtttttctatttgtttgtg

SEQ ID NO: 593330 - DNA, 574 bp, Homo sapiens
ttctttcagcagtgttttgtaattctccttgtagagatctttcacttcctcagttatatgtrttcctagatatgttattattttttttcagctattgtaaatgggattgcattcttgatttggctctcagcttgaatgttactggtgtgtagacatgctattgacttttgtacattgattttgtgccctgaaactttactgaagtaatttattagttccaggagccttttggaagagtctttaggattttctaggtaaaaaatcatattgtcagttaagtgagatagtttgatttcctcttttcttacttggatgccttttatttctttctcttgcctgattgctctagctaggatttctcaggctgttatgaacaatcagatagttaatagagcaagaattcactcattaccatggggatggcagccacacccattcatgaggaatctacctccatgaggcaaacacgtcccactagtatctacctccaacactggcgatcacgtttcagtgtgagatatggagacttacccaaactataccaatgtgcatttgtagatctatgtcatttcat

SEQ ID NO: 593331 - DNA, 313 bp, Homo sapiens
tcaagcaaacattatatatatacacatatgttatatataacatatgtatatatattaatatatgtatatataatatatatacatatgttatatataatatataaatgcttgctattatcaagcaaacattttatatttatatacacatatacatttttatatataaaaatgtataatacacacatatatacacatatataataaattaagggtgtttctagatgktactcttttttgatgtgtatgtgtttgtgtgtttcattaaaaaactttaaaaacaggaaaataaaagagcaggcaattcgccaaaggg

SEQ ID NO: 593332 - DNA, 457 bp, Homo sapiens
taacaaaacacttctgaaataaatcagagatgacacaaacgaatggaaaaactttgcatgcccattgataggaagaatcaatattattcaaatagccacacttcccaaagcaatgtacagatccagtgctattcctatgaaactactaatggcagtcttcacagaattagaaaaaaaaaactattccaaaatacatatgaaaccaaaacaaagcctaaatagccaaagcaatactaagtgaaaagaacaaagctggaggtgtcacattatttgacttcacactatactgcagggctacaggaaaaaaaaaaaaaagaaaagaaaaccagaatatccaycaaaacctcttcatagaccttcagtgttaatctcgtctgacctcatggtccaaccagctcttatcaggcctcacttgcaacaccgaggattacaatttgatatgagatttgggtgggaa

SEQ ID NO: 593333 - DNA, 627 bp, Homo sapiens
atgggaacaatagacactggtgactactagacagaaaagagtaggaggggaaagagggttgaaaaactagctgtgctcactacctgggtgacaggatcatttattcaccaaatctcagtgataagaaatttacccatgtaaaaaaacctgcacctgtaccccatgaatctaacataaaaatcagaaaaaaaagaaaatggttcaatatgagaagacggatacattcctaggaagtagccaatggcctgaccatctggaagggggtccctaaaggaaaatgactgaaaaataggagacaaggagttcaaggtagaggcatgtggatagaaaatgtgaagattttcatatcacatgttaatgccctccagaaattatctgccatagaagaagttctgaataaccaattttgcagaataactaccatttgaggttagccagtcttcaccattggccagctcaaaatrtttgtgatgggaacatgaatggaatggccatggaggcagagacagatgctaggaatagacccacaggcatgtattcacacttactgtggctgcttcagctgctgttgcctctaaatgtctaattggtcagaaacagaaacaaccactgagcccatgatacagc

SEQ ID NO: 593334 - DNA, 468 bp, Homo sapiens
caaagtctcactctgtcgcccaggctgcagtgcagtgctgcgatctcggcttactgtcagctctgcctcccaggttcaagagattctgtctcagcctcccgaggggctgggatttcagacactcrccaccacacccagctaatttttgtatttttagtagagacagatttcaccatgttggtcaggttggtctcgaactcctgacctcaggtgatccatcccctctccctcccaaagtgctgggattacaggcatgagccaccacgcctggcctcacatgttcaattttatctcatggcaacatgttacgaagcaaatgaagtctctgtcttaccaaagaccctcctcatcacagtaaggagtatatggaaataaaggagtcagagagaacagagaaactgattatccattctcttgctatccccttactccaaaacatatttgattggcatctgcttgaagagactt

SEQ ID NO: 593335 - DNA, 603 bp, Homo sapiens
atttttaaaatgtaaattctagaactgaaaattacagtaactgagataaaccatttactacgtaggcttaacagaagatttgagatggtggaaaattgagtcagtgatcttgaagatatatcagatatattctagtcagaagaatacagagaggctggacgcagaggctggygcctgtaatcccagcactttgggaggcttaggtgggcagatcacgaggtcaggagatcaagaccattctggctaacacagtgaaaccccgtctctactaaaaatacacacacacacacacacacacacacacacacacacaaagtagccaggcatggtggcgggcacctgtagtcccagctaatcgggaggctgaggcgggagaatggcgtgaacctggaagttggagcttgcagtgagccaagatcatgccactgcactccagcctgggtgacagagcgagactccgtcaaaaaataataatactaatacagagaaaaaggttggagaaaaaaatgaactttccttcagaaatatgtgtgacaatatcaaatagtgtaacatacatattacttgagtcccaggataagaaaaaaatgagaatggatagaa

SEQ ID NO: 593336 - DNA, 593 bp, Homo sapiens
acacacacacacacacacacacacacaaagtagccaggcatggtggcgggcacctgtagtcccagctaatcgggaggctgaggcgggagaatggcgtgaacctggaagttggagyttgcagtgagccaagatcatgccactgcactccagcctgggtgacagagcgagactccgtcaaaaaataataatactaatacagagaaaaaggttggagaaaaaaatgaactttccttcagaaatatgtgtgacaatatcaaatagtgtaacatacatattacttgagtcccaggataagaaaaaaatgagaatggatagaagaaactgtttgaaaacaatgactaaatatttctcaaacttaatggaaaactaaatctccaagaaaccctgtgacctcaagcaggatattctctcagctacaaatttagcaatgtatttaacatttattaagtgcttactctgtgcaaagagctatgctgggcatggagaaatatatatctgaatatggcacaatatctaccatatttaacaatctagatctgtactatcaaatatggcaaccacatctgaatattgggcacttgaaatgtggctaa

SEQ ID NO: 593337 - DNA, 593 bp, Homo sapiens
acacacacacacacacacacacacacaaagtagccaggcatggtggcgggcacctgtagtcccagctaatcgggaggctgaggcgggagaatggcgtgaacctggaagttggagcttgcagtgagccaagatcatgccactgcactccagcctgggtgacagagcgagactcygtcaaaaaataataatactaatacagagaaaaaggttggagaaaaaaatgaactttccttcagaaatatgtgtgacaatatcaaatagtgtaacatacatattacttgagtcccaggataagaaaaaaatgagaatggatagaagaaactgtttgaaaacaatgactaaatatttctcaaacttaatggaaaactaaatctccaagaaaccctgtgacctcaagcaggatattctctcagctacaaatttagcaatgtatttaacatttattaagtgcttactctgtgcaaagagctatgctgggcatggagaaatatatatctgaatatggcacaatatctaccatatttaacaatctagatctgtactatcaaatatggcaaccacatctgaatattgggcacttgaaatgtggctaa

SEQ ID NO: 593338 - DNA, 430 bp, Homo sapiens
ttgacaaactgtaaaatattcaagaaatcaccattgcaggtcttgctgtctctgtcaagatgacaaaatcatacttttactaggataaactgtgtatgaataattttgctaggtatattttattcaaacagattttctgtttccatcatcaaaggattccttgacctggacaatgtctatttccagcaacacacatacttataaatgacattgcacatctgctgctgtactacttaggagtctataagatgttccagcaaggtgtacaaagacagaaaaaaatctataacaaaagcatgtaaatacaatgagaatctgagttgctgtaggaatcatagatacatgatttctctctmtatatattcatatatatatagatatatatatacacaaacacgtataatttactctcacaaaacaatgaaagatg

SEQ ID NO: 593339 - DNA, 540 bp, Homo sapiens
ctgtgtgagccaggatggtctcgatctcctaacctcgtgatccgcctgcctcagcctcccaaagtgctgggattacaggtgtgagccaccgcgcctggccaaaatttttgttcacattatgataaatttattcctaggcacaatagtacatttttwaaaaattgcattttctaatagttcatttccattgtacagaaatgcaattgatttctgtatattgtatgtagaaacatcattaaaataataattttgattatctgtgtagaaaatcacattatataaaaatgatagtttcttgtttccatttcagtaagaattgtctattattgctttctgtttctctgttttactccattatctagggtttctggttaaatgtttaataaaagtggtgttattgggcattttggttttaatcttcatcaaaaaggaaagttttaactttaaccctaattataattattaatcttatttcagactggatactggattctgaactagatattgaacactattaagtttaatgtctattctaggtct

SEQ ID NO: 593340 - DNA, 570 bp, Homo sapiens
gatttttataatgactctatttaacctcattttcatttgtcagtgtcagcatcttctgtggaagtcttacgtttaccttctgtgacctgctggtcatttagcagagctaaatgtataagaatacctttctaggctttagtgtcagttactatcttcaggaaacaaatcctaaacacgtgctcttaaytgctcagattcccatcttgcttaactgtcagacttacctagataaagtcagtcacattgtgtaggtttttaaaagaaacatctctagtcatttcaaactgtctttgcagcttaaagccatatttttatattgtggacaattttgaagggacttgaacattaggtcaacgggtttgtatttaatttggtatgaaatggaacaaagataaaaatgctgtaaagataacagtatataaatataatttcattgtttctgtgattgagaaatcccttggagtttaagcagaccgctatttgttcatcaatatatatttccttctttttctatgttaatgaaatcttcggtaaaccatttgaccaaccagcctccatcatatttaaata

SEQ ID NO: 593341 - DNA, 570 bp, Homo sapiens
gatttttataatgactctatttaacctcattttcatttgtcagtgtcagcatcttctgtggaagtcttacgtttaccttctgtgacctgctggtcatttagcagagctaaatgtataagaatacctttctaggctttagtgtcagttactatcttcaggaaacaaatcctaaacacgtgctcttaattgctcagattcccatcttgcttaactgtcagacttacctagataaagtcagtcacattgtgtaggtttttaaaagaaacatctctagtcatttcaaactgtctttgcagcttaawgccatatttttatattgtggacaattttgaagggacttgaacattaggtcaacgggtttgtatttaatttggtatgaaatggaacaaagataaaaatgctgtaaagataacagtatataaatataatttcattgtttctgtgattgagaaatcccttggagtttaagcagaccgctatttgttcatcaatatatatttccttctttttctatgttaatgaaatcttcggtaaaccatttgaccaaccagcctccatcatatttaaata

SEQ ID NO: 593342 - DNA, 432 bp, Homo sapiens
gaaatgttcctatgaagaacaatgcaaaatataaatacagtagctttagtaaaaaaaaattacatctaatggtattgcctctttctgtgtattattcatggtaatgacaaccacagatatggtgaataggtctattgtgcataatttccccttgcattattttccaaagttcattcagtcttatactatcttcataatacttgttatatccatgtctgcttttaatattactgatttaatattttttaaaaattgactttatataactgtttcttttgtttttttttagagacagagtcacactctgttgtccaggttggagtgcagtggcatgatcaaagttcactgcaggctcaaactccagggctcaagtgatcctctcacctcagcctcctaagtagctragactacaagcatatgccacaatgtcca

SEQ ID NO: 593343 - DNA, 643 bp, Homo sapiens
tttatttaatatgagccacacacacacacacacacacacacacacacacacacacacaaaatggaatagtattcagccataaaagaataaaatactgtcatttgcagcaacatggatgagcctagagaacacaatattaagtgaaataagtcaggcacagaaagataaataccacatgttctcgcttgtatgtgggagcttaattcagctcattatatgtgggagctaaaaaattcagttcatagaagcaaatagtaggattgtggttattagaggctgggaaaggtagagagagggaaagataggaagggttggttaaaagatataaagttacagctagatgggaggaatagttctagagttctgtagcactgtgtggtgaatatgattaacaataatttaaagtatattttcaaaaagccagaagagaggattttgaatgctcctaacattaaaaaatgaaaaatgtttgagatgatagatatgctgattaccctgatttgatcattacacattacatacrtgtattgaaatatcattctgtatcccataaatatgtatacttatgtatcaaataaaaataaaaggaaaaaatatgtttttttaaaattataagttaagaaaggatagaggatgtgtattt

SEQ ID NO: 593344 - DNA, 572 bp, Homo sapiens
agttgcaacctaccattaagacaacgaataatatcatcaacattttgatgtattttcttcttaatcttttttctttggcttttatatctcaaaatgtagcttagttttagtttttatccacgttatatatgcacaaggctttaaaagaacaagagctctgcaaaatttattaagagaaatgatactttcaaattttaatagattctcttgttattaaccccattactgtaagtaacatgcttatttttgcctttaaagaaatttttgtactatttagttgataatccacaatgtatgcctttccttaatacttcctctatctactgttactacatatgcagtccgtgttcaagaaataaaaataagcttcatactatatacctttcaaactagaaaatcatagtacatatttggaaaccagatgaaatttaattagaaagactatttttgacattggcaaatatttttctagaaatgttagtaaatgaattaaaatgtcttgctctaattttctttttcttcaaaggctgcatttsattttactattagttatatgcacacacacaaaaaac

SEQ ID NO: 593345 - DNA, 599 bp, Homo sapiens
attaaaatgtcttgctctaattttctttttcttcaaaggctgcatttcattttactattagttatatgcacacacacaaaaaacactttcaaataaaaatacacatccccttcttcaaattcctcataatataaaacatgtctgaaatgaggaataattgatcagaagtcagtgagtaaatgtgtagttctcaaaggaataacagaaattatatctttaattaaaatgtaaattaactgggaaaatatttgctacagatataacagaaaaatgtttaatatcttaatatacaaagaattcttcacaatcaataataggacattaatacccaaataataaactaagatcaagtacaggaaatttgaacttgcataattagtaagcaaacaatttttaaaaaccacattcatttcacactagtaaygaaagaaatgctaattaaatattagcaggatactatacttcatctatcaaaatagagaatacatttaaaaagataataccccattggggaagaattggtgaaaaagacactttcatatactgcttatgaaagtatatactttcataagtatactgcttatgaaattgtaaattag

SEQ ID NO: 593346 - DNA, 591 bp, Homo sapiens
ggcagcaaaaaataaaatgctctgactttttcttactagctctatctaacactcacatactttctaaagcaatcaagagccaaaatattttagttttggcaacttgcacttactagagattgagtggtgggttgaggctggatggaacagaaagttwtcatgacaacatgaaagaaggcaacaaagaaggaagtttggaagagatgaatgactatggctcctgagtcataggtttgtgaccgcactccaattctaattctaaagtgtcaccagatatgtgtagatgtgtaaatgtctcacatgcccaaatggttgagtgggaggattgtggtttgctggctggggtaggtgaagagcttttagaatggcacattgttagcacctcacaaagagtgacccttttcctatgtataagcattagtactgcttgggtcttgctgcaagaagtcttgctaaccatcagggctaactccacatttttctctgagatatgacattttccctggtgggcaatattagatccattaagggtttcatttctttgtgattttataaaattattttttaattgtgggaagagcaaaggcatat

SEQ ID NO: 593347 - DNA, 570 bp, Homo sapiens
ccaaacattgcatgttctcactcataggtgggaattgaacaatgagaacacttggacacaggaagggggacatcacacaccagggcctgttgtggggtggggggaggggggaggggtagcattaggagatatacctaatgtaaatgatgagttaatgggtgcagcacaccaacatggcacatgtatacatatgtaacaaacctgcacattgtgcacgtttaccctagaacataaagtataataaaaatatatatataaaataataataataataatgggtcacagctggcaccagggaaaggcggtctcccaataaatgaagacacctgaaacttgtgatcagtagcttcccgataagatctcaggagttgggccgctgggctcaagcakgtgcattgaggagcaagatggaactactaaagtgagcatgcctacaactccagtaaacacactgtgcatgctttcctcctaggtgctagctgaccagggagcatgagtcctcctaccctaagggaaaagtcagggaagaagaatgcaagaccctggaagaatgccagtgtataacacccg

SEQ ID NO: 593348 - DNA, 584 bp, Homo sapiens
ctcagtacttgggttgtttggtgtttgcaacatttggctcagatgcactgagttcttagagggggcctagctctgttttataccatccatcttttaaccttccccttgcaaaaaaggttaaatctaacctcccccattctgcctattttatatgtcctcatccttgtgattactatatttatatgcaatgtctatataaagaatttgatgtataataaacttctctctataggtacatatatagaccaaaaaaacctggttggtgggtgtttggaataggtgaaatattttcaaactgaggaggaagaagattccatatggtgtttttaaccagaatcaggaaaggagtgtatagtttgaaaacattctcaatattataattttttatttgtaaaatgaaacaattatttctatgcttttcatgatttcagctgaaggtaamgtaaaacaaatatttttttgattagtgcagatatgcagaagatatttttaactagaagcggtcttctcctgaagggaagatgaagagtaaaatttaattttaacaaaagaggatatgatttgaatattttaacactaaaata

SEQ ID NO: 593349 - DNA, 524 bp, Homo sapiens
tttctctggcttctgtgttcaaaaatattcctagaatgaccctttcccaattcttgatggcattatagattccatagctttctaagaattttctcatgtttagactttaaagattctaaatcaaacactaatctcatatccaattaacggcttcttctcttctcctatcttaggcgtggtgtagaggctggagaacagcagggaagaaagtggggtaaattctttcactcccctatcacgtcctctcccttcttctgtattgtgtgtgtgtgtgtgtgtgtgtgtgtgtgtgtgtgwgagagagagagagaaagttatcaggcaacacactatacttttaataaaaagcattatataggataaagtatttacaaattggacaacacaggtgcattagctccttggtatcttaatttcatatctagctaaaggaagctgtcaaaaaatgtcctagcttttggtcacaatcgttctgttattcttttcaaaacatctttttatttatttatttttgagatagaatt

SEQ ID NO: 593350 - DNA, 525 bp, Homo sapiens
caaaactggccaaatcaggactgtaaggtggatacctaataatttttatggaaactcttagaaaattacctttgttttgtgagagaaatgaccatgagcattgtgatggttgagagggactctctggtgaagctttcccaggtgtttttctgctaaaggtttggctaactttctgaaaacactctgataatcagcagatattatcattgcttggtcctccagaaagtcaacaaggaaaatgacttgagaatttcaaaaaastttttccatgactcttgttcttaacttgtttatttttggtttgattgggccacctacacctcttggtagccattgctctgattgtgcattgtcttcagcatggtactggtaaagctgtgttttatctcccataagtattcttcaaaaatatgctcagggccagtacagtggctcacacctgtaatcccagcgctttgggaggccaaggtgggtggatcatgaggtcaggagatcaagaccatcctggccaacatggtgaaaccc

SEQ ID NO: 593351 - DNA, 525 bp, Homo sapiens
caaaactggccaaatcaggactgtaaggtggatacctaataatttttatggaaactcttagaaaattacctttgttttgtgagagaaatgaccatgagcattgtgatggttgagagggactctctggtgaagctttcccaggtgtttttctgctaaaggtttggctaactttctgaaaacactctgataatcagcagatattatcattgcttggtcctccagaaagtcaacaaggaaaatgacttgagaatttcaaaaaagtttttccatgacycttgttcttaacttgtttatttttggtttgattgggccacctacacctcttggtagccattgctctgattgtgcattgtcttcagcatggtactggtaaagctgtgttttatctcccataagtattcttcaaaaatatgctcagggccagtacagtggctcacacctgtaatcccagcgctttgggaggccaaggtgggtggatcatgaggtcaggagatcaagaccatcctggccaacatggtgaaaccc

SEQ ID NO: 593352 - DNA, 525 bp, Homo sapiens
caaaactggccaaatcaggactgtaaggtggatacctaataatttttatggaaactcttagaaaattacctttgttttgtgagagaaatgaccatgagcattgtgatggttgagagggactctctggtgaagctttcccaggtgtttttctgctaaaggtttggctaactttctgaaaacactctgataatcagcagatattatcattgcttggtcctccagaaagtcaacaaggaaaatgacttgagaatttcaaaaaagtttttccatgactcttgttcttaacttgtttatttttggtttgattgggccacctmcacctcttggtagccattgctctgattgtgcattgtcttcagcatggtactggtaaagctgtgttttatctcccataagtattcttcaaaaatatgctcagggccagtacagtggctcacacctgtaatcccagcgctttgggaggccaaggtgggtggatcatgaggtcaggagatcaagaccatcctggccaacatggtgaaaccc

SEQ ID NO: 593353 - DNA, 645 bp, Homo sapiens
aagttctttctagcgcccttccctttgcagaaatgttgtattagtcaatggaacctgacatttatattcatcactattcttttatgaacaactccatgtgttttgcttgcatttctctaagtttctacccttagctgagcgggtccatatatcaagagtaatgtcaaccagcacgacatccaacaatcacactctgactccaagacttttgtaaacagtccgtttttaaataaaacctaagttttaaggtgaaaggtttacttataatttacrtgctattatcttaaaaatatagcttcaacttttagcaaaaattaattgctttgtaaatcctgattttcagaagctgtgacatctcttctagtgtgatgactggcctcttccatgatagaatggagaattttgtaagaagtatgtttgattctcaagtgggaaacctttgagtacacgcaggtcatatcacagaacaaagaaacaaatttaggcaattccaaatttaggcggtgacactttcctacatagaactctttgtttaaatattatttatgcatcaaggattagctcatttcaagataaagtcactgttttcctctccctttgggactaataaaataaaaccttattaaataaaaagtaattgacaaa

SEQ ID NO: 593354 - DNA, 606 bp, Homo sapiens
ttgcttgacccccttttcaattcattgagcatatgcttactattaataacctgaaataatttggctgtttcttaataatcatgactgatatctgtgagatacgtattctaagtccatttgagggatgaattgattctctaaggaagctatgagatcgagaccaccattactctcattttgtagatgaggaattaaggcaagataaatgctcacatacaccccaggctcacagagctactgcataacagagctgggttctaaagtcaggtcatctctacctaaagttcatttctcaactaccccactctggttcctaatgatgaccgagcaactttatgaaaccatcagtgtrtgtaatttgttgtagacataaaatccttgaaggacatatgattttattttaggtaccaagtggtttcaaagaattacacttgctcacatcagcatctgcttttcggtgttggttttctttgccctcttcctctttctgccacaatatcagggcaccctcctcacagactaaatattgagaaagtcccattgggtagaattttgtgttcaataaataatcacaatttcatttcacaaagaggaatgagtatgata

SEQ ID NO: 593355 - DNA, 606 bp, Homo sapiens
ttgcttgacccccttttcaattcattgagcatatgcttactattaataacctgaaataatttggctgtttcttaataatcatgactgatatctgtgagatacgtattctaagtccatttgagggatgaattgattctctaaggaagctatgagatcgagaccaccattactctcattttgtagatgaggaattaaggcaagataaatgctcacatacaccccaggctcacagagctactgcataacagagctgggttctaaagtcaggtcatctctacctaaagttcatttctcaactaccccactctggttcctaatgatgaccgagcaactttatgaaaccatcagtgtatgtaatttgttgtagacataaaatccttgaaggacatatgattttattttaggtaccaagtggtttcaaagaattacacttgctcacatcagcatctgcttttcggtgttggttttctttgccctcttcctctttctgccacaatatcrgggcaccctcctcacagactaaatattgagaaagtcccattgggtagaattttgtgttcaataaataatcacaatttcatttcacaaagaggaatgagtatgata

SEQ ID NO: 593356 - DNA, 439 bp, Homo sapiens
agcctcactgaactgtgaaggtaatagcccagaagcctgggctcaccaaaggcagaaacctactacacagcaactgggcattggtaaaataacagttgattacagctaaaagaactgccaggctcaagtcatatttaagaaggagtctttatagaaatgcagacaacagggaagacaaaaacaaagacactagagaaaattttagcctctgacacctaaagctgcagcaaacaataaacagtctaactcatggccaggtaaacatgaaacctcgtactgaaggtctatctgccccaatttctttcactcagtaaatcatgctgagctttcaacaaaaractcaaaaagcaacaacaacaacaaaaacaactaaaagtaactcaaaaaagcataataaaaagacagagtctgaagcaataaagcaagcatcagaaccaga

SEQ ID NO: 593357 - DNA, 637 bp, Homo sapiens
aacaaccaatatatggatatttcatgcagtatgtaaaatataattgtaacatctcatgtgagcctcaaaacaaccttatgagacaattaactaaaaattatgacacmactttatgaataagaaaactgaggaagataaaatgttgtttctattaaggccacttgactgatcaatatcagaagaagaacacaaagtcaggtgtttagattcaaaattcagtatgcactgatgtctgataagagtgggagatataaacatgaatgagatacatcctgccctccaagagctcgcagtcttgtgtctggaacacacatgtaaaatatatcatatctacagccgtagacttatgctcagcattctgtgaatgggagcagataagaaaagcatttaattctatttgacctgatctgaatggattgccagaagctataatcttgaactcagtcttaaagactgaatagttcgccaggtaaagcttatagaaatggtattgggggattcttgccaagagagaacatatcatgctgggggaagagcagtgcacccaatttaagaaaggtagaggaggcgtaaaacagaaagcatcagtgaacagactagtgggttaaggtatttgagaagtttgagtgattggatt

SEQ ID NO: 593358 - DNA, 637 bp, Homo sapiens
aacaaccaatatatggatatttcatgcagtatgtaaaatataattgtaacatctcatgtgagcctcaaaacaaccttatgagacaattaactaaaaattatgacaccactttatgaataagaaaactgaggaagataaaatgttgtttctattaaggccacttgactgatcaatatcagaagaagaacacaaagtcaggtgtttagattcaaaattcagtatgcactgatgtctgataagagtgggagatataaacatgaatgagatacatcctgccctccaagagctygcagtcttgtgtctggaacacacatgtaaaatatatcatatctacagccgtagacttatgctcagcattctgtgaatgggagcagataagaaaagcatttaattctatttgacctgatctgaatggattgccagaagctataatcttgaactcagtcttaaagactgaatagttcgccaggtaaagcttatagaaatggtattgggggattcttgccaagagagaacatatcatgctgggggaagagcagtgcacccaatttaagaaaggtagaggaggcgtaaaacagaaagcatcagtgaacagactagtgggttaaggtatttgagaagtttgagtgattggatt

SEQ ID NO: 593359 - DNA, 516 bp, Homo sapiens
ttaaaggctcagatcaaacatctattattgattgagctaataagaatttaactgtctattaaaagtaaatagccgtattcccaaatttgaaatgaattaatacaaaagaaaaaaatataaagtgattctgacaaaaggaagaaaaatatgaatgacatttataaaaaaaagtcagtagtgtagttactttgaaatcactgctgaatgaagactccatccccataaatttgggaaacagaaatgttttggacccctatgaattcaattaataaaacatcaaattgaagttytaaaaactgcccagtgggaatggtttatatagaattcaatgctgaagtgtttttctcaaataatttctgctcccctcaaagcgcacacacacacacacacacacagacacacacacaaaatatgatgtaccactatatcacgttataatagctaacacgtgcacagacacacacacacattcatggacacacataaaacataatgtaccactatatcatgttataa

SEQ ID NO: 593360 - DNA, 516 bp, Homo sapiens
ttaaaggctcagatcaaacatctattattgattgagctaataagaatttaactgtctattaaaagtaaatagccgtattcccaaatttgaaatgaattaatacaaaagaaaaaaatataaagtgattctgacaaaaggaagaaaaatatgaatgacatttataaaaaaaagtcagtagtgtagttactttgaaatcactgctgaatgaagactccatccccataaatttgggaaacagaaatgttttggacccctatgaattcaattaataaaacatcaaattgaagttctaaaaactgcccagtgggaatggtttatatagaattcaatgctgaagtgtttttctcaaataatttctgctcccctcaaagcgcacacacacacacacacasacagacacacacacaaaatatgatgtaccactatatcacgttataatagctaacacgtgcacagacacacacacacattcatggacacacataaaacataatgtaccactatatcatgttataa

SEQ ID NO: 593361 - DNA, 643 bp, Homo sapiens
tctctagctggtgattcccaaatatagatgcctccagttttggctatttccaaggttcatatgttttctttttgttttcttcactgggatatctctagattatccttgatttctctctttccttcatagccttctcctccctcattctaccatcgaatgcactgatacttgaattagaaatatttcaagatatgatgcaaatcttccctttgcaaaggttttggtatccatcactatcattcctartctaggctgacatcatctttcacctaaagtttttgaaattacctcctaccttatcccctgattcttctcttgtctttccaaaccattccccacatataagacacagtgtttttttatgtagatttgattatattactctactgctgaaattattttaaaagtttcctattatccttggaataacatttcatatccttatgtcctacaaagtcctgcatgatctggcctccccttaagtctttaattgtacaaatctctgcctctctgtcttgctcattactttcccattgtagtatcagcctcaaaaagttctttaaaaaaatttccccttcactgatacataatattttacataattatggggtacatgtgggtatttgttacatgcatagaatgt

SEQ ID NO: 593362 - DNA, 643 bp, Homo sapiens
tctctagctggtgattcccaaatatagatgcctccagttttggctatttccaaggttcatatgttttctttttgttttcttcactgggatatctctagattatccttgatttctctctttccttcatagccttctcctccctcattctaccatcgaatgcactgatacttgaattagaaatatttcaagatatgatgcaaatcttccctttgcaaaggttttggtatccatcactatcattcctagtctaggctgacatcatctttcacctaaagtttttgaaattacctcctaccttatcccctgattcttctcttgtctttccaaaccattccccacatataagacacagtgtttttttatgtagatttgattatattactctactgctgaaattattttaaaagtttcctattatccttggaataacatttmatatccttatgtcctacaaagtcctgcatgatctggcctccccttaagtctttaattgtacaaatctctgcctctctgtcttgctcattactttcccattgtagtatcagcctcaaaaagttctttaaaaaaatttccccttcactgatacataatattttacataattatggggtacatgtgggtatttgttacatgcatagaatgt

SEQ ID NO: 593363 - DNA, 643 bp, Homo sapiens
tctctagctggtgattcccaaatatagatgcctccagttttggctatttccaaggttcatatgttttctttttgttttcttcactgggatatctctagattatccttgatttctctctttccttcatagccttctcctccctcattctaccatcgaatgcactgatacttgaattagaaatatttcaagatatgatgcaaatcttccctttgcaaaggttttggtatccatcactatcattcctagtctaggctgacatcatctttcacctaaagtttttgaaattacctcctaccttatcccctgattcttctcttgtctttccaaaccattccccacatataagacacagtgtttttttatgtagatttgattatattactctactgctgaaattattttaaaagtttcctattatccttggaataacatttcatatccttatgtcctacaaagtcctgcatgatctggcctccccttaartctttaattgtacaaatctctgcctctctgtcttgctcattactttcccattgtagtatcagcctcaaaaagttctttaaaaaaatttccccttcactgatacataatattttacataattatggggtacatgtgggtatttgttacatgcatagaatgt

SEQ ID NO: 593364 - DNA, 447 bp, Homo sapiens
atcgcctcaaaaggacaaatctaagagcaattggtttaaagtggaaatagagaaaaagatagggggagaaatctcattcaaagggataatcacagaggacttcccaaacctgargaaatatattgatattcaagtagaaaaggttatagaacaccaaacagatttaacccacaaaagactacatcaaagcatttaattatcaaactttcaaagatcaatgaaaaataaatgcttctaaaagtggcaagagaaaagcaaccaatatcatacaatagagctatagtacgtctggcagcagactttgcagtggaaatcttacaggctaggtgagagtggcatgacatgtttaaagtactgaaggaaaaaacttttaccctagaagagtatatccagtgaaaatatcatttaaacatgaaggagaaataaagactttccagagaaacaaaa

SEQ ID NO: 593365 - DNA, 447 bp, Homo sapiens
atcgcctcaaaaggacaaatctaagagcaattggtttaaagtggaaatagagaaaaagatagggggagaaatctcattcaaagggataatcacagaggacttcccaaacctgaggaaatatattgatattcaagtagaaaaggttatagaacaccaaacagatttaacccacaaaagactacatcaaagcatttaattatcaaactttcaaagatcaatgaaaaataaatgcttctaaaagtggcaagagaaaagcaaccaatatcatacaatagagctatagtacgtctggcagcagactttgcagtggaaatcttacaggctaggtgagagtggcatgacatgtttaaagtactgaaggaaaaaacttttaccctagaagagtmtatccagtgaaaatatcatttaaacatgaaggagaaataaagactttccagagaaacaaaa

SEQ ID NO: 593366 - DNA, 544 bp, Homo sapiens
cttaaggaaagtgtaaatgttaccaagcaatcctcaaagaaggtgatattattaataactcctctctggagatacgaacaacatttattggaagttttatggcaactcagatagagattktttttattacattctcatggaaatagggtgttttggaattatgatccacttgtaactgcttcttctgtttgcttaaatatcctgttttcataaatatacatctatctggttgatgttttgatgaaacatacaatattttgtggtgcatgcacactattttctcaaactgacaaatcttgtaaaggtccaatggcagcaatctatatgactttattaacacctgccttggcatgccagaaattctgtaggcattttaggaattggacttgggataatgcttcttgctgagttagggtgaactaactaatgcaactggagccttaaaaccataagtcagcatagaaaattcagtttccactccaacatgtaaacaaactgaaagtcatctttttcatacttacaaagagaaaaaaaatctgaacag

SEQ ID NO: 593367 - DNA, 465 bp, Homo sapiens
aatgtcaacaagcagtgtcactggagggaatttggcagtttctagctttccttatatcacttcccttttatgttcatttttcatggagggatataaatctgtgaaaatgcaatgtaaatattgttttgtaatctgtgtgtaattttagagtgcaaaaactgtaaagggttaatttctgttctttagtcacttgccggaatcgtgtcttaaggttgagtggtgatttctgcctgacaacccaggttttttaaagaatttttttttcctgatacagtccctatgatacataatatatgtatgcatattatttttakatccttttctgttgataatttccagttgaatttttttttaattttcaaaggcaagacaacaataaaatatatgatcttacaaggaagccatgaagctcactggaatataaaaaaggaataaaagcaaacattaaaaaaattatatcaaact

SEQ ID NO: 593368 - DNA, 545 bp, Homo sapiens
atttaacagagttaaccacaggaattttgctataaaagaggaatgggatacagacaaattcagacacagaaatgtaaaaatagagaaaatagtaaaatatttttaagagaaaccattgggagatatacctaatgctagatgatgagttagtgggtgcagcgcaccagcacggcacatgtatacatatgtaactaacctgcacaatgtgcacatgtaccctaaaacttaaagtataataaaaaaaaaaaagagaaacctcatccattcacatgaaaaacattaaatatctgagaaatgtttagagtctaaaatgtgaaatatatgtgaagttaaagttgaatctaactggattaagaaatacccagctaaatttttttggtgatgtaamtgtacttgagaaaaaaatccatagtagttcagagacttggtctttttgttacctctggtgttagccaaattggggtggagtgaggaatttgcttgtgtctgtaacacctcagagaggcatgacccaaccagcccaaactgtgactgagatctgagta

SEQ ID NO: 593369 - DNA, 655 bp, Homo sapiens
tgtgacccagttctgatcaataaaatgtaaaacaaggtttagtgagtgagtttattcttcccaccacccgcccccacccccccmcccccccaccaggatgatcttgaactcctgggctcaggggatcctcttgcttcagcctttcaaagttctgggattacaggcacaagcgactatacccagtcctgtgtagtgcattttctaaaaatgcttttcattttccaagtgaatataaaagaaaaaataatcacatttgttactccagaaattgttacatttagatacaatgtttgaaatttacacagcatcttgccacccatctaaaattaaagctaatactgaaattaaccaaactgagaatggaaaaatgctagttccttgatgatagctttgagggctgaatcaaccaatgttgaagcaaacctatctctggaccacttttatataataaagtaagtgttcctattgtttaagccaattttaagcataatttacattagctgtggctaaaataatcctaaatagggcaatgaataaagacatgttagtcttcactttgttggtcctgaggaaagcaagtagaaaggtagagtccttgaggggaagtagttgaagagggatcagcatgcaagaggctttgtgcttgatgcttaca

SEQ ID NO: 593370 - DNA, 426 bp, Homo sapiens
caattaactgaacactgaggtagctgagtacagactttagcggctacatttgacaaacattgcaattacaagcagcaacacaaactcaaccttgggatggggatagaaatcttttctttcttctttctttttttttttttttttttgagacagagtctcgctctgtcacccaggccggagtcaagttggcgcaayctccgctcactgcaaactccacctcctgggttcaagtgatcctcctgcctcagcctcccaagtagcttggattatgggtgcccaccaccatgcctggctaatttttgtatgtttgatagaaacggtgtttcaccctgttgaccaggctggccttgagctcctgacttcaggtgatccacctgcctcagcctcccgaattgctggcattacaggcatgagccactgcatcca

SEQ ID NO: 593371 - DNA, 596 bp, Homo sapiens
cagagcagctcttctgtacaaccccctccacacctgccggcacctggccaattaagctgcagccttagctttttgggaaaaggagagtggtggggttaaatccagatatagacatagcttgagggcctgkgttcgggccctgggcctgattgttctggagtgcaaggagcccctacttgatagtaattgatgttccaatattgagccatcagtgcatttctgttttaagtctttcttggttatgtgggattgtactattggataaggttttctactattttgtctagattactctgaaatgagattggcctatagctttctttgtggtatatgctcttgtaatttattttttatatcaggattatgtgaattttctagaatgatttggagagatttaaagcgttctacgctggaacattatatataacataaaattacatattcttaactaaagattagcagaaacttgcttgtaagcctctgggtggggtgccttttgtgaggaagagctccttaatgatcttttaatgaattctgtcattattggtctatttaagtgctctgcttcatcttaggtcacttttagtaattcattt

SEQ ID NO: 593372 - DNA, 531 bp, Homo sapiens
ctttggggtggtaaatctagaagcaaatgaacttgtattgcatttaagtagaaccatcattaattatgttaaatgacctccacaagcagtaaggatggaatggaaggtgaggggacagagaatcccaccatgatatactttttcacaaaaggaatctttttttttttttttttttgagatggtttctcactctgtcacccaggctggagtgcagtggcgcgatctcggctcactgcaacctctgcctcccgagttcaagcaattctcctgccttarcctcctgagtagcttggattacaggtgcacgccaccatgcccggctaatttttttgtgtattttcagtagagattgggtttcaccatgctggccaggctggtctcgaactactgacctcgagtgatccacccgcctcagcctcccaaagtgctgggatgtcaggtgtgagccaccgtgcctggccgaaatcttatgaagaaaataattacaagtagaactgtttgaggggaaacaggtaagggggctggaccctt

SEQ ID NO: 593373 - DNA, 465 bp, Homo sapiens
atgatttcattctttttcatggctgcatactattccatggtatatatgtaccacactttctttatccagtctgccactgatgggaacctaggttgatcccatgtctttgctattgtgaataacgtggtgatgaacatatatgtgcatgcatctttttggcataatgatctgtttttctgggtatatacccagtaattggcttgcggrgtcaaatggtagttcagacacttctcaaaagaagacatacaagcagccaataatcatatgaaaaaactcccatcatcactattcaacagagaaatgcaaatcaaaaccacaatgagataccatctcacaccagtcagaacagctactattaataaggtcaaaaaacaacagatgctggtgaggctgcagagaaaagggaatgcttacacactgttggtataagcagatgggtggtggggatggaaatgagttcagcca

SEQ ID NO: 593374 - DNA, 507 bp, Homo sapiens
cacttatgtatcgtttattcctactgaaactgttgagcccctgctttgtgctgcctgaggtgtacatcggaatcactggtgaaaatttaaaatacagttatctgsactccacctcagaccagttggttctcagaagcatgcatttaaaaactcctcaagtgattcttgtatgtttgtgttactttttttattttttatttttaatcctcgtgttggttaatcccataatgtcactcaatttctctgtcatccttagcctgatttttctgtggtctgggtcacttttctcaggccaattcccagccttggacagggtgtactaattaggcatttctgccacttgtttgctagagtgttgagttcactacaaatctagcttccttttgggcccatgttgctttccattaatccagaagtactttgcttcccctcctcctaacctactccctttacaactttgtaatttgagtttcaactggaacttgagttctagactcccttacttga

SEQ ID NO: 593375 - DNA, 592 bp, Homo sapiens
caaataaatgattttttattttatctttatttgtttgttttctaatgctcattctttcttcacgtagatctgaatttctgacctgtattactttccttctctctgaagaacttatttttagatttcttataaagtaggtctactgatgacaaattccatcagtttttgtttttctgagaaagaaggtcttcttcacttttaaaggttaattttgctggatagagaattactgattggtgtattgttttttcttattttactccactctcattttgcttgtatagtttctaaagggaagtctgacataattcttatccttgtttcccttcaggtaaggtgttttcttcctctgacttctttcaagctgttctctttgttttctagtttraatatgacatgcttaaaggttttttatttgtttattttgttgttgtagttatttgtcctccctgatattctctgaagttactgaaactgtggtttagtgtctctcgttaattttggagaactctcatgcattcatatttcaaatgttttgtctattcctttctatgtttactctccttctggtaatcccattacatgtatttac

SEQ ID NO: 593376 - DNA, 482 bp, Homo sapiens
acaaaataacaaagtaagatttcttccaagggcgggagtctcggtttgtagtggcttcgctgaggcagtggtggccgcactgtaccgttagaaactcagtttcccggaggttgtaaggccctttgaggtgaaatggctctgggcgtgaaaggagcaggcgttggcaatggaaggaccaccgcgacctcaggctgaccgtagggagggatcttgagggccctccgagtcccckgggcttgcgctttttttctttgtagccaccgtgcctaccgcgaggatgagctcggcctcggtcaccgctttcgagaaggagcatctctggatgtatctgcaggcgctcggcttcgagccaggcccagcaaccattgcctgcggaaagatcgtgtcgcacacgcacctcggagtttctggaccagtcactcgccaaagaagttttcaaattttgttggcccccatttgaccaaaaaagtgatactgaattc

SEQ ID NO: 593377 - DNA, 542 bp, Homo sapiens
aaagtgttccaggtctgtgttttcccaggaagtccccaacataagcatactgctaacataaggggtgagtgggaaagaatggctgaacatgaggtagagggatcctgatctaagttaaggaccagccttcatggtattaggaatcatagagaagtatttagttcttaagaatgcaaactctggactcctggctccaccacttgccagccaagtcggggtcttgttcaactgttcaacctctgcctctatttcctcatctattaaattggagtattaagagtgcaaatttatagggtcttgttaaagttacataagtaaagtgttagaatagtgcctggaagatactatgtgctagctgctaccatgaaatcytttttttaattttaattttaattttaattttgagatggagtctggctgtgttgcccagggtggagtacagtggcatgttctcagctcactgcaacctccacctcccaggttcaagggattctcatgcctcagactcctgggcagctgagactacaggtgcacaccatcat

SEQ ID NO: 593378 - DNA, 592 bp, Homo sapiens
gtataacgacctttcaaaacaaaatrcaagatttgaaaactgattggctgggggatgaggaaaaggcagacctttaagttcaatccctgttttgctttaggttgttagggggtggttttataacatattgtagaatatgtcatttcagttttgaacgtcttgagttaaattgtcctaacatatcttaagaatttgattttcttccgtgggaagctaatatttcaaaaccttaaagagtatagatttccaacttgtatccaatttataaaattatccctaggctgctgatttcaggaggaagctcatgaatagtctatttgcagacaatatatcaggagttaacaacagcttcaatatttgtgggacaaccagttaactaagccacctcttagtgtatttagatggaaaatcttagctgaagatattaaataatgaaccaacagtgactaaaaaattgaatatttaagtatatttcattgtaatgaatttgaatctaagtagccatatacagcagctagtatttaccacattgaacaatgcaaattagaggaaaaaattaataaccatatctaataccacatgccaaaatcct

SEQ ID NO: 593379 - DNA, 553 bp, Homo sapiens
  misc_feature 323: n = A,T,C or G
atccacatgtttttgttaatatgaatttggggaaaaaagcatacttaattaactaagacttctcattctaggcttgaccctgtgttcgacatcttttgaatttgtagttgcataggctgctctctgacactggttagtgatctggaagctatattaacgttaggggaggtggtgtatgagcattagaggtatccttgcaaggaaagacttgtcttatctcaatacatccttttttgcacacaagaaagtcaatgtttgagtcttctaaaatcttcctatttccaagttgcagagtaccattgattcctaagcaaagatctatnttttgactcagagacgtggcaaggtagtgaatcacattataatttaacaatcttcaagataaaattatctctcygatatttagattttgcccaattattaagatatttgggtgttttgttaagaatggaagactctagtcccttgagcagagacgataaaggcctcagatgatcatttataattttatgctcttttctataacatcttcaacacagttggaagcagccaa

SEQ ID NO: 593380 - DNA, 553 bp, Homo sapiens
  misc_feature 323: n = A,T,C or G
atccacatgtttttgttaatatgaatttggggaaaaaagcatacttaattaactaagacttctcattctaggcttgaccctgtgttcgacatcttttgaatttgtagttgcataggctgctctctgacactggttagtgatctggaagctatattaacgttaggggaggtggtgtatgagcattagaggtatccttgcaaggaaagacttgtcttatctcaatacatccttttttgcacacaagaaagtcaatgtttgagtcttctaaaatcttcctatttccaagttgcagagtaccattgattcctaagcaaagatctatnttttgactcagagacgtggcaaggtagtgaatcacattataatttaacaatcttcaagataaaattatctctccgatatttagattttgcccaattattaagatatttgggtgttttgttaagaatggaagactctagtcccttgagcagagackataaaggcctcagatgatcatttataattttatgctcttttctataacatcttcaacacagttggaagcagccaa

SEQ ID NO: 593381 - DNA, 432 bp, Homo sapiens
tggctttgtgctgagttctttgaagctggcgcaaagtgtgtgttcactcttgcactgagtgaagttcaagttcactcttgcacagagcttgcactgaggggarggatcagccaaggtaaaagtgtagggtcttcttatgacatttgtcagcatgtggcttaacctatgcatacgtgtgactttctagactctcccatgtacgtgaatgattttgaatgtcttagttttccaaatactcttctccaacttttcttcctgtgctgaaggtgatctactatatgtgtaaactctaatttttgccctaagcatctgttgtttgttaggtctccttgcagagtttctcaataatgtccattccttatctgttctgtattctagcaacacagaaaaaaaagcctttcattagtccttcaggtatcccccagaccagtc

SEQ ID NO: 593382 - DNA, 432 bp, Homo sapiens
tggctttgtgctgagttctttgaagctggcgcaaagtgtgtgttcactcttgcactgagtgaagttcaagttcactcttgcacagagcttgcactgaggggaaggatcrgccaaggtaaaagtgtagggtcttcttatgacatttgtcagcatgtggcttaacctatgcatacgtgtgactttctagactctcccatgtacgtgaatgattttgaatgtcttagttttccaaatactcttctccaacttttcttcctgtgctgaaggtgatctactatatgtgtaaactctaatttttgccctaagcatctgttgtttgttaggtctccttgcagagtttctcaataatgtccattccttatctgttctgtattctagcaacacagaaaaaaaagcctttcattagtccttcaggtatcccccagaccagtc

SEQ ID NO: 593383 - DNA, 190 bp, Homo sapiens
tttaaaaaatcaactctaaattttatatcttgctccaaatatatagagatataaataggttatmatcaaggtatggagaaagccatatcatggaaacactaaaataaagctgtggaaggactacattgatattagacacaacagagttcagaacaagaaatattatcagagatgagagataatatataat

SEQ ID NO: 593384 - DNA, 190 bp, Homo sapiens
tttaaaaaatcaactctaaattttatatcttgctccaaatatatagagatataaataggttataatcaagrtatggagaaagccatatcatggaaacactaaaataaagctgtggaaggactacattgatattagacacaacagagttcagaacaagaaatattatcagagatgagagataatatataat

SEQ ID NO: 593385 - DNA, 190 bp, Homo sapiens
tttaaaaaatcaactctaaattttatatcttgctccaaatatatagagatataaataggttataatcaaggtatggagaaagccatatcatggaaacactaaaataaagctgtggaaggactacattgatattagacacaacagagttcagaacaagaaataktatcagagatgagagataatatataat

SEQ ID NO: 593386 - DNA, 209 bp, Homo sapiens
ctgtaaaccatactttacccatatgaagaaaagcamtaaggattatttagtaaatacacatggaaactcatccagggttggctgatgagaagctggttagcaagggggtctgtcttcagttaggacaaggtctgtgcttcccacaggttatctccacagcaggagggatgcaaacttccctttcctcccctgcacctaccctcaaatgg

SEQ ID NO: 593387 - DNA, 209 bp, Homo sapiens
ctgtaaaccatactttacccatatgaagaaaagcactaaggattatttagtaaatacacatggaaactcatccagggttggctgatgagaagctggttagcaagggggtctgtcttcagttaggacaaggtctgtgcttcccacrggttatctccacagcaggagggatgcaaacttccctttcctcccctgcacctaccctcaaatgg

SEQ ID NO: 593388 - DNA, 209 bp, Homo sapiens
ctgtaaaccatactttacccatatgaagaaaagcactaaggattatttagtaaatacacatggaaactcatccagggttggctgatgagaagctggttagcaagggggtctgtcttcagttaggacaaggtctgtgcttcccacaggttmtctccacagcaggagggatgcaaacttccctttcctcccctgcacctaccctcaaatgg

SEQ ID NO: 593389 - DNA, 621 bp, Homo sapiens
aattttgtaaatcaaaaagtctcaatgwcattataaactatcttggcaggggttgatctccaaggaataattcctctcccaaattatgccaatcagaatttcactataccataattcttttaatcagtttcagaggaataataaatttcaaaattgttcaaggtacttgtagttcaagtacattttgacaggtttaaaactgtagacagactgatacaaacatattctaattgactcaaaaatatatgggacctattttaaaatctagattttaaaatgtcatctcaacatatacatgttctccttgtgaaataattgctttttattctctggatagaatctttaaaccttcaattcactgttaaaaacaaaacattacataaggatatgcttataaaaataattcacaagtagcttttcaattcagaaatatatgtaaaaaatcattaagcatctaatggatttcaaggagaaatgggttagtaatttgttccatatgtctcaatttttcctggacacacggcttcctttaaaataattgtaggcatttaagaaacctggtaaactaaaaagaagaaattatgacactgcctggttaggttttttaaaatctttggacat

SEQ ID NO: 593390 - DNA, 621 bp, Homo sapiens
aattttgtaaatcaaaaagtctcaatgtcattataaactatcttggcaggggttgatctccaaggaataattcctctcccaaattatgccaatcagaatttcactataccataattcttttaatcagtttcagaggaataataaatttcaaaattgttcaaggtacttgtagttcaagtacattttgacaggtttaaaactgtagacagactgatacaaacatattctaattgactcaaaaatatatgggacctattttaaaatctagattttaaaatgtcatctcaacatatacatgttctccttgtgaaataattgctttttattctctggatagaatctttaaaccttcaattcactgttaaaaacaaaacattacataaggatatgcttataaaaataattcacaastagcttttcaattcagaaatatatgtaaaaaatcattaagcatctaatggatttcaaggagaaatgggttagtaatttgttccatatgtctcaatttttcctggacacacggcttcctttaaaataattgtaggcatttaagaaacctggtaaactaaaaagaagaaattatgacactgcctggttaggttttttaaaatctttggacat

SEQ ID NO: 593391 - DNA, 584 bp, Homo sapiens
agttttgcaagaaacataaatttaagggaaacaaaattatgtgcacaagatgaatttaataacatcttgatattttcctctattatagttttatttggtaaatctttaaatgcacatcatctaaagataataaatgaatcttggaaatcttgtaggtaagggtaaatgttaggatgcatttggtttaacagcccaaaatccattacggtaatacatcttatccatagaataagaaacaagatttgcatgatcatctcaatagattcagcaaaggcatttaacaaaatccaaatgttttaatgattaaaaataaaaatgaaaataaaaactcattgagccatgartagaagagaactttctacaccagatacatggcacctgtgaaaagccaacagcaaacattcaacttaatggtgaaagaaaggatactttcctgttatggtcagagataagaataggatatatactttgacctcttctagtcaacattgtaataaagattttatgcagggcaaatcagcaagtaaagaaataagagtcacccttattgaacaggaagaaataaaactttatttgcaaataac

SEQ ID NO: 593392 - DNA, 553 bp, Homo sapiens
aaatgttgttgggttaaaaatcactctcttcttttctataacatatttttccaaatcataaacaagtaaatggtgctctgcaaactccacgatcctgtggatccttatgatttccctgagagacaaaagtaccagataatttgtattttacagatgaaatagtttcaaagcccttatccttagtctttgccggagccataaatgtcacagctttttgaaaaacttgttatttggaatttcaaactcacacaaaatttttaatttttaagaatagtagaatggatgcctatacccgtcacctagattcaccagttgtttacatttcgttccgttggctattttatatactcattgagccacttcagagtaaactgctgacatcatcactctattcctaaacacttcagcatccatctcttaagaaggttaggaaagacaaggrcattctcttgcataaccacagtatatctctcataatcaattcctttaacaatgtgtgcaatgtatagtcattcaaaatttgccttttgacagataatgttctttatagaaa

SEQ ID NO: 593393 - DNA, 572 bp, Homo sapiens
ataagatatcacatatgacccagcattactctgagtgttcacttaatacagcaggcaataaatattcccttttcagatagcctaaaagaaggtattaaagaacaatgacaataaaccagaacaatgacaataaaccagggtcagatgtcccctcaacatgaaaatccaaacatttaaggaatatttgagttacttttagttgcaattagaaaatacaggtaaaattttttttaggaaaaacatgtttctttctttatcaaggacatgctgaattatttggtgtaattttttttttttttttttgagacagtgtctcaatctgtcacccaggctggagtgcagtggtgcaatttcagttcackgcaacctccacctcccaggttcaaacgattctcatgcctcagcctccagagtagctgagactacagctgtgccaccatagctagctaatttttgtagtttttggtagagacaggatttcaccatgttggccatgctggtctctaactcctgacctcaagtgatccgtctgcttcagcttcccaaaatgccgtgattacaggggtgagcca

SEQ ID NO: 593394 - DNA, 600 bp, Homo sapiens
  misc_feature 1, 2, 3, 4, 5, 6, 7, 8, 9, 10, 11, 12, 13, 14, 15, 16, 17,18, 19, 20, 21, 22, 23: n = A,T,C or G
nnnnnnnnnnnnnnnnnnnnnnnaaaagtgcagtgttgttattgctgtcatttgtgtttattagatacagaaaatgttttgtgtgctatagagacaactgactccttttcccggagctcttaccttctaactggaaaagaaagacaggaagtctgaatactgtttttgtttgtttgtttgttttgttttgttttttatacttgcaaatgatggtcaaaattcagtgtaaagatagaactataagaaagtgtgggtttataagtacatgatactatacagaacagaaaaatattgggaggaaattgagtatagtacattttcatacattaagagacctggagttttaaaccaaaccctgtaattacttatcwgcatgatcctgggcaaagcactttatctccctaggtctctattatactttaataatctcactatccaagatggagaaaagagaatttatcatggtaatatagagggcaacattaactcagagtttattttcatttgctacaattagcactacaatttgagttcttttttttaattgacagcattgtttgcagtctttgtttaccatttgtaaattctggttagtagacc

SEQ ID NO: 593395 - DNA, 569 bp, Homo sapiens
atgaagctggtgaagggaaacaactgtcctcactccactggcaaaacatgcattttgataattgcagatgcttctaggccagggtttcttgaccaggatgagcttcaggggttccatcaacaaccagttgtgtagggctgtgttggcaggtatgccagcaattatatattcctacasgggcatttttctggcaagaggattaatacttgaaaaggtaaatgtccatgctctaaaatagtgattcttaaactttattgtgtataataatcaccaggggagcttgctgacatctccaattcctataatcactgtggtgggaaatttggcagtatctaacaatataaaatattcatttactatttgatccagcaattcttgtttctaaaattcaacctgaggatgcatcttaacaaataagaaacagcacatacactaagttatttactgtaaccttatgaataatagcaaaatattagaaacattttttaaccagccctctcttccctggctgtttattaatttctttccagaaaactagaccctaggttctgagactacaacagggaatt

SEQ ID NO: 593396 - DNA, 545 bp, Homo sapiens
taaaaccgtctataacaatattcatgtcttcttaaaatcagataatattattttatgttttacttgcataagttattaatactcattaggacatctacacatagcattactcagaatttaggtattgaatgaagaaaacagtttagtaaattatgtggtaggttttttatgagtctaaatagtcattgttcctttttttaatagacatatcattgtaaaaatttaatgagtatgtagttcaatacatttaagatgaataaattatattatgaatttcctaacacrtatgctatcgattggaaattatctagcaacagagtttttgaagatatttcagctaaaacaacgatcctaaagcaaactatctcattcaaaagcttcagttttttcccactatattaaaattgcttcaatggaatacaaatgtaattttataaaataatggaaatgtgtacatgagaaatatcaatagctgataaaagataaaattatcttttagaagaataaaacttaaattatttggatggcacaagcatagctatgga

SEQ ID NO: 593397 - DNA, 569 bp, Homo sapiens
catagttaacatcaactctaggtcacaagtgatgcatttttcttttctgtgttttcattttcttttctgtgttcctccttccattcccaagaaacactggacagagagtaataaaagtaggcttagttaatatgttaagaaatatttgaatgkttatgtggtttaaaaaatatttttaatatatatgactaaattattttcaatacatacttgttatgtttaacattaagatttgaggttaattttaaatgttcttggtaaaaaatttttaagtgaagtctccagttggtttaaggaatgagaaaacaaacttagtgatacagttggttttatttatttattttttttgagatggagtttcgcttttgttgtccacagcgatcaatctcagctcactgcaacctccgcctcttgggttcaagcgattctcctgcctcagcctcccaagtagctgggattacaggcatgcgccaccatgcctggctaattttttgtatttttagtagaaacagggtttcaccaagttggccagactggtctcaaactcctgaccccaggtgatccaccca

SEQ ID NO: 593398 - DNA, 431 bp, Homo sapiens
ctaaaaatatgcaaagaaaaaagaaaattattgaaccaaagcaaaacaaaaagctactcaagaatacaacagtttcaggaatttggatgtgtcttactcctatatacacaaaattctttttacatgctgtgctcatccaattctaattttctaattatatctatcttctggcctattaatggcttctcaaaaagaatagaaggaccaagaggacagtgtgcgaaatcctaaactccaaatgacatcttygtctatgccagactctgcctccaagataagttctgaccaacctattctatttttccacatagttctaataaactgcatctatctggcctggttataagatgtcaacatcagaatttttctatcctagttgtgtttatctaacaatgatgggaaaagctaaaagtaaaaaaaaataagttagc

SEQ ID NO: 593399 - DNA, 497 bp, Homo sapiens
catagactcaactggatgccccgagaagctctaggactcactcaacctatgtggtctttctggatatcatggttgagcctcagacctgtaaagacagcctagcaaaaaaattgttccagctgtttggtaaggtatttattcyacgggatctcatagaattgatctaccataatggtgtgggcacattaatttgggtgattctcactcacattggagataagatgagttaaaggctctgggctgctgatggaccatcattgagccttgggctcaagtcacgcatgtgacatatgtggactcattcattagctctcgcccttgttccaaccatagtgtcacctctagtccagtggtgcctggagggtagcagatgacttttaccatacatccgctttctgctaacactcaaggagatcacgctagccctttagtagcaggctttgtgccacatttcaagcactgccttctgcaaaagctttagagactcatgcacataa

SEQ ID NO: 593400 - DNA, 497 bp, Homo sapiens
catagactcaactggatgccccgagaagctctaggactcactcaacctatgtggtctttctggatatcatggttgagcctcagacctgtaaagacagcctagcaaaaaaattgttccagctgtttggtaaggtatttattctaygggatctcatagaattgatctaccataatggtgtgggcacattaatttgggtgattctcactcacattggagataagatgagttaaaggctctgggctgctgatggaccatcattgagccttgggctcaagtcacgcatgtgacatatgtggactcattcattagctctcgcccttgttccaaccatagtgtcacctctagtccagtggtgcctggagggtagcagatgacttttaccatacatccgctttctgctaacactcaaggagatcacgctagccctttagtagcaggctttgtgccacatttcaagcactgccttctgcaaaagctttagagactcatgcacataa

SEQ ID NO: 593401 - DNA, 568 bp, Homo sapiens
ttttttgtttctctctctctcttttttttttttttttttttttgcaatttggagaaggaagtactttaaaagaaaagttaaaaggcagacatagatagcatgaagcctaattgcaagatctttttcaaacatattagttttaggaaatagcacctgaatttaagtcccttaaaattgtctatgtcttcacgtccaagtctctatatttgcagggctgtgtacaatctaractgaacatgcttgacctaaaaacagaagtaatacctggggcaaagcacgatgtgcaccacagtcttctctctttagtgtgttaagataaagttgattcccagagtagcctgccatcactaactctgagggatggtgggctaattttgatagaaggagcagaggtggtagttaggaggaaggtgactcatcatcattgtatcagcaggcattgatgactggaaatatcagggggcacagcctgaaagagaatggcttaattggaattgatagtgggaacttggaaatcaatacatatgcactgaacagaaaatggtatgctataatctactatacactg

SEQ ID NO: 593402 - DNA, 563 bp, Homo sapiens
gtatagtagattatagcataccattttctgttcagtgcatatgtattgatttccaagttcccactatcaattccaattaagccattctctttcaggctgtgccccctgatatttccagtcatcaatgcctgctgatacaatgatgatgagtcaccttcctcctaactaccacctctgctccttctatcaaaattagcccmccatccctcagagttagtgatggcaggctactctgggaatcaactttatcttaacacactaaagagagaagactgtggtgcacatcgtgctttgccccaggtattacttctgtttttaggtcaagcatgttcagtctagattgtacacagccctgcaaatatagagacttggacgtgaagacatagacaattttaagggacttaaattcaggtgctatttcctaaaactaatatgtttgaaaaagatcttgcaattaggcttcatgctatctatgtctgccttttaacttttcttttaaagtacttccttctccaaattgcaaaaaaaaaaaaaaaaaaaaaaaaagagagagagagaaacaa

SEQ ID NO: 593403 - DNA, 370 bp, Homo sapiens
aaagtttgctggtagctcagctcacctccaagttccctctctcattctggctgctatgygctgcttcctggtctgccaggccccaaccccccagcacccttgcacacctatttaagtctctctctcatctaaatccctcaaaactcacaaattacgggaggtctacattcatattggtctttttttggttggctttctcacatatgctcacgaaagtaagttctatcattatttgttcatttttaaactcctgacaatttttttatttcttcctttctctgtcatcctctcccattatcactacattgtattcccatttcctggaccttgaaggtatctgataagggtgcaataatgcacacaaacaaac

SEQ ID NO: 593404 - DNA, 370 bp, Homo sapiens
aaagtttgctggtagctcagctcacctccaagttccctctctcattctggctgctatgtgctgcttcctggtctgccaggccccaaccccccagcacccttgcacacctatttaagtctctctctcatctaaatccctcaaaactcacaaattacgggaggtctacattcatattggtctttttttggttggctttctcacatatgctcacgaaagtaagttctatcattatttgttcatttttaaactcctgacaatttttttatttcttcctttctctgtcatcctctcccattrtcactacattgtattcccatttcctggaccttgaaggtatctgataagggtgcaataatgcacacaaacaaac

SEQ ID NO: 593405 - DNA, 608 bp, Homo sapiens
gtacatcacgggagctgagaggcaataaaaataagaattggcacagctaactcctctggcttcttggctcctatatacaaccttctacccacatttgaacttcctatgcctccacctgtcaagaaaagctatccttcaaagaaaagatgaytttcttacccgttcttccaaattaggagactcggtcccaacagttattccatcactagttatatgatttctctctaaaattcagttacagtctgactcaattctgttacctaaaggataaattttaaatgtaacctgcaataacttatatataaaatggaaatgggaaaaaggaaactgattggcatatacagataaaaacctacagataataaataagagacaatacacaaagctactagagccctcatttctgtaattggtcacagggcgttagttgttatctatgatttcctttttccactgccctcagacaacaccagctggtcaggattctttatggggatgaaaccaaaatctttatcactgaagtgtctgagttctcagtcatgtattatttggttgctatagttctccactgaccttttctattaagaaaacaagtattaaaaagcccc

SEQ ID NO: 593406 - DNA, 540 bp, Homo sapiens
ttggctcctccccccgccctgatgtttactttcttaaaaactgccatgtgctgtgctctggctaagtaaagaaaaattttagmtatcctacaaaatgtgtggctgaaatgttgtcaaatatttatatagaacaaatatttaaaagttcttgataactaaacttgataactggataactaaacttgagagaagagcctcattaattgctgattggaattaggagaaaaatcatatgttttatgtatatataactatgttgtgtgtgatagtgagtaaaatattgctatttgattatagatgttcacttttaattctttctccatttggatactttctatttagccctccagatctactcttccccttacatactctgctctttgccttgaagccctaaaaattatgtcaactgactcctaccccttctgctttccttttgggtttggccagcgggaaacccaagcaggacattggagaaaggaagaagtatgaaattgtatatttctctagttcatgagattcccctatgcctggccgttc

SEQ ID NO: 593407 - DNA, 565 bp, Homo sapiens
aacttctgcctggacatccaagcatttccatacatcctctgaaatctaggcagaggctcccaagcctcaattcttgccttctgtgcacccacacgcttaataccatatggaagccaccaaggcttatggcttccaccctctggagcaatggcctgagrcatatctggagcccttttagccagagcaggagctggagtagctgggatgcaggcagaagtgtcccaaacggccctgggcctagctcacaaaaccacttttccctcctaggcctccaggcctgtgacaagaggggctgccatgaaggtctctgaaatgactttgaggcattttccccattatcttggccattaacatttggctcctttttattatataaattttgcagcctgctttaattcctcccttgaaatagggtttttcttttctaccaaatgatcaggctacacattttctaaatttttatgctctgcttcctttttaaatatacgttccagtttcagatcatctccttgctcacacatatgaccatatactgttagaaccagctaggccacatcttgaatgc

SEQ ID NO: 593408 - DNA, 622 bp, Homo sapiens
aatctaccaagttccttcccctgttcccacagctttttgtgcatatttccatggaagcgtttacacattacatggtagctactgcatgcatcttcttccttactaatctgtaaacaatttcagaacaggaatcttacttcacatttctctgtatcttcatttcttagcaaagtatctagaacaaagtatgtccttactaaatatgtattgaatgagtgaatgcataaccacaatataatgttcaattagtaccaagatatttagtttttaaaatcaaagatcttgattgtttacatgttaaaactagaaaagtcttgatatgttttattagcctccaaacttacctgagtatcttatctgcagtacagaatgtgggatacctaataagtgtgaaaaatggtccttaagatatttaagaatggtatcaaccttaaaaggtattacaatttcctggcccactggaataagtacaacttttactgtaaattaaatagaaaagaaagaattatagtcaaatatagcaaaggtcagcaaactacagtccacaaacagatacagaattatgtgttaatttttaattacayagaatacaagttgttcttgctagtgtttccctgctgtg

SEQ ID NO: 593409 - DNA, 537 bp, Homo sapiens
ggaggggcggtgtcgggaaggaggagcgcggcaggaaataagggaaggagctagaggcgggctgggggccggggwctggaaggaggatcgcggtagggaagaagaggagccagaggagggggatgggggctgcaaaggaggaacgcgatagggaaaagggggaggagccagaggcgagggggcggggagaagaaacatggcaggagaaaggggaggagccagaggcgaagagacaggaagagggacgcgtcagggagaaggggaggagtcagaggcgagcgggcgtggaggagggaagcggcagggagaaggggcgggcgcagaggcgaaggggcggggaggagggacgcggcagggagaaggggaggagccagaggcggaggctgttaccaactggctacctagatccaagtgaatcaggacactaacttctctccaagatcttttacacttgtgaaacggcacagctctctaaaccaaacactgacagcagtttaattttacagatataaaaaaaatccgagtcagagaaatcat

SEQ ID NO: 593410 - DNA, 537 bp, Homo sapiens
ggaggggcggtgtcgggaaggaggagcgcggcaggaaataagggaaggagctagaggcgggctgggggccggggtctggaaggaggatcgcggtagggaagaagaggagccagaggagggggatgggggctgcaaaggaggaacgcgatagggaaaagggggaggagccagaggcgagggggcggggagaagaaacatggcaggagaaaggggaggagccagaggcgaagagacaggaagagggacgcgtcagggagaaggggaggagtcagaggcgagcgggcgtggaggagggaagcggcagggagaaggggcgggsgcagaggcgaaggggcggggaggagggacgcggcagggagaaggggaggagccagaggcggaggctgttaccaactggctacctagatccaagtgaatcaggacactaacttctctccaagatcttttacacttgtgaaacggcacagctctctaaaccaaacactgacagcagtttaattttacagatataaaaaaaatccgagtcagagaaatcat

SEQ ID NO: 593411 - DNA, 537 bp, Homo sapiens
ggaggggcggtgtcgggaaggaggagcgcggcaggaaataagggaaggagctagaggcgggctgggggccggggtctggaaggaggatcgcggtagggaagaagaggagccagaggagggggatgggggctgcaaaggaggaacgcgatagggaaaagggggaggagccagaggcgagggggcggggagaagaaacatggcaggagaaaggggaggagccagaggcgaagagacaggaagagggacgcgtcagggagaaggggaggagtcagaggcgagcgggcgtggaggagggaagcggcagggagaaggggcgggcscagaggcgaaggggcggggaggagggacgcggcagggagaaggggaggagccagaggcggaggctgttaccaactggctacctagatccaagtgaatcaggacactaacttctctccaagatcttttacacttgtgaaacggcacagctctctaaaccaaacactgacagcagtttaattttacagatataaaaaaaatccgagtcagagaaatcat

SEQ ID NO: 593412 - DNA, 537 bp, Homo sapiens
ggaggggcggtgtcgggaaggaggagcgcggcaggaaataagggaaggagctagaggcgggctgggggccggggtctggaaggaggatcgcggtagggaagaagaggagccagaggagggggatgggggctgcaaaggaggaacgcgatagggaaaagggggaggagccagaggcgagggggcggggagaagaaacatggcaggagaaaggggaggagccagaggcgaagagacaggaagagggacgcgtcagggagaaggggaggagtcagaggcgagcgggcgtggaggagggaagcggcagggagaaggggcgggcgcagaggcgaaggggcggggaggagggacgcggcagggagaaggggaggagccagaggcggaggctgttaccaactggctacctagatccaagtgaatcaggacastaacttctctccaagatcttttacacttgtgaaacggcacagctctctaaaccaaacactgacagcagtttaattttacagatataaaaaaaatccgagtcagagaaatcat

SEQ ID NO: 593413 - DNA, 650 bp, Homo sapiens
ctaaatgacccagtaaaaatattaatgacataatttataaaatataagaacatatttttaaagtttaaccttactagcaattggagaaaaaagatgcaaatcttaaaaaaaaaaaaaaaaaaaaaaaaagagttatcattattttcccatagatgctttaaaaaaccaactacggaatactcaaaatagtatatttccagcctatttacatcagtaacctatctatttctataacctaactatgaccaaaggaaaagaattaaaattcagattaaataaaactaaactgyggtgtttgttctcttgtataagcagcaggtatagtgagaggagaagaaaatttcccaatagaataatttaagatttaaatattctaaatgtaattaataatgttaataatttttctaatctcagtctcttcataatcatgcttacattttactactcaatattatttgtcagggttagtatttgggaaataatgtagaattaagctctcaaatatactatgcaattgttttttaacttgctcaaatgctcaagaaccaaaaataaaaataaaagtacattttaattttataattcaaaatgtctgtatttttccctactaaaaatatgccacactcttaaaataagatacaactattaaa

SEQ ID NO: 593414 - DNA, 366 bp, Homo sapiens
tcatattaagcagccaactccagaaaccccaaaatcaatgaaagaactctatccttaatattctgttcctctagaaccactcctggtaccaaaatctgtattagttagggttccctagacggacagaacagataggatagatatatctatatgaaggggagtttattaagtattaacttacatgatcccaaagttccacagtaggctgtctgcaagcctgaggagcaagcagggccagtccgagtctcaaaactgaagaacctggagtctgatgtttgasaacaggaagcattcagcatgggagaaagatgtaggctgggaggctaggccagtctcaccttttcatatttttttgcttgctttata

SEQ ID NO: 593415 - DNA, 328 bp, Homo sapiens
tagggatgctgtttggagtctttggcaggcccccataggtgaatcacagcagaggactctaggattttggagcaaagccctgccatcttctgcagataactactctccttttgagagacagctcttggcctgttactgggctttggtggaaactgatcgtttgaccgtgggtcattaagtcaccacgcgacctcaattgcctatcatgaactgggtgctttttgacccatctagccataaagtgggtcatgyaaagcagcattccatcataaaatggaagtggcatatgtgtgactgggctcaagcgtgtcctgaaggcacaaataag

SEQ ID NO: 593416 - DNA, 328 bp, Homo sapiens
tagggatgctgtttggagtctttggcaggcccccataggtgaatcacagcagaggactctaggattttggagcaaagccctgccatcttctgcagataactactctccttttgagagacagctcttggcctgttactgggctttggtggaaactgatcgtttgaccgtgggtcattaagtcaccacgcgacctcaattgcctatcatgaactgggtgctttttgacccatctagccataaagtgggtcatgcaaagcagcrttccatcataaaatggaagtggcatatgtgtgactgggctcaagcgtgtcctgaaggcacaaataag

SEQ ID NO: 593417 - DNA, 328 bp, Homo sapiens
tagggatgctgtttggagtctttggcaggcccccataggtgaatcacagcagaggactctaggattttggagcaaagccctgccatcttctgcagataactactctccttttgagagacagctcttggcctgttactgggctttggtggaaactgatcgtttgaccgtgggtcattaagtcaccacgcgacctcaattgcctatcatgaactgggtgctttttgacccatctagccataaagtgggtcatgcaaagcagcattccatcataaaatggaagtggcatatgtgtgactgggctcaagygtgtcctgaaggcacaaataag

SEQ ID NO: 593418 - DNA, 581 bp, Homo sapiens
ggctgccatgataaaatattatagacaggtggcttaaacatgtaattttcttttctcacagttcttaaggctacatgtcccagcatggttggttcctggtgagggtgagggcttgtttcctggctttcagatgggccactttttcactgtgtcatcacatggtgaggagggagggagggagagagagaaagagagagagagagagagatcctgtatatcttcctccttttataagagtaccagtcccatcagattagggtcccacctttcggacctcatttaactttaattagctgcttatgggcccagtctmcaaatacagtgagactgggggttagggcttcaacatatgaattttgggggacacaatttagtccatgacagaccccttccacttcaatgtcgtgaggttctaaagttatgatagtgcttcttaaatggaggtttccaaagaacaacagtacctagaacggcagtgaaacagattaggcattaccacagtaaagccttccagattgttatagaaaattatattattcaaaaatagttctgtttacttttacattttcataaccactact

SEQ ID NO: 593419 - DNA, 589 bp, Homo sapiens
cattatttatatatatatgtagatagatacagatatatacacaatacacaattctacaatgcatattttatacattaaaatgttttctgacactagtgtacttcttatatggatttgtatatttaatgtagcatttcttcttctgcaaagctatattgaaaaaagctgatggatcatgcattttacaattgatagcatcttaggaacaactaaatacattatttaaattagggaaaggctagttgaaagaaaatcaccgtagtttataatgggaacaaagtccttttaccagagttaagcacacaaatatgattgctatgcccttagatttctgaatagaatgagaggcagagtcaatgtttggcttcaatatagcatttacacaagatggcaagtattcctggggatgctgtagttccaacaacacaatcttctccagtctaacatcacagtaatctttgttggcattaaagctatttcatctctggcagagtaacattcagtgtatggattaggagtcttatcttgctaaaaccagcaacatcaggaatcgatagatgagtgayttctgcaaatggtacctgaggga

SEQ ID NO: 593420 - DNA, 358 bp, Homo sapiens
tcacccagactggagtgcagtggcgtgatcataactcactgtaaactcaaactcctgggctcaagcagtcctctcaccttggcatcccaggtagttggaaccacaggtatgtgctaccatgcccacgtaaattatttttattttcatttttatttatttatttatttctgagatggagtctcgctctgtcccccaggctggagtgcrgtggcgcgatctcggctcactgcaagctctgcctcccaggttcaggccattctcctgcctcagcctcctgagtagctgggaatacaggtgcccaccaccatgcctggctaagtttttgtatttccagtagagacgaggtttcgccatgtta

SEQ ID NO: 593421 - DNA, 305 bp, Homo sapiens
atagtcctagctgtttgggaagctgagggaggaggatctcttgagccctgaagtttgaggctgcggtgaactgtgaacatgccactacaccccagcytgagtgacagagaccctatctcaaaaaaaaaaaaaaagaaattcattgtgcttgagccttcatcttttccattcatcaacttttaccacatatcaagatcatttacgaagcatatgtagtagcttgttctgcacctaggaaataactttctatcagaaaaattgaagacattttcctaaaaaaaccagttattttgcttagggagtat

SEQ ID NO: 593422 - DNA, 563 bp, Homo sapiens
tacattcccactatcagttgataagcattctcttttaccacatctatgccaacatttattgttttttgactttttaataatgggccatcttggctggggtaaggtgatatctcattgtggttttaattttcatttccctgatgattagtgatgtgcattttttcatgtttgtcagccatttgtttatctttttttgagatatgtctatccatgtcctttgcccactttttggataggattttttatttttttcttgctaatttgtttgagtttcttgtagattatggatattagtcctttatcagatgtgtagttygcaaatattttcttattctgtggtttgtctgtttagtctaatgattatttcttttgctgtgcagaagctgtttagtttaattaggtttcatttatttatgtttgttttatctcctttaggtgtcttagtcataaattctttgcctaggccaatgtccagagagtttttcctgggttttcttctagaatttttattgttgtaggtcttagactaagtctttagtccatcttgagtttatttttgtgta

SEQ ID NO: 593423 - DNA, 563 bp, Homo sapiens
tacattcccactatcagttgataagcattctcttttaccacatctatgccaacatttattgttttttgactttttaataatgggccatcttggctggggtaaggtgatatctcattgtggttttaattttcatttccctgatgattagtgatgtgcattttttcatgtttgtcagccatttgtttatctttttttgagatatgtctatccatgtcctttgcccactttttggataggattttttatttttttcttgctaatttgtttgagtttcttgtagattatggatattagtcctttatcagatgtgtagttcgcaaatattttcttattctgtggtttgtctgtttagtctaatgattatttcttttgctgtgcagaagctgtttagtttaattaggtttcatttatttatgtttgttttatctcctttaggtgtcttagtcataaattctttgcctaggccaatgtccagagagtttttcctgggttttcttctagaattttwattgttgtaggtcttagactaagtctttagtccatcttgagtttatttttgtgta

SEQ ID NO: 593424 - DNA, 598 bp, Homo sapiens
gtagctgtgtacatgtctcatatatgtacatacacataaaatgagaaaaaaatgaatgcagcaaaatgtaaatgcttacttttgatggagctgttttttgtaccacactttcaaattttttacaggtctgattttcaaaataacaagtagaagaaaaaaaagaaccctttattgagcccaagggcttcttgctacccttcgtgaatatttagtttgtatttcaagttgttgttaaaagatttttcttcttcttcttctgtgtaaacaatgtgtttttgattatctttttggaagccttccctgacatccagttccgtcttcgagtccctagacaatgtgatttttttgaatacrtacgatagcaaatagaagagatttcctgaattcatgtgatagcaaatagaagagcttcagtgaaaggaatgttttatgttaatctctgtggaagtccagtttataggaaaaacatttgaaaataaaatggtaaataaagtggacatatagtattactttataaccggcactcagtaaatatgtgctaaatatgagtgtattttgtaagcttctaaataccattaaaatatcacctgatagtaac

SEQ ID NO: 593425 - DNA, 563 bp, Homo sapiens
atgaaattgatagaccattagtgagattaacgaagaagagagaagattcaaataagctcaattataaatggaatagtagatattactattgatatcacagaaatacaaaatattattcaaggctactataaacacctttatgcacataaactagaaaacctagaggagatggataaatttgtggaaatatataactatcctagattaaaccaggaagatrtagaatctctgaacagaccaataacaggcagtgagattgaaatgtcagtgaaacaactgccaacaaaaaatgtccaggaccagatggattcacagctgaattccatcagtccttcaaagaagaattgtaccaattatactgacactattccaaaagatagagaaagagggaatcctccctaaatcattctatgaggcaagtatcaccctaatatcaaaaacagggaaggacataacaaaaaaagaaaactacagaccaatatccctgatgaacatagatgcaaaaaatcctcaacaaaatactagtgaatcgaatccaacagcatatccaaaagatattccca

SEQ ID NO: 593426 - DNA, 515 bp, Homo sapiens
gtcactgactgcgaaccactgttgattagtctttaacagttgacaaaactatgtgcacattcagaaaataacctgacaagtacctggtaatatatagaactggactctgttatttaacctgttagtagagagaaaaaaaaatccctttcctccgctttcaactacctcactggcttattttcttaatgctagtatttctaagccatagttcaaggatttttatttatccctgatcattgttcctctttatatattgatattatgattaaccaaaaatgtctcttgcaaaacatataattattatttattcataaaataaatatgtattgagtacttactgtgagtcaggcaccattatacatgctatggatatgcccctgaacaaaacagaaaaacttcctgtccamagagaacttactttctactggaggtggtcagaaaataaatatttaagcattaaatccttaccatgtcaagtggttctagctcttattaggaaaaaataaagcagagga

SEQ ID NO: 593427 - DNA, 517 bp, Homo sapiens
tattaatagacggagcccaaattctgacactgattctctttgttattccttgtaattaattctactgatggtaaggacacattctctttccacagaactctaattcttttaatgccaaaagactgatgctttactcacttggtggaactaaaaataactaaagatccaaaaaatatctcaattgccttctgtaacctcaaaataactcttgactatatctcaattaaaaaacaaaacaatgagagagacagaaatggtttatgtcctcacgatcttccatagtaagagctcattgccatttttttacagtagtacttattggcatagataaaactgctagtgtaaaagaagtaattaaatgcaaacttttgaggygtcaatataggtttagctgtttaaagattatttgcctttactatgtatagttaaaaaaatttttataactgttaaattgcccaaggatattcccatttataattccacaggggaaaagatagtgttttcaaaaagtaaataa

SEQ ID NO: 593428 - DNA, 553 bp, Homo sapiens
acacgtgatatatgactttctgggtctggcttattttacttgagataatgatatccagtttcatccatgctgctgcaaaagacataatttctttctttcttttttttgagacaaagtcttggtctgtcacccaggctgaagggcagtgttgcaaccttggctcactgcagcctcaacctcctgggctcaagcaatcctccgacctcagcctctcgagtagctgggactacatgtgcataccaccacacccagctaattttgtttatttttttatagagatgaggtctcaatatgttgcccaggctggtcttgaactcctgggttcaagcaatcctcctacctcggcctcccagagtgctgggattacagcrtgagccactgtggctggtcaattttgatattttttatggctgaatagtatatcaatgtgtatatatatcacattatctttatacaatcaaccattgatagacacttaggtcagacacctgaattttttttggaagttcgttacttttaatttttaaatttttttatttttattttttgcaga

SEQ ID NO: 593429 - DNA, 619 bp, Homo sapiens
tggaatacatgtagatactttatccatcatctcacatccaatgtctcacacaattacccatttctttttgtttttggtaaaagcagctaaaatctactcatttagcattgattccatatacagtaccttttttttctttttcccctgacttcccatctacagtacaatttcattactgatggtcctcgtgttgtaccttagtttgctagatgtgttggcataattagatcgttgttgggcacttgttttcaggcagtggctggmagcgtgagagcccaggggttagggcatagggtttctgtaatcagcctgtcactaagccctgtcatctggcctgattggtgtggatgtggtaccccactaagacattcctcagtgccagttgaggagctcaaaaataaaataaaaatgaggtttatagagatgtagcactacaaatgagatgcctggattgccaaaagcctacaggctttgggtttgaaatgaactagatcaggtctagtagttaaatcaaaaattcaaaaggcttttattttatttatttattttgagataggatctctctctgtcacccaggttgggagtgtagtggcgcagtctcagctcactgcagcttcaa

SEQ ID NO: 593430 - DNA, 619 bp, Homo sapiens
tggaatacatgtagatactttatccatcatctcacatccaatgtctcacacaattacccatttctttttgtttttggtaaaagcagctaaaatctactcatttagcattgattccatatacagtaccttttttttctttttcccctgacttcccatctacagtacaatttcattactgatggtcctcgtgttgtaccttagtttgctagatgtgttggcataattagatcgttgttgggcacttgttttcaggcagtggctggcagcgtgagagcccaggggtyagggcatagggtttctgtaatcagcctgtcactaagccctgtcatctggcctgattggtgtggatgtggtaccccactaagacattcctcagtgccagttgaggagctcaaaaataaaataaaaatgaggtttatagagatgtagcactacaaatgagatgcctggattgccaaaagcctacaggctttgggtttgaaatgaactagatcaggtctagtagttaaatcaaaaattcaaaaggcttttattttatttatttattttgagataggatctctctctgtcacccaggttgggagtgtagtggcgcagtctcagctcactgcagcttcaa

SEQ ID NO: 593431 - DNA, 585 bp, Homo sapiens
  misc_feature 251: n = A,T,C or G
agtctccaatcttatccaggtcactgcaaatgctgttaattcagcccatcactcttaaaggtgctgcagtcagttgtattaaaggtgtatgtactgttaacatgtccgagagttctggtttagcagtggcaggagaaagcagagatggtaaggaaaacagaaagaaaacgcattaacaagaactgcacaggggttagggacatgtggcatagcagtaaatatccctaaagtctcaacggcctttcagcttntgatgatttcagttaatgccaatcttccagccatcacagcagcacagcaatcaataggacagtttccatgacactggtaggacagtaggacagtacacagtagaacagtttaggacagttcagagtacacagtaggacagttcacagtaagacagttcacggtacccagtaggacagtacacagtagaacagttcacagtgcacagtaggacagtacacagtagrgcagtttacagtacacagtaggacagttcacagtaagacagttcacagtacacagtaggacagtacacaataggacagttcacagtaagacagttcacggtacccagta

SEQ ID NO: 593432 - DNA, 585 bp, Homo sapiens
  misc_feature 251: n = A,T,C or G
agtctccaatcttatccaggtcactgcaaatgctgttaattcagcccatcactcttaaaggtgctgcagtcagttgtattaaaggtgtatgtactgttaacatgtccgagagttctggtttagcagtggcaggagaaagcagagatggtaaggaaaacagaaagaaaacgcattaacaagaactgcacaggggttagggacatgtggcatagcagtaaatatccctaaagtctcaacggcctttcagcttntgatgatttcagttaatgccaatcttccagccatcacagcagcacagcaatcaataggacagtttccatgacactggtaggacagtaggacagtacacagtagaacagtttaggacagttcagagtacacagtaggacagttcacagtaagacagttcacggtacccagtaggacagtacacagtagaacagttcacagtgcacagtaggacagtacacagtagggcagtttacagtacacagtaggacagttcacagtaagacagttcacaktacacagtaggacagtacacaataggacagttcacagtaagacagttcacggtacccagta

SEQ ID NO: 593433 - DNA, 585 bp, Homo sapiens
  misc_feature 251: n = A,T,C or G
agtctccaatcttatccaggtcactgcaaatgctgttaattcagcccatcactcttaaaggtgctgcagtcagttgtattaaaggtgtatgtactgttaacatgtccgagagttctggtttagcagtggcaggagaaagcagagatggtaaggaaaacagaaagaaaacgcattaacaagaactgcacaggggttagggacatgtggcatagcagtaaatatccctaaagtctcaacggcctttcagcttntgatgatttcagttaatgccaatcttccagccatcacagcagcacagcaatcaataggacagtttccatgacactggtaggacagtaggacagtacacagtagaacagtttaggacagttcagagtacacagtaggacagttcacagtaagacagttcacggtacccagtaggacagtacacagtagaacagttcacagtgcacagtaggacagtacacagtagggcagtttacagtacacagtaggacagttcacagtaagacagttcacagtacacagtaggacagtacacartaggacagttcacagtaagacagttcacggtacccagta

SEQ ID NO: 593434 - DNA, 585 bp, Homo sapiens
  misc_feature 251: n = A,T,C or G
agtctccaatcttatccaggtcactgcaaatgctgttaattcagcccatcactcttaaaggtgctgcagtcagttgtattaaaggtgtatgtactgttaacatgtccgagagttctggtttagcagtggcaggagaaagcagagatggtaaggaaaacagaaagaaaacgcattaacaagaactgcacaggggttagggacatgtggcatagcagtaaatatccctaaagtctcaacggcctttcagcttntgatgatttcagttaatgccaatcttccagccatcacagcagcacagcaatcaataggacagtttccatgacactggtaggacagtaggacagtacacagtagaacagtttaggacagttcagagtacacagtaggacagttcacagtaagacagttcacggtacccagtaggacagtacacagtagaacagttcacagtgcacagtaggacagtacacagtagggcagtttacagtacacagtaggacagttcacagtaagacagttcacagtacacagtaggacagtacacaataggacagttyacagtaagacagttcacggtacccagta

SEQ ID NO: 593435 - DNA, 550 bp, Homo sapiens
catgaaaataatttaataagaaaattttatttctttatgttccattttggctaaagtgaagagtcccccctttcttggaaggacttcaacctccacccttggagactaagttggcgcctctcagagtggctctttcttactccccggctctggagcaggaaggagaaatgtgtttgtcacctatcagcatttatttctgagaacagtgtttcattccaagtcaaagcatgtagggcgtggtaacaacagtttcaaactgcgttttcctttatyattgaagaaatgaatttccataccaagaatatgccattatttatgctaatttagacacttgccagaaaaaatattactttaaattttatttttattttgcgacaaataaataccaggaagccacgcagtaaactttgacacataaatggaaaagtttgaggcgtggcagagggtagaatgaaaagctggctgagctggtagttgcaccagcacagagaatggttttctttgttgtcatgtatccagtgcctctgaagatctcactgcttgtgaattc

SEQ ID NO: 593436 - DNA, 550 bp, Homo sapiens
catgaaaataatttaataagaaaattttatttctttatgttccattttggctaaagtgaagagtcccccctttcttggaaggacttcaacctccacccttggagactaagttggcgcctctcagagtggctctttcttactccccggctctggagcaggaaggagaaatgtgtttgtcacctatcagcatttatttctgagaacagtgtttcattccaagtcaaagcatgtagggcgtggtaacaacagtttcaaactgcgttttcctttatcattgaagaaatgaatttccataccaagaatatgccattatttatgctaatttagacacttgccagaaaaaatattactttaaattttatttttattttgcgacaaataaataccaggaagccacgcagtaaactttgacacataaatggaaaagtttgaggcgtggcagagggtagaatgaaaagctggctgagctggtagttgcaccagcacagagaatggttttytttgttgtcatgtatccagtgcctctgaagatctcactgcttgtgaattc

SEQ ID NO: 593437 - DNA, 550 bp, Homo sapiens
catatgcatagacacacacaaacatatatacacatactgctgtgagctgtgtcctttaggattttttaattacaatcagagaaaaaaaaatagctctggctactttaatcagaaatggatttcttttcttttcttttcttttctttctttttttttttttttgagaaggagtctcgctctgtcgcctaggctaaagtgcagtggtgcaatcttggttcactgcagcctctgcctcccaagtagctgggactacagatgcctgtcaccatgcctggctaacttttgtatttttagtagagatgagggtctcatcatgttggtcaggatggtctcgaactcctgacttcaaatgatccacccacmtgggcttcccaaattgctgggattacaggtgtgagacaccgcgcctggccagaaatggatttctatagaagtatatgggcagctgacagaatcaaaggggaacctttatatcagggctcaggaggaacaggagctggggctgttcctctggctctccatggggatgagttgatggttggcacagggc

SEQ ID NO: 593438 - DNA, 497 bp, Homo sapiens
tgctcagtgcaaaatatctctttaactgtgttcttttttatctctctgtgaagattctcttccagcattgtcaggaggacaaagttattttattcattcaaggtactttcacttaagtttgatatttctttatctaaaacttcatstaaaagtttgaaaagttcaataaactctgagaccagacattaacatcttaatattaaactttaatataatcctttttgatattactaatgatgcctgattgctctaagttttagaatacaataagcatcattttgactttattttagaatgagagaacacgttgaaatcacatattattatttcaaaaaaggctaccagaaaaagagacacagatacaagttagtaagatggaatctattatcactcgtctccctagtcaatcctctaaaaatttgtctgctcagaaagccaattaaagcctcctacagtctccttcattggccagaataataatggtttaaaaaagcagt

SEQ ID NO: 593439 - DNA, 581 bp, Homo sapiens
cacagtcattatctccaacctgcccctcccatgggcccacacagaggtggtggcaccgctaccactcaggaaacagttcacttcacagctacacagctattctcttggctagtaaataataactactttggtttttctcagcatttactatcatgttaatgagtgttccatacattatctcatattaccttcacaacaaccctcagatcagctgctgtcatgagctacttttttttttttttttaagagacaaagtctcactctgttgcccaggctggagtacagtggctcaatcacagctcaccgcagcctggaactcctgggatcaaacaattctcccgcgtcagcctcctgagtagctgggactacttgtgcatgccaccatgcccagataacgtttttaaaaagatttttgtagagacggggtcttgttatgttgcccaggctggtcttaaacccctgacctcaagtgatcctcccttggcctcccaaagtrctgggatgacaggcatgagccactatgcttggtccactccttttttaagttgaaaataatttttatttatttatttttcagagag

SEQ ID NO: 593440 - DNA, 586 bp, Homo sapiens
tgctgttaataaaaacatacccaagactgggtaatttataaagaaaaagaggttttaatggactcatagttctacatggctgaggaggcctcgcaatcatgttggaaggcgagggaggagcaaagggatgccttatggggtggcagggaagagagcatgtgcaggggaactgtcctttmtaaaaccagcagatctcatgagacttattcattatcatgagaacagcatgggaaaaacctcccttcatgaatcaattacctcccaccggtccctcccacaacacatgaggattatgggagctacaattcaagatgagatttgggtggggacagagccaaaccatatcatggagttctacaaatggattctttttaatttctattttgattcagaggagtacatatataggtttttaacaagggtgtattgcatgatgctgaggtttggggtatgcttgaaatcgtcacccaggtagtaagcataatacccaataggtagtttttcaactcttgccttcctttctccctccctccttttggcattcccagtgtctgtaatttccatctttatgtccatgagtacccaa

SEQ ID NO: 593441 - DNA, 396 bp, Homo sapiens
acaccctgtggattagtctgttctcacactgttatgaagaacctgtatgcaaccatccatgacgaccctccgtgctcttccgagctcccccagtgcatgtgacaatatcccagaggtgtcatccaaactcgtgccttactcttgactgctgtgagataagtatgagtgatracagcttcctggaagaaagcccctcgatctttacggaggacatagccactgctttccattggtgtcttgggaagaacttgctgttgtgttattgttttgctttgttttaagatatctgctttttaaaagaatttcccagaggggtgaagaagttgagcaccagagaccagatggggaaggtgactatttctctcaaatacagggaaggcttttggttttgtttgg

SEQ ID NO: 593442 - DNA, 414 bp, Homo sapiens
actcactacaagacctattactttttattttagtcctcatagtgcaggattttatgataaaactgtttagacttgtcaccaacaaagttagtatttcaaaacaaaacaaaagccctaatcccccaaacttttgtgatcacattaagttggatcaacccaaattttccttctggagagagccaagaagtcatagggagcaggttgggtatctctaatccaaaaaatctgaaatccaaaatgctccaaaatctgaaactttttgagcacagatatgactcaaagaaatgctctttggaacattttggatttcagatttccaaattatggatgctcagcctgttaaatacagtgcaaatatccccaaatttgaaaagatccaaaatctgaaatrcttctgaggagttgcagatcagc

SEQ ID NO: 593443 - DNA, 505 bp, Homo sapiens
ctcctggctgattgctccagctaggacttccagtactatgttgaataggagtggagagagtgggtatccttgtcttgtttcagttctcaatgggaacaatttgagcttttgcccattcagcatgatgttggctgtggtttgtcatagatggctcttattattttgaggtatgttcattcgatgtcttgtctttcgagggtgtttatcatgaagggatgttggattttattgaaaaccttttctctgtctattgagatgattgtatggtttttgtttttgattctgttctgttggtgaatcacacttagtgatttatataagttgagccagccttgtatcccagcaatagagcctgtgtgatcatggtgtattcacattttgatgtgctgctgaattcagtttgctagtattttgttgaggacttttgcrtctgtgttcatgagggatataggtttgaagttttccttcttgttgcatctctgccagattttggtatcaggctgat

SEQ ID NO: 593444 - DNA, 640 bp, Homo sapiens
caggatggtctcgatctcctgacctcgtgatccagccgcctcggcctagcacgaagattcttacaggtggtgaatcgggatgaagtccaggcagaaagtgaatgcagtagccatggcataaatggtgtggggcaaaggtaattttaaggatcgtggagttggctacttttgttaaggctcctaaagttagactcctacctcaaggcaagttgtgaaagtcagaaaacatccatgaagtattaaaagaaacctttatcttttaggataatgggggaaaagtaggtttcaaatcatgcccaggaattacggtcaaggaagcagagctgcaaaggagactgaatgcaaaagcttaatagctaatgggaaagtactgggctgctgagatgaaattgttggtgacctccaacaaacytgagatccttgaactcccagaagtccctgaacccttcaggtcagtggaagcaacttccttcccactgatgagatgatgttgttggtgacctccaacaaacctgagattcttgaactcccagacagccctgaacccttcaggtcagtggaagcaacttccttcccactgatagaagaggaagtgccactagtctagacaccctgaaaacatattacctgagtcagatgc

SEQ ID NO: 593445 - DNA, 609 bp, Homo sapiens
tctgcttactttatttatttatttatttatttatttatttatttatttttctctgaaatatatggacatataaatgacattctgcttaattatgattcatcattcatgaaatattatcttcaaagcatagatattagaacatatctgtcttaaatataaaacatgattaaattattctttgattatatacatatctttcactccctactcaaactmtcatcaggattccacagtgttaatacccctcttgaaacaattcctctttttgttactgtaactctccatcctccatttcccaactgcctttctggccaattttccctaatctcgtcccaagctcttctagtcaacctccaaactttgaagtgcatgagctctatcccaggctctccttaactctttatctacaatctctccatggattacttcatctcatttcatttatttaaaacccaattacatgttgatgtctcgcaaaccatatcttcagccttgatttctccactgagtcacacactcatatataaaactatataattggcatatcctcatcaaagaaaaacagttcttttacactttaacatatcgggaactgaaatccttgttttc

SEQ ID NO: 593446 - DNA, 412 bp, Homo sapiens
tccatcctttataatcttcaacttatcttcaaaactaggaaaaacactctcttttggaataaacatcattattcatttgcacctaagtttctaaattcaaatccattgttgagtaggaggtcatctgaactagttttccaatctctgatctggaactacaactaggaccccgggggaaggtaactagttagcagaaggccaccctcatctgctgctggggacagctttatagaaggccaagaattttttagacgctaaagtatatagaaagtcctttgggttagaaacactcccaggtcttccaatccataccctactttttcgtgtgtgttgttctgtttgakactttcagagctctcaaaatctcgcagacaccaatcaacaccatcagtcaaccactgtgcagactgct

SEQ ID NO: 593447 - DNA, 210 bp, Homo sapiens
ttgtgccattgtactccagcctaagcaacaagagcagaactccatctcaaaaaaaaaaaaaaaawatatatatatatatatatatacacacatataatttgacaagtttctaccatttgtgcacacaactgaaatattaagcaataaaaaaatccttataagcatcctcctcagataactctggctataaagggaaacaattcagatata

SEQ ID NO: 593448 - DNA, 546 bp, Homo sapiens
tctttgctctgtgcttctccttgttgctgccatgtgaagaaggacatgtttgcttccccttctgccatgattgtaagtttcctgaggcctccccagccatgtggaacttgagtctattaaacctctttcctttataaattacccagtcttgggttatctctttattagcagcatgagaacaaactaatacatgtgtctcctttaatttctcccagcagtgttttgtatagtcttatgctgtttgttaaatttgttcctaagtattttattcttttctgatgcttccgtaaataaaattcaaatatatatgtgtgtgtgtatatatatatatatatatatatatatatatatatatatwttttttttttttttttttttttgagacagtctcacactcttgcccaagctggtatataggggtgtgattttgtctcagtgcagcctcaacctcctggctcaagcaatcctctcgagtagctgggactacaggtgcatgccaccatgccccactaatttctgtatttttttatagagacagggttttgc

SEQ ID NO: 593449 - DNA, 450 bp, Homo sapiens
cccaggtggtcattctgccacagggcagaaattgtctgacctgaaaattcaagagagatcagtgcaaataataatgaacccaaggtgtgtcccccgtccctaagagaaagggcccctagaattttggctgcaagagcctaggcattctctgggactaatctccctcaaaaatccataaccaggagatttaaaatatcttttttagtatcttcttaataaaataaaaagttcattgctttgccattcacattaagcttttgctttagcaaatccattgaaaggacttttttcttcaagrcatttacacgaaattgtgttgatgtgataacagagccctaaatattttaaatcaatcacagttgatgtggcagcttaatctacttagtgttgttccctggaaggtttatatgctgatgcttagatttctgaggctgggagcacaggagccct

SEQ ID NO: 593450 - DNA, 411 bp, Homo sapiens
atcctcccacctcagcatcccgagtagctgggaccacaggcacrcaccagcatgctcagtgaatttttcaaatttttttgtggagataggggtctctctatgttgctcaggctggacttgaactcctgggctcaagtgatcttctcacctcagtctcccaaagtgctgggattataggcatgagccattgcgcccggcctaggttccctactttagattagctcacagtttctcagccttcagcatgtctaacaattagaattcaacatgaatacataaaaccacacactttgcataattattgatttaagtgactttccagggtattttgacagtcagttatttttaactcctgtgtgactttatcaaccacatgcctccacccaggatggggtgtccctgaggactcag

SEQ ID NO: 593451 - DNA, 543 bp, Homo sapiens
tactcccttctgaccctacctaccttgttaaatttcccagctgctgaatagtggtagaggttctgcttactgctagatcatattaacactattctgggaacatttggaacatgtcaattgctaccttgaagtagtgtgggaatggggaagatcaacttcctttatagacctgctgaagccttttaatggggaaaggagaaaaacacatttttattattagtgttaggctggaaaaggtttgtattcgacaaaagattttctgctgtctgttgttttgccatttgtttttcagactttggcttaaataaacagcctttacttcgagctttgttttgcttttattttttaattatactttaagttctagggtacatgcsacaaagtgcaggttacatatgtatacatctgccatgttggcgtgctgcacccatcaacttgtcatttacattaggtatttctcctaatgctccccttcccccaggcctccacctcctgacaggccctggtgtgtgatgttccccaccctctgtccatgtgttctca

SEQ ID NO: 593452 - DNA, 548 bp, Homo sapiens
tcactatagaaaaagatatatattaataaatctatatgaatataaatttatctgtgtcttttatttgtgcattccttaagttccacctatataaagaaaatgtagatcgtgactactcacatataacatcaggtctatgaattagaataataaacagtgaaaaccatcaaagccaatttccttaacaatgtttagatcttacctatttctgtaattgttttatcagtcatgccctaactgtaataaactcagtggccatttgtacatagatatatacacagatactgctatatattactataagtacattttaaaaaattataattgacaattccatagaaaaatattttaggctaaatttgctacaaaattagttacttcttgaattgacctccatatagccagtttgaattgaaagcggaattcatgcaaattataaaatttattttaatataaaacaacgttaaaagggggtacttatccatatatttaaggaaatagaataaaakggacacatattactttaaaaatgagatcatttcttcagt

SEQ ID NO: 593453 - DNA, 572 bp, Homo sapiens
taacaaaataagattctcagtatatttttaaatgcaattaatttactgagttgttaaatttgtgcaaattaatatttcttgaaaacagcatttattaaacataaaaaattatgttttactttagaataagcacaagataagtttatctttttaaagtatatagtatgaaattgtattatttactgaaggttttttctgtctataaaatacactatttagataaataaccatgctagtataccaactgttaccattacaagctgtttcaaagagaaattactttttctaagttgatcattagaaacatatgctagcaaagcaaaataagtgccaaataagattttacattttaagcaaaaagaggaatacactttaaaaataaccctcaaagttattttaaatagcccactttacactcatatgattttgcctttgggaagacacaagatggaaagtatcttcctaaacacatacacacacacacacacacacacacacacacacacacacacgatggaaagtatcttcctaaacacatacacacacayacacacacacacacacacacacac

SEQ ID NO: 593454 - DNA, 602 bp, Homo sapiens
ggagggttttgttcttggtaatgttttctttgtttaactattgtaaagtggtaaaattgtttctgattttccattaaactgctgttggaaaaccaggagagcatgcatagcatcaatatacatttctctttaattctcattttgacctttcattttaactcctttttcctgtaagctactgttaaatatgcaaaccaattaacctatctttcatctctttcatttatcctcccaacttccaaaataatacatggtaaaattgtacctatttgcccatcctcctcacaaaagacataaaaatcacaaaaattatacaatcaccactcagcaactgaaataccaagatgtcaggatgatccatccacagacacaataatagccggtgtttgatataagtttgtcctgcccagtaaactccatgtcaacaggattattccctgttgttagtytgtgcatcttcaggcagggcccacccagcatggggacttcacagagcagacactccataaatacttgtgggatgagtgaatcagtgcacacagtaggctcaacaaacctttgattgattccatccacttctctccagtttataatagtattgt

SEQ ID NO: 593455 - DNA, 602 bp, Homo sapiens
ggagggttttgttcttggtaatgttttctttgtttaactattgtaaagtggtaaaattgtttctgattttccattaaactgctgttggaaaaccaggagagcatgcatagcatcaatatacatttctctttaattctcattttgacctttcattttaactcctttttcctgtaagctactgttaaatatgcaaaccaattaacctatctttcatctctttcatttatcctcccaacttccaaaataatacatggtaaaattgtacctatttgcccatcctcctcacaaaagacataaaaatcacaaaaattatacaatcaccactcagcaactgaaataccaagatgtcaggatgatccatccacagacacaataatagccggtgtttgatataagtttgtcctgcccagtaaactccatgtcaacaggattattccctgttgttagtttgtgcatcttcaggcagggcccacccagcatggggacttcacagagcagacactccataaatacttgtgggatgagtgaatcagtgcacacagtaggctcaacaaacmtttgattgattccatccacttctctccagtttataatagtattgt

SEQ ID NO: 593456 - DNA, 517 bp, Homo sapiens
catcaatgatgggacaaaaacaccacataacttggaaaaatcttaacaagaaatatatagggccaatatgagaaaaattgctaaatttattaggtaatatgaaaaaaggccctgaataawtaaaaagatttaccagtgtttagtactgaaagaaataaaaattataaaaattcttcccaaattaatttataacttcttgaaattaattccaatttaaactccaatttggttcttcttacaccaggcaaaatgattctgaaattccctggaatggtattttttgggaaaaacagcagaaacaacatagcggtgaaagaatacaattttaagatacagtatttaaaacagtaagatattggctcaagaaggtatagagagattaacagaggggaattgacaaactagaaaaagatgctagtgaatagaagaatatcatattttatacaagtattggaaaagcatgcttattagagaaaatgtacttattagagaaatgtaaataactggctgttttgaa

SEQ ID NO: 593457 - DNA, 517 bp, Homo sapiens
catcaatgatgggacaaaaacaccacataacttggaaaaatcttaacaagaaatatatagggccaatatgagaaaaattgctaaatttattaggtaatatgaaaaaaggccctgaataaataaaaagatttaccagtgtttagtactgaaagaaataaaaattataaaaattcttcccaaattaatttatawcttcttgaaattaattccaatttaaactccaatttggttcttcttacaccaggcaaaatgattctgaaattccctggaatggtattttttgggaaaaacagcagaaacaacatagcggtgaaagaatacaattttaagatacagtatttaaaacagtaagatattggctcaagaaggtatagagagattaacagaggggaattgacaaactagaaaaagatgctagtgaatagaagaatatcatattttatacaagtattggaaaagcatgcttattagagaaaatgtacttattagagaaatgtaaataactggctgttttgaa

SEQ ID NO: 593458 - DNA, 484 bp, Homo sapiens
cagaaagaggacaatctggagcccagaggagggtgtctgatgtttgctctttgcagcccttcagacccaattgcaggctgattccctccctgtcctgatacccttccttcttttctttcctacgttctccctttctccacatgcccactttyatttctctagtggggtaaaggctgggggagtcattgtttttggctgagatatgctaaataatggcccccaaagatatccagatcttaattcctggaaactataaatgtaactgtatagggaaaaattgattttgcagctatgattatggatattgagatggggaggtttatcctggattctctaggtggaccctaaatgtaatgacaagtattcttagaagagggaggcagagagaaattggaccagaagtagacaatgtgaaggctgaaacaggatgctactctgtgactttgaagatggataaaggggccttgagctaagggaagcaagg

SEQ ID NO: 593459 - DNA, 484 bp, Homo sapiens
cagaaagaggacaatctggagcccagaggagggtgtctgatgtttgctctttgcagcccttcagacccaattgcaggctgattccctccctgtcctgatacccttccttcttttctttcctacgttctccctttctccacatgcccactttcatttctctagtggggtaaaggctgggggagtcattgtttttggctgagatatgcyaaataatggcccccaaagatatccagatcttaattcctggaaactataaatgtaactgtatagggaaaaattgattttgcagctatgattatggatattgagatggggaggtttatcctggattctctaggtggaccctaaatgtaatgacaagtattcttagaagagggaggcagagagaaattggaccagaagtagacaatgtgaaggctgaaacaggatgctactctgtgactttgaagatggataaaggggccttgagctaagggaagcaagg

SEQ ID NO: 593460 - DNA, 484 bp, Homo sapiens
cagaaagaggacaatctggagcccagaggagggtgtctgatgtttgctctttgcagcccttcagacccaattgcaggctgattccctccctgtcctgatacccttccttcttttctttcctacgttctccctttctccacatgcccactttcatttctctagtggggtaaaggctgggggagtcattgtttttggctgagatatgctaaataatggcccccaaagatatccagatcttaattcctggaaactataaatgtaactgtatagggaaaaattgattttgcagctatgattrtggatattgagatggggaggtttatcctggattctctaggtggaccctaaatgtaatgacaagtattcttagaagagggaggcagagagaaattggaccagaagtagacaatgtgaaggctgaaacaggatgctactctgtgactttgaagatggataaaggggccttgagctaagggaagcaagg

SEQ ID NO: 593461 - DNA, 421 bp, Homo sapiens
tcaccttaatttgagaatcatatattgtacacctacgacgtgtcagccaaggtgctaatttctatgaggaatcaaagatgaaraagtcacagctccattcttatgaattttttcattctatggcaatggcaaccatataaagcaaaagtttcatggaagacaaaatgtcctgagggcacagagagtctgtgtgggcacagaggaaagagttcctatttaggtaagaaaaagaacaacacgagaaagacaaaactttaacattctgtatcaaaatgttgatttaacttctgtatcttctttctaacaaaccctgagacctagaaatttgctgaacttggtgctttgtgactgagtctaatttgcttcactgctcttgaaccgcaaggtttagagcatcctgagcttgtaattttggtatttc

SEQ ID NO: 593462 - DNA, 421 bp, Homo sapiens
tcaccttaatttgagaatcatatattgtacacctacgacgtgtcagccaaggtgctaatttctatgaggaatcaaagatgaaaaagtcacagctccattcttatgaattttttcattctatggcaatggcaaccatataaagcaaaagtttcatggaagacaraatgtcctgagggcacagagagtctgtgtgggcacagaggaaagagttcctatttaggtaagaaaaagaacaacacgagaaagacaaaactttaacattctgtatcaaaatgttgatttaacttctgtatcttctttctaacaaaccctgagacctagaaatttgctgaacttggtgctttgtgactgagtctaatttgcttcactgctcttgaaccgcaaggtttagagcatcctgagcttgtaattttggtatttc

SEQ ID NO: 593463 - DNA, 421 bp, Homo sapiens
tcaccttaatttgagaatcatatattgtacacctacgacgtgtcagccaaggtgctaatttctatgaggaatcaaagatgaaaaagtcacagctccattcttatgaattttttcattctatggcaatggcaaccatataaagcaaaagtttcatggaagacaaaatgtcctgagggcacagagagtctgtgtgggcacagaggaaagagttcctatttaggtaagaaaaagaacaacacgagaaagacaaaactttaacattctgtatcaaaatgttgatttaacttctgtatcttctttctaacaaaccctgagacctagaaatttgctgaacttggtgctttgtgactgagtctaatttgcttcacygctcttgaaccgcaaggtttagagcatcctgagcttgtaattttggtatttc

SEQ ID NO: 593464 - DNA, 620 bp, Homo sapiens
ggattgcttgattgaatggtagttctgttttttaagttctctgagaaatctccaaactactttctayagaggctgaactaatttacattcccatcaactgtatataagcattctcttctctgcagtcttgttaatatctgttgtttttttgactttaataatagcccttctgactggtgtgagatggtttctcattgtggttttgaatttgcatttctctgatgattagtgattttttcatgtatttgttggctgcctgtattagactcagtcatttttattctatgcttccaaacagctgcattgttatagcatcatcaaatgtctcccatgtcagaatagcctaaccaaacccaaaagtcaaaatagttctctgtctttgtggctacagtggctgcgtgaatgctgtgggccacatttctgtgagaagtagctccttggatttgctctctgcattgaagagaatgccttgaactgtcctccagagagagctgtgtccatgacgttggcctttctctttccctcactgggctgtcacctgcaggtagagatggtccttgctgtatagtcacccacaatagggatgtcactgcagccaccttgacagctaagggtgtgat

SEQ ID NO: 593465 - DNA, 620 bp, Homo sapiens
ggattgcttgattgaatggtagttctgttttttaagttctctgagaaatctccaaactactttctatagaggctgaactaatttacattcccatcaactgtatataagcattctcttctctgcagtcttgttaatatctgttgtttttttgactttaataatagccyttctgactggtgtgagatggtttctcattgtggttttgaatttgcatttctctgatgattagtgattttttcatgtatttgttggctgcctgtattagactcagtcatttttattctatgcttccaaacagctgcattgttatagcatcatcaaatgtctcccatgtcagaatagcctaaccaaacccaaaagtcaaaatagttctctgtctttgtggctacagtggctgcgtgaatgctgtgggccacatttctgtgagaagtagctccttggatttgctctctgcattgaagagaatgccttgaactgtcctccagagagagctgtgtccatgacgttggcctttctctttccctcactgggctgtcacctgcaggtagagatggtccttgctgtatagtcacccacaatagggatgtcactgcagccaccttgacagctaagggtgtgat

SEQ ID NO: 593466 - DNA, 620 bp, Homo sapiens
ggattgcttgattgaatggtagttctgttttttaagttctctgagaaatctccaaactactttctatagaggctgaactaatttacattcccatcaactgtatataagcattctcttctctgcagtcttgttaatatctgttgtttttttgactttaataatagcccttctgactggtgtgagatggtttctcattgtggttttgaatttgcatttctctgatgattagtgattttttcatgtatttgttggctgcctgtattagactcagtcatttttattctatgcttccaaacagctgcattgttatagcatcatcaaatgtctcccatgtcagaatagcctaaccaaacccaaaagtcaaaatagttctctgtctttgtggctacagtggctgcgygaatgctgtgggccacatttctgtgagaagtagctccttggatttgctctctgcattgaagagaatgccttgaactgtcctccagagagagctgtgtccatgacgttggcctttctctttccctcactgggctgtcacctgcaggtagagatggtccttgctgtatagtcacccacaatagggatgtcactgcagccaccttgacagctaagggtgtgat

SEQ ID NO: 593467 - DNA, 545 bp, Homo sapiens
ttgaaaagatttccctgcttgagaagggaacagaagagacaacaatcagtcctttatatatccttactccctttgctgtatcacaagtttcttagtgaaaagaactgttatgtgagataccataatgctgaataaggttttctttgagtcyacaaatagtgttgttggaagaagcgtggtgagcagaaaaggcaaattcataaccatatccagaatgagtgtctatttcagtaaaaagtcactgcacagtcctcggtgaaaatgatccaacataaccagttacacttcgattgaaagaacaggcaagacagaacttacagggttttctgtttcccgaatttcttctgcatgaggcatctctacatgttcaagtaaatccctagattgatacagttacatttaattggaatctcttttattaccttctggcttggccagagaaccccttgaagcatggattggagttccttggcatgggagacagtggagaaaggctctccaaccttgagaaagtttgaaaccttggatctgagagagccttactg

SEQ ID NO: 593468 - DNA, 520 bp, Homo sapiens
cctcccaccaggctccatctccaacactggggattacaatgcaacatgagatttgggaagggacaaatatccaagctctatcagtcatcacaaaagccaaagttctaatcaaagccttcaaagtcgtatgtaatctgtttttcagctctcagaccctgcctcctttctgtataccattgttcttatctcctttcctatctccccacagcccaccccaagattaatccactctaattataccagctttcttgctattcctggaacataccacgcatactcagggcttttatatttwctctttccttaaacatcccttctccagatatttgcatggctcacttccccatttccttgaggtttctacacaaacgtcgccttatcaaataagccctccctgaccaccaccctatgcaatcactccttccacttccccatccaggactttcactctatttctttatcctgctttgtttctcctcatggcactatcaccacccaacacatcatatatttacctact

SEQ ID NO: 593469 - DNA, 432 bp, Homo sapiens
acttcccagctccaggactgggggatttatttggagcatgttttgtaaagagctgtggttccatataacatargaaagaggtaggaccagagaaataagtgtttttactaatagtgtaaaccccttagtatctataggcaggtgagggctatgaaaactcatattaaataaccataactttttatgattcaataattttatttcctagggtgttttgtatactgtatttttcattatttaatgaacaatttatttcatttaatattcttcaaaacatccttttgttttgtactagcttctagatatcccatcttgatttggaaggtctcccccattcctagattgtacacatagtctgttcgatttttcctattttatttttatgatcaaacttctttactcattttgaatatatatatatatgtataaatt

SEQ ID NO: 593470 - DNA, 554 bp, Homo sapiens
ccaatcgtttccattatcaccaaaattatctatagtgaggcctctccatcttctaccagtccctcttttttttcactcactcaaaatatatgtatcgatggtcaaatgtgtcccagacattgtgcaaatctctgacaaaggtaacacaagaaaatgtgtactctgagaacttcttattctgccccagtttaggagattcatgcaactgccaagcaacaataataagagctagcagttattggagtacctcattcctcacaactcgtcataaggcaggtgttatcattagatattccccatgtgtatgcaggatgaggaaataggttcagagaggtcaagtggctcacccaaggggcacagctaagtgaaaggcactgcaggcatctcaaactacccccttcccacaagactccactgcagagcagkacagtcaccctgacaccagcccaatgggttcatcttgcccattacccagatggggctaatttatcaagacaagggaattgcaatagagaaagagtttaatacacatagagccagctaaacaggagacc

SEQ ID NO: 593471 - DNA, 594 bp, Homo sapiens
gtgagcatcctcaactcctactcttcaaggactcctatctggcttctaacgctccctccaccaaatctgctgttgccaagatcactagggacccccaggtcaaatccagtggagagttttcagaagagtctgcaatcagagttaggttagaatcccggctctgttacttacaagttatgccacgtcaagcaaatattttttcaaatttaaaaccagtaacaatgttttctcaagttgacatatcatttaaagcaaaagcaaaaaactcataaaaattaatttttaaaaatgactaaacatttgagtattacagcttgtggagaatgggctggctgtgtatatatacctgaaggcaagggttggggtgagggaaggcatgtttttgttttaagtgagagagaaytgaactggttttaatgctgaggagaagaaatcagttaaaagtaaagagaggtgtgggcccggcgtggtggcccccacctgtaatgccagcactttgggaggctgaggcagcagggtcacttgagggtaggtgcttgagaccagcctgggcaatataactaaaccccatctctacaagaagttttttaaaaa

SEQ ID NO: 593472 - DNA, 490 bp, Homo sapiens
ttattgcataggaatattcatcagattcataagcttagacacgattaagtccattctcttcagagcctttcagactccattttcmtattaactcatccctattgtggcatttataccttagaaattactttttattttgatagacttaaaagagctgtttttattattcttcccatggtgccatttatttcatcaacaagaatcataaccttcgttttgtgttttctcttctgttactttggttgatgtgtgagacctagtcattgagttcctgagggtcgtgtggggtgggtggctttgcttttgtggccactgatatgcccttctgcgggcttccattcacacatggatttatctaagtcccttatgccacaatagcctggaaaaatcttaattttatggtaaattatttacaaagaagaggcacctaacaatttcaagtctgtataatggtgacaaagaaaaagaaataggaaatttcattttttca

SEQ ID NO: 593473 - DNA, 557 bp, Homo sapiens
agagtaaggagggcggatcacgaggtcaggagatcaagaccatcctggctaacacggtgaaactcagtctctactaaaaatacaaaaaaaattagccaggcgtggcggcaggcgcctgtagtcccgaaaaaaaaaaaagaaagaaagaataaggattccaagaaagaaaaaaaattagccaggcatggcggcaggcgcctgtagtcccaaaaaaaaaaaaaaagaaagaaagaaagaataaggattccaagaaagaaaaaaaaatgtctgtgtccaagagcttcttctctttctcttaggctgtattatgccaatataatcaatcccaaaattcataatcacataggcaacactgacatcagtgactcgccattaacaagaaaatcattaaaagatgttatttaatcaaatgcacttagcatgcaaagtgttattctgcatctcccsgtctttactgcctgtatcagaattcctatccaactcatccaaattgaatattttctaagttgaattttcatgaatcctattctttcctcttcttgtctagatgtgaaaat

SEQ ID NO: 593474 - DNA, 613 bp, Homo sapiens
  misc_feature 485, 489, 501: n = A,T,C or G
agcaggagagagtgctatcaagggactccaaggtttcaagaataaagcaacaataagaacagaaatgaatcttggaaaacagtttgacatccccactataacacaagaagaaacactataacaaggaagcagaaagccgtaaaaagccgtaagarggtagtaccctagatgaaattgaaagagagctgagtaaaataagaaagagttaaaagaaaactaaaaatacaacacaggatcaatatctccactgggagaaataaatggaattagacactgcaaaaacctggagctgtaatgtacagggcaatctcaagaaacttcaccaaaaatatagaagaaaggaaacattaaagttatgcaaatactgagaataagatgtatataaaaaataaaactccaacataataattataggaaattatatgattcactatttctaaatagggcaaaacaaataggaagcaatatcacaaatataatggaanactntcttgattgganaaaaaatgaacatacaaataaatgtgtgaaccaaatctaaacaaaatgaaagaaagggtattctatacccaaatattcctggaagttcttgaattaaaatataaattaaaat

SEQ ID NO: 593475 - DNA, 605 bp, Homo sapiens
ttgcatttatattatagagtagcaaatgcttttattccacttccaaggcagaataagcctcaaacrcagaaccataatattgagcagatgattaaaaccattagctaaaatcttttatgacaaaaagatgaaatgtactagataatgacacaggaaacataaaaatgctgtttttataagtggggacattttaccttctttaaatatgattcaaggtttttctttcttttgttattaaataatttcattattatctatatttgcactttgacagcttattttttcctctttgctatatttaacttcgttaggggggtatacattcaccagtcttttgaatagtatacagcatacaattaatatacttcctgttaagacagaaaaaatgcactacagctggctttcttgagagaacgttcacacatatatacagtcttttgaaggatacatttcataaagactcttgcattttgtgttacatttattaaggctccttgcataaattttcataatttcacattttattagtaattgccatttctatttttctagtctcatctgaaacatacttaccatttccattagaaaaaaagtctaatttccta

SEQ ID NO: 593476 - DNA, 545 bp, Homo sapiens
cattgagatgtccacactacccaaagcaatctacaaatcaattcaatccctatcaaaataccaatgacattcttcacagaaaaaaaaaaaacagtcctaagatttacatggaaccataaagacacagaatagccaaggctatcctaagccaaaagaacaaaactggaggaattatgttacctgactttgaaatatactacagagctttagtaaacaaaacagcatgatactggcataagaacagatgcatagaccaatggaacagaatagagaacccagaaacaaatccatacccctacagttaacttattttttataaaggtgccaataacatacaccggggaaaagacagtctcttcaataaatgctgtggggaaaactggatatccatatgcagaagattaaaactaggcccttatcacttgccatatacaaaaaacaaatcaaaatggaktaatgacttaactctaagacctcaagccatgaaactactacaagaacacattgggaaaaatcttcaggacattggcctgggtaaagatgtc

SEQ ID NO: 593477 - DNA, 588 bp, Homo sapiens
aaatgtttcttttttcagaactgctgataaaggaggagaaaagagtagttaaaacatttaaaaagtgaaattaatatgcatttgtaaaaaatcaaacgatacaaacatgagctgttcctccactctgaccccagtctcactcttcagaaggaacctatgttaatgatcataaatatccttctagactttttctaagcataaasaaacacatgcacatacatgcttgttggtttctatttatcacaaaaatgaaattatactgtacacttacaacttgttttccatttacttaaagctacatgctggataacattccatgtcagtacacatagtttaacctcattccttttaattgctacttagtattatatgatttgtgcagtaatttattcagtcatctccctttttgtaaatcacaattcagattatttccaattttgctattagaaacaaggctcaaatgaacattcttatctgagagctggtgtaaatatttctatagggtagatttctagagttgaattactgggtacatgacatacaaatttaaaattttgagacatatcactcaaatctcttcctaaaaca

SEQ ID NO: 593478 - DNA, 277 bp, Homo sapiens
gccaattcctgaagtttcatgygaataaaatcaagtaatatttgtccttttgtgcactaaacataatgctttcaaatttcacccactttataccatgtataagtacttcattctttgttatagctgaaaattgggtgtccatttatgagtcaacaagcatatggattgtttacactttttgactgtatgaatattactgctgtaaatattcatgcacatgtttattttttgagcacctatgttttgtaagattaacagctgacttaacagaaacaat

SEQ ID NO: 593479 - DNA, 277 bp, Homo sapiens
gccaattcctgaagtttcatgtgaataaaatcaagtaatatttgtccttttgtgcaytaaacataatgctttcaaatttcacccactttataccatgtataagtacttcattctttgttatagctgaaaattgggtgtccatttatgagtcaacaagcatatggattgtttacactttttgactgtatgaatattactgctgtaaatattcatgcacatgtttattttttgagcacctatgttttgtaagattaacagctgacttaacagaaacaat

SEQ ID NO: 593480 - DNA, 277 bp, Homo sapiens
gccaattcctgaagtttcatgtgaataaaatcaagtaatatttgtccttttgtgcactwaacataatgctttcaaatttcacccactttataccatgtataagtacttcattctttgttatagctgaaaattgggtgtccatttatgagtcaacaagcatatggattgtttacactttttgactgtatgaatattactgctgtaaatattcatgcacatgtttattttttgagcacctatgttttgtaagattaacagctgacttaacagaaacaat

SEQ ID NO: 593481 - DNA, 277 bp, Homo sapiens
gccaattcctgaagtttcatgtgaataaaatcaagtaatatttgtccttttgtgcactaaacataatgctttcaaatttcacccactttataccatgtataagtacttcattctttgttatagctgaaaattgggtgtycatttatgagtcaacaagcatatggattgtttacactttttgactgtatgaatattactgctgtaaatattcatgcacatgtttattttttgagcacctatgttttgtaagattaacagctgacttaacagaaacaat

SEQ ID NO: 593482 - DNA, 442 bp, Homo sapiens
ttgcaggtgtttccagagcagcctttagagataggagtgaagaatgcatagcttctgttacaggtagtaatcgagatacacaaactcttctgtggacttctaaggtgtgggagttgataacttctgaaagcaaagaaaaatggcataaaaataaaacagaatgtgataaggaatgactagaggataggctgtaggaaagaaggagaaagaggaaaggtcagtttaggttcagttatttaagaaaatctctttgaggagtaggaatttgaaaccasttctgcagaaacctgggggtagaatattccaaacagagtaaaatagaagaacaaagactcagaggcaggctcaatcttggcaataggctcaacaatcagaccaaaaaaaaagcagaataatgaggggatagagtgataggagatgaaatgggagaggggttcagatt

SEQ ID NO: 593483 - DNA, 442 bp, Homo sapiens
ttgcaggtgtttccagagcagcctttagagataggagtgaagaatgcatagcttctgttacaggtagtaatcgagatacacaaactcttctgtggacttctaaggtgtgggagttgataacttctgaaagcaaagaaaaatggcataaaaataaaacagaatgtgataaggaatgactagaggataggctgtaggaaagaaggagaaagaggaaaggtcagtttaggttcagttatttaagaaaatctctttgaggagtaggaatttgaaaccagttctgcagaaacctgggggtagaayattccaaacagagtaaaatagaagaacaaagactcagaggcaggctcaatcttggcaataggctcaacaatcagaccaaaaaaaaagcagaataatgaggggatagagtgataggagatgaaatgggagaggggttcagatt

SEQ ID NO: 593484 - DNA, 442 bp, Homo sapiens
ttgcaggtgtttccagagcagcctttagagataggagtgaagaatgcatagcttctgttacaggtagtaatcgagatacacaaactcttctgtggacttctaaggtgtgggagttgataacttctgaaagcaaagaaaaatggcataaaaataaaacagaatgtgataaggaatgactagaggataggctgtaggaaagaaggagaaagaggaaaggtcagtttaggttcagttatttaagaaaatctctttgaggagtaggaatttgaaaccagttctgcagaaacctgggggtagaatattycaaacagagtaaaatagaagaacaaagactcagaggcaggctcaatcttggcaataggctcaacaatcagaccaaaaaaaaagcagaataatgaggggatagagtgataggagatgaaatgggagaggggttcagatt

SEQ ID NO: 593485 - DNA, 442 bp, Homo sapiens
ttgcaggtgtttccagagcagcctttagagataggagtgaagaatgcatagcttctgttacaggtagtaatcgagatacacaaactcttctgtggacttctaaggtgtgggagttgataacttctgaaagcaaagaaaaatggcataaaaataaaacagaatgtgataaggaatgactagaggataggctgtaggaaagaaggagaaagaggaaaggtcagtttaggttcagttatttaagaaaatctctttgaggagtaggaatttgaaaccagttctgcagaaacctgggggtagaatattccaaacagagtaaaatagaagaacaaagactcagaggcaggctcaatcttggcaataggctcaacaatcagacmaaaaaaaaagcagaataatgaggggatagagtgataggagatgaaatgggagaggggttcagatt

SEQ ID NO: 593486 - DNA, 191 bp, Homo sapiens
ttacaacaaccaagtgaaagcagactcaaggaaaagacaactggaaaactttacgacatttttarcttgcctttgcctcagcaaattggcagttctgaagtgtcagaagcccacgttcccagtgaggaagcctggtccatcgtccaaaggaacaagagaagatcttacccgcaaattattatgtgtctgtt

SEQ ID NO: 593487 - DNA, 273 bp, Homo sapiens
acaaatttcatgttttcctactctaattggcctttacataaaaatacaggtaaaatttatttgtgcttttttgctatttctgttttgctattctctgtttgtctatgtcttctccacatagacacaattrgggaattttgtacactcttgtgccaactgctttgatagtaacaaaatgtatttctcgaactgctaggtataaaactcaagtatccacaatttaaattctttttccctcacttctactatgtttccagtctcaatagaaatcga

SEQ ID NO: 593488 - DNA, 273 bp, Homo sapiens
acaaatttcatgttttcctactctaattggcctttacataaaaatacaggtaaaatttatttgtgcttttttgctatttctgttttgctattctctgtttgtctatgtcttctccacatagacacaattggggaattttgtacactcttgtgccaactgctttgatagtaacaaaatgtatttctcgaactgctaggtataaaactcaagtatccacaatttaaattctttttycctcacttctactatgtttccagtctcaatagaaatcga

SEQ ID NO: 593489 - DNA, 273 bp, Homo sapiens
acaaatttcatgttttcctactctaattggcctttacataaaaatacaggtaaaatttatttgtgcttttttgctatttctgttttgctattctctgtttgtctatgtcttctccacatagacacaattggggaattttgtacactcttgtgccaactgctttgatagtaacaaaatgtatttctcgaactgctaggtataaaactcaagtatccacaatttaaattctttttcsctcacttctactatgtttccagtctcaatagaaatcga

SEQ ID NO: 593490 - DNA, 418 bp, Homo sapiens
cacaacaggattttaaaatgctcttgaataccttcaggttgccatttaatattttaaaatttaggtttaaataggtactacaaaggagggaatatcttacatagtatagatatcggcattatgatccatggtctctaatccgtgagtcaaataaatgtattgttcatcttccaatgtggtattattttattattttgtggcataattttatttgttatttgttttagatttatttgtatttttgtcaaataatgtgaatgatwtaatatcaatcctttgaatgttgttggaatttgctttctggcttttatttcctttacatttaaagaaacagacttagtttacattttctcagatgttacaaatgtacttaaaaagaatgtattttttaggcaaatccatagaaacagaaagtatt

SEQ ID NO: 593491 - DNA, 383 bp, Homo sapiens
ctagaagcttatgaaggggctgcagcccagcctggccaaccaggcctggcacccgaggggtccctcattgagcagaaggggctctggggcttgtgtaaaaggcagggtgcagaggatacaaaagcccacctcacgcacctctttctacatccatgctatttctccctttgtaagctgggtctgccttgataattttaaaaggaaacacaagcaaggaaacttttatctccacaattytgcagtatataaaaaagctgtttccctatttggttaaaaaaataatttacaaatcccttgaaaatcctcaataacagtttcaagaggctgtgttgttatccttgctttctgaaaaatagtcaatgtgacatcaaaaacaagagaat

SEQ ID NO: 593492 - DNA, 577 bp, Homo sapiens
ggttcttcctaatatctaactctctctcaaaccactcttctccttcactcctgggactcttctccttcactcctgggacttcagtatyggagaataattcagatatttttgattattctgtagtaaatttggttaaagaaatattcaacaaggccagcttccttcatctttccaatgggtaattgaagtccttaataggtccatgttagttctttttctttaactttttagttctgaagatattttggatagagctagtacttaggggagtctcttcagtatagatcattaaagccaaatcaagcaggaagtaattgtaaactttcataggtttgcgcctatagccatactattagaaggtagataaaaatatgcaacctagtcaatttcacattttctcattttctctcattaaatatttgccaagttctaagaagaaggctgtaagatttcattctggatactggaaagcaaatagtggtatgatgttaaacttgttctctggaaaataatcaagcaagcaagcaagtttgttttgttttctcttttgttttgtttctgttgtgtttggcaattt

SEQ ID NO: 593493 - DNA, 577 bp, Homo sapiens
ggttcttcctaatatctaactctctctcaaaccactcttctccttcactcctgggactcttctccttcactcctgggacttcagtatcggagaataattcagatatttttgattattctgtagtaaatttggttaaagaaatattcaacaaggccagcttccttcatctttccaatgggtaattgaagtccttaataggtccatgttagttctttttctttaactttttagttctgaagatattttggatagagctastacttaggggagtctcttcagtatagatcattaaagccaaatcaagcaggaagtaattgtaaactttcataggtttgcgcctatagccatactattagaaggtagataaaaatatgcaacctagtcaatttcacattttctcattttctctcattaaatatttgccaagttctaagaagaaggctgtaagatttcattctggatactggaaagcaaatagtggtatgatgttaaacttgttctctggaaaataatcaagcaagcaagcaagtttgttttgttttctcttttgttttgtttctgttgtgtttggcaattt

SEQ ID NO: 593494 - DNA, 577 bp, Homo sapiens
ggttcttcctaatatctaactctctctcaaaccactcttctccttcactcctgggactcttctccttcactcctgggacttcagtatcggagaataattcagatatttttgattattctgtagtaaatttggttaaagaaatattcaacaaggccagcttccttcatctttccaatgggtaattgaagtccttaataggtccatgttagttctttttctttaactttttagttctgaagatattttggatagagctagtacttaggggagtctcttcagtatagatcattaaagccaaatcaagcaggaagtaaytgtaaactttcataggtttgcgcctatagccatactattagaaggtagataaaaatatgcaacctagtcaatttcacattttctcattttctctcattaaatatttgccaagttctaagaagaaggctgtaagatttcattctggatactggaaagcaaatagtggtatgatgttaaacttgttctctggaaaataatcaagcaagcaagcaagtttgttttgttttctcttttgttttgtttctgttgtgtttggcaattt

SEQ ID NO: 593495 - DNA, 577 bp, Homo sapiens
ggttcttcctaatatctaactctctctcaaaccactcttctccttcactcctgggactcttctccttcactcctgggacttcagtatcggagaataattcagatatttttgattattctgtagtaaatttggttaaagaaatattcaacaaggccagcttccttcatctttccaatgggtaattgaagtccttaataggtccatgttagttctttttctttaactttttagttctgaagatattttggatagagctagtacttaggggagtctcttcagtatagatcattaaagccaaatcaagcaggaagtaattgtaaactttcataggtttgcgcctatagccatactattagaaggtagataaaaatatgcaacctagtcaatttcacattttctcattttctctcattaaatatttgccaagttctaagaagaaggctgtaagatttcattctggatactggaaagcaaatagtggtatgatgttaaacttgttctctggaaaataatcaakcaagcaagcaagtttgttttgttttctcttttgttttgtttctgttgtgtttggcaattt

SEQ ID NO: 593496 - DNA, 539 bp, Homo sapiens
ctgggtgggcacaatctaatcagctgccagctcrgctagaatataagcaggcagaaaaatatgaaaagagagactggcctagcatcctatcctacatctttctcccatgctgactgtttcctgtcctcaaacatccgactccaagtccttcagttttggaacttggactggctctccttgctcctcggcttgcagacagcctattgtgggaccttgtgatcctgtgagttaatacttaataaactcccatatatatattatatttatattccattagttctgtccttccagagaacactgactaatacacaaggcctactcattgtgttgtaaaattcaatggacttgacaaatgcataatttcatgtatccataaatacatactacaaaatagttttatgatagtaacaaaaatccaccatggcttgcctattcaccctacttcaccattctctccaacttctggcaatcattgatctttcatagtctccatagttctgcattttccagaatgttacataattgcaatcattcagtat

SEQ ID NO: 593497 - DNA, 595 bp, Homo sapiens
aatcctttattgtgaatcacttgtggccaagtatcacttaaaataagagttctagaactaaaagtgtctttagaggcctagtacagtttgttataaggaacactgtgtgtgtgtgtgtgtttgtgtgtttgcatgtgtgtaagactatttagaaaagtaagcttatataaaggtacaataatgtcttgtttattgagtatctactttgagtctggcatatcatcaacattttatatcattatcttattgcttacaatcttagggataggtactattatcatttttattttacaggtaggaaacagaaatgcaaactctttctgattccaaatcctatrtttataaccacagcacattatttggtctattagatgtaaaacaactaaattccagaaatagtctccgagcccacctacttagcctcaatcttcaatcttggaggtccctgaaggggctcctctaacctttaaggtttttcacatgtttttacaattgtttcagagcccatgccagggttaataatcagccactacttactgaaaactgtaccagttttgaaaatattaaagtacttctgaaccatttagtaaataac

SEQ ID NO: 593498 - DNA, 595 bp, Homo sapiens
aatcctttattgtgaatcacttgtggccaagtatcacttaaaataagagttctagaactaaaagtgtctttagaggcctagtacagtttgttataaggaacactgtgtgtgtgtgtgtgtttgtgtgtttgcatgtgtgtaagactatttagaaaagtaagcttatataaaggtacaataatgtcttgtttattgagtatctactttgagtctggcatatcatcaacattttatatcattatcttattgcttacaatcttagggataggtactattatcatttttattttacaggtaggaaacagaaatgcaaactctttctgattccaaatcctatatttataaccacagcacattatttggtctattagatgtaaaacaactaaattccagaaatagtctcygagcccacctacttagcctcaatcttcaatcttggaggtccctgaaggggctcctctaacctttaaggtttttcacatgtttttacaattgtttcagagcccatgccagggttaataatcagccactacttactgaaaactgtaccagttttgaaaatattaaagtacttctgaaccatttagtaaataac

SEQ ID NO: 593499 - DNA, 572 bp, Homo sapiens
actgtgttcaacaacactgtaaaatgattataaaaattcacattttataaaagctaaaacctgaagacaactagaatgttggtatttggggatccatctgggtgattccaaagcttgcaactctaccagtactcttgatgccttccttcatagaatgttgaatgttatcatcaagaggtgcaatgggacaaaagagaagcctcactttgtgtaatgatctttggcttctaaagcttggctaaaactaaaaaccataaataactcctcatatgcaaaccatatctgagacaacacattagattttctaaaagtaaaagaaaaaaacacattatgaaagccaactgcatcctgaagcaaaaagtatygtgaggattttgccatacaattttgccagactttttttaaccttgttattttgactaatgtatttcctccttgcttctattaccagaattaccgacattgtgctctaaaatttgttttttttttctaacataggaaaataataatatcttaactacttgagaggcttagaattaaactactattatattgcttcattaagtacagga

SEQ ID NO: 593500 - DNA, 579 bp, Homo sapiens
tttgtcttgccaccgatgatctcatcaggtcaggatgaragggtacagggagacagcactagatgttaggagaaggtgcaggttggaggagtgttgcatggctgggtaccttggccagtagctcactggcccttctttggagggatcacttatagagacgggaagggctgtgacttgggagtctcctctcctttcagagctttcttcaaccccaagctggatatggtctcctaagagagcaggagccccagagaagtgggtgggtgtctggaggattaccctgagcctggtgccagccacaacggggcagatattctaggtgatgacttacaatccctggggttccaaactaaaggtaattatgagaataggacagttattttgatttgagttctagatgttcattcaaacattcaacaactatttcttaaactctgagctatgtccttgggatgcagtggtggagcttcaactactgcttttatggaacttgtggtcaggtttctaacaagaaataggaaagagattcgaggtgagcacaccagggagacagataggcttgcccaagcaagccccata

SEQ ID NO: 593501 - DNA, 579 bp, Homo sapiens
tttgtcttgccaccgatgatctcatcaggtcaggatgaaagggtacagggagacagcactagatgttaggagaaggtgcaggttggaggagtgttgcatggctgggtaccttggccagtagctcactggcccttctttggagggatcacttatagagacgggaagggctgtgacttgggagtctcctctcctttcagagctttcttcaaccccaagctggatatggtctcctaagagagcaggagccccagagaagtgggtgggtgtctggaggrttaccctgagcctggtgccagccacaacggggcagatattctaggtgatgacttacaatccctggggttccaaactaaaggtaattatgagaataggacagttattttgatttgagttctagatgttcattcaaacattcaacaactatttcttaaactctgagctatgtccttgggatgcagtggtggagcttcaactactgcttttatggaacttgtggtcaggtttctaacaagaaataggaaagagattcgaggtgagcacaccagggagacagataggcttgcccaagcaagccccata

SEQ ID NO: 593502 - DNA, 276 bp, Homo sapiens
caaaagcaggagtaagaagagcagtctctgaggtcaagcccttggctgtgcaccgaaagagatagtgtctggccatgaccctggtgctgtrtgatcctgggcaagtggtccctcttctgtggcccctcttcacatctcctctgataagatcagctccagtctcctctgtggctcatctgtagtgctgcttttgagaagggctaaccttagggacccagagctcgcagcatggggacaggtgagcctggccaccatctccttgccctggtgcccaag

SEQ ID NO: 593503 - DNA, 276 bp, Homo sapiens
caaaagcaggagtaagaagagcagtctctgaggtcaagcccttggctgtgcaccgaaagagatagtgtctggccatgaccctggtgctgtatgatcctgggcaagtggtccctcttctgtggcccctcttcacatctcctctgataagatcagctccagtctcctctgtggctcatctrtagtgctgcttttgagaagggctaaccttagggacccagagctcgcagcatggggacaggtgagcctggccaccatctccttgccctggtgcccaag

SEQ ID NO: 593504 - DNA, 483 bp, Homo sapiens
atgtagactcttgttctctgagctatgagaatagggtggctagcattcaaagctagctggtgctgstgctgctcttaggtccaagaggaaagatcctgctcctttttgaagctgccaagtgtatgtgagaaggcttagcaaggcagagaggattcagaacataagtgagctgaccgtggaggtatgcagtctacacaagctgtttggtcagatctcaggtgattttcaagtaaccctgaaggtattgcccttgactgtcggtcctcatagctaagacactggggaactaaagagttcctaccataccagggcctgtgatgcctgctgagttgagcatgtgtgtgtatgtgtacttgcatgcatctctgtgcatgtgcagacatggtggttacacatggaccctggccactgaattgattgatccaggctttctgtctcctggcctgtggttagaagggcgcagagcagttctccagtgcccag

SEQ ID NO: 593505 - DNA, 483 bp, Homo sapiens
atgtagactcttgttctctgagctatgagaatagggtggctagcattcaaagctagctggtgctggtgctgctcttaggtccaagaggaaagatcctgctcctttttgaagctgccaagtgtatgtgagaaggcttagcaaggcagagaggattcagaacataagtgagctgaccrtggaggtatgcagtctacacaagctgtttggtcagatctcaggtgattttcaagtaaccctgaaggtattgcccttgactgtcggtcctcatagctaagacactggggaactaaagagttcctaccataccagggcctgtgatgcctgctgagttgagcatgtgtgtgtatgtgtacttgcatgcatctctgtgcatgtgcagacatggtggttacacatggaccctggccactgaattgattgatccaggctttctgtctcctggcctgtggttagaagggcgcagagcagttctccagtgcccag

SEQ ID NO: 593506 - DNA, 483 bp, Homo sapiens
atgtagactcttgttctctgagctatgagaatagggtggctagcattcaaagctagctggtgctggtgctgctcttaggtccaagaggaaagatcctgctcctttttgaagctgccaagtgtatgtgagaaggcttagcaaggcagagaggattcagaacataagtgagctgaccgtggaggtatgcagtctacacaagctgtttggtcagatctcaggtgattttcaagtaaccctgaaggtattgcccttgactgtcggtcctcatagytaagacactggggaactaaagagttcctaccataccagggcctgtgatgcctgctgagttgagcatgtgtgtgtatgtgtacttgcatgcatctctgtgcatgtgcagacatggtggttacacatggaccctggccactgaattgattgatccaggctttctgtctcctggcctgtggttagaagggcgcagagcagttctccagtgcccag

SEQ ID NO: 593507 - DNA, 609 bp, Homo sapiens
gcaagaagagcaaagtttaaagtatgacactctatactctatgatttaaaacatattacaaaggtacactaatcaaaagacttgtcctggcataaaagcaaatatacagatgaattgaatcaaataaagagcccaggaacaaactcacacatgtatggtcaactgttctttgacaaaggagccacagatggggaaaagatagtctgttcagtaaatggtgttaagaaaattacatgtctacgaaaattacatgtctacgtgataaagaataaaattgggccacatgcggtggctcaygcctgtaatcccagcactttgggaggctgaaagtgggctgatcacttgaggtcaggagtttgagactagcatggctaacacagtgaaacctcatctctactaaaaatagaagaaattatctgggtgtggtggtgcatgcctggaatcctagctactttggaggctgaggcatgagaattgctcaagcccaggaggtgaaggtggcagtgactcgagatcgtgccactgcactccagcctgggcaacagagtgagactctgtctcaaaaataaataaataaataaataaataacataacataaaattggactt

SEQ ID NO: 593508 - DNA, 609 bp, Homo sapiens
gcaagaagagcaaagtttaaagtatgacactctatactctatgatttaaaacatattacaaaggtacactaatcaaaagacttgtcctggcataaaagcaaatatacagatgaattgaatcaaataaagagcccaggaacaaactcacacatgtatggtcaactgttctttgacaaaggagccacagatggggaaaagatagtctgttcagtaaatggtgttaagaaaattacatgtctacgaaaattacatgtctacgtgataaagaataaaattgggccacatgcggtggctcatrcctgtaatcccagcactttgggaggctgaaagtgggctgatcacttgaggtcaggagtttgagactagcatggctaacacagtgaaacctcatctctactaaaaatagaagaaattatctgggtgtggtggtgcatgcctggaatcctagctactttggaggctgaggcatgagaattgctcaagcccaggaggtgaaggtggcagtgactcgagatcgtgccactgcactccagcctgggcaacagagtgagactctgtctcaaaaataaataaataaataaataaataacataacataaaattggactt

SEQ ID NO: 593509 - DNA, 609 bp, Homo sapiens
gcaagaagagcaaagtttaaagtatgacactctatactctatgatttaaaacatattacaaaggtacactaatcaaaagacttgtcctggcataaaagcaaatatacagatgaattgaatcaaataaagagcccaggaacaaactcacacatgtatggtcaactgttctttgacaaaggagccacagatggggaaaagatagtctgttcagtaaatggtgttaagaaaattacatgtctacgaaaattacatgtctacgtgataaagaataaaattgggccacatgcggtggctcatgcctgtaakcccagcactttgggaggctgaaagtgggctgatcacttgaggtcaggagtttgagactagcatggctaacacagtgaaacctcatctctactaaaaatagaagaaattatctgggtgtggtggtgcatgcctggaatcctagctactttggaggctgaggcatgagaattgctcaagcccaggaggtgaaggtggcagtgactcgagatcgtgccactgcactccagcctgggcaacagagtgagactctgtctcaaaaataaataaataaataaataaataacataacataaaattggactt

SEQ ID NO: 593510 - DNA, 609 bp, Homo sapiens
gcaagaagagcaaagtttaaagtatgacactctatactctatgatttaaaacatattacaaaggtacactaatcaaaagacttgtcctggcataaaagcaaatatacagatgaattgaatcaaataaagagcccaggaacaaactcacacatgtatggtcaactgttctttgacaaaggagccacagatggggaaaagatagtctgttcagtaaatggtgttaagaaaattacatgtctacgaaaattacatgtctacgtgataaagaataaaattgggccacatgcggtggctcatgcctgtaatyccagcactttgggaggctgaaagtgggctgatcacttgaggtcaggagtttgagactagcatggctaacacagtgaaacctcatctctactaaaaatagaagaaattatctgggtgtggtggtgcatgcctggaatcctagctactttggaggctgaggcatgagaattgctcaagcccaggaggtgaaggtggcagtgactcgagatcgtgccactgcactccagcctgggcaacagagtgagactctgtctcaaaaataaataaataaataaataaataacataacataaaattggactt

SEQ ID NO: 593511 - DNA, 384 bp, Homo sapiens
aaactctttatgataatggaaatgttttatatctgtgctgtccaatatggcagccaccagccatatatggttattgagcacatgaaatacagctagcgcaactgaagaattaaatgtgtaattccatttaattttatttttttttaacatttttttaagggtctcgctatggtgcccaagttggtctcaaactgggttcaagtgatcctcccgcctcgttctcctaagyagctgggactacagttgcatgccactacacactaattttaattcttttaaatttaaataattaacacctatagctagtggctaccatattagacaatgcaggcctagacatttctgcaggtgggggaaccctagatgacctacatccaaacagct

SEQ ID NO: 593512 - DNA, 577 bp, Homo sapiens
ggaataaaactggaaatcaactccaaaaacaaccctcaatagtacacaaacacatgaaaattatataatgtgcccttgaatgatttttaggttaacaatgaaatcaagatggaaattatctatttttttgaagagaaaataagatgcgcagaaacaagaaggtatgagagagcattgtgttatacctagtgcattttattttcatttttagttgagtaattgcaggatgacccatctcatatagctggttttagygctgggtagcatgactttctgagacacctgagaaatttcttctgttctacttccactgcactgcatttatgtatctatataaagcaagctgtattatcctgaagagtctgaatgtgatattggtgctggaatgtactgcgtcctgcaaccatattatcgatctagtaatcaatctttggacctgattgtatgtgcttgaccataaccattaaatttgaaacatattaaagcatcagacaataacaaaacctcagtctatagtcaacattgcaattaaagtataaagacaatccaaagaatatacttcctaaattatttgttt

SEQ ID NO: 593513 - DNA, 577 bp, Homo sapiens
ggaataaaactggaaatcaactccaaaaacaaccctcaatagtacacaaacacatgaaaattatataatgtgcccttgaatgatttttaggttaacaatgaaatcaagatggaaattatctatttttttgaagagaaaataagatgcgcagaaacaagaaggtatgagagagcattgtgttatacctagtgcattttattttcatttttagttgagtaattgcaggatgacccatctcatatagctggttttagcgctgggtagcatgactttctgagacacctgagaaatttcttctgttctacttccactgcactgcatttaygtatctatataaagcaagctgtattatcctgaagagtctgaatgtgatattggtgctggaatgtactgcgtcctgcaaccatattatcgatctagtaatcaatctttggacctgattgtatgtgcttgaccataaccattaaatttgaaacatattaaagcatcagacaataacaaaacctcagtctatagtcaacattgcaattaaagtataaagacaatccaaagaatatacttcctaaattatttgttt

SEQ ID NO: 593514 - DNA, 611 bp, Homo sapiens
ggcttgacagtccatctagtgctatgragtatttcctaggtacacgatggaaacccagaacagagacagagccaaggggtcctggtcagaaatctcaggatgaatattcaattacaggaaataggatgaattttagacgtggaaaggatcgacactttacttcattagcttcaaaggtaaaaaaaaaaaaaaaaaaacaacaacaaaaaacaaaactctggctcggagagacagtgtcttatccaaggtcacacagctaacacactgatgagttcagacaagaactcagctcctatatactgaatggacatcatcctttcctttccaaagagcaaaatccttaccttaccaaaactgagggttggggagcaagaagggagaagagaggagagaataaggaggggagagtatctagctgtgaatcagttattaaagtacgtgttgatagaaaagcagttacagaaaattgtgcaagaaatatgtatctatataacctttgatactaaaatcttctagggccagcgtattcacatatacccaaactttagagaaaggttctgcatataaactccaatctaaaatgaaaactattataacaataatgaaaatta

SEQ ID NO: 593515 - DNA, 449 bp, Homo sapiens
taatttcaacctattattttcaccaatttargtcctataatgtagttgtttcacaggcaaataaacttcaactcaggcagacgaagtagctttatgtaaggacaacttatctactctaaattgcatactctttgtacttaacattttactcttagagaattctacaaaattaggacaagaaatgtcctattggtcaccttgtccaaacttccatttgatcctctgacagattttttctaatcagttagtatatttcagttatctccagtaaaatcttactcaacatcagatacctgtgaatgcaggatcagtgagatctctcattaattgtctcttactttcacagtgtctggtgctgtgtgcatgcagaggacaaaaatatgaatttattgtggttttaatagtatattttgagtgtcagtcatgtgctgggtgctgtaagagactgc

SEQ ID NO: 593516 - DNA, 449 bp, Homo sapiens
taatttcaacctattattttcaccaatttaggtcctataatgtagttgtttcacaggcaaataaacttcaactcargcagacgaagtagctttatgtaaggacaacttatctactctaaattgcatactctttgtacttaacattttactcttagagaattctacaaaattaggacaagaaatgtcctattggtcaccttgtccaaacttccatttgatcctctgacagattttttctaatcagttagtatatttcagttatctccagtaaaatcttactcaacatcagatacctgtgaatgcaggatcagtgagatctctcattaattgtctcttactttcacagtgtctggtgctgtgtgcatgcagaggacaaaaatatgaatttattgtggttttaatagtatattttgagtgtcagtcatgtgctgggtgctgtaagagactgc

SEQ ID NO: 593517 - DNA, 449 bp, Homo sapiens
taatttcaacctattattttcaccaatttaggtcctataatgtagttgtttcacaggcaaataaacttcaactcaggcagacgaagtagctttatgtaargacaacttatctactctaaattgcatactctttgtacttaacattttactcttagagaattctacaaaattaggacaagaaatgtcctattggtcaccttgtccaaacttccatttgatcctctgacagattttttctaatcagttagtatatttcagttatctccagtaaaatcttactcaacatcagatacctgtgaatgcaggatcagtgagatctctcattaattgtctcttactttcacagtgtctggtgctgtgtgcatgcagaggacaaaaatatgaatttattgtggttttaatagtatattttgagtgtcagtcatgtgctgggtgctgtaagagactgc

SEQ ID NO: 593518 - DNA, 566 bp, Homo sapiens
tctctgacttacctcaatggaagttaacgtctccctcgcataacagtttaatgcaggtgttcacttgatggcctcccaccggatgattcmgagacccagaacgatccaccttgtggctctgatcactgttacaggttttggaatcctctattggaggattctgtattccctgtttccagtcagcagacggggtagagacaggaagcatgcaggattgtgtggaaggttttatggaccagctctggaagtggcattaatcatttctgccatattccactggccagaactctgtcatatgaccacacctgactacaagggaggctaggaaatgtagtcaggctatgcacctaggaggtaaaaggaaacggtttcataaaaaaccaatcaatcagtctgtgacacatattatttgaagtttctgttcctaaacttatccattgggcaaagggcctctacttcatcatctaaattagcgtgaatataagttaggaaaacagattttgagagagcttaaaaaatttataatgtatatatatacatatatatatatacacacatacacatgc

SEQ ID NO: 593519 - DNA, 566 bp, Homo sapiens
tctctgacttacctcaatggaagttaacgtctccctcgcataacagtttaatgcaggtgttcacttgatggcctcccaccggatgattcagagacccagaacgatccaccttgtggctctgatcactgttacaggttttggaatcctctattggaggattctgtattccctgtttccagtcagcagacggggtagagacaggaagcatgcaggattgtgtggaaggttttatggaccagctctrgaagtggcattaatcatttctgccatattccactggccagaactctgtcatatgaccacacctgactacaagggaggctaggaaatgtagtcaggctatgcacctaggaggtaaaaggaaacggtttcataaaaaaccaatcaatcagtctgtgacacatattatttgaagtttctgttcctaaacttatccattgggcaaagggcctctacttcatcatctaaattagcgtgaatataagttaggaaaacagattttgagagagcttaaaaaatttataatgtatatatatacatatatatatatacacacatacacatgc

SEQ ID NO: 593520 - DNA, 484 bp, Homo sapiens
ccaagcatggtggttcatgcctgtaatcccagcactctgggakgctgaggtgggaggatcacttgagcccaggagtttgagactagccaactttttatttagccaagaaaaattagccaggtgtggtgatgcacatctgtggtcccagctactctgggggctgatgtgggaagatctcttgagcccaggaggtcaaagctacatgatcacaccactggacaccagcctgggtgacagagcgagaccctatctcaaaaaaagaaaaagaataacaaaatctctgtcctcatggggctcatactctagagctgcactatccaaaacagtagcccctagccaagcttgattatttaagtttaagttaatcagaattaaattaaataaaaaattcaagccgggtgcagtgtctcagacctgtaatcccaacactttgggaagcaaggtgggaggatcacttgaggccaggagttcaagaccagcctgg

SEQ ID NO: 593521 - DNA, 484 bp, Homo sapiens
ccaagcatggtggttcatgcctgtaatcccagcactctgggaggctgaggtgggaggatcacttgagcccaggagtttgagactagccaactttttatttagccaagaaaaattagccaggtgtggtgatgcacatctgtggtcccagctactctgggggctgatgtgggaagatctcttgagcccaggaggtcaaagctacatgatcacaccactggacaccagcctgggtgacagagygagaccctatctcaaaaaaagaaaaagaataacaaaatctctgtcctcatggggctcatactctagagctgcactatccaaaacagtagcccctagccaagcttgattatttaagtttaagttaatcagaattaaattaaataaaaaattcaagccgggtgcagtgtctcagacctgtaatcccaacactttgggaagcaaggtgggaggatcacttgaggccaggagttcaagaccagcctgg

SEQ ID NO: 593522 - DNA, 614 bp, Homo sapiens
acattcctgggtgaggcagaaatatgtggagaatttaaaaagtgattccaaataaatttaggtccctttgctctttctaaatattacattccccaaatccatttatccacatttatctctagtaactacaatttgtttatgtaaaaagacattttagatttggctgcttcccctgtgtgtcattttttacttcaatcactttgtagagtatttttaaataacaaaggtttttaactcaaggatatagagaggtttagctagctttgattcttgcaaacccctgaagaaatagaaaatgamcagttctggccagtgacttagcatggcaagagtactaatgcaggcccattgctgcataatctgggactactctaatgggaaactttggcttatagacgcccccatcagcctagctgaaattttcttagaactgcgctgcagtctgagaccctgcctgtgcaatcctttcttttctctctccttcataggtgccagacttatatcacagtctggagcatctcccaccttctcctgctctcatcccttttatccttcatagatgtttctgccaattgatctcttacatgtttttatgggctgaattgtgtcttgcc

SEQ ID NO: 593523 - DNA, 586 bp, Homo sapiens
  misc_feature 543, 544, 545, 546, 547, 548, 549, 550, 551, 552, 553, 554,555, 556, 557, 558, 559, 560, 561, 562, 563, 564, 565, 566,567, 568, 569, 570, 571, 572, 573, 574, 575, 576, 577, 578,579, 580, 581, 582, 583, 584, 585, 586: n = A,T,C or G
tgtgtcccccaaagtttatgtgctagaagcttgattccccaatgcagcattgttgggagatgggacatttaagtggtgataaggytatgaaggcttttgtgtattagtctgttttcacactgttataaagaaatacccaagactgggtaatttataaaggaaagaggtttaattgactcacagctccacatggctggggaggcctcaggaaacttacaatcatggaggaaggggaagcaggaacattgttaggaaagagagaagagtgtgtgtaagaggaactgtcaaacacttacaaaaccatcaagaactttcaaacacttataaaaccatcaagagaagatagtgagaactcactcaccatcatgagaacagcatggggaaaactgcccccatgatccaatcacctcccactgggtccctcccttaacacatggggattatgggtattacaattcaagatgagatttgggtggggacacagccaaaccatatcagctctgcccttatgaatggattgtcattatcatgagaatggaattnnnnnnnnnnnnnnnnnnnnnnnnnnnnnnnnnnnnnnnnnnnn

SEQ ID NO: 593524 - DNA, 586 bp, Homo sapiens
  misc_feature 543, 544, 545, 546, 547, 548, 549, 550, 551, 552, 553, 554,555, 556, 557, 558, 559, 560, 561, 562, 563, 564, 565, 566,567, 568, 569, 570, 571, 572, 573, 574, 575, 576, 577, 578,579, 580, 581, 582, 583, 584, 585, 586: n = A,T,C or G
tgtgtcccccaaagtttatgtgctagaagcttgattccccaatgcagcattgttgggagatgggacatttaagtggtgataaggctatgaaggcttttgtgtattagtctgttttcacactgttataaagaaatacccaagactgggtaatttataaaggaaagaggtttaattgactcacagctccacatggctggggaggcctcaggaaacttacaatcatggaggaaggggaagcaggaacattgttaggaaagagagaagagtgtgtgtaagaggaactgtcaaacacttacaaaaccatcaagaactttcaaacacttataaaaccatcaagagaagatagtgagaactcactcaccatcatgagaacagcatggggaaaactgcccccatgatccaatcacctcccactgggtccctcccttracacatggggattatgggtattacaattcaagatgagatttgggtggggacacagccaaaccatatcagctctgcccttatgaatggattgtcattatcatgagaatggaattnnnnnnnnnnnnnnnnnnnnnnnnnnnnnnnnnnnnnnnnnnnn

SEQ ID NO: 593525 - DNA, 586 bp, Homo sapiens
  misc_feature 543, 544, 545, 546, 547, 548, 549, 550, 551, 552, 553, 554,555, 556, 557, 558, 559, 560, 561, 562, 563, 564, 565, 566,567, 568, 569, 570, 571, 572, 573, 574, 575, 576, 577, 578,579, 580, 581, 582, 583, 584, 585, 586: n = A,T,C or G
tgtgtcccccaaagtttatgtgctagaagcttgattccccaatgcagcattgttgggagatgggacatttaagtggtgataaggctatgaaggcttttgtgtattagtctgttttcacactgttataaagaaatacccaagactgggtaatttataaaggaaagaggtttaattgactcacagctccacatggctggggaggcctcaggaaacttacaatcatggaggaaggggaagcaggaacattgttaggaaagagagaagagtgtgtgtaagaggaactgtcaaacacttacaaaaccatcaagaactttcaaacacttataaaaccatcaagagaagatagtgagaactcactcaccatcatgagaacagcatggggaaaactgcccccatgatccaatcacctcccactgggtccctcccttaacacwtggggattatgggtattacaattcaagatgagatttgggtggggacacagccaaaccatatcagctctgcccttatgaatggattgtcattatcatgagaatggaattnnnnnnnnnnnnnnnnnnnnnnnnnnnnnnnnnnnnnnnnnnnn

SEQ ID NO: 593526 - DNA, 578 bp, Homo sapiens
tcttgctctgtcactcaggctggagtgcaatggcgtgatctcggctcactgcgacctccacctcctgggttcaggcgattctcctgcctcaccttcccaagtagctgggactacaggcatgtgccaccatgcccagctaatttttgtactttttagtagagayggggtttcactttgtgtttaccaggctggtcccgaactcctgacctcaggtgatccacccgccttggcctcctaaagtgctgggattacaggcgtgagccactgtgcccagcccagattggatacttctgtgctttgcttacaacttgagaaaatacaattcagcaatgtttacattattaagattaggcaaatagtatttactgcagaaccaactagtgaaatttgatctgtagaaaaaaggaaatgtaatcttaaagcattaaatttgtgtcactttaaagagaattttctgcaagtcgaggccaagtgaattctctttttttacagcccattaattgttcattgtaatgccatagtttagatcaattaatatgtaaaccatgagggggtaaggctttcagatatgtgcctgg

SEQ ID NO: 593527 - DNA, 455 bp, Homo sapiens
gcaacaccaggcagaactcagctggagcccatggagggattatttagacccagccagaagggaagtgcccatcccatagtcagaacctgagttgtggcaagcctcaccattgttgcctaaagtgctctgggattctaaataaactttaaaagcggtctagggcacarggactgcaattcctgggcatgtcctggtactgtgctgggctcagagccagcagacttgaggggcaagtgacctagtgagataccagcttggtcggccaagggattgcttgcaccacacctcctcaactccaggcagcacaacttgcagctccaggaaagactccttcccttctcatgagaagaggagggggaagagtaaaaaggtctttgttttacaacttgaatactggcttagccagagtaggacagaacaccagcagaattgtgagggtccgatttcaggacccc

SEQ ID NO: 593528 - DNA, 618 bp, Homo sapiens
ggactgaaaaggcactgtagaccaaatgtccctaatagaacatttcattcaacagctgcacaatacacattttactcctaagcacatgaatcattctcaagggtagaccatataggccacaaaacaagtcttcaaaagctcaaaaaattgaaagtatatcgagtatcttctctctacaatggaataaattttaattattccattaaatggaataaaatttaaattaattacaagagggattttggaaaccataaaaaaaaacagaaattgtgtaatatactcctcaaagaccagtgggtcaatgaagaaattaagaaggaaatcaaatatttcttgaaacaaatgataatgaaaacacaacataccaaaacctatggggtatagtagaagcagtactaggaggaaagtttatagctataagcacttacatcaataaagtagagaaagtgctacaaataaacaactaataatacatcttaaagaattagaaaaayaagagaaaaccaaaaccaaaattagtagaagaaaaaaataataacccaaggatagatatataaaattgaaacaaaattcaaaaaatcagaacaatgaaaagttgttttttcttgaaaagacaaa

SEQ ID NO: 593529 - DNA, 342 bp, Homo sapiens
caagcttctttgcaacatccccaaaggatagtccaggtgttttcctttgactctggggtgatggaatagaataagaaaaatgcctgaggaatcatcttgtgcacactgaaattcctgaagtttttatttgtttctcccttaggaggaagataggttttcatttctctctctttttttttttttttttttttttgagacggagtctcactctgttgcccaggctggagtgcagtggcgtgatctcggctcactgcaacctccaccctccgagttcaagcgaytctcctgcctcagcctcccaagtagctgggattacaggcacctgccaccatgcccagctaa

SEQ ID NO: 593530 - DNA, 342 bp, Homo sapiens
caagcttctttgcaacatccccaaaggatagtccaggtgttttcctttgactctggggtgatggaatagaataagaaaaatgcctgaggaatcatcttgtgcacactgaaattcctgaagtttttatttgtttctcccttaggaggaagataggttttcatttctctctctttttttttttttttttttttttgagacggagtctcactctgttgcccaggctggagtgcagtggcgtgatctcggctcactgcaacctccaccctccgagttcaagcgactctcctgcctcagcctcccaagtagstgggattacaggcacctgccaccatgcccagctaa

SEQ ID NO: 593531 - DNA, 403 bp, Homo sapiens
attcatttattcaacatacatttaacatgtttttctagtggttgccaacacagttctaaataatatgcttttgcttcttttttgatttataatttttacaaagtatttattgtgtttccaatacatctaattatttttcatgagttttccccatttataaggatcagagaaccaaaccggttttgttgcactgccgttacccagaagttttgaaaagtgagagtcaactcagacctctgttctgtaggtcaktgggagaattccttatattgaacacgaaatgtgaaataaaggcgcaaggatgaatatcgtcatagttaaacaagttaacattagtaaagcactcaagacaatgaaaccacctttgcaaaaattatatcagttagaaaattatgacagtgaa

SEQ ID NO: 593532 - DNA, 403 bp, Homo sapiens
attcatttattcaacatacatttaacatgtttttctagtggttgccaacacagttctaaataatatgcttttgcttcttttttgatttataatttttacaaagtatttattgtgtttccaatacatctaattatttttcatgagttttccccatttataaggatcagagaaccaaaccggttttgttgcactgccgttacccagaagttttgaaaagtgagagtcaactcagacctctgttctgtaggtcattgggagaattccttatattgaacacgaaatgtgaaataaaggcgcaaggatgaatatsgtcatagttaaacaagttaacattagtaaagcactcaagacaatgaaaccacctttgcaaaaattatatcagttagaaaattatgacagtgaa

SEQ ID NO: 593533 - DNA, 503 bp, Homo sapiens
ctttgtctcctgactcaggaactgcccaacttgctgctttgtgggatattttgtctgtaatccacttcagcttccctcctttccacctgcaaatttagatctatcaggaatcctccttctgccagagtccgagaaagatgtgttgtgcctcctgttcatttctgcttgcgaccttccacttttgctgtctcttttggtacacctttctgggttatctcctctgtctccctccagccattacgtgctctagtttttcttgccctagttctctccctacccccaacaaatccattattactttatcactgtagctgtctcyctgccagaggcaagctctttaaaggacaggccactctcttgtggcctccatttcctcatccactccttacacaccaactacatttcaaccactacagtctggtttttggccctatcgctccactgaaacttttttattttttcgagacagagtttcactcttgttgcccaggctggagttctgc

SEQ ID NO: 593534 - DNA, 503 bp, Homo sapiens
ctttgtctcctgactcaggaactgcccaacttgctgctttgtgggatattttgtctgtaatccacttcagcttccctcctttccacctgcaaatttagatctatcaggaatcctccttctgccagagtccgagaaagatgtgttgtgcctcctgttcatttctgcttgcgaccttccacttttgctgtctcttttggtacacctttctgggttatctcctctgtctccctccagccattacgtgctctagtttttcttgccctagttctctccctacccccaacaaatccattattactttatcactgtagctgtctccctgccagaggcaagctctttaaaggacaggccactctcttgtggcctccatttcctcatccactccttacacaccaactacatttcaaccactacagtctggtttttggccctatcgctccactgaaacttttttrttttttcgagacagagtttcactcttgttgcccaggctggagttctgc

SEQ ID NO: 593535 - DNA, 557 bp, Homo sapiens
tgttggttacataatattacaaacatactaaatgtcacttttaaatggtttcttttatattatgtgaattgcacctcaataaaatatctatctggctgggctcggtggctcacacctgtaatcccagaactttgggaggccgaggcaggtggatcacctgaggtcaggagttcgagatcagcctgaccaacatggtgaaaccctgtctttactaaaaatacaaaaattagctgggtgtggtggtgggcacctgtaattccagctacttgggaggctgaggcaggagaatcacttgaacctgggaggcagaggttgcagtgagccgagatcatgccattgcactccagcctgggtgacagagtgagaatccctctcaaaaaataaaataagatatttgtttaaaatttgattatatattttctaaaagatctactcttttgctgtgtggagagttgcattagtcrggataagatagttttggtgcagtgtgatgaaatcaggatattagttttggacatttaaatttgaaatgttataagctatcatagtgtagctgt

SEQ ID NO: 593536 - DNA, 537 bp, Homo sapiens
catctgtcaggctggcatctggtctcagctctgagttgcagaacgagagagctgctgccaagaccccctttttgtttcttttttcacctttccttgactcaacagcaaatgaatggatcaatgcagtgaaataaccaggaagtgaccactcctggctcatctatccgttcattcaaggaactgtgtcccaggcagcagtgtagggaggtgctgattctgcctggcaccaccagggggagcttcacagaggagggattcattgaaaggggaaccttgaaaggtgaacaggatttcayggacgagacagagtagggtgagtggctctacatccagacacatgaggaaaggctgttgggtctggaatctggacagaagggccatggcccattttcctctgtgttcccatcacccagtagagaaatcgacggaaggaggacagatggtcagacagataaatgggtaaaggagtcagtggagggatggctgcactatggctatttcaagcaaggtggaaaagactcaagaaacacaagaagc

SEQ ID NO: 593537 - DNA, 608 bp, Homo sapiens
gctggtatgcggttttagacaaggccatcctggaagccttcattaacraggacggatggcagggaggtgagggaaagagacagcagatgggttcccttccaggcagaggaagggcccaggcaaaggaccagaggtggacagtggggtatgctgaggagacactgggagaagtgagggcagggcagggcagggcctgggagggagggacggcactgccaaccatcacagggccatcactaaacaggttggctgggatcccacgttagcttgttggtgttgtaaaggtgattaccttaaagaggccccattcacagtgggtgaggtggagcccagcgtcatgcttttagaggacatttggctttctgcactaagaagtataaaaatggtcctacctctacctttaggaccagtcattacgcatctgggactgtatccttacgaaaaagcccaaacatcagatccctcagcttgatccctttcattagccatgggaaggcaggtggcttcctgggcctggcacacttcctctctagtccccaaggctctgcagtcctacgtccccctccccacacctggtctcccatctggacctgaactgcctgcctggg

SEQ ID NO: 593538 - DNA, 560 bp, Homo sapiens
ttgatccctttcattagccatgggaaggcaggtggcttcctgggcctggcacacttcctctctagtccccaaggctctgcagtcctacgtccccctccccacacctggtctcccatctggacctgaactgcctgcctggggtgtggcctagatctgtccccaccaatgcaggaaaaaatcgtcrtcctcacccttctgtcctaaatgccctctgccagatgcttctcagacatcccttctaatgggctctaaagatgggcctgtctgacataggagaggggacaacttgggccagcctctccctcctgccacgagtaacaggtcctgtctggaagttctcatgtgggtacagcctggcccccgtgcctggtcagtgtgtcccacccctcaccatagatggctgaacaagactactcagggccaggcctggccctgctggtctccttccagccaccagggaaaggacagagtctttctttgagacagggtctcattctcacctaggctggagtgcagtagtgggatcatagctcactgcagcctccacctcctgggcttaa

SEQ ID NO: 593539 - DNA, 583 bp, Homo sapiens
gtcgtcctcacccttctgtcctaaatgccctctgccagatgcttctcagacatcccttctaatgggctctaaagatgggcctgtctgacataggagaggggacaacttgggccagcctctccctcctgccacgagtaacaggtcctgtctggaagttctcatgtgggtacagcctggcccccgtgcctggtcagtgtgtcccacccstcaccatagatggctgaacaagactactcagggccaggcctggccctgctggtctccttccagccaccagggaaaggacagagtctttctttgagacagggtctcattctcacctaggctggagtgcagtagtgggatcatagctcactgcagcctccacctcctgggcttaaggggtcctcccacctcagcctcccaagtagctgggaccacaggcagatgccgccacacttgggtgattttgtagtgatggggtcttgctttgttgcccaggctggtgtcaaactcctggcctaaaagcaatcctcccatcttcagcctcccaaagtgctgggatcaggtatgagtcactgtgcccagcctgaggctttctgag

SEQ ID NO: 593540 - DNA, 581 bp, Homo sapiens
ttgggggatcaggagctggtgtcaacaccgggtgaggggatttgccaacaggctactgcaatagccccagcaagagctcttaaggacacaggtcagaatgtctagagaaagaagagataaagggtgcccagccctctgtacttggggctgaaaagtcccccttacccaagggaggacacctacattgaccctgcacacaggtcagagggactatggaaagagaaggccacagaggaagccctcagacctccaagcaccaaagccacacagccaagtggatgaagaactcatgagcgtgagtcagatggcctgtgtctcggcacattactcatccacctgtgctgccaattttcaactgataaaatggggcccagaagaggactgacctcacaggggtgttctgagagtgaaagctaatgacagtaaaagccttccgctgtgtctggcaccaygacatctcctgacctgtctctctcacatcagacttgcctagacacggcggtggctgacagcctgggaagacacacttcattgaaactgggggactttgcaggcgccactgctcctctctgtacccagcc

SEQ ID NO: 593541 - DNA, 585 bp, Homo sapiens
agatggttgctatctacccacccagaacaactggctcctaaacaagcttgtccaattgattttcactaagcccccctctgccactgtttgccaggcactgggatatagagcagaggcatagcatttgtctccatgggcatccttccgaggcagtcccctgcacacagccccaccctccctctgccctggtgtcctaggagacccctgcaccaaacctacacttttccaatatgaaaagggaagtgacctggctgatcagtgctgacctttctaatcatgacaagcttcggaattcaggagagatggctgcagccttcatctgtctccttggttttcccaacaaagccaactgactgtaaaatacagtttcccttaaacatcttttctgcctacctgactagtcaaccagggtarctgtttcctggtctccccagggtgtgtctggagtatttgtcaagaatacttcaacttccttctaagtgtccctgcatccactccaaactcagcagaactttggcataatgagaaagccctaagtcttttcaaaactgacaaacaggcttgttcctccattccacagttatt

SEQ ID NO: 593542 - DNA, 613 bp, Homo sapiens
tggagagaccagcaagccagtgtggctggcatgcgatgctccaccaaggtcatccctggtgccatgggggtgggagtggtgggagggcagggcaggcttcaaggagggcctgataggtgagaagggacctgaaggctgagcaagagtttgtcaaccagagaacacagcatggccttccatgaggaggaagcagcacgaggaaggcagagaaaagactatggtttactttgaggaactgtgagaaatttggggtaccctgattgtgtgtagaataaggtctaggtcactggtcagacttaaaaygtatgaaaaatgacaatgacttggggaacaatttgtagtacaatagttatagcaactcagaaatatacttctaagtgtaaaataaaagttaataaaaaaaaacgcagcaatttgtacaaaacatatagctctggttctcaacctagtttccccccatttagcacacactcacatcagtgacagagggacagttagctgcaggttccctctccaggtgaccatttcagcctctgctgaaagtgtctgcagattgaacgagctgaaacctgatacacccttagggagctgtgccctctctctcaactcccct

SEQ ID NO: 593543 - DNA, 613 bp, Homo sapiens
tggagagaccagcaagccagtgtggctggcatgcgatgctccaccaaggtcatccctggtgccatgggggtgggagtggtgggagggcagggcaggcttcaaggagggcctgataggtgagaagggacctgaaggctgagcaagagtttgtcaaccagagaacacagcatggccttccatgaggaggaagcagcacgaggaaggcagagaaaagactatggtttactttgaggaactgtgagaaatttggggtaccctgattgtgtgtagaataaggtctaggtcactggtcagacttaaaacgtatgaaaaatgacaatgacttggggaacaatttgtagtacaatagttatagcaactcagaaatatacttctaagtgtaaaataaaagttaataaaaaaaaacgcagcaatttgtacaaaacatatagctctggttctcaacctagtttccccccatttagcacacactcacatcagtgacagagggrcagttagctgcaggttccctctccaggtgaccatttcagcctctgctgaaagtgtctgcagattgaacgagctgaaacctgatacacccttagggagctgtgccctctctctcaactcccct

SEQ ID NO: 593544 - DNA, 613 bp, Homo sapiens
tggagagaccagcaagccagtgtggctggcatgcgatgctccaccaaggtcatccctggtgccatgggggtgggagtggtgggagggcagggcaggcttcaaggagggcctgataggtgagaagggacctgaaggctgagcaagagtttgtcaaccagagaacacagcatggccttccatgaggaggaagcagcacgaggaaggcagagaaaagactatggtttactttgaggaactgtgagaaatttggggtaccctgattgtgtgtagaataaggtctaggtcactggtcagacttaaaacgtatgaaaaatgacaatgacttggggaacaatttgtagtacaatagttatagcaactcagaaatatacttctaagtgtaaaataaaagttaataaaaaaaaacgcagcaatttgtacaaaacatatagctctggttctcaacctagtttccccccatttagcacacactcacatcagtgacagagggacagttagctgcaggttccctctccaggtgaccatttcagcctctgctgaaagtgtctgcagattgaaygagctgaaacctgatacacccttagggagctgtgccctctctctcaactcccct

SEQ ID NO: 593545 - DNA, 613 bp, Homo sapiens
tggagagaccagcaagccagtgtggctggcatgcgatgctccaccaaggtcatccctggtgccatgggggtgggagtggtgggagggcagggcaggcttcaaggagggcctgataggtgagaagggacctgaaggctgagcaagagtttgtcaaccagagaacacagcatggccttccatgaggaggaagcagcacgaggaaggcagagaaaagactatggtttactttgaggaactgtgagaaatttggggtaccctgattgtgtgtagaataaggtctaggtcactggtcagacttaaaacgtatgaaaaatgacaatgacttggggaacaatttgtagtacaatagttatagcaactcagaaatatacttctaagtgtaaaataaaagttaataaaaaaaaacgcagcaatttgtacaaaacatatagctctggttctcaacctagtttccccccatttagcacacactcacatcagtgacagagggacagttagctgcaggttccctctccaggtgaccatttcagcctctgctgaaagtgtctgcagattgaacgagctgaaacctgatacacccttagrgagctgtgccctctctctcaactcccct

SEQ ID NO: 593546 - DNA, 416 bp, Homo sapiens
ccaattttggaagaagaaatttaagaaggagaaatggcagggtgtggggtggaatgaactattaagaaatattaagccagtggctggaaattacgttctggagtttggaagaaagatgaaggcaggagatttgagtcaggagtagctatgactttaaatgacatttatatgcgatgaacttccaaatttatgtctttaatcaggacctctcgtagccactgscatgttgagtaggcatctcagacttagtatgccccaaatttccagctagacccctagcactcacccccaccagcagctctgcccactttccctctccactgctcacagcagctccatcttgcagtttctcaggccagacaccctgcaggcacctctcactcctctttcccttacactccctgtttagtctgtca

SEQ ID NO: 593547 - DNA, 593 bp, Homo sapiens
tgacccaaaagtgattactatgggtcagggtggccccctgagtctccatcagcccctagaattgctccaaataaacatgcagtccaaaaaaccagtgtgcatactacatacccagcctcaagtgggggagctgtagaatgagtacccggccccacttccagacacctcaccctccgtgaacccctcctacattgacatcctggagctttctctatatttctatcctttgataaaagtttaaatatcttgtgataaaaagaaaaagaacttttattattcaacaggctctttccccttgaaaatgtcagttgagcctgctaaggggtctagttcctgtctcaraacgatttcttagattatggatccagtttaaatgaattgatcctgagccatgaaatagcagccaagattcagtaacagatctcacaccctctatcctctatctcttgttccctgggctcctactggaggagacagcgctggttgtggtgggagtctgttcaggacagcctgggacgcccttcacaatgcttgcacaggatccggtagtctccaagctctgcacacagccttcttcccaaactctctccctg

SEQ ID NO: 593548 - DNA, 554 bp, Homo sapiens
acctgcattttttcagtccttgcagatgtagagggtacaagaactggagtccrgcaccaccaaggatggggaaaccctgataagtcaccaccctccttaagttaggatcccaaaggactgcaccacaggaattaggattaaatataaatcaaccaatctccaaatggactgtagcccagttttgagtcatctggatggctcagaaaaatctcaaactctgaaactgtatgaagatgatcctgggttggtacaagtaggagttaacaagaagtaaattttaaaatcttctataggggaagatactatcttaggcctcaaattgtttctacaaatacttttttaatacaatgtccagcacacaattaaaataaaccagaactctaggagacaagataaaatgcgtagaaaccagcggaaataataaaccgcaggacaaacacatgggttctccaaacaatggaattctcaaacacagtctataaaatacctatctttactacaatgaaggagataaagccaaacctaaaacacttgggaagaaactgaaagtggca

SEQ ID NO: 593549 - DNA, 545 bp, Homo sapiens
ccctcctgcctgggtcccgttagggcctgaacggccccctccccttggggaaaaaggcccctttgtcaagttgcactgtacattcaagcaaatttaaatagcttgaattcaaatgacctattcaaaccagttgtttattactccccctaaagcaggggatgayttcccggccttgactctgctcagtcaggtgaaactgaaaaaaaaaaaaaaaaaaaaaaaaaaaatagccctgcgtttgcattttagagaaatgatggatacttcagcaaggttatttccccagagttgtatctctcctttaatttgactacatgagggatggggacgaggtggagcccaaggagaggcagaggagctggggtctttggaaacttccagggagccttgggagctagtaggcaagggcggggtggtccctaggggacccctcaaaggagacttcggttatccttaccgttgaagtttttctgccgaggaggctaagtggccttgaatttccggggagcatttccaccgcagcctccggggggcggggagctcgc

SEQ ID NO: 593550 - DNA, 545 bp, Homo sapiens
ccctcctgcctgggtcccgttagggcctgaacggccccctccccttggggaaaaaggcccctttgtcaagttgcactgtacattcaagcaaatttaaatagcttgaattcaaatgacctattcaaaccagttgtttattactccccctaaagcaggggatgatttcccggccttgactctgctcagtcaggtgaaactgaaaaaaaaaaaaaaaaaaaaaaaaaaaatagccctgcgtttgcattttagrgaaatgatggatacttcagcaaggttatttccccagagttgtatctctcctttaatttgactacatgagggatggggacgaggtggagcccaaggagaggcagaggagctggggtctttggaaacttccagggagccttgggagctagtaggcaagggcggggtggtccctaggggacccctcaaaggagacttcggttatccttaccgttgaagtttttctgccgaggaggctaagtggccttgaatttccggggagcatttccaccgcagcctccggggggcggggagctcgc

SEQ ID NO: 593551 - DNA, 545 bp, Homo sapiens
ccctcctgcctgggtcccgttagggcctgaacggccccctccccttggggaaaaaggcccctttgtcaagttgcactgtacattcaagcaaatttaaatagcttgaattcaaatgacctattcaaaccagttgtttattactccccctaaagcaggggatgatttcccggccttgactctgctcagtcaggtgaaactgaaaaaaaaaaaaaaaaaaaaaaaaaaaatagccctgcgtttgcattttagagaaatgatggatacttcagcaaggttatttccccagagttgtatctctcctttartttgactacatgagggatggggacgaggtggagcccaaggagaggcagaggagctggggtctttggaaacttccagggagccttgggagctagtaggcaagggcggggtggtccctaggggacccctcaaaggagacttcggttatccttaccgttgaagtttttctgccgaggaggctaagtggccttgaatttccggggagcatttccaccgcagcctccggggggcggggagctcgc

SEQ ID NO: 593552 - DNA, 443 bp, Homo sapiens
acagggcacagggaggttcaccaagcccacccggcaggacctgttgggggccaggcctgctcccgctgcgtgttcccatttcttccaaacaggagtctattgtgctgacgatgttctctccactgctcrgtactgggtgtgggggtacacagcctgcctcttggtttaaagttcaccaaaagttaaaaagtccacccaaagtttaacattttggtttaaaattccaaggagtcacttcaagacccaatggtgagggctgcgtatcaccaggagagcctgaccttgggggctggatgctgggacaggatgaggcacccagggcaggggtgagagtgctctgtgtgtgggaagatgggtgcatggcatttgcagggaaaggttcattacatggtagagactcctagttgcacaccacatgtcctttctttccttgcttgtagaac

SEQ ID NO: 593553 - DNA, 542 bp, Homo sapiens
cctttctttccttgcttgtagaacccctggtttttagcttggtacatggataacaaactagagctatacttcccagcctcccttacagctaggggtaaccaggtgtctaaattctatgagcaagatctcaaaaaactacaccacagcttccggggaacctcctcaaagataactagcatgtgctctttgtcctgcttcccaccttcctccatcctgctgcctggatcacagatataatggtgggagctctcgcctgcgttttgccttccttgggcatgtggacagctccccttcccagggtggttagtaaatctttaagaccatcccctaggtcttctcaatgcctgctgtgtacacagatgctaactgcactggtcttcgctctgcccaggtgaattctccargttcacaaggagtgtccacagatgcccttgcctgaaaggagtctccagtccccatgcatcccctttccctcactttttgcaaatcctggggaaggagatgtctcccacagcagaccttctactctgggaagccagcct

SEQ ID NO: 593554 - DNA, 542 bp, Homo sapiens
cctttctttccttgcttgtagaacccctggtttttagcttggtacatggataacaaactagagctatacttcccagcctcccttacagctaggggtaaccaggtgtctaaattctatgagcaagatctcaaaaaactacaccacagcttccggggaacctcctcaaagataactagcatgtgctctttgtcctgcttcccaccttcctccatcctgctgcctggatcacagatataatggtgggagctctcgcctgcgttttgccttccttgggcatgtggacagctccccttcccagggtggttagtaaatctttaagaccatcccctaggtcttctcaatgcctgctgtgtacacagatgctaactgcactggtcttcgctctgcccaggtgaattctccaggttcacaaggagtgtccacagatgcccttgcctgaaaggagtctccagtccccatgcatcccctttcyctcactttttgcaaatcctggggaaggagatgtctcccacagcagaccttctactctgggaagccagcct

SEQ ID NO: 593555 - DNA, 554 bp, Homo sapiens
ggtcatgttgattgagaatatttaactctactatatctttgctgatttcctgcctgcttattctatcaattattgaggaagagtattratattcataactgtagatctggctacttttcattatagttctatcagcttttacttcgtgattctgaagctcccttattaggggcatacatatttattattattatgtcctcttgggaaattgacccctttgtctttatgaaatgaccttcctcatccctaatattattttttgctctgaagtctttgtcttatgttgatacagccactgtagctttctttgactggtgttagtgttatatatctttttttccatcctgactcttaatctgtttctgtcttcatgtttaaagtgcatttgttttaggcagcatgtcatttagtattgattttttattcagtttgacactctctaccttttaattgggtatttaaaccatatacatctaatgtgattttttgaacatggttaggtttaagactgtcacccttccttgttttctgtgtatcccatctaatgtgttctt

SEQ ID NO: 593556 - DNA, 530 bp, Homo sapiens
agaattcaaacaaaagtatttctcactcttgcaaaacagaactgctttgacttgagttacatcaggcacctttaaagagctctggatagagggtcttccgattccaggaacatatacttttccccattcctcccgctaaaaacttggacattttattcaaaacaaaagtaagaagactctgaaagatggcgagaggaaggcagaccagccagggacctcaggacccaaggaacatcatagcagcmgattctctgggtattacggactgaattgtgtcccctgaaaagtcatacgttgaagcttcagctctcagtgtgactctatttggagggagggcctttacagagataaagttaaataaggtcttaatccaatagaactggtgtcctcataagaagaggagataccaagcatgtgtgcacagagagaaggccatgtgaggacacagtgagaaggtggcttgtagttgcctaccctgtgacaccttcatcttggacttccagcctccaaaactgtgagaaataaatgtc

SEQ ID NO: 593557 - DNA, 540 bp, Homo sapiens
cactacagaccctgcagacatcaaaagtataataagaggatactatgaacaattctatacacataaatctgacaacttacatgaaatggaccaatcccttgaaaagtataaactaccacaatgcattgaatattatgattatttgaatagccctataattattaacccgtttatgctggaggttgcaaatttttttgtgtgaaaaatcagaccttggtgatgaccttaagcagtaggacataaataactcccacaagcttagcgttctaataatggaacactaggcataaatgagttaagggtattgaattagcaacattaaaactccccraaaagaaatcttcaggcccaaataatttcactgaaaaattctaccaaacatttaaggaagaattgataccacatttatacaatctctttcagaaaatataagaggagggaacatttcccaatttattttacgaaacaggtatcctgataccaaaagaagataaatacagtacaacaaacaaaaaaccaaaccaactatagaccagtggc

SEQ ID NO: 593558 - DNA, 578 bp, Homo sapiens
tcttatttttggtagctggactgataatgctgaaaataaaacaccaacttaattttttgccgaattgcactggaaatttagaacattgattggtaaagaatgggattctgaaactttgaatgggagcttctggttgaacccagaagaaactgacaatcttagacctccaagtcgctctgatattcctttacccatggaaggagcctgccctccggtgtctgagrataatagccttccttttctttgagaatcttgtgataagctcacctgaggcagatgctttgaaaggggatgccctttctcctcaagacccaatcaaaccatatgcacatagacccataactagtgtcaaatctcagcatgctccagagaacaggtagacacagtgacccaaaaagaagtagcttacacacagaaagaataaggttttgttaatgtatattgtcagaagcctaggatgcatgtgtggaagtgcattctaagggcgttacaccaaggagggtggaatctaacactagatcagccctgattgtgaatatgggtgctcttattggacattctggatttagtgtgtttgc

SEQ ID NO: 593559 - DNA, 564 bp, Homo sapiens
gggaaacagactctcaggcagaggaagttcattgggaagtgcttttggtaacagtacagtgtggaagggagggaagctggaccaggcagagggagaaagttccactggaatgcagttacaagaaaggcagaggygggggctgggaaatcctgcaggtcatcttgtgcgaaaagaaaataaaagtgtcgggaccccagactcactatgtcaaagggaaaagttaggcttgggaactgagtcacgcaaaactgcctcccatttcctaaatggatagctgcaaagatagaagccacacacatccccaggggcctcctcaaaattcgcttacaaggaaattcctgtgggccgaagatctttaccctaaaaccgacttctgttgaatttcactctgacaatttaatcaacagcctatcttcacaggtacaggacagacaggacttgtgtttgtccctctgcccacctgagacaaaggcatatatgactgcattttttactctatatttcctttattttatgtaaaaaatgcagattcactgagcacaagaccagtgcatagttgactgt

SEQ ID NO: 593560 - DNA, 633 bp, Homo sapiens
atcatttttgggtgtgcctgtgagggtgtttccagaggagattggctgtgagttagtggactgaatgggaaagatcccctctcactgtgggtgggccccatccaattggctagggacctggctagaggtagaagaaaggtgaattcttttctgtctctctcagagctgggacacacttggtcttggacatcagaactccagcctttggactgcaggacttatgacagtggcctcctgggttttcaggcctttggcctcagactgagagttaaaccattggcttcccaggttcttaggctttaggatttagacctatcccagggtcttcagcttgcagatggtctgttgtgtgactttttagcctccataatcacatgaacccattcccctagtaaatcccttctcatacatctctatctctatccctagctctgtctytatcatctctatctctatctctatgtctctatctctatttctatctctatctcagctatctctatctctatccctgcccatatccctcccccatccctatctctatctctacctatctctatcatctctatctctatctctatctctatctatctctatctctatcttcatctctatctctctgtctctatccta

SEQ ID NO: 593561 - DNA, 593 bp, Homo sapiens
cctgggtgtgctcccacagcatgtggggtagacctgttcaacctggaaggactctggccccaagaggtcagagtggctgccgcagaaggacacctctcaggcctcccttcaggagaagctaccccaagggacgtgactgaccatcccagctgccgcacctgcaggcgccgctgtggtactcactcccaacacttcctctccccggactgcccctgctggaggctgagccagcgaggtcatttgcagatgtgggactcctccggggggagtctttgcctgggtctctgcctcacctggctgaggcatccctagagcggtgctggctgaggctcttccaattcyctttctgcccccatccttgcagctgtgacagctggatgccagggtccgaaggctctcctgcctattcctgctctgtaccccctttatccttcagagatatttcttggaggacccccagatgactaagcctgaggaaggaacagtcctgccgagagccaaggggccccagcaccacccatagccctggcaggtatgtctggcaggagatgctgcctggagacaggtggaaccccccccatggcagcaccccc

SEQ ID NO: 593562 - DNA, 593 bp, Homo sapiens
cctgggtgtgctcccacagcatgtggggtagacctgttcaacctggaaggactctggccccaagaggtcagagtggctgccgcagaaggacacctctcaggcctcccttcaggagaagctaccccaagggacgtgactgaccatcccagctgccgcacctgcaggcgccgctgtggtactcactcccaacacttcctctccccggactgcccctgctggaggctgagccagcgaggtcatttgcagatgtgggactcctccggggggagtctttgcctgggtctctgcctcacctggctgaggcatccctagagcggtgctggctgaggctcttccaattccctttctgcccccatccttgcagctgtgacagcyggatgccagggtccgaaggctctcctgcctattcctgctctgtaccccctttatccttcagagatatttcttggaggacccccagatgactaagcctgaggaaggaacagtcctgccgagagccaaggggccccagcaccacccatagccctggcaggtatgtctggcaggagatgctgcctggagacaggtggaaccccccccatggcagcaccccc

SEQ ID NO: 593563 - DNA, 535 bp, Homo sapiens
aagaaataaaataactacctcatagaatcattgcaaggattaaacatgatatgtgctcaataaatgatatccattattatcctaaatattccttaattccagttatatatcaataatgaaatcattctcaggagagtrtaatttgtgggtgtggaaattagtaaaagatgaagtcaattcctggctatatttattgatagatatcaatatgtttgttttatttgtaaaaacagtgtagggagttattgtgtttacagagatggtatgtggatactgcttattaacgtatactgaattgatcacactgagacccttcagctgctatttaatctttttggtatgtgcttggagttttaggttaatcactgttacacatgttgcttactggatggttaggtttctgtttttataaagtaaactttctgagagttgtgtcagatctttgagcttaatttttctctgtttataggttagatatacaaatcctctgagaggctggtttctaacatagaagttcttcgtttactctgaagta

SEQ ID NO: 593564 - DNA, 613 bp, Homo sapiens
tagggaactaataaagtgagaaatcgcccattactgtgaggacaacagcaagccattcatgagggatccacccccatgactcaaatacctcccattaggccccacctccaacattgaggatcaaatatcagcatgagttttagggggacaaagatccaaactacagcaccaagtttatgccaaagatgtgttaaaattaaacacttctcactaatttagctcaatttttacacttttgggttcacactgaataataaattgtamtcagttctatgtgagggtgaagaaattctccctttgcattgattgcctgtaataaacaagaaaacctcatgtcttttgtttggttaaacatacataatcctcaaagatgatctgtaatgtggctcagtttttgacatgaggatctaaaactttttctgcataagtgtttaaaagattacaatttgaaggtgtcttctaaatattatctcctttaaccattgttacctttgtcagtggagtgcatgtttacttggttgagaagaataaacaatagtttacctattttcatgttttctttcttttcatatagcaaaataggtatatttgtgggctgtgaaaggtctagatc

SEQ ID NO: 593565 - DNA, 617 bp, Homo sapiens
catgtttaaaaaggacttagaaaaactgatatacaaactgataggaacttttgtaaagcaatttgttggtatctatcaacattttaaacgcatgttcgttttgacctagcaatctcactttttggcatctgcatactttgcacatgtatacaaataaacatgttcaaggatattcatttcagtattctctaacaaaagggaaaaaataatgtaaatgtccacccacagaagaatggttaaataaactataatacgtgcattttatgtacccataccatgaaacattaagaagaagacagatctacatgaactacgtagaaaaatttccagaacatagtatcrggtaaaaataagtaaattacaaacaacagcaataaaacaaaacaaaaggcatggatttttaagtatgtgagtaattttttcgggtgtgggtatagatcattcaaaattttcaagttcaagttcgacagactggttaactatgatgttaacagttaatatcagtattaactatggtaagactagaagaggaagggaaggtaaaaaaggtagaagatgttttgagaaaaagataatgatactgacttaaatatattcctattggatatccacatcca

SEQ ID NO: 593566 - DNA, 429 bp, Homo sapiens
aataaatggacagagattatgaatagacaattcacagaagataaaatgcaaatagaaaaaatggacatatgctcaatttcacttgaaatrtaaaaaatgaaaacaataatatatcacatcatgctgatgtgtccttttatatgtttgaaaatagagagaaactggaactcactttactgtggagagggtaaattggtatagctcttattaatgagtactatggtaataccttctagaacagaagatgtataacttccttccaccaagcaattctcttattcctaaaaagctcagaaaagtaagcaaggagttatatcaaggagtatttttcacatcatgatttgtaatggtgaaaaattagaaacatctcaatattcatgataggagaatggataaatatattgtggttaaggccacacggtggattgc

SEQ ID NO: 593567 - DNA, 481 bp, Homo sapiens
aactgcttttttttttttttaaaccatcagatctcataagrctcattcactatcatgagaacagtgcaggaaagacccacccccatgactcaatcacctcccactggtttcttcccatgatacgtgagaattgtgggaggaacaatgtgatttgtgtggggacacagccaaacctcctaacactctactcctggaccctcccaaatctcacgtcctcacattttgaaaccaatcatgccttcccaacagtccccccaaagccttaactcatttcagcattaacctgagacaaggcaagtcccttccacctatgagcctgtaaaatcaagatcaagttagttacttcctagatacaatgggggtacaggcattgggcaaatacagctgctccaaatgtgaaaaattggccaaaacaaaggggctacaggcctcatgcaagtctgaaattcatcaggacagtcaaatcttaaagcctgagaat

SEQ ID NO: 593568 - DNA, 573 bp, Homo sapiens
gctcatcactacaacagattgggcaaatttcatctctgytattgtgcaggctgctcagaagtttaccaaacacctgcattttccatgctcttctcccagaaataactactctgtcactgatgtctatgacatgaaagacattaaaacttccaaccaagaaatctcaccgtcctcacctgaccacttaaagaagctttgggcctaaaatccagacatcttcaccagctgctcttcagaatcagaaactgggttgtggttggctacaatctttcatttttgtttttattttgtcatcatagaaatgtcagtcattgagtacctgatggctcacaccatccagcaaatatcctctaataccacgtctcaacagatagttcagctgttccttaatagataagagaggaccaaaaggaccaggtgcaggcactcatacctgtaatcccagcattttgggaggggaaggtggatgggccacctgagcccaggagtttgagaccagagtcggcaacatggcaaaactccatctctacaaaaaatacaaagattagctgggcttagtgacatgcagctata

SEQ ID NO: 593569 - DNA, 573 bp, Homo sapiens
gctcatcactacaacagattgggcaaatttcatctctgctattgtgcaggctgctcagaagtttaccaaacacctgcattttccatgctcttctcccagaaataactactctgtcactgatgtctatgacatgaaagacattaaaacttccaaccaagaaatctcaccgtcctcacctgaccacttaaagaagctttgggcctaaaatccagacatcttcaccagctgctcttcagaatcagaaactgggttgtggttggctacaatctttcatttttgtttttattttgtcatcatagaaatgtcagtcattgagtacctgatggctcacaccatccagcaaatatcctctaataccacgtctcaacagatagttcagctgttccttaatagataagagaggaccaaaaggaccaggtgcaggcactcatacctgtaatcccagcattttgggaggggaaggtggatgggccacctgagcccaggagtttgagaccagagtyggcaacatggcaaaactccatctctacaaaaaatacaaagattagctgggcttagtgacatgcagctata

SEQ ID NO: 593570 - DNA, 609 bp, Homo sapiens
tatacccactagaggttaaaaatcatctctaggtctcagtttaaatttctgcaaaacccactacatgccattccttaataaaaatgcaccagacaataaagatatgattaaatgccacgtttagccttccagagcgatgactctgtgctgaagtgattaggaacagtctcccacagaagataaaccctgagctggcccttgaggacagagtatctagataggaaaaataacctaggaaggggcagaagcaaaaggtgagaagctaaaatgtgagagatgtttggtttccaataaaggatataacttggctaaatacactgttcacagagaacagccatcttaattccatcacgtttatagaaactttggttttgttttcttttttaagacgaggtctcgctctgtcacccaggctgkagtgcagtggtacaaccgtagctcactgcagcctcgacctcccgggaatcaagcgatccttctacttcagcctccagagtaggtggaccacaggcacatgccaccacaactggctaattacaaaaaattttttcagagatggggatcttcctatgttgcccagactggtctcaaactcctaagcccaagcaa

SEQ ID NO: 593571 - DNA, 379 bp, Homo sapiens
tcgactttaatgatggatgcgttcacaaattgtgactgtttcctttaaaaatctggtatgggaactactcctaaagaattgaaaggtttctctgtccattctagtactggataaatgaaacccaaagcttgctgatatagatcagtttttcaaattacaatcagcagcagatagcttaagtccatcttaaatatttattttattttataataatttaaatggatttaattgacttttatttgttcattatagtttttgtgaatattttgctcgctaacattaaggaactactaaatttatgtttagccttccacttccaccaaacatacgttccttcacagaattaaaaaccgcatygttgtagtttgtttcagaaggt

SEQ ID NO: 593572 - DNA, 402 bp, Homo sapiens
aaaaccgctatcattgcctttttccagggagagtttgtctcaatatctttttcattagcattgcttgtccacataggtttccttaaaacccattgtaatatttttagccttcaagaatttaagatccacattggagagcacattattgagctggtggtatgtttcaggccatcttttaggtggacaatgttaaatttattatcacatgtatgattaaattttttgaggtaggcattcttatcttcattttacagaacaataaggtaatggagtgtgagtactacgcccagsgtgaagtcattagttaactggaagtggttgaaatagtggagagtttggattcaaaacccagatgtagagaatcccaaagcacatcctctgtcccttagcaccattgattct

SEQ ID NO: 593573 - DNA, 653 bp, Homo sapiens
tgggctaacatggacttgggcagctctccccctgtggctttgcagggtatattccccctctcaactgctttcacaggctgttgctgagtgtctatggcttttccaggcatatgatacaagctgtcagtggatctaccattatggagtttggaggacagtgaccctcttctcacatctctactargccgtgtcctagttgagactctatgtggggggctatgaccccacatttccttttctcaatgccctagcagaggttcttcatgaggactccactcatgcagcaaacttctgcctggacattcaggcattcccataaaccctatgaaatctaggtggaagttcccaaacctcaatttttgacgttttcatacccacaggacaaacaccatgtgaaagctgccaaggcttggggctttcaccctctgaagccacaacccaagctataccttggctccttttagtcatggctagactggctgggatgcagggtcccaagtcccaaggctgcacagaggatggggggctctgaggctggtccaggaaaccattttttactctaagacctctggccctgtgatggaaggggttactgtgaaggtctctgacataccctggacacattttcaccattatcttggtgattaacattt

SEQ ID NO: 593574 - DNA, 554 bp, Homo sapiens
tcttcccttctgggtacatagttaggattgtacttccttgctcattaggtgtgattatgtgattattatttggttaatgacctgtgagcatggctgacacctgtcactctcaatgggagcattaatagctagagcatgcaacaacatgttctcctttctcatggtaatggtgaaatgcattgtcataaacagtggctgtgccttcagtctgtatccctgaatgcagatgttgataatgcaaacagagccaaaatcctatatccaggaaggtcaatgtagtgtgagtcagaaatggacatttactgttttaagccattgggattgtgtgtgtgcgtgtgtgtatgtgtgtgtgtatgtgtgtgtgtgtgtgtgcatgtttaatcagcgcagcataacttaacctgtcctgtgtgatacactgtcttccttagtctttgccctatttcttcytttcttcctggacgtctcctcaacccacagaggagtaatgctgcacctgggcaacaagcccgctataagcaatggcaaaagcataagacatctattgatgggtg

SEQ ID NO: 593575 - DNA, 417 bp, Homo sapiens
catgcctggagacttcaaagagtatttttgtccaaacyaagcctgggttttgattttgtagttgatgagtcattacttccccaacacagggtgggctttgattttgcaggtcatatttccccaacatattcttctgatgtccaaatcaaagtgctccagaaatatgtagaatatttattgttataaaaaatccatagtagatttgaattgataagatctcctataggcctttgtgattttttaaaaaatatatgctaccttatgaatcttgtctaagttattaaaacctccaaacatcccttgtcaaatcaggaactaggagggtatattagtcattctcatgctgctaataaggacatacctgagactggataatttataaaggaaagaggtttagtgaactcacatttccagatg

SEQ ID NO: 593576 - DNA, 417 bp, Homo sapiens
catgcctggagacttcaaagagtatttttgtccaaactaagcctgggttttgattttgtagttgatgagtcattacttccccaacacagggtgggctttgattttgcaggtcatatttccccaacatattcttctgatgtccaaatcaaagtgctccagaaatatgtagaatatttattgttataaaaaatccatagtagatttgaattgataagatctcctataggcctttgtgattttttaaaaaatatatgctaccttatgaatcttgtctaagttattaaaacctccaaacatcccttgtcaaatcaggaactaggagggtatattagtcattctcatgctgctaataaggacatacctgagactggrtaatttataaaggaaagaggtttagtgaactcacatttccagatg

SEQ ID NO: 593577 - DNA, 481 bp, Homo sapiens
atcagatacatttaacaaagggattgaaataattaaaaaacatccagagcagaatttctggagctgaaaaatgcaattggcatactgaagaatgcatcagagtcctttaatagcagaattgggctgggcgcagtggctcatgcctgtaatcccagcaccttgggaggccgagatgggtgaatcacctgaggtcaggagttggagaccagcctggccaacatggtgaaactccgtctctactaaaattgcaaaaattagttgggcatggtggtgggcacctgtaatcccagctgctcrggaggctgaggcaagagaatcgcttgaacctgggaggtggaggttgcagtgagctgagatctggccactgcattccagcctgggcaagagagtgagactaaacaacaaaaagttaaaaagttgccaagacagtattaaattgaaacaaaaatcaagaagcttttaaaaacaaagttaaaaagca

SEQ ID NO: 593578 - DNA, 481 bp, Homo sapiens
atcagatacatttaacaaagggattgaaataattaaaaaacatccagagcagaatttctggagctgaaaaatgcaattggcatactgaagaatgcatcagagtcctttaatagcagaattgggctgggcgcagtggctcatgcctgtaatcccagcaccttgggaggccgagatgggtgaatcacctgaggtcaggagttggagaccagcctggccaacatggtgaaactccgtctctactaaaattgcaaaaattagttgggcatggtggtgggcacctgtaatcccagctgctcgggaggctgaggcaagagaatcgcttgaacctgggagrtggaggttgcagtgagctgagatctggccactgcattccagcctgggcaagagagtgagactaaacaacaaaaagttaaaaagttgccaagacagtattaaattgaaacaaaaatcaagaagcttttaaaaacaaagttaaaaagca

SEQ ID NO: 593579 - DNA, 554 bp, Homo sapiens
tcttccttgcagctcagcactgaggcactttttgatttctctaggtgycatgtgagtcatttgggccaccttgaaggggtggctattaaaatggtaagttttggagagaaattttaattgtaactatttcacctgaaaactgaatcctggaggcttcaacaacttaggagctgtgtgaccttgacaatttagttggcctctctaagtgaatttcttatatgacaaatgcagacacaaaatatctatagcagaagctggctttgttctgtaaactgggagaattgctcattttgtgtttactactatgtatttagtattatttggccacagtggtcaggtaagaagtgatgaaaaagtgaatctgtactaatgaatcaatcaaagcaccagaaaaataggaatagattctctatcaagagattgtgcaactttatttttcatatagtaattgacaagcgggtctagctgaagcaaaacatagatgataataccagagaaaaaggagcaccagcatgaaccgcacacctgctaggtttcagtcactgtctaggacc

SEQ ID NO: 593580 - DNA, 610 bp, Homo sapiens
gtttacaaaacaactagcctgcaatatttaaaatgccaaggacatgaaagacaataaaaaggctaagaaactgttccagatcagaagagactagagacataaacatgtgataggcagatgtcagtgatgagrtatcacttctgagattaggttacaaaggactgagacttccatcttgctagaattctctttctggctcttctcagcttgcttgttctggtgaagcaagctgccaaattgtgagctgccctctggagaggcccatgtttcaaggaactgaggaattcctagccaacagccagccaggaactgaagccctaaatccaacagtctgcagtgacctgaatcctgccaacaatcactgaatgagcttggaagcagatcgtattgcacttgaattctgagatgactgtggccgacaccttggttgcagtcttgtgagagaccctgagctcaagagcccagctaagccatgtctagattcctgacccatggaaacggagatgacaaatattgttttgagctaccaagtttgttgtgcagctaaatttaactaatacaacaactaaatgcatcctgaactagatcctgaaactgaaaaaaaggatta

SEQ ID NO: 593581 - DNA, 610 bp, Homo sapiens
gtttacaaaacaactagcctgcaatatttaaaatgccaaggacatgaaagacaataaaaaggctaagaaactgttccagatcagaagagactagagacataaacatgtgataggcagatgtcagtgatgagatatcacttctgagattaggttacaaaggactgagacttccatcttgctagaattctctttctggctcttctcagcttgcttgttctggtgaagcaagctgccaaattgtgagctgccctctggagaggcccatgtttcaaggaactgaggaattcctagccaacagccagccaggaactgaagccctaaatccaacagtctgcagtgacctgaatcctgccaacaatcactgaatgagcttggaagcagatcgtattgcacttgaattctgagatgactgtggccgacaccttggttgcagtcttgtgagagaccctgagctcaagagcccagctaagccatgtctagattcctgacccatggaaacrgagatgacaaatattgttttgagctaccaagtttgttgtgcagctaaatttaactaatacaacaactaaatgcatcctgaactagatcctgaaactgaaaaaaaggatta

SEQ ID NO: 593582 - DNA, 604 bp, Homo sapiens
ttcccttttctctgcatccttgccagcatctgttgttttttttactttttaataatagccatttttactggtgcaagatggtatcacatcgtggttttgatttgcacttctctaatgatcagtgatgttgagcattttgtcatatgcttattggctgtgtgtatgtcttcttttgaaaagtgttcatgtactttgctcactttttaacggggtcgtttgttttttgcttatagattctggatcaaaccttagatagatgcatagtttgcaaatattttctctcattctttaggttattcgtttactctgttgatagttacttttgctgtgcagaatctctttagtttaattaggttccatttgtcaatttttgtttttgttgcaattgttttggcatcttaatcacaaaatatttgtcaggtcttatgtccagaatggtatttcctcagttatctcccatgatttttatagtttttataagtctttcatccatcctgagttaatttttgcacatagtataaagaaggggtccagtttcaatcttctgcwtatgctagccagttgtcccagcaccatttattaaatagtgagactttcccaattg

SEQ ID NO: 593583 - DNA, 633 bp, Homo sapiens
gtatcttttagcatcttaatcagtggaggattagtcaggaaatacagtgtgggagaggttgattaaggtaagtggacaaagaggtaccttgatctcatgccagacattatagacaggaaactcaggcagcaacaccagtctcctgagcatgagagaggctaagatcctctaccctgattgcaaatggctcagacactgggtggggccaagtgcatgattggagacaccaaacattttgattgagtggggctgggaaagcaggacaattgttatactctctaaatgctgttcagttaaccaagcctgattgccagtaaaggytgggagtcttgtatttcccactggatgccagactgaacagtggccttctggcatctcttttaaaaatctattctgataaaaaacacatcacataaaatttgccctcttaaaactttaagtgtacagtacagtattcttaactatatgcacattgtatagcatgcaatattttccttctgagactggcttcttttactcatggaatatccatgttgctgcgtatggcaggattttcttatttttttaactctgtatagaattccatcttaccacactttctttactgagtcatccatcaatggacatttaggt

SEQ ID NO: 593584 - DNA, 542 bp, Homo sapiens
tctttctcagaaatgttttggctatttaagttcctttgtggttccatatgaaatttagaattgtttttctacttctgcaaaaaaaatgacattaggattttgatagggattgtactgaatttgtagattgctctggaatagtataacaattttggaaatactatgtcttttaatccatgaacatgaatgtctttccatttatctgtgacttcatttcagcaatgttttgtagttttcagtatacaagtctttcacttccttaaatttattctcaaatatcttattcttattgatgctatcataaatagaattgttttcttattttctttttcagaatttttttgttagtgtttagaaacacaactggtttgtatgttgattttgttgtgcaacttttctgaatttgttagttctagcagttgtctgttgtgtgtgtgtgtgtgtgtttgtgtatgtgtggtcttcagggtttyctacacataggatcacattatctgagaacagagataattttatttctttcattctaattgggttacctt

SEQ ID NO: 593585 - DNA, 542 bp, Homo sapiens
tttggtatttaaagggggaaaactgggctagagtggaagaggaagcatatagtaattcacacattgcatgagaaaaggagaaggtgggggaatagtcaattatatattcatcttgcactcagtaacttggcactttgcattagatagggtgaatgtatagtagctacctgtggagatatttaatattttatctgtagatatatgcttaggaacaataggaaaggcaacttcttgcatgacttagcttattttttttcttttggcatagtgaattggggtcccaagtttttatttttctttcacacatccttgggctgtatggaggcatgctagagtatgttaacatctcttagagcatggggtagatgaaattrtttatgctgaaagtctgcattctttataggctaaagttgaggtcaagtcaagaagagagctcatatgagcctgagtgtgattaaagagaaaacctttgttaatatgataattaaaaatatatatattctttactaatgctttatgactttttctattccatagtgaat

SEQ ID NO: 593586 - DNA, 540 bp, Homo sapiens
tttccctcttacccactccccactgacagtaaacttcttataatccttcataaagamaaatacaagttgtctgaagcaaatacccccttttctcctcaaactaacatactcgctacacttgtagtcactctatccttttctgctgttacaaaggaagaagtatcaaaaacccaaattctccatactactctatttctcttcaaaattctttttctcaggggactttctaccccaatcttctggatcttgctactcactctagtttattaaaaagcagacaaaacaaaacttttccctagctcatacctcattcttgctccagcggtaattgtgagggccagttgtaaactgcttccacttcctaacctcttattttctcttcagtagacaccaataaggcttttgcaaccaccaattaattgaaaataatcttagtaaaggacaacaataatcctactgcagctaaatcaaatgaattatttacaattctcacattacagtacttttcagtagtacagttgatccttgaacaacatagat

SEQ ID NO: 593587 - DNA, 562 bp, Homo sapiens
tgcacagcctgttccccaagatacagaatgctgtgtaggctatagggctggggacccttccccattgctggktacaactctgttaagccactgaagctcttggggtagacatgtggggatgtcagtggggctccagtgttgtggagatgcaggggttgttgagctccaggacaggatgaagtccgatggagtctgggctttcaaaatggtgctgtgctgtggctgcttgggtctcagggggtgtgaggcccagcatggactccctctttagagcaatgttgtcatgcaaactccaggcagatccttagtctcagaattcttgatgattgaggggatatcccatggttggaattctaagagtctgtggtgggaatctgaaccattgtggatctctcacttaccttttccttgcactagggagcatctccaggctaccatctgatcttgccagctgatgctttgttttcatctccttctgtgactcaggtgtcttctttcacttctctgtagaatttcagtgttgtcttttagattctctattcaaagtgtgatcatctagttg

SEQ ID NO: 593588 - DNA, 226 bp, Homo sapiens
tgcctacttcccttttactatcccaccttgacccacacccatggcctcattgagagtttcctattaccagctcactgggacaagatcagtgagaatcaaccacctccacacaatatgttgtcatgtgccaaaactgaagttytttggcattaaagccccacttggggactcaaaacactgggaaagagatattcttccagtgattagaactttgattagtacatct

SEQ ID NO: 593589 - DNA, 553 bp, Homo sapiens
cgtggtgaagaaggatgtcttcccagaaggccacagatatttttcagtagaaaatggttccaggagccttcaaagatgtcaagttaacccaacagcaattggagaagggcaccagcctrtaagtgaggagtaaaaaggttagatcccacctcaaacacccaagatagcatttgaagtcaactttccactcaaagcaaagagcatttaactgattctcatccataaatattatcgaaagtttcattttatacatagcaggaacttaagcatcatttgtaggccaactactatcacgagcaagacagaactactggttttatggagagttgactatacatatggtcatgcacatttgaactatgattgaagaggtttctattccttaatctctacatttcacagaaaaaccttagctgggtatattcatagagataccaacgtctgtttaaaatgttatgtgacagctgaaaacaacataggtaactggagtgtgatgatcacacaaacaaggtgggctttttgttttactccatgcagaggtttttaagggacc

SEQ ID NO: 593590 - DNA, 573 bp, Homo sapiens
gaactactggttttatggagagttgactatacatatggtcatgcacatttgaactatgattgaagaggtttctattccttaatctctacatttcacagaaaaaccttagctgggtatattcatagagataccaacgtctgtttaaaatgttatgtgacagctgaaaacaacataggtaactggagtgtgatgatcacacaaacaagrtgggctttttgttttactccatgcagaggtttttaagggacccagttccatatgtagtctaatgtgtttttgaccagtgggagatagtagaactttaacaccatcatcatagcatactgcatcaccacattggcagaatggtgatcagaaagccggcaccttctcaattgtgtgtccctacaggtcttttcccagtacaggggagagaaatagcaaataggctgttctcctgcctcaagagagacctcagacaaacaagaatccatcttattttaaagacaggtcagaagaggctgcacgatcatgctcagtgatgcccaggtccccaaagtgtgataggaagattgtcaaataataaaccaaatc

SEQ ID NO: 593591 - DNA, 441 bp, Homo sapiens
ttccaccccgtggtgaaatgctttcctaccctttcctcctccgccttgtcctttcattggtgtgaggctcgtattaaaacaggaacagaaaagcagttagtacatcagattattttgatgtctgggcaggtcctggggaaggtatgattatgtatctactgttcacagcaatacacacacacacacacacacmcacacaaaaaaaaacgtgactctatatatacatatggaaggtatgattatgtatctactgttcacagcaatacacacacatatatatacaaaacatgatatatacatatacacacatacactaaacgtgacatcccaagacataaatttacagtttaggaaatggctctttacaagctgtgtggctgtgtttaatgggcctaccctctctgagccacatctataaatggggatgataatgcctcccta

SEQ ID NO: 593592 - DNA, 441 bp, Homo sapiens
ttccaccccgtggtgaaatgctttcctaccctttcctcctccgccttgtcctttcattggtgtgaggctcgtattaaaacaggaacagaaaagcagttagtacatcagattattttgatgtctgggcaggtcctggggaaggtatgattatgtatctactgttcacagcaatacacacacacacacacacacccacamaaaaaaaaacgtgactctatatatacatatggaaggtatgattatgtatctactgttcacagcaatacacacacatatatatacaaaacatgatatatacatatacacacatacactaaacgtgacatcccaagacataaatttacagtttaggaaatggctctttacaagctgtgtggctgtgtttaatgggcctaccctctctgagccacatctataaatggggatgataatgcctcccta

SEQ ID NO: 593593 - DNA, 469 bp, Homo sapiens
gaagcttgcccaggctccctggttctttcttttgggctgtgggtcaaatgctgtccagtgctgacctggacaagttgaggataccagaaggaatccaaggcgccactagtgctgtgggtggaccctggtcatccccctgcctctggatattagaactcagtttagctacattygagatgtaattcaaggggtcactggggaatggttatatgtgatgcccaagtgtgtggcttcatggtcccccaaagaccaggtgccagggcaacccttccccacctgctccagcactatccaccccatcccagtactgtcaattatatggggtcaatggtgtggcaggaggatggttcttggtattaaaacggatccatttccttagggttgaaaacgtagaggatccaagcagatcctagcctcctgaatgccaggaattcttgatgttttattaggattttgtcaagaaaggggg

SEQ ID NO: 593594 - DNA, 616 bp, Homo sapiens
agtactctaaatattccatctgttagttgaaacagatcattccctcacattgcaaataccattctcaatagctcttaaataaatgggttattgagaactagagtagccacatacagttgtcaggggtaatgttagagtctcatgtgattggtaagtgtgtgtgattaaactgagacagcatacaaacattctctaacttctggacagatgaccaatgttttaccaacaatgaattaaagggaattcttttaaaaagagtatgtagcattaaatacttttgattttattaccgatgaaatyacaggtttaaaaaaaaaacaaactctagaaggttagtttagttttctagccaaaaagaaaacatataccaactagaataagaatgaatttgaaaggaaattgaaaaaatatacttttcctaaccctagataagtccctttaaagtaggctgattcatgtgaagcttgttacagggacgataaatgctctttctgccaccagagaaagtaagtaatcagtccaattgtataagcagtcactttttttcatacattatacacaccaaacagagagattacttgctagtgcctggtgttgctgttggaacagcactggc

SEQ ID NO: 593595 - DNA, 622 bp, Homo sapiens
ataaatggtttgttgatattacatcacaataaatgttatattcaatatgttgtctcatattaccactgcatagtttagtgcaatgtgcaaaattacaaggaacatcatgtgtgagcactccatttacatcaatctctgcatgtgtatctgtgatatgttgataaggttcctcaaatttcactaaataaacttttgatatgtttcctcaaatttcactaaataaactcttttcctttagcctaacacaaactcttaaatcatcaatccagttttgcagattatcactcagtcatttctatatcacagtggcctgggggatgtggtgtgctgtgctactggaaccactcagatggctttctttagcacataaaatggggcattatttgatcacttraattagcaaacattgtttgtcttagactttagtaactacaggactgccttggtctcttgctgtactcaaccaaaaaggcataggctggggaattataaaatttggattagaaaaaaaataaatgttaagtgatcttatattaagggtctttcagtttttaaatgatttagagttatgaaatgagtcagtgctcctggatgtatgataatggaatcctgtggatcccat

SEQ ID NO: 593596 - DNA, 591 bp, Homo sapiens
agctttgaggtttgagttgtgtcactgtgaggaattacacagacctatcttgatgctcccaagccctgggggatgctgtgtcctcaagacgaagggcttatcactaccctggcactcagatcccggcctcctctcagaaactctgcaaattgtaatgcagctctgtgggcagagctgctaatacttacccttaaccctatgtaaggttcagcattttaggccaaatgtagtttcctgatgaaaatatcttccccagaaaagccagagcttgacgtgcaacggaccaaccagaggctgctgggattcccatgttgtgcctggctgcagctgtgggcaggttaccaaccccattgggattttcatccaggcctggaggatgttagaggtggaaagggatttggaggtcagagatgttgcattacttaactttcctctttgtataaaataagcactcctcaaatatttgttgaatgatgagtgactgaaaatgctcagtgtggctgcsaagaaaggtacccgaggaaatcagagggctttgatgttggggaagaatgtgatctacacaagtctgtttgtcttgaacaatctggg

SEQ ID NO: 593597 - DNA, 585 bp, Homo sapiens
gaaaatagtttgtgatctttaaataaggaaggaaaacagctcctggaattgattcctgagtaatttaatcaccttttgtccagacaactcagagctggctcaaggattagccacatattgatgcatgtactgaatttccrgctatatccacatgcagagggacctggggagcttcactgccaccccttctccacccctctgtctcttgggagaagcactgtgcagagaactgctttggaccatactaccttccaaagcacccagacagaggagtgggagggccagtgagaccacatccatgccttcaaatacagaaaggaaactgatgctcagaaaaagcacacaccaaaaaatcttgaggtgctgggatgtgttatgtaacagttttcctcatctatggaagagaaaacaattgtctgagtggagatcaggaggctggggtctgactcctgctttctcccccgcagttgcagcaataccttggcaagctgcttgtcttggagtctcagcgttactaacagaaggctggtttctgtcattcatttactcaatcattcacttaataatcactttccaaacacctgc

SEQ ID NO: 593598 - DNA, 533 bp, Homo sapiens
tctctgtgccttaatttcttcatctgtaaattggtaagcaaaatagtaactaactcatagagtgcttggtggattaaacgagttaatatatacaaggtacttagaacaatgtctatccatagaaagtgtacaaaatgcttcctatcaatattatgctgaaaataaaactctttaccccacctcctctccagctatcatcccgattttcctgctgccccatttgtagcaaacttcctacaaagggatgtctacatgccctgtttacaattgttctcccctgcttctcccttgagccccctcccatcaggctttctcaccctcaacactgctccaaagtacttctcatcaagatcacagtggccttcatggtgcacagtgccatactcagttttgagtccattctgtaccaaaccygtagcaggtacttgacacagagaatcagtctcctcttcatacatggtcttcacttggtcgatgacactgctccctcatgatgcttctccttcaccttctctttctcctccttctccctg

SEQ ID NO: 593599 - DNA, 548 bp, Homo sapiens
ccctgccccatcctgcctccctccccgtttcccacaggtgtttgtctcaaggcattcctcttaagcgtcctgcttcataaactccttctgagagtctgcttcctggagagctcaaccttcaccactcacccccaagatccaactcataaattctcctggacactgcgatgaggcagctggctttctccctggcaccagccccaagggagccagcctttgcctataattgattcctggccctgaccccctcctcctgccagaggcccatgcagcccagaggctccagtggcaatgaccatgttgagatgcttaaatcctgccatcttggctttttccattattttttaaaccttggggccatggtgtccaaggtccatagacactgggtggccagtgataagaggyccctgtcactctgccccaggaacaactgacaccaggcctgggcagcccttcttccccctacaggggcccttgctcccttttgtcttgacaagaggccccacctcatcccaagaggtgcaggaggccagactttgcagagtagc

SEQ ID NO: 593600 - DNA, 588 bp, Homo sapiens
ggctgcaacacagggccaagaagggacagcctttccttccctctgacagcacggccctgtattgaacagctttgtgaacatattctgggactactaacgtctgtrcctgcctcttgcagagagggcttgagggctgccagcacattgtgatcctcttggaagcagcagagaacctccccccaacttaaagcccacctcgcttttccagtgtgcccaaatccacctgatgagaaccctctttcgctttaagctttggctgttaagaagtcttcttttaaaagaaggaatcctctaaataaacccactcgcaattattgaagagctattgtactggtcacagtggaggccgctgggatgacagttacaaaaggaccatgggcaagctccttccctctttagcctcagtttcctcatttattaaagtggaaggggttctgatagatcctgttttatacaagactgagcacaagatactgggtgatgaatgcagttccttggtttgacggttacagaggagctgagttgcactccctttgtcctcatagatgggaagtggtcctgcccttgaggtctcaaggctgacctgtt

SEQ ID NO: 593601 - DNA, 637 bp, Homo sapiens
tataaaatatcattatttttactatgtcctgtctccagtgccactaggcagggtcacaagctccttgggggcaggccctgtgcaagtgcctcattattcccacagagcttctggccagtgctgaatatataaatgacacttaaaacaaaggggttgacctaataaaagcaccttgtttataaatgtgctttctctataatattgccaaattgccctccatagggcctgtgccactttgtacctggagcagtggcaatcaatgagctctactgtttctgtacacttccctaacaccatgtgataaccaacattgagatttttgccaaccctataggtaaaaatgagcatctcagcatgatttaaatgtgcatttatcttattatgaattaggtgaagcagagtttcatatatttaacagccactggtatatcctttcatataaatggctgtcaactgtattgcactgttggtyttgtttcttcctcattgatccgtaggatatgtatttgagggatcaaggacatatcatttgcaaatattctttcctagtttgtcatttgtttttaactttatgtatgctgtaactcgtttgagaacatcagcaaagagaagccagcacataagacctggtggaaat

SEQ ID NO: 593602 - DNA, 573 bp, Homo sapiens
acctgtgtgaaggacaggtcacttcctgatcacagctgagcctgcgttggttggagccaggactgtccctccccatagaatagccctgccaaggcaggggttcctacgcacccctcctactcattctctctcgggagatctggtttgcagacttttgcagacaaagaagccaatgtactgaaggaaagtttcagtgattttcccaaggtcatactacttaaaattagaaaaaacaaaacaaaacaaaaaaaaacccacmaatcccaaagtaatctgaggtcagattccccaggaaatggtgtggtgactgaacgatgccaatcagtctgataagaagattgagatggaatatgaggctggtgaaattcacaaagaaaaatattgagcatcaagggtgtagcagttcccactgttaccacctttaaatgacatgtttggtctgaaacaaggaatgccatcaaaattaataataacaccaactaatattctttgaacatttactgtaagcaggcaccagtctatcagctgtacctgccataacccatttaaatatacacatatttaaacaatagt

SEQ ID NO: 593603 - DNA, 482 bp, Homo sapiens
ggggttcctacgcacccctcctactcattctctctcgggagatctggtttgcagacttttgcagacaaagaagccaatgtactgaaggaaagtttcagtgattttcccaaggtcatactacttaaaattagaaaaaacaaaacaaaacaaaaaaaaacccaccaatcccaaagtaatctgaggtcagattccccaggaaatggtgtggtgactgaacgatgccaatcagtctgataagaagattgagatggaatatgaggctggtgaaattcacaaagaaaaatattgagcatcaagggtgtagcagttcccactgttaccacctttaaatgacatgtttggtctgaaacaaggaatgccatcamaattaataataacaccaactaatattctttgaacatttactgtaagcaggcaccagtctatcagctgtacctgccataacccatttaaatatacacatatttaaacaatagtaataa

SEQ ID NO: 593604 - DNA, 538 bp, Homo sapiens
aaaattataaaagataggtagaattcataaaacaaagctgtaagtcaaatttaagagttgttattcgtaaactttattgtggtggcagaactttagagttctgatttataacataaatcatttatatctcaagtgtaaaataaggttgggaaaatcaaatccctttatttcagatttattgcatgatttgtaaacctgtccctctgtttgtatattttttcctgtgccatgtacataaattttgaatgtttcaggattttcatgtgtgttttataatcaatcacatactttcaaaaactgtgactaactgtgatccctaaagaatgcatacaaatactagtctagttcttccatttaacaggaaaagatttatacgtggtaagtatacyttctagtctgtgttgattcaagcataacttcataaataagaataacaataacatttctttaacccgcattcagcttctgagtctgaatcctatctgggagcatagcatgctcatccaaaaggagccatctctttagaaagcctgaatct

SEQ ID NO: 593605 - DNA, 499 bp, Homo sapiens
acaatgacaagaaagaatacagtgtctgttgttgagaagctcacagtctagttgactacttctaaaatgctagtgatggaacttcatagcagggctttcaaatgtaccattggcccccaaagctatttccacacctaayaacctaaccgaatgtaagctcctctgctttaactccttttcatcattgaagattgcatttcaaaactgtctccataggaaaccattgcctggctgcctgcaatcaaatctaacgtaaatgcccatgcaagtcttcatgtaacccatatcgcatttatattcacttgttcaatatcaattgatttgatggtctataggctgtgagggaagaatctacttttatctaccttggaatttgtacagtgactggtttacaataagaattaaataattacttggtgtttatgccattgaatggtggacagcaatccagaatcaattgaatgagaactttttgaacactattcatgcatcagacact

SEQ ID NO: 593606 - DNA, 577 bp, Homo sapiens
tttcagctccatgattctccccgggaagtgttttgactgaaagccaaaaagtcaaggctcctgtgcagttaagagtgtttttgaacttggaaagaaagtgtatctgtcactggatttgtggggttctcctgcatgaaagacattcatttaaaatgtttcctagagtgtcaacaggtagtatataattgatcaagcattttaggagtgaagtgactaaacatcatcccaaaggaaggcttagcatcagagaattatcgttctttggcttcccttgacaaggggtataaatcagcaggtggatgcgcctgtcttgcttggagaaattgcagctttataaataaaaacactaatccatgctgctgctgaccagcctctgctgccagctcacaayttcagtctctcaccagcctgccctggggaactttcccattgccagtgttgaatattttgtactgttttaaatataattctgttaaatagtaacaaagaaaaatacgaactcatttagaacatttggacaatgtaggataatgttttaaaaataaaaatcattcataatctcactacccagagacaa

SEQ ID NO: 593607 - DNA, 560 bp, Homo sapiens
ccattgaatgaggcaaaatggtttgccctcttaccagctatgataacttattctctttaaatgtcagtttccttctttttccaatgatgacagtaatgatacctattgtgatggtgaagagtaaatgccatgatttatcaaatatatctaacactgtatctgagagrgtaaaaggaagttctccttaaaaatagattatcaaaaatattaaataaaattatttaaatatattatatatggtttgttgctatgtatcatttttaaattacatattcagttacttaaaatatagttttaaattttattgcatggaattgagaaaaccatcctgatggaatagtgtgataaaaccactatatttgctagcaacaaaagccctacatttgagtcccaggtttaccactgtggttacttataaaagtcatgtaccttcttgtgcttccgttatatcatcttatcttgggtatcttaggatctgccatatgtttcatagtgttattatgaaaattacttgtcactttccaagtagatgattctgtgatgtattcaatgtcaggctt

SEQ ID NO: 593608 - DNA, 625 bp, Homo sapiens
ttgtacattctaaaacactatgtgaatcctcacattttgatgctgagagaatagtgaaatgggaaaccttaaggtcttcaaatcctgtcttgcttgtgtaccgttttacacagttccacccagtgagcacttactacatggagtgtatatactagaaggttcaggaatacataggaatacataagaatacatrgcaatatatgtattatgccatgatctctccctaagggaaagggaggggagaggtagaagtatttacccagtgcaatagtaatacaagacagcagaagccaagagttaaatagtcgatgcagacagtaaacatgtgggtttacagggaagatggtgtggggaaggctgcaatactgcctcattggactctcatgtcactgaaggggacacagtgtccaaagggctctcatggctagttaggacacagccacacagccagcagccgattccacctggctgctctccctgagaagtacctccaaggtaagaccctggaaataatcccagaaaagaaggagcgatgagttctggactgatgatttggtggaaaacacagccctctaagagtgtgggataagaaggaggctctggcttcctttgcaaatacactact

SEQ ID NO: 593609 - DNA, 531 bp, Homo sapiens
atgctacaataaacatatgcatgcatgtgtctttatgatagaatgatttgtattcctttcagtatatacccagcaatgggattgttgggtcaaatggtatttttgtttttaggtctttgaggaactgccacaccattttccacaatggttgaactaatgtatgtgcccaccaacagtgtataagtgttcctttttctccacaacttcactagcwccagttattttttgactttttaataatagccattctgactggtgtgagatgctatccttagcaaacggacgaatagttaacaggaacagaaaactaagtaccccatgttctcacttataagtggagctaaatgatgagaacacatggacccatagagggggacaacagacaatggggccaatcggagggtggagggagaggatcaggaaaaacaactaacggatactaggcttaattcctgggtgacgaaataatctgtacaactaatcttcatgacacaaatttacctatataacaaacctgtacaggtacccctg

SEQ ID NO: 593610 - DNA, 524 bp, Homo sapiens
ggttaaacactaacttacataaatcaatggtcattataattaaaaggggaataaacttttatttcaagcaatgagttctctggtttgctaaatgaagtaagaaattattagatataactagacatttaagttggtttaatttttttaattttatgtacaagcttgtcagtacatgcttttaaaatatctgattaaatataaggtttctgatatttagtgaactgccaaaatttaataaaaaagtaagctcttctctgtgagatgaattgcacagaatatattgtatacagacaagcggaatgtatcatttgatattagaacagggctcttttgatggatcataaaaatatatttaaagtgtggttaagggagaagaacgacattaaacacttgtaaattccttgagagcaaatgtctaattctgaatatttaccaccaaatctcwaccataaggcaatgaagtctataaatactcgctgagtgcttaactgttctgttaaattaagattttagagcagtgggaa

SEQ ID NO: 593611 - DNA, 602 bp, Homo sapiens
ggcagtcaaattggttagcccaactcacactgagaaacttctatgtgcccagatgtctttgtaattatttaacataaattaacacaactaagtagtacttgcactacttcggtaggtactttgattattcttattttacagrtaaggacactgaggcacagaaaagttgagcaacatgcacaaggcctcttagatggcaaaaggtagagtcatgatttaaacctaattggactagttccagagtcaatattcctactttatgtcacattaactctcctggaaaaaggcaggtttcccacactggaacacagacgatttctggccaatgtggaaatgccatcatagataaaagtacaaggtcctatcaaagcttagaggaagaaaacctgatccagaatatgtgaagttgcaggagagaagttcgggtaacatctaagttaccttcaaggataagtagtagttgaggagagaacaacataaagagcttagcatagtgtctggcacattaaaagtagttatgataagatgttggtctggacagttagagaaaagctgggtcatggcagattttgtgtaacttgctgaggattaaacattcatcc

SEQ ID NO: 593612 - DNA, 602 bp, Homo sapiens
ggcagtcaaattggttagcccaactcacactgagaaacttctatgtgcccagatgtctttgtaattatttaacataaattaacacaactaagtagtacttgcactacttcggtaggtactttgattattcttattttacaggtaaggacactgaggcacagaaaagttgagcaacatgcacaaggcctcttagatggcaaaaggtagagtcatgatttraacctaattggactagttccagagtcaatattcctactttatgtcacattaactctcctggaaaaaggcaggtttcccacactggaacacagacgatttctggccaatgtggaaatgccatcatagataaaagtacaaggtcctatcaaagcttagaggaagaaaacctgatccagaatatgtgaagttgcaggagagaagttcgggtaacatctaagttaccttcaaggataagtagtagttgaggagagaacaacataaagagcttagcatagtgtctggcacattaaaagtagttatgataagatgttggtctggacagttagagaaaagctgggtcatggcagattttgtgtaacttgctgaggattaaacattcatcc

SEQ ID NO: 593613 - DNA, 555 bp, Homo sapiens
atgtgaagttgcaggagagaagttcgggtaacatctaagttaccttcaaggataagtagtagttgaggagagaacaacataaagagcttagcatagtgtctggcacattaaaagtagttatgataagatgttggtctggacagttagagaaaagctgggtcatkgcagattttgtgtaacttgctgaggattaaacattcatcctgagagctgcatgactctagctaatgcattgaagtagtaaagagacagggtcagatatttatttaagatggtctctgccaattcagtcaaagatgggtgggaaatgagcaaactagaggcagaaatgtaggaaaaaacttgagcccagcagtacatttagtgtacgtgttcaagtttcttgtaaccccaacttaccacataagggatgccaatttatggcaaagacactgttagaaattttaacgtgtaatgaatgtcccgatccctagtaagatctcttttagcggataccctgaaacagaaaaaagaaagaaaaaaggttttagtaatctcatggcttccctgaggacc

SEQ ID NO: 593614 - DNA, 555 bp, Homo sapiens
atgtgaagttgcaggagagaagttcgggtaacatctaagttaccttcaaggataagtagtagttgaggagagaacaacataaagagcttagcatagtgtctggcacattaaaagtagttatgataagatgttggtctggacagttagagaaaagctgggtcatggcagattttgtgtaacttgctgaggattaaacattcatcctgagagctgcatgactctagctaatgcattgargtagtaaagagacagggtcagatatttatttaagatggtctctgccaattcagtcaaagatgggtgggaaatgagcaaactagaggcagaaatgtaggaaaaaacttgagcccagcagtacatttagtgtacgtgttcaagtttcttgtaaccccaacttaccacataagggatgccaatttatggcaaagacactgttagaaattttaacgtgtaatgaatgtcccgatccctagtaagatctcttttagcggataccctgaaacagaaaaaagaaagaaaaaaggttttagtaatctcatggcttccctgaggacc

SEQ ID NO: 593615 - DNA, 555 bp, Homo sapiens
atgtgaagttgcaggagagaagttcgggtaacatctaagttaccttcaaggataagtagtagttgaggagagaacaacataaagagcttagcatagtgtctggcacattaaaagtagttatgataagatgttggtctggacagttagagaaaagctgggtcatggcagattttgtgtaacttgctgaggattaaacattcatcctgagagctgcatgactctagctaatgcattgaagtagtaaagagacagggtcagatatttatttaagatggtctctgccaattcagtcaaagatgggtgggaaatgagcaaactagaggcagaaatgtaggaaaaaacttgagcccagcagtacatttagtgtacgtgttcaagtttcttgtaaccccaacttaccacataagggatgccaatttatggcaaagacactgttagaaattttaacgtgtaatgaatgtcccgatccctagtaagatctcttttagcggwtaccctgaaacagaaaaaagaaagaaaaaaggttttagtaatctcatggcttccctgaggacc

SEQ ID NO: 593616 - DNA, 481 bp, Homo sapiens
atttggattttattcctcattgtcatcactgtaaaacaaatgctatagaggatatttttgttgcttatatgatacttattaatttttattaatacttaatacttataatacttawtacttaatatttattatttttgttccctattaaatactaaaattaaggtactatttagtcttcataagtgtttcaaagtactattactgtttttcaaacttttcaaaccaaaaactttttttttagcctagatagatgaaatgtggtaggcttgcagaaaagaaaaggttgacttagtgattacttcagtagcaaaccaattttgcaaataaatttcagctagctttagaaaaaggaaggtacataattacacaggcaaggaaaatcatgtgggctaccagaaagagcactggaatgagagtcagtaacttagagccgtaggactatctaagctcctgttttgttcttactcatttgtttattcat

SEQ ID NO: 593617 - DNA, 481 bp, Homo sapiens
atttggattttattcctcattgtcatcactgtaaaacaaatgctatagaggatatttttgttgcttatatgatacttattaatttttattaatacttaatacttataatacttattacttaatatttattatttttgttccctattaaatactaaaattaaggtactatttagtcttcataagtgtttcaaagtactattactgtttttcaaacttttcaaaccaaaaactttttttttagcctagatagatgaaatgtggtaggcttgcagaaaagaaaaggttgacttagtgattacttcagtagcaaaccaattttgcaaataaatttcagctagctttagaaaaaggaaggtacataattacacaggcaaggaaaatcatgtgggctaccagaaagagcactggaatgakagtcagtaacttagagccgtaggactatctaagctcctgttttgttcttactcatttgtttattcat

SEQ ID NO: 593618 - DNA, 529 bp, Homo sapiens
tattctgcctgccacatatgtctcacaatgtatcatcaggctttaatttcactgaaatgtttagtcaggaaacatcattccctactttgttagagttagttttcctctggcctttgtgacatagcctggatccacttagcagattgtttcttcacattcctttgcaattttatttccttcctctactatagtaaaagttcatcttcataaaactttctctatcaatgacttatagaaagagtgttaygatagatatttgacaactaagatgacaataataagttattaagcatctaatgagggtcaggcactattttctgaatgttttacattcatcataatatttcatgcctgcaatgattttatattttatagggtcggtcactaatttcatttacctgatgaaacaaacagaggcagagagattgtgtaacttgcccaaagtcagagttaataactggaaatactaagttctaatccaggagtttgattatagaacttgggctccagaatgctgtgccatacttcc

SEQ ID NO: 593619 - DNA, 595 bp, Homo sapiens
caatgacttatagaaagagtgttatgatagatatttgacaactaagatgacaataataagttattaagcatctaatgagggtcaggcactattttctgaatgttttacattcatcataatatttcatgcctgcaatgattttatattttatagggtcggtcactaatttcatttacctgatgaaacaaacagaggcagagagattgygtaacttgcccaaagtcagagttaataactggaaatactaagttctaatccaggagtttgattatagaacttgggctccagaatgctgtgccatacttccttcttgtgtgaatggatagcttctcgactatcatggctttatgccatcgactgaagattcacggatctagttctaacctgtctcccattctactactatgtatgctcaacatttacatttaaataccccttttaattaaaattgctcagaagttatcatgacaagaatgaagcttgaaatggttaccatttatggtatctctactttgtttcaaattctgtagtaggtgctgtacctaaatatgtattttcctccttaatttagtttcctatattatctggcaaggtg

SEQ ID NO: 593620 - DNA, 492 bp, Homo sapiens
gaagcttgaaatggttaccatttatggtatctctactttgtttcaaattctgtagtaggtgctgtacctaaatatgtattttcctccttaatttagtttcctatattatctggcaaggtgattgtcgttggtcccatttgacatccaaggaatcttgaagctgaggtattttaagcaacttagtactccrccaaaaaatattcaaagtctatgttctcttatttatgcctaggaacctcacttatagtgtatctattcacagatactcctcaatttaactgtcctgtttctatctttctagtattcagctcaaaactcatgttcatgtttgctttttttctcgatgacacaaatattcatttctcagaccagtcatgtttcctctgcaatattgcttctacgggtacatgtaactccctactttctatcttgacagtcaagcacctaatgaatgctccagtttcatcttgcttccccactccaatagcttct

SEQ ID NO: 593621 - DNA, 492 bp, Homo sapiens
gaagcttgaaatggttaccatttatggtatctctactttgtttcaaattctgtagtaggtgctgtacctaaatatgtattttcctccttaatttagtttcctatattatctggcaaggtgattgtcgttggtcccatttgacatccaaggaatcttgaagctgaggtattttaagcaacttagtactccaccaaaaaatattcaaagtctatgttctyttatttatgcctaggaacctcacttatagtgtatctattcacagatactcctcaatttaactgtcctgtttctatctttctagtattcagctcaaaactcatgttcatgtttgctttttttctcgatgacacaaatattcatttctcagaccagtcatgtttcctctgcaatattgcttctacgggtacatgtaactccctactttctatcttgacagtcaagcacctaatgaatgctccagtttcatcttgcttccccactccaatagcttct

SEQ ID NO: 593622 - DNA, 571 bp, Homo sapiens
tttgtttgtttgtttttttgccatggaaagtaacatattcacaggttctgaggattaggttgtggacatcttttggagccattattctgtgtaccacagtataaatagcacttaaaggtacatttattttctctacggtagaaagcagaagtagttttagttgaacaacagttgggctccaccacatatgtattctatattttcaagcaatttaatggactttttatatcttaaagatagatattcatagtttttataggtttatcctaaagtctgaagaatttttaatataatgaaatcatattacatgaaggttaagttctaaattcatacatattgtcaaatcattgcacaatcaaaataattctttgaaagattgaaatattcctcaaaatgtagtatttttatttttattgcrttttggctgcagtttcttcccctctctccacctcacacagtaagagccaaagcctggaagaataatagaataaatcaggaaattctaacacttcatgtttgttttatttgtatgtttattgggttttctgagtgtttgacatgaatttgcata

SEQ ID NO: 593623 - DNA, 529 bp, Homo sapiens
ttaaatacagttttgccaccattaacataatgtaattttaaatatttttattaacatccaaaattctctcttgcaatttgcagccacttcttttctcatccccagtctcaggaaattactaacttactttcaatcattatagatttgatccttttatataaacggagtcttgtagtatgtggtcttgcatgtctacyttccatcacttagcacagatatattttagatgcattcctgttttatcatgtatcactaatttcttttacttaaatagtattccattttgtgatataacagatttcgtttatctaattactaagaaacagaaatttgagttgttttcaattttgactattatgaataatgcttctacagacatttatatgcaagcctttgtctggacatgtgtttcactttcttgggtagatttctaggagtagaaatataggatcatgatacatttatatttaactttttacagacgttgccaaaataatttttaaaacagttgtaccattttatatttcta

SEQ ID NO: 593624 - DNA, 529 bp, Homo sapiens
ttaaatacagttttgccaccattaacataatgtaattttaaatatttttattaacatccaaaattctctcttgcaatttgcagccacttcttttctcatccccagtctcaggaaattactaacttactttcaatcattatagatttgatccttttatataaacggagtcttgtagtatgtggtcttgcatgtctactttccatcacttagcacagatatattttagatgcattcctgttttatcatgtatcaytaatttcttttacttaaatagtattccattttgtgatataacagatttcgtttatctaattactaagaaacagaaatttgagttgttttcaattttgactattatgaataatgcttctacagacatttatatgcaagcctttgtctggacatgtgtttcactttcttgggtagatttctaggagtagaaatataggatcatgatacatttatatttaactttttacagacgttgccaaaataatttttaaaacagttgtaccattttatatttcta

SEQ ID NO: 593625 - DNA, 529 bp, Homo sapiens
ttaaatacagttttgccaccattaacataatgtaattttaaatatttttattaacatccaaaattctctcttgcaatttgcagccacttcttttctcatccccagtctcaggaaattactaacttactttcaatcattatagatttgatccttttatataaacggagtcttgtagtatgtggtcttgcatgtctactttccatcacttagcacagatatattttagatgcattcctgttttatcatgtatcactaatttcttttacttaaatagtattccattttgtgatataacagatttcgtttatctaattactaagaaacagaaatttgagttgttttcaattttgactattatgaataatgcttctacagacatttatatgcaagcctttgtctggacatgtgtttcactttcttgggtagatttctaggagtagaaatataggatcatgatacatttatatttaactttttacagacrttgccaaaataatttttaaaacagttgtaccattttatatttcta

SEQ ID NO: 593626 - DNA, 586 bp, Homo sapiens
gcaagcctttgtctggacatgtgtttcactttcttgggtagatttctaggagtagaaatataggatcatgatacatttatatttaactttttacagacgttgccaaaataawttttaaaacagttgtaccattttatatttctaccagcaatgttataagggtatcaatttatccacatcattgccaacacttgttattgtcttttttatattatagtaattctagtggatgttaaatggtatgttattttggtcttgatttgcatttcctagatgactaataatgttgagatcttttcatgtgtttatgagccattcctgtatctttttcagtgaagtatctattcgaatgttttgcccattttaaagttgggtactttttaataataattgtaaattatttcatcatcttagcaagtggtaggatctaatattagtcttactaataagatgtagtgtctaacttttaacttgaggcctggtacctgacctacaattaagctgatttttcccattatatttcagtctttttgattggttttgttttttcagatagagtctcactctgtcatccaggctagagtgc

SEQ ID NO: 593627 - DNA, 586 bp, Homo sapiens
gcaagcctttgtctggacatgtgtttcactttcttgggtagatttctaggagtagaaatataggatcatgatacatttatatttaactttttacagacgttgccaaaataatttttaaaacagttgtaccattttatatttctaccagcaatgttataagggtatcaatttatccacatcattgccaacacttgttattgtcttttttatattatagtaattctagtggatgttaaatggtatgttattttggtcttgatttgcatttcctagatgactaatamtgttgagatcttttcatgtgtttatgagccattcctgtatctttttcagtgaagtatctattcgaatgttttgcccattttaaagttgggtactttttaataataattgtaaattatttcatcatcttagcaagtggtaggatctaatattagtcttactaataagatgtagtgtctaacttttaacttgaggcctggtacctgacctacaattaagctgatttttcccattatatttcagtctttttgattggttttgttttttcagatagagtctcactctgtcatccaggctagagtgc

SEQ ID NO: 593628 - DNA, 572 bp, Homo sapiens
agtggataataattccttggatttgttggtaattttgtttctggttttcacaataaacaacgtgcatatttaaaattttctaagtaatatgtgctcattgaacaagaatataaaatactaactatgtttaggaataaaatggaaacatattcctctgccacatttcactctgagatgtctaccattcatgtttggtgattatccttgtatagtttatgtctataaacataaacatgcaaataatattcatacacttcagattaacatagattatatcacacacatatacttatcttggrtatagatagtttttattttctggaaattgttttgtaagttttttggtttgtttgctgttccaatgctaaccttttctcttcttccaccatccctactttacttggcccatgtaagcaatgctgatatttatctgtgctgatggaattacaccaatacatatctacagatatatttagatgtaaatatatagatacaaatatattatataaatatataaatatatttttatatatgggtatatgtatagtttttatcattacttgtttaaaaac

SEQ ID NO: 593629 - DNA, 572 bp, Homo sapiens
agtggataataattccttggatttgttggtaattttgtttctggttttcacaataaacaacgtgcatatttaaaattttctaagtaatatgtgctcattgaacaagaatataaaatactaactatgtttaggaataaaatggaaacatattcctctgccacatttcactctgagatgtctaccattcatgtttggtgattatccttgtatagtttatgtctataaacataaacatgcaaataatattcatacacttcagattaacatagattatatcacacacatatacttatcttggatatagatagtttttatttyctggaaattgttttgtaagttttttggtttgtttgctgttccaatgctaaccttttctcttcttccaccatccctactttacttggcccatgtaagcaatgctgatatttatctgtgctgatggaattacaccaatacatatctacagatatatttagatgtaaatatatagatacaaatatattatataaatatataaatatatttttatatatgggtatatgtatagtttttatcattacttgtttaaaaac

SEQ ID NO: 593630 - DNA, 361 bp, Homo sapiens
ccctccacccattctgtcatcatgtattcactgagaatctactgtttgacaggcaytgtaggtaatggggatatagagatccagaaaggatagtacctgttttaaagggtatactttgagatatctcaagggtaacattttttttgcatatgctcttacagagaccaaacaacaaatatgtggttaggcgtactatgttgtaaaaaatgtaagagtgggtaacaagagaagtggctgaacatgtgtatatagaattaattataagatgcttgggccagacctagtcaagcaggttttcatatggctcagttttgcaaatattttgacataccaattgtttaaaggaagctaaatacacaac

SEQ ID NO: 593631 - DNA, 577 bp, Homo sapiens
cattgcttctttctgagcaccatggctacatgtaagtaaagctattttttcttagttctcaggaaacatagtggtacagaggatttcttttgatatctggtcttaagctcatagacagcttggagatttttgtcatgttagtgattgagctgaagagactttctactttttggaagaakgagttaacatttgccaagtttctccatttgtcagaccctttaaggggcatgatgaacacctggatatttagtatatgttattctaaaagctaactttcatttgagaagagtctgtacgggtcctttgcccatattttaattgggttgtatgttttcttgctattgagttgttttgagttctttatatattttggcttttaagcccttatcagatgtatgacttacaaatattttctccctttctctgagttgtctcttcactttttttttttctgcgcagaagccttttaatttgatgctatttgtctatttatggttttgttgcctatacttttggggttccagtgttgactatatatccaaagaaacttaaatcaacatgtcaaagggatatctgc

SEQ ID NO: 593632 - DNA, 577 bp, Homo sapiens
cattgcttctttctgagcaccatggctacatgtaagtaaagctattttttcttagttctcaggaaacatagtggtacagaggatttcttttgatatctggtcttaagctcatagacagcttggagatttttgtcatgttagtgattgagctgaagagactttctactttttggaagaaggagttaacatttgccaagtttctccatttgtcagaccctttaaggggcatgatgaacacctggatatttagtatatgttattctaaaagctaactttcatttgagaagagtctgtaygggtcctttgcccatattttaattgggttgtatgttttcttgctattgagttgttttgagttctttatatattttggcttttaagcccttatcagatgtatgacttacaaatattttctccctttctctgagttgtctcttcactttttttttttctgcgcagaagccttttaatttgatgctatttgtctatttatggttttgttgcctatacttttggggttccagtgttgactatatatccaaagaaacttaaatcaacatgtcaaagggatatctgc

SEQ ID NO: 593633 - DNA, 577 bp, Homo sapiens
gtttcaatatatgagggtcaccttgttttatataggccacaaaccaaagctgaataaagaatgctatttgttaatcaaactgtgtgggattttgcagcctaatttgagtgggcaatattcttgctcacagcagtctaggttaaaacttaaatgacaatgcattattatgccaattaaaaattcaaaaataaatgcaatatttaaacctgtctttccccatcaacatatacatacccactgagttttagaaataacaagagaagagttctccaagcttcttttttcttcacagccctttaaaatgtcaaaggcgtaaatgaagcttagcccctacaataagagctgttattcagctgaatgataaagggctatcttttgtgttagatactccagacttacaatggcataaatgagaagcaaatacaaaaacaaaacaggtgaaagcatgcacttcatgaaagacagacccagatttctattayccatcctccatttactcgatgagtggacttgggtaaattactcggcttaatttcagtttgatcatctgtaaaatgagaagaataaatttctactg

SEQ ID NO: 593634 - DNA, 592 bp, Homo sapiens
ggtttatttgatgacaaagcccattttacaaagactaaaacagacctgaagagaaatatagcaggtttaagtaatttcccatggggaaatgaaaactctgaatccaaagtccttaaattagctactacactrtggttcacaagatgaaatgcactggtgcatggcagtgcatttttaaattgtgatgctttctatcaataaactctttgtaagtaaaagtaaattctgatgtagacttgtggttttagccgtacggtctagactactattatgagctagagaggtagttccagtgtcctttgtggttagattggtcatatgactgaattgtagctaataaaatatgatcagaaatgatatatacaacttgtagccatgaacataaaacaattccacatgttcctctatgggttttgctcctttcaacttgggaaaggagatgatctcaagggcaacctcgggaactatgaactgaggatgccagagctgtcacagtcttgaggaataatcaaatggtaaaaataataacttatgagtggctaaatgatattcaggttaaatcaattcacagtcatctgtttctttgcaaaca

SEQ ID NO: 593635 - DNA, 592 bp, Homo sapiens
ggtttatttgatgacaaagcccattttacaaagactaaaacagacctgaagagaaatatagcaggtttaagtaatttcccatggggaaatgaaaactctgaatccaaagtccttaaattagctactacactatggttcacaagatgaaatgcactggtgcatggcagtgcatttttaaattgtgatgctttctatcaataaactctttgtaagtaaaagtaaattctgatgtagacttgtggttttagccgtacggtctagactactattatgagctagagaggtagttccagtgtcctttgtggttagattggtcatatgactgaattgtagctaataaaatatgatcagaaatgatatatacaacttgtagccatgaacataaaacaattccacatgttcctctmtgggttttgctcctttcaacttgggaaaggagatgatctcaagggcaacctcgggaactatgaactgaggatgccagagctgtcacagtcttgaggaataatcaaatggtaaaaataataacttatgagtggctaaatgatattcaggttaaatcaattcacagtcatctgtttctttgcaaaca

SEQ ID NO: 593636 - DNA, 640 bp, Homo sapiens
aatcgtgtgacttttctttttttttctttattttttttttctgtagaggcaagtgtaraaatactgttcttattcagaaccacaaggcacatccttctgctgagcaatcaaaactcaggctcatttccatttcaaactgtttctttattccttgaatttgccctgtctgattttctaagagtcttgtatttcttattattcaaataatttggcagcagatacaagtagaattctgcactggttgctagtaagggactagaattgaaaagagaggctgcggaattagagagaggataaagaagcatcaaaaaatgggctcatgagtaaaaggtttcagagaagatggagttaagagaccagatgaagatttttaagaaataaataacaaagaatagagagtaacaagagtgaagaaaggagggaggaagaaggagagagagcaggagagggaaggaagaaaagaaatgaaaagttaagaaaacagtgcaaagactgtttctctacaactgtagggatgttgatagtccagctccagaggatgatacagatgtgggttcacattccagcttttccatttgctgcttctgttaccttggaaaaattactcaatctgtctaatccttggtttccatctgaagat

SEQ ID NO: 593637 - DNA, 502 bp, Homo sapiens
gttgagacaggtgcatcacttgaggccaggattttgagaccagcctggccaacayggtgaaaccacatctctactaaaaatacaaaactttttggactacaaaacccagctacttgggaggctgaggcaagagaatcacttgaagctgggaggcagagggtgcagtgagcagagattgggcctgagtgactgagcaagaatctgtctcaaaaacaaacaaacaaacaaaaaataaataaataaatgaataaaagtaatggcatgtgtacaaggcttaatccagtacatttaagacatgtccgttccttttactttatttcctcattaaaaatattgacaagaacctaacttatagcaattactcaaaaaatgtataaataatgagataagtgaatgaataaaaaagatgaatgtatatatgcaggaatccaaaagtataatcttagttgactattcggctcatttaaaggagtgagaagaagatggaaaaccccaatgtcta

SEQ ID NO: 593638 - DNA, 567 bp, Homo sapiens
ttgagaaagatagccccctgatcctgatatgtttccattctatataagctactccaagagcaaatcagttttgccagattagatgctcaaaaataatattggactgaaccacagtcatgttctttcatttttactaaatatgtacttgcatctgctcgggcagaagtgtcttcatttcttgtttttacctgtagagtctaatagagaccctgttcattgtgtaagtgctcaaaacatgcttgtcattattcttacctctatgaccaccagcaaagccactattactagacaatgtagtaaattgaaaggaacattagaattggagccaaaatctttggttgtagcctgaacacatcaggtgctaggaatgtgaccaggcccaagtaacacaaatttcttcagyttcactttttctatttgtaaaatgtaggtaacaatggtgtctatctaaccaaggtaatattctagggcctagaatctcacttttagaaatccttaccaccgtaaagaaagttcagttgagttttaaacgttatcccttaactccaaatattgctagcaattaca

SEQ ID NO: 593639 - DNA, 573 bp, Homo sapiens
catcaggtgctaggaatgtgaccaggcccaagtaacacaaatttcttcagcttcactttttctatttgtaaaatgtaggtaacaatggtgtctatctaaccaaggtaatattctagggcctagaatctcacttttagaaatccttaccaccgtaaagaaagttcagttgagttttaaacgttatcccttaactccaaatattgctagcaattacaagtatccagtattatccttttgaaggcttaaaaatgtttcatcatcctttgttaatttcagttaagctgtttttttgtttgttcctttagaagcttaaagggaatagaacaaacatggggaaaaaataactgtacccatctttccaaaataaatactaggttttcatttacaaactaaaaacacttaaawtttttttttccttcaccatctttttttagtggaagttaaacataatatatcttacaattaaaagtgctttccactgtttttgctgagaggaacccagagctgctggcgaatgacaacaccactaaagctttgagcctcaacaagataaatcctggtgcaccacttgct

SEQ ID NO: 593640 - DNA, 656 bp, Homo sapiens
aatatcaacagagaaaatcaccaaacagaggaagtatcaatagmgacaagaaaagcggaaatgcacaagtgagaagtatctgaccacataaaaataaaggaacattgtagggtctttgcagagaaatatcaaagaatcatgggttaaagaacaaggatagagaccacatgtggctgaaggaagaatttggctcagagagcaggagtgcccttgaagaaagagagcgggactcagtggtagacaaagatcatcttgggggagtctgttagttgagaaagaaaagaacagacaggtagaagaatgagaacaacaagagaaaactgtgttcttataattgttataaatttgccctacagttccaaagtggggaaaggctgagtatgggggcagggaatgtggccaggagagaagaattcacagagttcacagaaagctttgtctctgaggaatgttgctaagtcaggggatatcctctcgggagatatatcatggcaaccttgatgaaaaagacccccaggtgagtccagttcagatgccaggtcatgatgcagcgtttccatccccccatggggaggactcattcatctctatcttaaggaagtggcccttggtcagcaaattataaacccttgctgcacgaatgaatgaatggtgcc

SEQ ID NO: 593641 - DNA, 524 bp, Homo sapiens
gcagccaggcagccccatatattttcctcaaattctgatgacttcacaatttctattttctcatattcaatataccattttcttgaaacagtctgatgttgttggggraggggatggaacaggagggggaacatttattccccattcctcatgttcctttatagagggacctccaatagagtgacattcctgacctcttgccccactcgattggcgcttctggaagaaggaactgaaagcactcatctaagtcgtcactctcttgggatccacttgcctgcagaaaatgtgcattctgaggttagaggagcaggcattgtcctactggtttgggtgaagttggagtgagggataaattcaattcaggagagtattcgcaagctgtgtcctccagcagagcttttttttttatcagtaataaaggtgacactttgatctccatctgactgagtctttcgtgtctcttataattagttttgtactaccctgaaaaggtttacttctctctgtatgttgctcacttc

SEQ ID NO: 593642 - DNA, 579 bp, Homo sapiens
gtccctagaaaaggtttttttatacaagttaactttaataaatccaaactcaaacatttaccagctggataaaaattgatatgtgtaacactggaatacatagaaatttcagcctcatcttccagcctgggcagccgagattgcaacactgcactccagcctgggtgacagagggagactctgtctcaaaaaaaaaaaaaaaaaaaaaaaagaaagaaagaaagaaagaaaattaaagctcagtacaacgactacaaaatgacacagctgaaagaatgactctgtagttttctaaaaggaagtctctactccttagtgaataatttttcacttaagtaaaaccaagaattctgaccttttccctctcctctctagtaacacttctcttccagttctactgtcaagataaaagcctttcccccyaactatgatatgttaaggcttttaagaaagtgtggacaagaaagtcaattatgggtttaagctttgataatatactctaagttttcacagaaaactaagtgatttgctcccttttccacctcacttactctgtttggatgcatactgcaagagaaa

SEQ ID NO: 593643 - DNA, 603 bp, Homo sapiens
ccagtctgcctgagagatcccttctttgagcaagttgtttcattgtaattattaatggcattatcttttacttttaaattgttctgattgagttgactaattatatgttcaccatctgtcacatgggatctggtaactgggtttcagcgaagccaaattagcttcaaaattaaaagaayctcccattccattccaatcccaactactagaacttctgaagataaactggtcgaaaagacaggagccattgcttccaggtgttgttttccaactacattgtgctaaatgacctacagtgagctggcttggggttcagtgctggcctggaagggatccatataactgtcactatgcaacaggtccacatgggtttttcttcctaatccttctcactagtaagttacaaagagaactttggggacctgctttgtttgtatttattgaccatttaaaaatgagttattgtttagaagacattactcttgttagattttattgtttggagagttccagaacacttttaaaccacttttagaagaataaagcaaaatgcagttcagtggtcataaattcaaccagacaggcaatgtagtgagaaggtaa

SEQ ID NO: 593644 - DNA, 576 bp, Homo sapiens
gttattcatgtataaggctggctgcaaaatccttcataaataaaagtatacattataagtgcacatagtagattctctttttatttctactgttcacagaggcataaataaggaaaaaatatttaaagataagagtctagtgatagtagaagttttgatccatgatgttgggaaaagctgttaacattaaggatgccatcttcttctggggaaaaactttcctggttagttttactttaagggtaccaatgggtgtacagttccaggagtgtggagagacccttctcagttgtgagattatgaacccaaggttcaagactccaaagttttgctgtagtgtaaatggcaaggacagtctttctctgatgttctcagaagatccaaactctgggttctagattgtgaaggaattgtactcagtgaaccataaaaaaagttcttttcctggtgaaaattcactgtagcataataatctgctcttataacatcaggcctcttgmatgggaaagcttttttacaaccagaaaacatgcattgaaaatgacaattgaatgaaatccctttataaatgtttaa

SEQ ID NO: 593645 - DNA, 427 bp, Homo sapiens
caagactccaaagttttgctgtagtgtaaatggcaaggacagtctttctctgatgttctcagaagatccaaactctgggttctagattgtgaaggaattgtactcagtgaaccataaaaaaagttcttttcctggtgaaaattcactgtagcataataatctgctcttataacatcaggcctcttgaatgggaaagcttttwtacaaccagaaaacatgcattgaaaatgacaattgaatgaaatccctttataaatgtttaaatggcccatgaggtagccaaatgtacctcaaactttgattatcattccaggaatatggaaccaaaaacttattttaaactatttctgtaatttataactcactacatcaatatattcaatttggattaatttttcttttccatgatgagtcatggaatgcagaa

SEQ ID NO: 593646 - DNA, 554 bp, Homo sapiens
atgtatttactaacagaaatagaataagttagtttataagcatgtagtcaatattgcacttagggtaaacaaatgaacaaaacaaaaaagtatctagattgaacatgacttcagagctaacaaatacaactagatctcatgaagatatgagatcaatataggggcttcttgatatcagaacaaataaaataaaatcaagaaatagcattacaattaatgtcttaaatcaacataaaagaaaataattcagctaagaaaatagaagagcaaagcaatgatcccaatggaattcttgtacctgtaggatgctaagccagtgacattttctatccagaggcagcttgagtattattgcaaactaagccagaggaagagccaccccactgagactacagaaaagcaggatcaatattttctctattgaatagtttcaaataacagaaagattcccagaacacagttcatcctcacctctaaaaatgaaattagaaacccattacaaaacccaatttgtccataatatctcatttatasaacatagctgtgctttactt

SEQ ID NO: 593647 - DNA, 533 bp, Homo sapiens
ttatctacagattacctcaggcatcctctgaggatgagttgtttctgagaggacacagtgtcattcaatctgaattcagtaattacaacaattcatgtggaagatagaaatttaccctctgctttacagattaaagaaaacgagcttgcaaatgccaccacttcaaaaatattccaagtctcatctatcatttttttttagagactttccaaacttcaaaagtaccctaagtctgaaatatgcatactgcttagatatatgaaggcttataacttttgatctagaaacaacttgtatgaactgaacacaatttaggtatttggcacagaagaatgggactgtacagaagaaggagggagtatgtatttatttttattttattttatttcatttatattttttgagatggagtttcactcttgtcacccaggctggagtgcaatggcatgatttcrgcccactgcaacttctgcctcccaggttcaagtgattctcctgcctcagcttcccaagtagctgggattacaggcacc

SEQ ID NO: 593648 - DNA, 554 bp, Homo sapiens
ttgtatcacttgccccacagataccctcgtgattagaggtcttttgctggaggttgactgtgctgtctggtaagtattgtagttgttgtgrtaaaaacagatagatagaagattcaggaaccggttagtttttgtgaagttttctttcttttaaaaaaaatattcccaagcactgattaataagctatttcttttaatagcagtagattaaactttgaaattgagattttaggactctcaactttcaagaggcatctttcaagctgttgtttgtgctctttccccctcctctctgttacaattattagattttggagatttcatattttttccaaaaaaaaaaaattcatagattttcttgagttccttagaattaaaggcaagaattgtggatttagtattttaaatttccttcaaacagaagaaggttatttgtgatttctttatacctattttcagtattaacatactggttaaagtagtaatgaagaaaaaagagcctattttgtggctaaattggaaagtagctgaatgattcttttttcctatcagca

SEQ ID NO: 593649 - DNA, 453 bp, Homo sapiens
tgcctactaaaatatcgaagcaaattatttgtattttctttgttccttaagactctcataattcttaaatgattgagaatctcaaagagtatatgyttatattgattatattgatatttagtgtggtagaattatacaattgaaattttttcaaaatctatttttagtttagatttcacagccttaccactgttgatattatgggctagataatgctttgttgtaaggactgtcttgtgcattgcagagagtttagcagtattcatggcctctaccaactagatgtcagtagtaacccatgacccaggttataaaaacagaaaatattccttgagaacagtattgttaacagaagtttttcattgaaaaaaaacttttctacaacaaaaagttgagtaaaaagtgtgtcatttgtttatattatttaaagtctctcatgttgagcttaatagg

SEQ ID NO: 593650 - DNA, 612 bp, Homo sapiens
ggttggttttctcagggaatggtgctggctgacatgaacaacatgtccaccatggtgtctaatgctgactggatccatttgaccatttgtctggtctctgccacatcccagggccaagaagctgctgcactgtgaggtctggataaatgtttttcaggtaatgagtgaacttccttctctgtggaccttagcaggagatgacttctcctcttctcttgaatggggatgataatctgtctacttacttgacaatgttgaggtgtagctcagtcaagtcatgaggtagacaggctgaatgaagcacaacaatcctcccaatccccgggacaagggggaagcagccagtgccgcctcatgatgctggccgggagggttggcccatgctagggaaagccagaagttctgttgctctgtgtccccttgccccttgccccaacttcccaccatacctgcttcctccaggacacctggtttcgtccacccagaaaacataggttctgtgacaggatgtttcctccctcttgccaggygtggctgggaatggaagcagtgatgctgaagaatattccaggcccactctgtcttcctccctggagatctgctccctagcat

SEQ ID NO: 593651 - DNA, 543 bp, Homo sapiens
gatttccttcttgaagggggtgagaagaagggagactgtgacttgaccaagccaatcggcaaactaccttccctcccaacagaagttgatttgttcaggagggggcatgtgacaaaagctgggccactcagagcccatctaaggacttcactgaaatgctgacataaagcagccacttgtgccacagggggaaagccagcctcaaatgaaactgtctcrcaaagaaatagagatgaatgacttgtagagaactggaaacagaaacaaaatgaaacttgcagagaaaatattgcaagtaaatgttgaacctctggatcgaaccatgcctgagtccctcctggctctgacttttcagttaggtgggtccacacattccctttttcagccaagccatttgaatgggattttctgctctttgcaaaataaagatttgcgatgacttagagaggggttaaagccatatttgatctggacacatgagagtacctgaagcctgtcctcacccagctgtctcttcccactggtctttgaggcacaagtcct

SEQ ID NO: 593652 - DNA, 543 bp, Homo sapiens
gatttccttcttgaagggggtgagaagaagggagactgtgacttgaccaagccaatcggcaaactaccttccctcccaacagaagttgatttgttcaggagggggcatgtgacaaaagctgggccactcagagcccatctaaggacttcactgaaatgctgacataaagcagccacttgtgccacagggggaaagccagcctcaaatgaaactgtctcacaaagaaatagagatgaatgacttgtagagaactggaaacagaaacaaaatgaaacttgcagagaaaatattgcaagtaaatgttgaacctctggatcgaaccatgcctgagtccctcctggctctgacttttcagttaggtgggtccacacattcyctttttcagccaagccatttgaatgggattttctgctctttgcaaaataaagatttgcgatgacttagagaggggttaaagccatatttgatctggacacatgagagtacctgaagcctgtcctcacccagctgtctcttcccactggtctttgaggcacaagtcct

SEQ ID NO: 593653 - DNA, 565 bp, Homo sapiens
aacagctccgttctgcagcttccagtgagattgacacagaagatgggtgatttctgcatttccaactgaggttcctggttcatctcactgggactkgttggacagtggatgcagcccatggagggtgagccgaagcagggcggggcattgcctcacctgggaagtgcaagaggtcaggggatttccctttcctagccaagggaagccgtgacagactgtacctggaaaaacggtacacttctgcccaaatactgcacttttcccatggtcttagcaaccagcagaccagaaaattccctcccgtgcctggctcagtgagtcccatgcccatggtcctttgctctctgctagcgcggcagtctgagatcgacctgcgaggtggcagccttgtgggaggtggtggaggggcgtctgccattgctgaggcttgagtaggtaaacaaagctgccaggaagcttgaactgggtggagcccactgcagctcagcaaggcctactacctttatagactcaacctctgtgggcagggcatagctgaacaaaaggcatcagacaacttctgcag

SEQ ID NO: 593654 - DNA, 565 bp, Homo sapiens
aacagctccgttctgcagcttccagtgagattgacacagaagatgggtgatttctgcatttccaactgaggttcctggttcatctcactgggactggttggacagtggrtgcagcccatggagggtgagccgaagcagggcggggcattgcctcacctgggaagtgcaagaggtcaggggatttccctttcctagccaagggaagccgtgacagactgtacctggaaaaacggtacacttctgcccaaatactgcacttttcccatggtcttagcaaccagcagaccagaaaattccctcccgtgcctggctcagtgagtcccatgcccatggtcctttgctctctgctagcgcggcagtctgagatcgacctgcgaggtggcagccttgtgggaggtggtggaggggcgtctgccattgctgaggcttgagtaggtaaacaaagctgccaggaagcttgaactgggtggagcccactgcagctcagcaaggcctactacctttatagactcaacctctgtgggcagggcatagctgaacaaaaggcatcagacaacttctgcag

SEQ ID NO: 593655 - DNA, 565 bp, Homo sapiens
aacagctccgttctgcagcttccagtgagattgacacagaagatgggtgatttctgcatttccaactgaggttcctggttcatctcactgggactggttggacagtggatgcagcccatggagggtgagccgaagcagggcggggcattgcctcacctgggaagtgcaagaggtcaggggatttccctttcctagccaagggaagccgtgacagactgtacctggaaaaacggtacacttctgcccaaatactgcacttttcccatggtcttagcaaccagcagaccagaaaattccctcccgtgcctggctcagtgagtcccatgcccatggtcctttgctctctgctagcgcggcagtctgagatcgacctgcgaggtggcagccttgtgggaggtggtggaggggcgtctgccattgcygaggcttgagtaggtaaacaaagctgccaggaagcttgaactgggtggagcccactgcagctcagcaaggcctactacctttatagactcaacctctgtgggcagggcatagctgaacaaaaggcatcagacaacttctgcag

SEQ ID NO: 593656 - DNA, 493 bp, Homo sapiens
caggcacctgccactatgcccggctaatttttgtatttttagtatagacggggtttaaccatgttggccaggctggtctcgaactcctgacctcaggkgatccacctgcctcagcctcccaaagtgctgggattacaggcgtgagccaccgcacccagctgaaagcaagatcttgaagagatatttgtacacccatgttcacagaagcaggattcacaagagccaaaagggagaagcaactcaagtgtccatgtacagatgaacagatgaaccaaatgtggtttgtacatacaatggaagatgattcggccttaaaaaggaagaaaattctgacataggctagaacatggatgaaactcgaagcattatgctaagtgaaagaagccagtcattaaaagacaaatactgcatgattccactgacataaggtacctacagtagtcacaatcatagagacggggagtagaatggtggctgccaggggcttggggga

SEQ ID NO: 593657 - DNA, 488 bp, Homo sapiens
gctgttacaattcttctatcaaaaatctaatcttcagggctttcactgtttcattcacacagaatgaaattgaggctcaagaggttacacgatttgaccaagtcacacaactgcaaacaagtaggtgtcagtttccaggatcgaarccaggaggaagctcaaagagcatccagcccccatgctgtaaaagggattcaaggcccagaaccagaaggtgattagccttgcagcaggacagagggcagacagcaccgaagcccagctctgctcactctgctgggagcacttcccaggccactgtggatctgggccttgtcctcagcttggggtggctgcaggagcatcctgaggaatgaacccatgccagagcactgaagatgcccccaccgcccccgctgcagactcctcacccaggtctcttcatctcaaaggggctgtcatagaggcccagggctgtgacctggaggaacacactccaccttcctgac

SEQ ID NO: 593658 - DNA, 488 bp, Homo sapiens
gctgttacaattcttctatcaaaaatctaatcttcagggctttcactgtttcattcacacagaatgaaattgaggctcaagaggttacacgatttgaccaagtcacacaactgcaaacaagtaggtgtcagtttccaggatcgaagccaggaggaagctcaaagagcatccagcccccatgctgtaaaagggattcaaggcccagaaccagaaggtgattagccttgcagcaggacagagggcagacagcaccgaagcccagstctgctcactctgctgggagcacttcccaggccactgtggatctgggccttgtcctcagcttggggtggctgcaggagcatcctgaggaatgaacccatgccagagcactgaagatgcccccaccgcccccgctgcagactcctcacccaggtctcttcatctcaaaggggctgtcatagaggcccagggctgtgacctggaggaacacactccaccttcctgac

SEQ ID NO: 593659 - DNA, 399 bp, Homo sapiens
gaattcagtcttcttggccctgctgctgccccacttgacagaagagagatggatggggaggtgagaggcactgcccgcctaaccacccaccaccygtcacttctgccttttgaaatcactttcgtgggcagaggcagggatgctgatcacaccatgtgggagggacttggagggtggggcggtgactcacaggacagtgggggataggaagcagctccagagcctccctggtagtgaaagggaagggcgctagtgactcagggacagctggggaggggtgcatggggagggagctcattcccccccccagttgtgccctgcatgcctggggggtgacctcctgtggtgggccccgatcttgcccctgtggggcagtctttgccctcagcttgcttccca

SEQ ID NO: 593660 - DNA, 412 bp, Homo sapiens
gccccacttgacagaagagagatggatggggaggtgagaggcactgcccgcctaaccacccaccacctgtcacttctgccttttgaaatcactttcgtgggcagaggcagggatgctgatcacaccatgtgggagggacttggagggtggggcggtgactcacaggacagtgggggataggaagcagctccagagcctccctggtagtgaaagggaagggcgctagtgactcagggacagctggggaggggygcatggggagggagctcattcccccccccagttgtgccctgcatgcctggggggtgacctcctgtggtgggccccgatcttgcccctgtggggcagtctttgccctcagcttgcttcccagcagtagccaggcacccagtagctgcatggtgagtgaatt

SEQ ID NO: 593661 - DNA, 412 bp, Homo sapiens
gccccacttgacagaagagagatggatggggaggtgagaggcactgcccgcctaaccacccaccacctgtcacttctgccttttgaaatcactttcgtgggcagaggcagggatgctgatcacaccatgtgggagggacttggagggtggggcggtgactcacaggacagtgggggataggaagcagctccagagcctccctggtagtgaaagggaagggcgctagtgactcagggacagctggggaggggtgcatggggagggagctcattcccccccccagttgtgccctgcatgcctggggggtgacctcctgtggtgggccccgatcttgcccctgtggggcagtctttgccctcagcttgcttcccagcagtagccaggcasccagtagctgcatggtgagtgaatt

SEQ ID NO: 593662 - DNA, 609 bp, Homo sapiens
catcagacttgttttggccgatgctatgtgggcaggagcatcatagaccccttacaaggcttctgtaaaagcctgcctgtgtttgccatgtctcttttccctctgctactagatagaatgctctaaataagaaccactctgtcagcttgtgtcccagagtaaaaacgacatggatcgagccacagccaactcacatcggatgtggaatatgagggagatgacactgagatttgggagtcttttgttattgcagcaaaactcagcccatcctgactgatatgactcatttgccaaagtctcttagaaagtgggatatctcaccttaagaggatgtgaatggcctggagtaggatagcatgcccaattccttgtccagagattacggaaacatctatgarttcagcatctcttacagaagaacatgataattaccttgagtgcaacccattccttatgtatatgaagagctgacagaaaatgacttcctcattcttcacctaagcaaaagagcatctacacctgaagagaccacttgcccttcactgacattaaatttcatcctactgactctgacctatctccttaggctgttgggcttattttttgaac

SEQ ID NO: 593663 - DNA, 516 bp, Homo sapiens
aaatgtttaaaaagcttctccttactattcatacaatatgtgtgtgtgtatatatgtgtatatatatactcacctaataacaatgagtgcttagagaatagatagtactgcattatgaccagggataaaaaatatgacactcagcaataactgtcataataataataacaataataattaaataacagcaactgaaagaaaagcgtcctttcctgaggaacttgtgcaatgcatcagtcatgcaacataatctttttcttgccatwtagaaagcaattataggcaaagggatacatatacacatatatatgtatacacctatacatgtatatacacatataatcaatttagattttaatcatcatattaaaatatattattatatgtataagttacactgcaggagagaatatgcctaagagaattatggaagctgtatttgaaaagaaagatgtgtttggtcttggtgttgaaatagtttactctgacgataatatataggtgatattaaaggaa

SEQ ID NO: 593664 - DNA, 510 bp, Homo sapiens
atcacaccactacactccagcctgggcgacagaggagactctgtctcaaaacaaacaaacaaacaaaagcaaggtggctggagaaagaggctaactgatgttcaaagggcaggtcatgttgtccagatgattattgaaagttttctctgaaacagatattcctctgaactcattttttccattttttcaattctgtaatacagttattttccaagtttctgattatacggccaaatcattagccactgcctcaaattaatacagatctatctatctatctatctatctatctatctatctatctatctatctrtctatcatcatctatttatttctcaaaacagactaagaaatccaaaatggattgcttgatgtgtggcccactgggataattttcattcacacttgtctttcaaggacatacttctgattgagcatctaatgctgcagtagtcccttgtaagtcggatttatcatattgacaaaagacctaagatatttcttcttcta

SEQ ID NO: 593665 - DNA, 615 bp, Homo sapiens
acaatttgagatgagatttgggtagagacactgagtcaaaccacatgaattagccttggcaaagaaattttggctaagtctccaaaagcatttgcaatcaaaactaaagtagaaaagtggaatgtaattaaactaaagaacttctgctcaggaaaagaagctatgaacagagtaaacagaaaacctacaggatgggagaagatattcacaaactctgcatccagtacatgtctaatatccagaatctataagaaactgaaaccacttgacaagtaaaatcaaataaccccattaaaaaatgggtaaatgacatgaacagacacttctcagaaaaagacatacaagtggccaacaaacatatgaaaatattttcagcatcaataatcatcagagagaygcaactcaaaaccacaatgagatactatctcacaccattcagagtggctaatattaaaaagtcaaaaaatcatcacatcctggcaaagctgtggagaaaggagaactgttatactctgttgttggtaatgtaagttaaccactgtggaaatcagtctggagatttctcaaggaacttaaaacagctatcattcaagccaacaatctcattactgaatg

SEQ ID NO: 593666 - DNA, 338 bp, Homo sapiens
gtaaaactgagagataaattaacaatatttctaaatgctgattaaatattttactgcttttttaacatttctcatttttcagcctctgcaataaatgcctaagttgtaacagttgtaagactgaaatctttgtaagtttatatttcaaaaaagaaaatactctacatatgaatttcacctattatgtaaaacaaatacattgatatatatatatakagagagagagagagatgaacatggtagatattttactgaaagtcacttcagtaataatatctaaaatagaatctgctatattttcccaaaattagactatttcttattgtcattataatcaa

SEQ ID NO: 593667 - DNA, 542 bp, Homo sapiens
gttactagaggctgagaagggtagcrgggaggggaggatacagcgaggatggtcaatgggtgcaaaagtatggtttgatagtttgaataagacctagtatttgacagcataacagggtgactacactcaacaatagtttattatgtattttaaaataaaataaataaaagactggaattcagattttcttaatacaaagaaatgataaatgcttgaggtgatggatatcccaattatcctgatttggtgattacacattgtatcccagcatcaaaacatcatatgtgacccataaatgtatacacaaaaataacaagaacaacggatagaaagcagttacagaatgatagacatgaatccaaatatgtcaataatcactttaaacttcaatggtctaagtataccaattaaaagatagagtggatacaaagttgagacccacctatatgttgtcatcaagaaatctttaagagagagacattaaaagtgaagggatggaaaagatacggcatagtagcagtaataatctaaagataacagag

SEQ ID NO: 593668 - DNA, 561 bp, Homo sapiens
gcttctgtaattctaatatgatttartgtatattataaataattataattgttatgtaaaattattgtatgccacaaaagtaccagattcctagtcaattacagctttaacagtggctatcctaagacttttgtcatccacaggcaattttgtctttttttgatctgtctcaaaaggcagtttttaatcagagatagggatctgatggggtattcttgaatgcacctctctgataactttaaaattgttgttactggaatagaggaaaaaaacaaacttctggggctctcatggggagttgatgtattaaccattgctaatccttttgtttccagagtcaaaaaaacttagttctttttagctatttacatattttagcaagtgagtaaagtctcctgggagataaatttggagcatattgctttcattctactttatttctccagcatttagaacctatttgggagtaatctcaacttacggcagtatagttattagcatcagtgcaataagaatacattttcattcataacaggacacaattggagaaactgttttctt

SEQ ID NO: 593669 - DNA, 392 bp, Homo sapiens
cctgggtatcacaagtagagactgcagaacagcaaagattgctgcctgttccttcctctggaaacttcatcccagagaggtatccgccagatgtcagccagygctcttctgtatgaggagtctgttgtccctactggggaggtgtctcccagtcaggagacatgcatgtcagggacccacttgaggaggcagtctgacccttagcagaactcgaacgctgtgctgggagatccgctgttctctttagagccatcaggcagggaggtttaagtctgctgaagccatacccacagcctccccttcccccaggtgctctgtcccagggagatcggggttttatctataagtccctgactggggctgctgcctttttttcagaaataccctgccca

SEQ ID NO: 593670 - DNA, 592 bp, Homo sapiens
aaattagtagtgatttttttaaataataaaaaagattggaagagtgctctttaaatatttagcaaaaattttctgctagttactatgtacaactgattacatgtctttatgttcatatgtttttcagattttctgtttcttcttgaatcgcatttatgttttctccaygaatttatctctttcccataagacttcaagtatattggtattaagatgcatacattcaatatttactgagcagcctcgttgtgccagaccctattctaagtgcatggactgtgagattccttcattcatgacccgtatatcccagtgatcactagaacattaaacattccttcaatatactgacaataagcctgaagacccatatcagtaggcaatctatagcctaaatgttgtttttggttttacaatttcccatctctttactaataggaaagtcttccaatctttttagattttgtggagctagtggatactgaatccttacccaaccatttgactgtcattagtttttattattcagtgcctgtatgtttactgcatacgggcacctcagggagcttcagcagctttactttaagagaac

SEQ ID NO: 593671 - DNA, 496 bp, Homo sapiens
ggtcttgctatgctgccttgaatggtctcaaactcctagccccgagctatcctcccacttcagcaacctgaagtgctgggactacaggcttgagccatcatacctggctaataattattataataaacatttattgagcacctgctatggcccacatgctattttccatgctttgctcatttaatttttataaaagcttatgacagagacattatttttgtcctcactttatagatgaggacattgaggcttagagaagttgartaatttttccaacatcatatagctagtgaagtggtaggctgaaatttgagcccaggtggacttcacactttcacttctaaccactacagcaaaatgtatgcttggaattgtcagctggggcagatcataagaagttgagaatataaaagattatattttatactcagtgagaagcagttgataatgagcagatgcaggatgaggagaggaagaagatcacatgatgggagac

SEQ ID NO: 593672 - DNA, 496 bp, Homo sapiens
ggtcttgctatgctgccttgaatggtctcaaactcctagccccgagctatcctcccacttcagcaacctgaagtgctgggactacaggcttgagccatcatacctggctaataattattataataaacatttattgagcacctgctatggcccacatgctattttccatgctttgctcatttaatttttataaaagcttatgacagagacattatttttgtcctcactttatagatgaggacattgaggcttagagaagttgaataatttttccaacatcatatagctagtgaagtggtaggctgaaatttgagcccaggtggacttcacactttcacttctaaccactacagcaaaatgtatgcttggaattgtcagctggggcagatcataagaagttgagaatataaaagrttatattttatactcagtgagaagcagttgataatgagcagatgcaggatgaggagaggaagaagatcacatgatgggagac

SEQ ID NO: 593673 - DNA, 376 bp, Homo sapiens
ctaggtgtgtgccaagagctgtcaggtgagagtgaagaaggctggctctagaagcagaaccaccctgcttcatgcagaggcaggagtgggatsggggggaagcaaaccaggcacggaactgagctggaaggtctgcagtggctcttggctctcaggatgttggtcctgctggctgacacagaaaggtatcctcagcatgctgcttggtaaagacagcacattagtggacagtatatcttttacgagagcaggatgccatttatgttgatgagaaagtgtgtgtgtgtgtgtgtatttctaaccattcataaagaaggtgtagagggctatatatagcaaaatgttaataatggctatgattggatggataaattat

SEQ ID NO: 593674 - DNA, 655 bp, Homo sapiens
catttattgtctagaggcacatggtgatcgtgacagggaagactagcccaagttcatctgaacagctgtggttcctataccctaaattctcagcatctaaagatttttaccttttatggaatcccctttgtctccttctaaaagtactatttgatctttttattgcattaaagttactggtgctttaagacttggtccatctcatttgagatacctggaaacactctagggagaacaaaggtgaaagatctgggcaaaggtcagtaaaatattctacccaactacaggccagaggacagcttcagttttgtctctccaacatcaygggctggaataaacagaggaatggttctataattctagctcagagacttccagttctagtaatatggcgagctatatatgcaaaccatctcccctactggggaaaaaacctaattctagagtaaaatatattttttaagattcttaatatcatcaaaaaagtaaaaaaaaggaaaaggtaagcatctggaaaattgaggcaaattttcttccaagggcaatggtgagctagaccaacttgagtttcagttttgccaaaaattgagaggaacattaagtcaagatccagggccaaagtggagagtctaaaggagaccctctgttatgcttg

SEQ ID NO: 593675 - DNA, 662 bp, Homo sapiens
ctcaattctgaggtccagagaggaaagtgatctctccaacattacacaacttggtggcaaggtctgaacgtcccattctgcaaggtgtgcaccctggtgtgctgagtgacctgtgcctgtgggttccactgagtgacctctccttgtgggttccactgattttggctttagaacagtgctctgaatgaggagtcctctactaggggagagcaaagcaggcaaggaattgcagtgctcagggctcgccacctgctgatgtcctcaktgccttgcctacctcatctctttctccaacacctcagtcacttctgggctctactttccatcctgtccatccactctgagacctgccaggccatctgtcctgacctcttcttctggatgtgatggaacgatatctggtagagaagttggagcaatgggtggtgggccagggagacacgaagagcactcatcatgagtcacagactcggcacaacctccttcctatgtgcagggcacccctgctgcctctcactgaagcacctgcactgtgatcacttccaataccgagccatggtcaagcctgttgaatggcagagtcatcatcttctagactcaaaggaagatcttagtttaggcaagagaaaacataaatcctcaaaagataattaatacggaac

SEQ ID NO: 593676 - DNA, 569 bp, Homo sapiens
gatgagaactgctggtctcaattctgaggtccagagaggaaagtgatctctccaacattacacaacttggtggcaaggtctgaacgtcccattctgcaaggtgtgcaccctggtgtgctgagtgacctgtgcctgtgggttccactgagtgacctctccttgtgggttccactgattttggctttagaacagtgctctgaatgaggagtcctctactaggggagagcaaagcaggcaaggaattgcagtgctcagggctcgccacctgctgatgtcctcagkgccttgcctacctcatctctttctccaacacctcagtcacttctgggctctactttccatcctgtccatccactctgagacctgccaggccatctgtcctgacctcttcttctggatgtgatggaacgatatctggtagagaagttggagcaatgggtggtgggccagggagacacgaagagcactcatcatgagtcacagactcggcacaacctccttcctatgtgcagggcacccctgctgcctctcactgaagcacctgcactgtgatcacttccaataccgag

SEQ ID NO: 593677 - DNA, 626 bp, Homo sapiens
atctgtgcagcatcacccagatcaatgtttaggatatacccatcaccccagaaacttctttcagtcccctttcctctcaatgcctcctctccatcctcccagaaccactattttgtcatgtagcaccgacagtcttgaacgttggggttatatagtatgaatgcttttgtttctggcacctgttgtttgacataatatttttragattcactcacactgctgcaagtttcagacactgcttcttctttatacctgagtcatattcctttatgtggatatagcataatttgtctatccattcaccggtcaatggacatttggtctggttttaatttttagctgttataaataaaggcatacatgaatattcttgcacatgtcttttttgaggacatacatactcatttctcttggataaatgtctaggagtactattgctggatcagagagtaggatcatagtcaactttattagaaactgccaaacaattttccaaaatgttgatcccattttacaccccaccaacagtgcatgagaattccagttgctccacattctctcaaattcaagcacaggtttttaaaggtcaactgattgtctgtttcctgtgtctactccctgtgcct

SEQ ID NO: 593678 - DNA, 500 bp, Homo sapiens
ctccctgtgcctgcagcaaatgcttaccatttctcgatggcctcctatatgcctattaagcaaacatttactttaaatgtcacaaccctgcgaagcaggtatttttatttccttttaacagaccaagaaagttaagtaatactctcttctcaccgttaataaccctctgcactargattcagtgtctgtgctcttagctttgggtgatggccaaggagagaggcaggaagagcctcagagaacctttctgtcttccacctaaacttgctgtttgcagagcaggggctgaggcatgaagacctgtgcacttgtatgaggataccaatttaaagcctgtttatcaagcaaggtttggtctcatttctccctgcagtcagatataaatataagtcctgtaataaaagggcttgtctcaaagacctgcaagaaaaatgtcatcatttacattgcttatttcttttaacgtatgtgaacacagatttcagtttctaacatcacac

SEQ ID NO: 593679 - DNA, 622 bp, Homo sapiens
ataactaggctgtaacttttaagatacttcagagaacgatgaaaatgcacatccatatacttcaggcatctggaggatgtgatgtgagggagtgccgggaaactgactttcaaaaatccatgcccattttactggattaaaattgtttaatctaactagctgttgaccttggtttgtgatattgaaaattctgggcctttctcatacgcttctgtttaatgtgactcctcttgtatcttacaatttccacgttgtccttagactccttgatgttgatgattgcatgacatctatctttgggaatctcgggaacctttttaaagtattagtaagagctattgatcatcacaaaarcccctgagagaaaaggaccacttcatccaggcttgttgtgaattatttacagaaaataacattaaaaaaatggacatccatttctgtcaccatatctagtctccccatgccaaacaaagcaaacaaaattgtcaaagcattggactttctaacacagaggagccaacaaatgtgatgtcctagtccagactggaagggctacttgatgtagaggcgatttgcagcatgtcagatggaaatgaaaggggacgacatcgggtccaagagg

SEQ ID NO: 593680 - DNA, 622 bp, Homo sapiens
ataactaggctgtaacttttaagatacttcagagaacgatgaaaatgcacatccatatacttcaggcatctggaggatgtgatgtgagggagtgccgggaaactgactttcaaaaatccatgcccattttactggattaaaattgtttaatctaactagctgttgaccttggtttgtgatattgaaaattctgggcctttctcatacgcttctgtttaatgtgactcctcttgtatcttacaatttccacgttgtccttagactccttgatgttgatgattgcatgacatctatctttgggaatctcgggaacctttttaaagtattagtaagagctattgatcatcacaaaagcccctgagagaaaaggaccacttcatccagrcttgttgtgaattatttacagaaaataacattaaaaaaatggacatccatttctgtcaccatatctagtctccccatgccaaacaaagcaaacaaaattgtcaaagcattggactttctaacacagaggagccaacaaatgtgatgtcctagtccagactggaagggctacttgatgtagaggcgatttgcagcatgtcagatggaaatgaaaggggacgacatcgggtccaagagg

SEQ ID NO: 593681 - DNA, 622 bp, Homo sapiens
ataactaggctgtaacttttaagatacttcagagaacgatgaaaatgcacatccatatacttcaggcatctggaggatgtgatgtgagggagtgccgggaaactgactttcaaaaatccatgcccattttactggattaaaattgtttaatctaactagctgttgaccttggtttgtgatattgaaaattctgggcctttctcatacgcttctgtttaatgtgactcctcttgtatcttacaatttccacgttgtccttagactccttgatgttgatgattgcatgacatctatctttgggaatctcgggaacctttttaaagtattagtaagagctattgatcatcacaaaagcccctgagagaaaaggaccacttcatccaggcttgttgtgaattatttacagaaaataacattaaaaaaatggacatccatttctgtcaccatatctagtctccccatgccaaacaaagcaaacaaaattgtcaaagcattggactttctaacacagaggarccaacaaatgtgatgtcctagtccagactggaagggctacttgatgtagaggcgatttgcagcatgtcagatggaaatgaaaggggacgacatcgggtccaagagg

SEQ ID NO: 593682 - DNA, 653 bp, Homo sapiens
ggcaaaattgtactgggagatatttggagccatcagaactttcggcactcttccaaatcactgcccaggggtgattattttccttgtgttgccttccccttggaaaaccattacttgcttttcagttccattagacttggaaagatgccatatatgtgggctttcagagtcctacaatgcacaytcagttttctttgattaattgataagttctaatactgtttatgttgcctttattctgtttcaagtgcaaatttttccatcactaaaaacattcgtttaaagcagtagtgtgttggagatggctcctaccagctcacaagagccgaatcgaatctgtgcatctcatcccaaccccagtttggtgactttacactggtgtcttgaaatcagccattgggaacatattgacatcacagaacttggcaaacagtaaaagtagagatttttttccctccagagagcctatttatcaacacaccattggttccaagtatgcatttttttttactatagtaggaaatttaattcatttggtaaactattactaatagtgcttaatgcatggtaagtacatacacaatagatctttgtaaaggaaggattgaatgaatgagtgaatgaatgggccgcttccagatatatacaatgct

SEQ ID NO: 593683 - DNA, 457 bp, Homo sapiens
taagaatctccatcctaatggataagacttctttcttcactttggtttccaatggaccctacttgactgctataacaatggcttttaagtcaagtctgaaggaagcaactgatccttcagaaagatgatggcactggtgtggagaaaagggaamgattatatactgaaggtggagatgtaaatgatacagcctgtatggaaaacaggatggaggtttctcgaagaactaaaaataaaactacacttcaatccagcaatcccactactggctatttaaccaaagggaaaaacagttatataaaaaagatgcctgcacttgtgtgtttatcactgcataatttacaataacaaagatatggaatccacccaagtgtaagtgtccatcagcacgtgattagataaaatgaacgtggtacgtatacaccatggaatactactcagccatcaaaaaaagtga

SEQ ID NO: 593684 - DNA, 642 bp, Homo sapiens
ctctcttctgttcttctgtttctctttccatcttttctttctcattcactctcttccatccataagcaggtttgtagcgacttgcatgttttaagctcagggctagtcctgagaatacaatggtacataaggcgggtgtgctccctgtcctaacttaatagcatgaaacagcccttcagtgcagcatgctcaggacatagaggagggataatggataattaacctaattttagagcatcaaagcagctggctcttccagccacttccagagctgcttgttctttgacccatttctccttaatgtcaacatcatctttatcatcacaatcatcattmttaatactataactacttatagaaattcgatttacctggtcccatggtagaccttgtatatagcttatttaatttaatcctcataacaatccagcaagatggattttatcagcttgaaaaaattaagtaactcacccaaagtcaccagtggttagcaaagcttcctggctgccacctccctttgactttttagatgttccttttctgtgcctccctactaatgaatgtaggtccttgtcattgtgcttagccatcaagcatttttaaatctttgtgtgctcacagaaactattcctcactgatctc

SEQ ID NO: 593685 - DNA, 642 bp, Homo sapiens
ctctcttctgttcttctgtttctctttccatcttttctttctcattcactctcttccatccataagcaggtttgtagcgacttgcatgttttaagctcagggctagtcctgagaatacaatggtacataaggcgggtgtgctccctgtcctaacttaatagcatgaaacagcccttcagtgcagcatgctcaggacatagaggagggataatggataattaacctaattttagagcatcaaagcagctggctcttccagccacttccagagctgcttgttctttgacccatttctccttaatgtcaacatcatctttatcatcacaatcatcattattaatactataactacttatagaaattcgatttacctggtcccatggtagaccttgtatatagcttatttaatttaatcctcataacaatccagcaagatggattttatcagcttgaaaaaattaagtaactcacccaaagtcaccagtggttagcaaagcttcctggctgccacctccctttgactttttagatgttccttttctgtgcctccctactaatgaatgtaggtccttgtcattgtgcttagccatcaagcayttttaaatctttgtgtgctcacagaaactattcctcactgatctc

SEQ ID NO: 593686 - DNA, 610 bp, Homo sapiens
tatattcatgtaaataagttgtccttgatcaactgggttgagcctgaagttgattctggtgagctcttgttcatggcttgggattactgccaaaggaaggtctttttctttcttgaatttgaaggactggaatatttcattctgacttggttgctgtatctttgagagacatacttttttcacaaatgatactcatttcagtaaaaatgggcaaacttgagatgtaactggatgacatgagtctttaaggtctggtgtttgagctccaactacttctagagcattttgagataaccttcagattaatttattagaatggcatcatagagtaatgaaattagatattccttgaaaatgatttgttgagcctcattttgtgacaggtagaaaaactgaaacctgagaggtgttttcacattccctaaragataaatcttaacctggtttcctatgcacctctcaataccaagcttttctgacattgtttgatgggaatctggtcaataaataagaggaaagactatatcaataaattattcattgtgagtagttatgttatttgataaaatataaactgtgttaaatggaaaacacatatttatatgttata

SEQ ID NO: 593687 - DNA, 610 bp, Homo sapiens
tatattcatgtaaataagttgtccttgatcaactgggttgagcctgaagttgattctggtgagctcttgttcatggcttgggattactgccaaaggaaggtctttttctttcttgaatttgaaggactggaatatttcattctgacttggttgctgtatctttgagagacatacttttttcacaaatgatactcatttcagtaaaaatgggcaaacttgagatgtaactggatgacatgagtctttaaggtctggtgtttgagctccaactacttctagagcattttgagataaccttcagattaatttattagaatggcatcatagagtaatgaaattagatattccttgaaaatgatttgttgagcctcattttgtgacaggtagaaaaactgaaacctgagaggtgttttcacattccctaagagataaatcttaacctggtttcctatgcacctctcaataccaagcttttctgacattgtttgatgggaatctggtcaataaataagaggaaagactatatcaataaattattcattgtgagtagttatgttatttgataaaatataaactrtgttaaatggaaaacacatatttatatgttata

SEQ ID NO: 593688 - DNA, 629 bp, Homo sapiens
ggggcaacttgaatctatgtttcccagcttaaatttttaaaaaatatatattttgagctcctgcaaccaatatcctttttcccttctttatggtttagaactaaaattttttttttaactaatccttttccttcatgtgtagacctaaacttttraagggggttttcctaaagagatcaaatattttgtcctttctgaatattttcctgggggacagatctaggacagccctctgattatcctcccttggtagtattcatactattgtatgatccttttactgtgagtataggtgggacctgtaagttgtttctaaacagtaaattatgacaaagatgatatgatgtcactgtcattattatgtcacataagattatgacttctatcttgctagtagaccctctccattaactctctctctttctgattgagtgtaagctgctatatgaagggatccacaagacgaataattaagggggacctctgatcaacagccagcaaggaactgaatccctcagacccacaactcacaagaaactgaagctgaagcagattcttcctcagtcaagcttcaggtgagattctagccctgcccaacaccttggttatagcctatgacagaccctgga

SEQ ID NO: 593689 - DNA, 530 bp, Homo sapiens
ctgactgcacttccagatgattagaggtgaatccgcaggaaatttatggtagacrgttaatgggaggtgttgattgtgtgtgtgtgtgagaacacaggttgtaaattctggcttttcttgcctgcagttggctgtaacagtgtaattacattaaaccagttcctggaaccatgggactgtgatgtgccttcatctaacacatctgctttattgctctcacaaccagccccacgaaagagttggggttttggtatagcccacaacaagccactctcctctctgctcaagtcagttacttctctgactctggggtacccgtgtcaccctaaaggcaaatgcctttaagctctaggaaactttctgcttcttcatcagtggaaaatgaccttaagctacctgaaagctccctgtctcctcaaatctcatctccccattcccccaccgtccactctctagctcatctcacacctggaagtctacatgaatgaactttccaccccactaataacctgatgaaacaagtgcaggtc

SEQ ID NO: 593690 - DNA, 578 bp, Homo sapiens
tcaattttttgcttattcaatggagataataatacttaccaccgatgagttctggggaaatgaacaatactacctacctttcaccactaagttttggggaagtaaatgaggttgcaaggaaaaaattgcacctgtaaactcagctatcttcaatacgtgcccaagtttttatttacattgatgtccaccatttgaagagttaaatagttctaaaatactcattattttaaaagcagctctcctccttctccaccaccttcccatacactcatatctttyaccccattcctcacaatgtgattcatttagtttttgatgaaattctcaatgtttatatttttaggagcatgaaaagttacttacagctttgtatttactatgtcacagttacaattcctttcttttataactcctctcatctggagttaataattgccttcttgatttttttgcatggtgctctatgtatctatcactattgccaaacctgatgatagatctgtaaatctcttcttgacacattagaacacattaagaaacatatccattctgcctacctatccatctgtcttggagat

SEQ ID NO: 593691 - DNA, 586 bp, Homo sapiens
ctctggtgttggatccctcatttyttgaatagcttttccttttccctctttctttgtttattctgattaaacaaatccttcagaaacttttgagaagcatttgagaggtaaaatttctgatgcattttgtctcacactcgattgacagcttgattgagaatagaattcaaggttaggaagccttttgcaaaatattttttgtgtgtatgacagggtcccactctcttgctcaggctgaagtgcaatggcacaatcacagctcactgcagcctttgcctcctggctcaagtgaacctcccacctcagcctcctgagtagctgggactacaggggagcaccatcatactggctaacttttgtatttttcttttcttggtagagatggggtttcaccatgtttgccaggctggtctcaaactcctgggcttaagggatctgcctgcctcagcctcccaaagtgctgggattacaggcatgagccaccctgcccagttagcatggaattttgaaaacattgattcattgtcatctatctcccaagttactcttaagaagcctggtaccattctaattcttcatattttgt

SEQ ID NO: 593692 - DNA, 586 bp, Homo sapiens
ctctggtgttggatccctcatttcttgaatagcttttccttttccctctttctttgtttattctgattaaacaaatccttcagaaacttttgagaagcatttgagaggtaaaatttctgatgcattttgtctcacactcgattgacagcttgattgagaatagaattcaaggttaggaagscttttgcaaaatattttttgtgtgtatgacagggtcccactctcttgctcaggctgaagtgcaatggcacaatcacagctcactgcagcctttgcctcctggctcaagtgaacctcccacctcagcctcctgagtagctgggactacaggggagcaccatcatactggctaacttttgtatttttcttttcttggtagagatggggtttcaccatgtttgccaggctggtctcaaactcctgggcttaagggatctgcctgcctcagcctcccaaagtgctgggattacaggcatgagccaccctgcccagttagcatggaattttgaaaacattgattcattgtcatctatctcccaagttactcttaagaagcctggtaccattctaattcttcatattttgt

SEQ ID NO: 593693 - DNA, 537 bp, Homo sapiens
gaattttgaaaacattgattcattgtcatctatctcccaagttactcttaagaagcctggtaccattctaattcttcatattttgtacataatccattttttcctcttgaatcttttaaaatattcacttggacttcagtgttstaagtttttatgatgctactctttgttgtgggttcatctatcatgttgtccgatgggtgggccctttcaatctagaaatacaggagctgtcattttgggaaatgtctttgaatttttgcattgatgatactcttcactaccttttctctgttctctctttctggaactcttgttatttgtgtatcatacttcctagatttactcttaactattttataatttcctgcatttttcaatcattttgatttttttatctgtgttctagaaaatcaacttcactcttctttttattcttcccattaagcttttacaaatattttaatttaatttttaatttccaatggtttattttacttctctgaatgctttttttaaaaagtacactgttctagt

SEQ ID NO: 593694 - DNA, 614 bp, Homo sapiens
taagcttttacaaatattttaatttaatttttaatttccaatggtttattttacttctctgaatgctttttttaaaaagtacactgttctagttttatggatggaatatcttctcagttctctgaggatattagtaatagtgggtttgtcggttggtaggtattctagtaaagaacttattttgtttttccccatgtttctctatcctggttatcgatcttggtctctgtattagtctgctggggctaccatawcaaagtaccccaaactgggtggcttaaaacacagaaatttattgtctcacggttttggaagctagacgtctgaaatcaagatgtcagcagggttggttccttctgagggctatgaggaaaagatctgtttcgggcctctctctctttgactcatagaggctcatctctgcctctgtgtgcattttcttccctctatgtgtgtccccttcatatggcattcttttattttttgagacagagtctcactctgccgcccaggctggaatgcagtggaatgatctcggctcactgcaacctctgactcctggtcagaggcagcaattctcctgcctcagccaccctggtagctgggattacagg

SEQ ID NO: 593695 - DNA, 298 bp, Homo sapiens
cattcttttattttttgagacagagtctcactctgccgcccaggytggaatgcagtggaatgatctcggctcactgcaacctctgactcctggtcagaggcagcaattctcctgcctcagccaccctggtagctgggattacaggcatgcacccccaagcctggctattttttgtatttttagtagacaccgggttcaccatgttggctaggcttgtctcaaactcctgagctcaagtgatctgcctactctgcttcccaaagtgctgggattacaggtgtgacccaccacacctggc

SEQ ID NO: 593696 - DNA, 517 bp, Homo sapiens
tcccgtctttgcaccctcatctgtgcccattgtcctccagtgcagagattccagttttaccttcttcaaagaacaaatgccattttctgattggagatggtgaggggcagctacctggctcttcagagtcgaggagggattttgaggtccaattcctactyaacagatttaagcccatctttctgtttcagccccacctttaccccacttccagagttactttgtgccaccaattcctatgccctttgggacttctagggtgcagacaaaattgtataatagcttttcttccctttatctgtctatagaaagatttctgtttccttaggtctgtcttctgagttagataccagtaaacctttctttccagcttcttaatgatttttgatcttatctcttttcccatttttattgtcttgtgtgtttctgccattagaaaggttccttactgtcttactgcacatctagtggagtttcagtaggggtcacaggtaagcactttattcaattcaccctg

SEQ ID NO: 593697 - DNA, 517 bp, Homo sapiens
tcccgtctttgcaccctcatctgtgcccattgtcctccagtgcagagattccagttttaccttcttcaaagaacaaatgccattttctgattggagatggtgaggggcagctacctggctcttcagagtcgaggagggattttgaggtccaattcctactcaacagatttaagcccatctttctgtttcagccccacctttaccccacttccagagttactttgtgccaccaattcctatgccctttgggacttctagggtgcagacaaaattgtataatagcttttcttccctttatctgtctatagaargatttctgtttccttaggtctgtcttctgagttagataccagtaaacctttctttccagcttcttaatgatttttgatcttatctcttttcccatttttattgtcttgtgtgtttctgccattagaaaggttccttactgtcttactgcacatctagtggagtttcagtaggggtcacaggtaagcactttattcaattcaccctg

SEQ ID NO: 593698 - DNA, 599 bp, Homo sapiens
ccaggtatcctttctgcttggctttgtcccacatgtggagagaagccactccctcctgttttctccggtaagatctaggcagcctgggatgtgcccagcaagtctgactgctctctgcaagtggaaagagaaagctccgcattgattgggcagtaactggcagccccttgccggctccttatccatctgcaattctcacagcaatcccacagatagataatatttttaatggccaaggaaattgaggttcagagagagattaagttacctgctcaaccatgtagctaagaaatgtcagatcttgaatatgaacacaggtcggccagccagacaccaaagtaggtatactttgcactgcacactgcccctccttcagaatataggttatatgttaaagcgaggcatagatctttcagkagattacagtccaagagggacaaatgatgacaataataatgtattatatctgtataaattttctatctctgtgcaagagagtgagcccagcatagtgtcttagcatactgtaggggctcagtaaaccttcagtaattacaaaaaggaaggaaggaagaaatgcaatatgaaggtgaacaggg

SEQ ID NO: 593699 - DNA, 451 bp, Homo sapiens
aacagggagcagagggagagtgcagagaaggaaagattaaattggagacaatgcttttatttaacgagcgggcagaggggaacattgtcaagggaaaacacataaaaattttgaaacttcagttttcaaatacttttggaacccatatatcatagagataaaccagagaaacagcaaacatctggcaaggcagcattttgcyttatgtaaaggaagccggtgggtagctggtgggaaatgagaaattgtcccccaggatggggaaatagctcagagcagccataactggagaggttcttctcaaacttacatccggcaaagactataaaaccctccctactgagtcacagaggtattcccaggatgcattttgaaggaggcatttgcagagaacatccacagagtattttgcattgggagagaattgaaccgcagtttcagttgctctggg

SEQ ID NO: 593700 - DNA, 592 bp, Homo sapiens
tctctccaggtgcccagctgtattggtagaggagaccaaccacaccctccacagcacagcacctggagaggaactgctgccatgaccatagaggacaccctctggatacaatgccagacttgatgtgggactgaccaacctatggaccccaggcaccaccacccagacctgctcagcacctgaaagtaagtcctacccttctgaaggaaactctagggtggcagcatgaacttctctgcctcagaggacaatagggaaagtgatgtcctccaggaagcacagagaagtactgggatgagagaacagagacgatctacaaggatgagatcaggtatggtcagcatccctcacctcccaaatcctcttccaagtcattcctcttgcacccttgtgtgaaaacccttcctcctttgagagrctatcaatctggctctatcacagtgtcagtcaaaattcccttggatgtaaacaacagaaactggctggctgatgtagcctgaaaatgaatgtattcaaaaaatgctggagagccacagaatcatggggatggtgcaatgggatggggtgagaggcatgactgaagaaccaggtt

SEQ ID NO: 593701 - DNA, 619 bp, Homo sapiens
aataaacagacttctttgctaaggatgtgctcttgacaagaagtgtttcttaaactgaaggtcgaagtcattgccgtgggcctccagttgggatgcaaatctgcaggtcttccacaggtttctgaaatcttacgtctggatttctggggttatcttccatgtctccaaatgctaacacatatgcgggaaatgcaggcttgtaatggtggatgtccctacaatggacttttttttgtgctcttgagatttctgatcatgtttttatgtgattcttcagtccttgcacctacattccatactttggaaagctgaatgactgttcttggtctcagctggttcttctcaatttcagtaatgatctcaggacattcatttacataaaaaaatctgattaacagtgtgatgctcataggcagacmcaattttcctaccttttaataaattcattagcggataaaagtgggactcaaagaatagtacagagagatgtttaccctcagtggaacaagtatgctcttcttcataactgactgtaaataaaactaatatcttattaagaggttcacttggcttaaaatatacctcctagctgggcctggtgcttctgcctgaaatcagc

SEQ ID NO: 593702 - DNA, 520 bp, Homo sapiens
taaatttcaagatgctatttttcagcagcctatgaatcacttaaactcatttgcaaaataaaccatttgccaggggaaattcatttttgatgaccgtagagagaatggaagtcgtaattcatggggcttctccctcctggtcgtcgtgagctattttcccaggagggataagcacgaccagccacataacttttaaactcaagttcttgagaaataaaaatatatataacatatcctgtcgactcagactatggttttcagagctgcatgccattttgtcaaacaacttggggctttattttggtctttcaccagaagtagaaagatgaatattataataaagattttatagagttgctatatgccttgatttaccaaggarccatttatttcaccacctggcaataaaaaaaagtatctgaaagatacttccccagaaggaatgttaagcaagagatgggttctcagacgaagtgtggctggtgtgtctctgatgggtggaggggatgcaggcaacgat

SEQ ID NO: 593703 - DNA, 520 bp, Homo sapiens
taaatttcaagatgctatttttcagcagcctatgaatcacttaaactcatttgcaaaataaaccatttgccaggggaaattcatttttgatgaccgtagagagaatggaagtcgtaattcatggggcttctccctcctggtcgtcgtgagctattttcccaggagggataagcacgaccagccacataacttttaaactcaagttcttgagaaataaaaatatatataacatatcctgtcgactcagactatggttttcagagctgcatgccattttgtcaaacaacttggggctttattttggtctttcaccagaagtagaaagatgaatattataataaagattttatagagttgctatatgccttgatttaccaaggagccatttatttcaccacctggcaataaaaaaaagtatctgaaagatacttccccagaaggaatgttaagcaagagatgggttctcagacgaartgtggctggtgtgtctctgatgggtggaggggatgcaggcaacgat

SEQ ID NO: 593704 - DNA, 574 bp, Homo sapiens
ttcattcctaatttatcaaatgatgttaatgatgatgatgatgatgatgatgatgatgrtaacatttattgagcatttattaatgtgccagctgggcactgttctaagcactttacattattatctcattttaatatcctcaaaaaccctatgaattaaggtattattattatcctcattttacatatgaggcaactgatgcattgagaggttaagaaacttgcctgtggtcaaaataagcagaagagcaagggtctaaatgcaccccaacactctgtcctcaaagctgtcacattcaactaccactgtaatattgagtcttcaatcaattgttatatatatagctgtatcaggcctgaaagtacttaccacatagtgggtcagcaagggcattacagttctatttctgttaaaacagaacgatgaaggatccaccaccaccactcccatttttaaaatattctaaatattcacacttattaacacaaaaataaggtgactaagaaggataatttctgtatttggagataaatttaaaatatctacattttaagggacataaaagttttaatag

SEQ ID NO: 593705 - DNA, 273 bp, Homo sapiens
ttggttttgacttgaaattttagccagttcttwcaacttgtaaatgaactttagatctaatcatgcgtgttccttaaagttgtgtgcttttaactttcttttttagggcagcggtcttaattctttttatgatcaacgagaatacatagggagaagtgttcattattggaagaaagttttgccattgttgaagataataaaaaagaagaacagtattcctgaacctattgatcctctgtttaaacattttcatagtgtagacattcaggtaac

SEQ ID NO: 593706 - DNA, 541 bp, Homo sapiens
gtttgaaaccagcctgtgcaacacaacaagatcctgtctccagggagaaaaaaatagccaggcatagtggagcatgcctgtgttcctagctactcaggaggccaaggaaggagaatcacttgagcccaggaggttgacactgccgtgagttatgactgtgacactgcactccagcstgggtgacacagggagatcctctctctaaataataaatacataacatacaaaaaataaattcaagaaagtaagacaagcagacaacagaagaattttcatcagccttggaaatcttggaaaccctgtggtaccactctcgcacttaacaaacaaaagaaaccagctttctctggggaggaaagctattccagaaatctcttttcctaccatgtgtaagcctctatgggaaagaataagtaagtacttaggatctattaaggcactgaggattccctggtccatgtactgttctctctacagatcagatcagtattttacagtcaaggagtcaaaaaggcagaaataaatattgaattcttcaagt

SEQ ID NO: 593707 - DNA, 541 bp, Homo sapiens
gtttgaaaccagcctgtgcaacacaacaagatcctgtctccagggagaaaaaaatagccaggcatagtggagcatgcctgtgttcctagctactcaggaggccaaggaaggagaatcacttgagcccaggaggttgacactgccgtgagttatgactgtgacactgcactccagcgtgggtgacacagggagatcctctctctaaataataaatacataacatacaaaaaataaattcaagaaagyaagacaagcagacaacagaagaattttcatcagccttggaaatcttggaaaccctgtggtaccactctcgcacttaacaaacaaaagaaaccagctttctctggggaggaaagctattccagaaatctcttttcctaccatgtgtaagcctctatgggaaagaataagtaagtacttaggatctattaaggcactgaggattccctggtccatgtactgttctctctacagatcagatcagtattttacagtcaaggagtcaaaaaggcagaaataaatattgaattcttcaagt

SEQ ID NO: 593708 - DNA, 582 bp, Homo sapiens
gaataagaaagtaaacaaaatgaaaataagagaaagttaataaacataaaagcagaaatccatgaactagaacacaaaccaccagacttaaaaacagaacacttgattaataagactaaaaactgtttctttgaacaaataaaatacaccaatttttggcaagtttgactaagaaaaatagactttaaaaataacattattataaagaaatactgcagaattatggatatagactagattttaaaagaaaatttatttctcaagaaatataaattgccaagagcctccaaaagacacagaagtctagattagatcagcaatcataaaataaattaaaaagctagtcagagttctgtccttgaataaacatcagacctggatagtatataaaagagacttaccaacgtctttcytatcatgtacactctatagcccttgaatacagatcggaaacttctccactcattttataagacaaaactattatgatactaagattaggaatatagaaacaaatagatctatctcacttctgaagacagtgaaaggttctgaaagaataaaactgaacaacttaaatcc

SEQ ID NO: 593709 - DNA, 603 bp, Homo sapiens
tttgacaaaaatcaacacccattcattaaaaaaaaaatcaatgaaaaccatgaatagaagaaaacctcctcaacctgtaaagcgtacctacaaaaaaaacaaacaaacaaaaaaaaaccatagctagcatcatacttaacggcaaaaaaaaattagaaataagtcaaggataggcaagaaataaatatatctgtttgcattttcagatgatattgtttatgtagaaaatcaggccacatatggtggctcacctctataatcccaacacttcaggaggccaaggcagaaggatcayttgagctcaggacttcaagaccagcctgggcaacatagagagatctcatctctacagaataattaaaaaattaacagggcatgttagcctgcacctgtagtcccagctactcaggagactgaggtgggaggatggtttgagtctagcaggtcgaggccacagtgagccataatcataccactgcactccagcctgggcaacagagtgagaccttgtttcaaaaattaaaaaagaaattcaattgtatttgtatatgctagcagcaaacaattgaagaatgaaataaattcatttatcatgatgtcaaa

SEQ ID NO: 593710 - DNA, 577 bp, Homo sapiens
caccagttgcttgtctaggtttatcttgggcacaactccctttctaaggccccttccagctcactacattattattacgctctgtgccaaccacagctgcctaatattaactgattgtgccacttctgaattactgcttgggaagcaggacctactggttttatttcttttattacccatgaccccacagaaaggcagattggctaggaaaaaataaataaataatgtgggctagtaaatgcttctggtgcttatttaccctcactctgttgctcaccccttctttatcctcacagtctcaatcccgattcccgtctattttggtttcagctgattatattgttcttttatttaatttttcccttgcattttccattcacttagaacagaatcccacattaaatgaggctccaggctcacttaagggtgcattttgcaaaccaaataaagtaaaatcatcagtaaattccaaatttattatgctcttctacacatgtacaaattccagtaaggctstagttatgaacataattctaagacaaggattccagatgcaattaataattttttctaacca

SEQ ID NO: 593711 - DNA, 445 bp, Homo sapiens
cactccactgcactccagcccaggcggcagagcgagactcatctcaaacaaacaaacaaaaactataaagaaagcacccagaggaggaaataatcaataaattacatatttcctggacaaataatacttcatagatgcccccaactttcccattcattgctaaaatctcatcataaggttgtaaatccaggattacatggagcacaagtttcacagatgttgtttgactcattcattcattccttattcattcaatatgaatttattatattttaggyaccaagctatcggctgaaaccagctgttagaggatggagagtatccagattgttaaggaagaaatgggtagatcatctggtcagtagtaataatggtaatggatccccagaggcagagtcaccttggggaatataaaatgcattttaatttgaatcgataaggaggc

SEQ ID NO: 593712 - DNA, 361 bp, Homo sapiens
ataatctactagacacctaggctatatggcatgtcctatttctcctaggctatacattggtacatgttactctcctggatactgtagagaattgtaacacaatggtaagcattagtgtatctaaaaacatagaaacaaaggaaagcatagtaaaaacacagtatatatatgtgtgtgtgtgtgtgtgtgtctgtgtgtgtgtatatatatatatatgtktagacggagtattgctctgtcaccaggctggagtgcagtggtgcaatctcagctcactgcaacctccgccttccgggttcaagtgattctcctgcctcagcctcccgagcagctgagactacaggcacgtaccaccatgccc

SEQ ID NO: 593713 - DNA, 586 bp, Homo sapiens
aaccagtccagctgttatactattacttttaaagaatgcctcaaattcttagtgtttacttctagtttagttcgtaccggatttctcttcacatgtcaagctatgaaaaaacaagctgacaaatcaaaaggttgacttcccaatgtcttctgataaaaataatatttgaactattctatctgtaacacaagaatatgtatttatatgtaagaaatcctttggctcttccctcttttgttatttacaatattgggtgcattctcatgatctttctttgctattcattttatttatttttactttcctacatagagagttcttattgtttctgttgtttcataaattttagaagcctccaattttagaactaaaagaaccatattgtagagatttcatgatcgccaagtttaatccttcctcttacctatgagaatgcctktaggttgcttgtattttattttatttcataaactactggaacatattctttatttttatttttatttttttattttttgagacggagtctcgttctgtcacccaggctagagtgtagtgacgtgatctcggctcactgcaagctcca

SEQ ID NO: 593714 - DNA, 568 bp, Homo sapiens
tttgtctccaaagggcagtgcctccccattggtcagtcgccccctgacgtcacaggcgcacggcttctactggcgtgtgcgcgacttgcagagttcttcgcctaccttccgcagttccaatcccagccggagctgcagccgggggccgcgctgtgtggccgccggggccgttggggagggaggcgcctctgcccggccggccgccgatgcttcccgccgcagctcgtgcyccaaatcccggagccccagttgccaatatctcagccttgaaacagccaactgggggctgctctctttcaatccctttgcacccttgtaggttgcctgtgcttagaagcagtgaccccacccccgcattaaatccaggcccccctttcttgacgtccctgccactctggtcctactacactcttgtgggagctccttgtcaccgtggatttttctagacgtattttattgaaaccacagaaggaagacgaaccctcacacctgggctccactccactggggggtggtaaagaaaaagaaaaatcagaccctgttctggctcggtccctgccgtttcagg

SEQ ID NO: 593715 - DNA, 605 bp, Homo sapiens
aagcttcagtatattatttttgttgttgctgttgtttgtttgtttttgagacagartctcgctctatcgccaggctggagtgtagtggcatcatcttggcctactggaacctccgcctcccaaaagcaattctcatgcctcagcctcggagtagctggaattacaagtttgtgcctacacaccaggctaatttttttattttttgtagaggcagggtttcaccactttggccaggctggtctcaaactcctagccttaagtgatctgccagtcttcgcctcccaaagtgctaggattacacgcatgagccaccgcgcctggcctccagtatattctttgagttaaagagctaaggcaggagaaggatacgaaaaaggtgaaggccaatcattctcacattggaagcatggtcttcaggtttgggggcctgcccagccagggtagatagattttatatagggtatggcagggcaagtgaatcctaagcacttaaggctaaaagggttcacgaaagtctacagttgcttaatcaaattgcttttatgccgttggatcatcattacattactccacagggaatttaaacataacatgaacatgtattt

SEQ ID NO: 593716 - DNA, 614 bp, Homo sapiens
acctctcattttagagatgaaaaaaatggggaatccaatatgattaaatgacctgcccaaggtcatatagctaattaaaagctaagcaagaactagatatcatgtcccctgctttcccattagggggtttgttttcttctattacatctcagcttttggttagtcataataagaggtggcagtggcctggattaaagaaaatagcaaatagacctcctgcccctttctttgttctttggctctttgaaaatgggactgttttgttgttagtttaattatttttatatactctgcatcatctaacatagtgtacattttttcagcaaaaatgtgttaattgcactgaataattagagaaattaactgatgttatcttttgagaaacagcagattaatgttaatattagcattaaggatggtaaaggaaagctgttagccaggtggagaatgatagaggaggaagctggtttggaattcacattttccatttccagaccacaaataataatccacrtggaggcaatagagacttaacaggaaaatacaaacagcagtattattcacatcatgtggataagccatttctttttctcattatccttctcatgttgcta

SEQ ID NO: 593717 - DNA, 575 bp, Homo sapiens
ggagcatatctaggccaacatttcagatctactttatttgaagaaggaaattttatggtgcagcttcctttacctttaaaattccctagccataagaatctactttttcaagacgcatacaagtcactgaatagccggaatcccttcatatcaaaccccaaatattatgaatagcaatatggaaagagaaaacaggctaaattgaaaaagagcttaaggaacaactgtcttaagtcaacacacaatcagtctgcagcaacagtctcataaaacctgaggtccccttgctgaagattasctacatcagatgaggcctacttactccatgtaggtaaattaatcaacaaaaactgcaggtgattgcagcctggctttttgaccagggtcctaatatactcacctaagctccttcttgtgaaatctgaaatgccttctatggctttcaaattagtaggatgggagaacttcagtaactgtacttaactgtggcttcacctgttacaattttggtaacatttctctttgatctccaactctgccactgcacccaagtcctgtgctccagggaggcagct

SEQ ID NO: 593718 - DNA, 575 bp, Homo sapiens
ggagcatatctaggccaacatttcagatctactttatttgaagaaggaaattttatggtgcagcttcctttacctttaaaattccctagccataagaatctactttttcaagacgcatacaagtcactgaatagccggaatcccttcatatcaaaccccaaatattatgaatagcaatatggaaagagaaaacaggctaaattgaaaaagagcttaaggaacaactgtcttaagtcaacacacaatcagtctgcagcaacagtctcataaaacctgaggtccccttgctgaagattagctacatcagatgaggcctacttactccatgtaggtaaattaatcaacaaaaactgcaggtgattgcagcctggctttttgaccagggtcctaatatactcacctaagctccttcttgtgaaatctgaaatgccttctatggctttcaaattagtaggatgggagaacttcagtaactgtacttaactgtggcttcacctgttacaattytggtaacatttctctttgatctccaactctgccactgcacccaagtcctgtgctccagggaggcagct

SEQ ID NO: 593719 - DNA, 492 bp, Homo sapiens
agggatttttagtaggagagccctgtggaggttcgaactagcgtctctcccctccggcaccttccaaggcccttcagtcgctgaattcccagcttgcccggccaggaagccggctaggctggaaaggggataggggtggagagaagaaagaatcaagcagctcctggcgtttgcgtaacaaagagaaggttacttgggaattttggtaagcgtgctgggttggtgcgagtgggaatagaaggctgcctcaaaaactcagtcaggattagtttgagagccgccacaagctagcacggtgcgggtgcyctgagcacgctgggtgggggtgggggggttaaggagttgtagccagccagagaagagcgcgccgagagttttgcggtttatccaggcatttccaaaaacaaaaagccatttaaaggtggaggagggttgctgaggggtcacgttgtaggatagatttttttttctgtctccataggcgcccacaat

SEQ ID NO: 593720 - DNA, 546 bp, Homo sapiens
ttttttttgcatgtaagttattgcatttcaaaagaccccccctttttttacagaggactttttttgcgcaactgtggacactttcaatggtgccttgaaatctatgacctcaacttttcaaaagacttttttcaatgttattttagccatgtaaataagtgtagatagaggaattaaactgtatattctggataaataaaattatttcgaccatgaaaagcggaatgtttctgaaaaatacttcattctgcccctctgrtaactggctagtgaagttttattgaaggcaactaaagaaggacaagctctgcagagatccaacaaggcaaaaaagaaaacagaagtcggggctctatgcatgcagactgtatatgtatatatgttcaatgctatactttgtgtgtgtgtgtgcatatatatatataatatatatggcatgtttatagtactgccatatctcataattgtttcaggtagaaagtaatgctgaaataaaaatacatccctctcaccctgtatgtgagttagaaggcaacagaaatccct

SEQ ID NO: 593721 - DNA, 564 bp, Homo sapiens
ggaatgtttctgaaaaatacttcattctgcccctctggtaactggctagtgaagttttattgaaggcaactaaagaaggacaagctctgcagagatccaacaaggcaaaaaagaaaacagaagtcggggctctatgcatgcagactgtatatgtatatatgttcaatgctatactttgtgtgtgtgtgtgcatatatatatataatatatatggcatgtttatagtactgccatatctcataattgtttcaggtagaaagtaatgctgaaataaaaatacatccctctcaccctgtatgtgagttagaaggcaacagaaatccctcaataacccctctgaattctaagckcaaagcaattatcttggagaagcgcccccacccatcagcctctgtgtagtgccagagcaattagacaaattacccttcaaagggagtttccagagatgagaaaatgaaaaagaaatctagcctcacacctattacattttttaggcatctaaaatgtttggagcatggcaaatgatagaaccttggactctttggagtatgattataaatgtat

SEQ ID NO: 593722 - DNA, 606 bp, Homo sapiens
aagcttcatgaatcaaatttttataagttgaagtatttttaaattaactacagaatgaaatagtttgttcctaaaaagttagctaaagttaaaaatctcctgttagtcctattttatcacagtttaaggtcatagtccatacactgggtttcttatagtgatcctggtctatattattttttaattattttttccaatgacactggtcatgcatctttccatttcaaagaattactcataaacatggggaaactcgctgggtgcagtggctcacatctgtaatcccagcactttgagaggctgaggcgggtagatcacctgaggtgagtttgagaccagcctggccaacatggtgaaaccccgtctctattaaaaatacaaaaattagcyagcgtggtggcaggcacctgtaatcctagctactcaggaggctggggcatgagaatcgcttgaacccgggagacaaaggttgcaatgagccgagattgtgccactgcactccagcctgggcaacagagtgagactttgtctcaaacaaacaaacaaaaacacggggaaactaagatgtttataggatcagaagaaatggaaatattaaacaacaaa

SEQ ID NO: 593723 - DNA, 606 bp, Homo sapiens
aagcttcatgaatcaaatttttataagttgaagtatttttaaattaactacagaatgaaatagtttgttcctaaaaagttagctaaagttaaaaatctcctgttagtcctattttatcacagtttaaggtcatagtccatacactgggtttcttatagtgatcctggtctatattattttttaattattttttccaatgacactggtcatgcatctttccatttcaaagaattactcataaacatggggaaactcgctgggtgcagtggctcacatctgtaatcccagcactttgagaggctgaggcgggtagatcacctgaggtgagtttgagaccagcctggccaacatggtgaaaccccgtctctattaaaaatacaaaaattagctagcgtggtggcaggcacctgtaatcctagctactcaggaggctggggcatgagaatcgcttgaacccgggagacaraggttgcaatgagccgagattgtgccactgcactccagcctgggcaacagagtgagactttgtctcaaacaaacaaacaaaaacacggggaaactaagatgtttataggatcagaagaaatggaaatattaaacaacaaa

SEQ ID NO: 593724 - DNA, 632 bp, Homo sapiens
attccactgtatatccagtcctttcttcttgttctttcttgatcattggagctaagagattaaaaatacaagcatccttttgaagaccttagagcactataaccatgagaaggctggatgacccaaggttgagagatagccactgaaaagacccyccaaataagcgtagtataaaaatcccccccaggccaggatgggtagagagtggtacagaaagcatgccagaccagcaatctgcatcctgggcctcagttgggaaggtgttcccaggagagcttcagggtggcagctactgcagtgactgaggaagatcaaatactgggggttatagcaaaaggaaggaactgtattccaggaaataaaatcagtgagtgacttggtgtcaagtactattgttattttgaccctcagggcttaagggaaaagaaagaagcatgcagaaggcttggtctacctcagggctgcaaggtggtttggagaggaaaaagcctgaaaggtaagaagataaagtggttattgtgacatatgacagaaagagaagaggcaataggatatattattacttctgtaggtttatcagttagctcttggtgcataacaaaccaccccaaaatgtagtggcttaaatgaaa

SEQ ID NO: 593725 - DNA, 574 bp, Homo sapiens
aattttaactaattcatacaattaatttatttagtcaccttaaaattggaactcaggatgaattatatgatttagaaaaaggagtcagttcatcctctcctcaaagacaacactgagtctctcaagtctaggatgtcattggtaaggcattatcaatattttagaaaaatatacgaagaaagtatagaggcttttcaataatcaagatttctatagttctaaagttgtttctgtatcaacctttgatcacaacatttcctgattaatgattaacttttaaaagttatgtgatttttctcagaccaaatcaattccatttaaggtggacactttaaataattccagattacttgtctcccaaaactctcacaaaacctagaagaattgattctcaataattgccrtgatagtcctgaaatggaaactagaaaaagtggtattcttgtggaattttctcacttgtctgccctttcaagacagtgattagttactataaatcttcacacccaactttcttaggcttaaaaacatcaaggaagttaagaaaagttcagccactgcctagttctgtaat

SEQ ID NO: 593726 - DNA, 548 bp, Homo sapiens
cattaaaaagatcactcaccatgattaagtgggattcagatggttcaacatatgcaaattaataagcatgatatatcacatcaacagaataaaggacaaaaaccctataatcatttcaatagatgctgaaaascatttgataaaattaaacataccttcatgataaaaaaaattttcaacaaactcagtaaagaagaaatatacatcaaaacaataaaagccacatatgacaaatccagagctaacatcatactgaacatggaaaaattgcaagactttcctctaagatctagaacatgacaaagatgcctactttcaccacttttatgcaacatagtattggaagtcctagccaaagcaattagaaaagagaatgaaataaagagcactcaaattgcaaaggaaaaagtcaaattgtcctgtctgcagatgacatgatctaatacttaagacaccaacaaacagccattagagtgataaacaaattcagtaaagttgcaagatataaaatcaacatattaaaatcagtagcatttctatatgcaaaa

SEQ ID NO: 593727 - DNA, 599 bp, Homo sapiens
ttagctatataaatattacaaattaaaggaagcacatgttggtgtaatcatcacaaacttatcctgtagctataatctagcagacagcaaaccttagggaaaaattgatcaagcatcatcaggcatcagagaacttacaggcttcagctcctcttcactgtagctgtcaatcagaggttgtctttcaaacagcatgaataagtgggctgcagacagcttagctttagcatagtctggagcaaatgaactggcatgtcctagagccactgcaccaaatacaattgcagaaaacaccctagacagaagtagaggaattcaaaaattagcttttataattaactccatgatgtttgaaagtctaaaggtatagtgcttaccagtattttttccctttactccttaatcatcccctttctccccgacatacattttcataaaattctagtaamaagagaaatctaggagaggggcaagatccacttcctgagggtttaccttttctcgacttgctttctgacttccctttgcatagtagcccctaatttcttaggactactgtgacttcccaaaggtttttactttcaagaagaggcttataa

SEQ ID NO: 593728 - DNA, 482 bp, Homo sapiens
atgttactgcaaaggacatgatctcattcaatctcattcttttttatggctgcatagtattccatggtgtatatgtaccatatttactttatgcagtatactgttgatgggcatttargttaattttgtctttgctattgtgaacagggctgtaataaacatacacatgcatgtgtctttatggtggaacaatttatattcctttgagtatatacccaataatgggattgctgggtcgaatggtaattatgtttttagctctttgaggaattgccacactgctttccacaaaggctgaactaatttacacactcaccagcagtctaagcttttcatttttttccacaaccttgcaagcatctgttattttttgactttttaataatagtcattctgactggtgtgagatagttatctcattgtggttttgatttgcatttctgtaatgattagtgatgttgaacattctttcatatgcttgt

SEQ ID NO: 593729 - DNA, 577 bp, Homo sapiens
gccacacagtttatggtatttcattatagcagcccaaatgaactaaaacaacaccatttataaatattgtacctgatatgccgaaaattatctggaaacttttaattttcctcttgtaacttagagttggaaaataaagatcatatatgtcaacatttgctttacatttaaatatcttagattgtttaatattagtaaatatagattaaataaaactcagatcattcatacctgataaattcaaactatcttaatccgctagccacttccttcccttcctaacttcacctgggagaagtttccagggcattcagkatcccccaagttaaaccccctcactttgtctcttctcacatgaaatatcttcttctccttctcttcttgagtttaaggccaactgacactgtaggcaaccacaggcatagctcagcattcagagactcagagaaggcaacttaactgtcctgtagtccgtttaggtggtttatgacaaataaagagttactgcccagttttattttccctcagctggcgacaagattctagtcaactagtagcacaggagaaaaaacccagt

SEQ ID NO: 593730 - DNA, 580 bp, Homo sapiens
actaacaattattgaattgtgtacaggcctaccttgttttattatgcktcgctttattgtgcttcacagatactgtatttttcacaaattgaaggttcatggcaaccctgcactgagcaagtctatcaatgccatttctccaacagcatgtgctcactttgtgtctctgtgtcacattttggtaatcctcacaaaatattttaaatcttcattattattatatctgctattgtgttctgtaatcagtgatctttgatattactatcataattgctcggggatgccacaaaccatgcccatataagatggagaactcaatcaataaatattgtgtgtattctgactgctccactgtttggccattcccccatctctcttcctctcctcgggccttcctgttccctgagacacaatgatattgaaattaggctaattaataaccctacaatgacctctaattgttcgagtgaaaggaagagtcacatgtctgtcactttaaatcaaaagctagaattattagaattattattattattattagagacagagtctcactcttgttgcccaggctggagagcag

SEQ ID NO: 593731 - DNA, 612 bp, Homo sapiens
catatcaattttcagcaatttcaatttcaccagcacgtcaggcagaagacggcaaattgaaaaagatcctcaaaattctggcgtatttctagtgctgtccatgtacatgaccttggaggtgatgagagattgctgtcagctgcatcgcgtcacatccagtcaatgaacccgcagcttaacgaggtgcagtctttgctggggggtacacacagagagctgygcttgagctggagccctgcatccacctgctttgcatgcagatgggcacctttgtgatgttcttctggatttcatggttaacaaagtatttgttgagctgggtaccatgtgaaccaccacagacatccatgtgtctaaggcagagtacgtgtctttaaggagttcacagtctaagcaggtgacgtacctatctacttaaggactgaagcatgtcacatccagcaatttttttttttttttttttttttttttgagatggagtctcactctgtcacccaggctggagtgcagtggtgcgatctcggctcactgcaacctccacctcccaggctcaagcgattctcctgtctcagcctactgagtaactgggattacaggcacatgcaactgtgc

SEQ ID NO: 593732 - DNA, 612 bp, Homo sapiens
catatcaattttcagcaatttcaatttcaccagcacgtcaggcagaagacggcaaattgaaaaagatcctcaaaattctggcgtatttctagtgctgtccatgtacatgaccttggaggtgatgagagattgctgtcagctgcatcgcgtcacatccagtcaatgaacccgcagcttaacgaggtgcagtctttgctggggggtacacacagagagctgtgcttgagctggagccctgcatccacctgctttgcatgcagatgggcacctttgtgatgktcttctggatttcatggttaacaaagtatttgttgagctgggtaccatgtgaaccaccacagacatccatgtgtctaaggcagagtacgtgtctttaaggagttcacagtctaagcaggtgacgtacctatctacttaaggactgaagcatgtcacatccagcaatttttttttttttttttttttttttttgagatggagtctcactctgtcacccaggctggagtgcagtggtgcgatctcggctcactgcaacctccacctcccaggctcaagcgattctcctgtctcagcctactgagtaactgggattacaggcacatgcaactgtgc

SEQ ID NO: 593733 - DNA, 612 bp, Homo sapiens
catatcaattttcagcaatttcaatttcaccagcacgtcaggcagaagacggcaaattgaaaaagatcctcaaaattctggcgtatttctagtgctgtccatgtacatgaccttggaggtgatgagagattgctgtcagctgcatcgcgtcacatccagtcaatgaacccgcagcttaacgaggtgcagtctttgctggggggtacacacagagagctgtgcttgagctggagccctgcatccacctgctttgcatgcagatgggcacctttgtgatgttcttctggatttcatggttaacaaagtatttgttgagctgggtaccatgtgaaccaccacagacatccatgtgtytaaggcagagtacgtgtctttaaggagttcacagtctaagcaggtgacgtacctatctacttaaggactgaagcatgtcacatccagcaatttttttttttttttttttttttttttgagatggagtctcactctgtcacccaggctggagtgcagtggtgcgatctcggctcactgcaacctccacctcccaggctcaagcgattctcctgtctcagcctactgagtaactgggattacaggcacatgcaactgtgc

SEQ ID NO: 593734 - DNA, 572 bp, Homo sapiens
caggaaacacctcctgatgacatgtaccctggatgcagttccaagagggagcctaggaagtccggactgaggatgacggatggcctgacctcccctttgactgatgctgggatctgatggcacctatccacaaggtcagcacagtccttgggactggtaatgaaagttgcaaaacttatgtcacagggagcacaaagctagtttccactgacatcactgggtaagcatgctgatgtgccataatgaacaggacacttggtgggtagagtttcatctgggcacaccacacaggcaccagggagtgcaactactatgatatggtttggctgagtctgtaccgaaagctcatcttgaactgtagttcccataatccccgtgtgtcatgggaagaacccggtgggaggtaattgaatcagcatggttacctccatgttgttctcaggatagtgagtgtattctcacgagatctgatggttttataaggggctttcccccttttctctgcacttctgcttgctgccrccatgtaaagaaggaacgtgtttgcttcccctttgccatgattgtaagtt

SEQ ID NO: 593735 - DNA, 508 bp, Homo sapiens
gggtcttatatgttgcccaggctggtctcaaactcctgagctcaagctatccatccaccttggcctcccaaagtgctgggattacaggtgtgagccactgagcccagcagatttgattttctgagaaagcacaaacgaagaaaaaaacaaaagacattggccaatccttggggaatgtgtacattagacaggaatggaaytataccagtagtgtctggagagccacaatcacacaaaaccaggcatacaaagaaaagagagggtttcaagaaagtctggttagctgtctccatagcttcagggagcccaagtaagatattaactaagaaaagatcactgggtttggcaagcaagacatcactagagagcctgaatgagtcattttagctaagtggtagaggcaaaggccaaggtaggtgagcactggaaaagttattgtacataaactcgaccattctcacaagacattgaacagagaataagaggagagaaaaaggcttacaacatc

SEQ ID NO: 593736 - DNA, 554 bp, Homo sapiens
actgggtaaattctgctaaaggaaaattttaagctaattaactagaaaacaaaaacagccctacaacatgttgaaaactttcaggaatgtaggtggcagtaaatatataaataaataacaaaaaaactgtgtttagtgtttatagtaagtgaatgggggataaaaaatattggatttattgtatcattcactgcatagacttgactcaatggcttaagctttgaaagtctgagagcttcaatttatctattctctaaatatacttacaataaaaatgccattaaaaatatgctgtgaagattaatgtcagtgaagaactgtgttayccatgtataagagataaaaaggaatttcaaatgtcataactataaactaattaaaatttaatgttacttaaaaatcacttagctatttgtgatggattcatagttgacacactaatatcaatttttaaatttatgttatatttgaagttttaaaaataacaataaactctagaaagcacttaaaattgcacgaatcaagatcatctgatatttatctttttttttgga

SEQ ID NO: 593737 - DNA, 597 bp, Homo sapiens
tgtgggattgctaggtcctatggtagtagttctattttaattttttgagaaacctctatacaattctccatgatggttatactaattgacatccctaccaaccgtgtacgaggattccctttgctctacatccttaccaacacttgttatcttttgtcttttttacaatagccattctgacaggtgtgaggtgataactcactatggtttgattttcatttccttgatgattagtgatgtggagcaccttttcatatccctgttggccctaggtatatcttctttggaaaaatgtcacatctcttgtgatagtacttttaatattatcaataatagtctataaagtgtcagagttctcaaatgttcagacccatcccttccaaggatgactttaaccycacctgcaaatcctgctctggctaatctccacctgcacatctgggtaatctccaggttcaatggagaccttaaacatgaggcatttaaataggcccttttccaacatgcaggtgactcaggatcaatactgttatcctaagaatggtcctagagtcatgccttagttctctgataattgagtttctgctcagattcaaa

SEQ ID NO: 593738 - DNA, 606 bp, Homo sapiens
agtgtatggtgctcacattcttgaatgctcttgggttctctgagtggttgattaggaaaggctttaatttgaatcctgcaacatttccaccccaaagcaacatttccaccctaaattaaagcctttcctgtaacacccsaaagcagtgttacacagcctttgaatgccgtagaccctggcattggactcgtggtgaatgtatgtatgctctggtgtatactttcagaataagctcatttcattgactttaaatatttgtgctggtaaatacttctcatccacacttaccctatgtggctcttcccaaaagctttgttaccttcaatatcaggacttgctgcctcaccacagaccttcatattatgaaaattatgatgcattttcaagtgttggaactggccatgtcttgctataaacatttgtatatatgtaggatcattggtgtactctttgaacttatagaacacacttcttaccctagcctaagtcatcagtaggctaagcggtatgcatctctgtatctggttttccatccacatgacaagtaatttttccatgttatcaagcagcccacctcttctctttgtgatgataatggatttaacc

SEQ ID NO: 593739 - DNA, 555 bp, Homo sapiens
gaataaatagaaagaaaaatattgtcattttattgtcttctttctattgatataattaccagagtcttctcaaagagggcattaaaaactctcttagggcactgaaagtcctttttactcggtttgaggtttcttaaaaggagtaaatgaaaaagtagggtagtggcttagagaaatccaccctggagaagacatgaacagaaaaataattacttataaatgggacaagttgatgtaaaatttgtaaagatgggttggagagttttggcaaaaatgtgagctctggaggaagcctgttgggttcaattcctgttctgtgcactgttctttcttttatattgttagttttctcaamtgcaaagcagtgtaacacagtcgctatgattgctatgaaggttaaatgaaataagacgtgaagaccatttagcatacagtccaacaaatacaattgagatttataggctcagaagttaccattagtgatattcaagcacctggaaatctcacacttaatattaagaacaaataatgaaataggcctaaagactaagatga

SEQ ID NO: 593740 - DNA, 555 bp, Homo sapiens
gaataaatagaaagaaaaatattgtcattttattgtcttctttctattgatataattaccagagtcttctcaaagagggcattaaaaactctcttagggcactgaaagtcctttttactcggtttgaggtttcttaaaaggagtaaatgaaaaagtagggtagtggcttagagaaatccaccctggagaagacatgaacagaaaaataattacttataaatgggacaagttgatgtaaaatttgtaaagatgggttggagagttttggcaaaaatgtgagctctggaggaagcctgttgggttcaattcctgttctgtgcactgttctttcttttatattgttagttttctcaactgcaaagcagtgtaacacagtcgctatgattgctatgaaggttaaatgaaataagacgtgaagaccatttagcatacagtccaacaaatacaattgagatttataggctcagaagttaccattagtratattcaagcacctggaaatctcacacttaatattaagaacaaataatgaaataggcctaaagactaagatga

SEQ ID NO: 593741 - DNA, 502 bp, Homo sapiens
aaaccccttcagtcaccccttatagatctataggagtaggaactygaaataacaataggatgaggccagaaaacaaatgagtgaagctcagggataacacagtaggcagctgccaggactatggagaaatagtctcccctgactcagggtattagcaactatcaccttccagatgacggctgctgctggggaaggcagcaggtctagtcttgcaagaccttcaagagaagctacaagctctggatactcatggggcacttctcaacttctaaaagcagaaacacagcaaaatgtaatttaaaacaatcctatgtgggccaagcaaaacatgtatctgtaatctcgatttgatcagcaaaatcgcagagttgacaccacccttttcttccaactctttaagcagctagaacactgcttcatatttagttgataaccactaagaatcacgaataaatttacaaaaactatacatgcatgtaaatatatgcatataaaatagaaa

SEQ ID NO: 593742 - DNA, 502 bp, Homo sapiens
aaaccccttcagtcaccccttatagatctataggagtaggaacttgaaataacaataggatsaggccagaaaacaaatgagtgaagctcagggataacacagtaggcagctgccaggactatggagaaatagtctcccctgactcagggtattagcaactatcaccttccagatgacggctgctgctggggaaggcagcaggtctagtcttgcaagaccttcaagagaagctacaagctctggatactcatggggcacttctcaacttctaaaagcagaaacacagcaaaatgtaatttaaaacaatcctatgtgggccaagcaaaacatgtatctgtaatctcgatttgatcagcaaaatcgcagagttgacaccacccttttcttccaactctttaagcagctagaacactgcttcatatttagttgataaccactaagaatcacgaataaatttacaaaaactatacatgcatgtaaatatatgcatataaaatagaaa

SEQ ID NO: 593743 - DNA, 502 bp, Homo sapiens
aaaccccttcagtcaccccttatagatctataggagtaggaacttgaaataacaataggatgaggccagaaaacaaatgagtgaagctcagggataacacagtaggcagctgccaggactatggagaaatagtctcccctgactcagggtattagcaactatcaccttccagatgacggctgctgctggggaaggcagcaggtctagtcttgcaagaccttcaagagaagctacaagctctggatactcatggggcacttctcaacttctaaaagcagaaacacagcaaaatgtaatttaaaacaatcctatgtgggccaagcaaaacatgtatctgtaatctcgatttgatcagcaaaatcgcagagttgacaccacccttttcttccaactctttaagcagctagaacactgcttcatatttagttgataaccactaagaatcacgaataaatttacaaaaactawacatgcatgtaaatatatgcatataaaatagaaa

SEQ ID NO: 593744 - DNA, 543 bp, Homo sapiens
gacgtcttgaatgacttcatggaatttatttacattccccaagtagagttgtgatgcacaacataatttatttatcatgggtaagaaaatatagagtaaaatacaaaaataaattaaacacctaccatattctaagttgtaggatcgttgcaaggattagatgagattattatatatatagtcatcattgtgtctaytctccagatgagaaggctgggttctgaagctaaagtgaccaatgaaggcatgtgaattcggtgtggatttgattccaggcccacatgagtgcaaggaccctctcttttcttgattcttttttttttaatatctgtgtattatttcaaatatctacatagatgcttccatgcttattaagtagtttttacctaatatttattttttattatacttgaagttctagggtacatgtgcacaacgtgcaggtttgttacatatgtattcatgtgccatgttggtgtgctgcacccattaactcgtcatttacattaggtatatctcctaatgctatccctcccccctccc

SEQ ID NO: 593745 - DNA, 445 bp, Homo sapiens
agtaagcaagaagagaacttgtaatatttactagtgtgaattttattttgaagaatttggggaatattaagagattttgtataggatatatactaaccatatttgtagttaagatatccattagtttgaggccaccccgggacgtgtcttggatccagaaagctccctatttacttgaggcacaatttcttcctggtacatagatatgggttacattgttgataagatgcaatctaaaaatctggctaaagcataatgtcccaatttatgagaagggaaaattttgaatttaatgtgaagcttgctttgtgtttttctttagacttgattcagacttttcttaaagactaattacaaytccaattttaaatacttatgataagctagtataaaatgggaagtgtgtgaagacaatagcctttggaccaaaaacaaaaaaatgtac

SEQ ID NO: 593746 - DNA, 584 bp, Homo sapiens
ttttctttagacttgattcagacttttcttaaagactaattacaattccaattttaaatacttatgataagctagtataaaatgggaagtgtgtgaagacaatagcctttggaccaaaaacaaaaaaatgtacgtttcgcacaatcttaaaatattactattgtcaaattttcattttgaaacagatgataagtctgtttactgattatagttaaaaggcagaaaagtacttatttttcagctgagattattgcatataaaagattcctctctaatagcatagcaagataaattttattattaacctcttatgtgccaggaaattttctaaacactttatcattacttacttcaatggcttataatgtaaagttatattttttgactgttatattttgttaatcactagtactgaaaatcatgtctgatttcataaaaaataaaagtaataaatgtaaatgtttcattaaaacagactcatctgttgtgagaacaaggtgtcataactatagtgaacctagtagccaccaacgggttaggcaaygattggagacagtgttggtgggcttgagaccacaaaggcg

SEQ ID NO: 593747 - DNA, 382 bp, Homo sapiens
gtatatgtaaaagatatattttctcttccatttcattgctttaagtactttccgtggtaacaatcactscagttggattttttaaatgatgagagactattcttactaccatatttttgctacttaaatagcattcagtgtattaggagggtgagcaaacaatatacatatacactgaaaaacaaaatttttaaagatagtttttccagaataaagcagtcaatgacacatttcaactcatgaccaaatgaggttttaaactactacagtgtcttgtttcaaatgcaacaaatttcaaagaaagtttgtttaagagttttcctttaaaaataaaagttctttacccaaatctctgcagaacaaagctgaagagagtgattat

SEQ ID NO: 593748 - DNA, 382 bp, Homo sapiens
gtatatgtaaaagatatattttctcttccatttcattgctttaagtactttccgtggtaacaatcactgcagttggattttttaaatgatgagagactattcttactaccatrtttttgctacttaaatagcattcagtgtattaggagggtgagcaaacaatatacatatacactgaaaaacaaaatttttaaagatagtttttccagaataaagcagtcaatgacacatttcaactcatgaccaaatgaggttttaaactactacagtgtcttgtttcaaatgcaacaaatttcaaagaaagtttgtttaagagttttcctttaaaaataaaagttctttacccaaatctctgcagaacaaagctgaagagagtgattat

SEQ ID NO: 593749 - DNA, 382 bp, Homo sapiens
gtatatgtaaaagatatattttctcttccatttcattgctttaagtactttccgtggtaacaatcactgcagttggattttttaaatgatgagagactattcttactaccatatttttgctacttaaatagcattcagtgtattaggagggtgagcaaacaatatacatrtacactgaaaaacaaaatttttaaagatagtttttccagaataaagcagtcaatgacacatttcaactcatgaccaaatgaggttttaaactactacagtgtcttgtttcaaatgcaacaaatttcaaagaaagtttgtttaagagttttcctttaaaaataaaagttctttacccaaatctctgcagaacaaagctgaagagagtgattat

SEQ ID NO: 593750 - DNA, 557 bp, Homo sapiens
actgctatgtattttatatttaagctattggtaccaatatctatataattcaattttgtcataatagtgccatgtaaaaagccatcctaaatttcagtagcttatgacaaaacgtttacccccatgaggttcttaagtgcaggtgactacagtttagcatatttagtagttagatggctgtgctttaggttgcagttggttttgctttcttcaaagctgaagaattaagttcacatctgttctattttgtacttacgtttaaagggaagcagttactgaagcatgatattcccaygacaccagaattataagaacaaacaaaactgtgcaaatatctttaaaccttctgctcaaattacaactggttatattatagtggactattcaaatccctttgccaagctgaacatcaaccagcagaaaagtatattctgcccatagtgtgaggggatgagaagggagccataagtaacccatgtcacagagaaaaatttgttataactctgcattttatctggagcgtatctttatatgtagagtcaagcaaattttttctt

SEQ ID NO: 593751 - DNA, 475 bp, Homo sapiens
attaaataaatgaaatggacactgaacttgacattatttaaaatgtcatccctcagaagttaacttccaaataagtattttgtcatttctgtagtcctgaaatgtagtataccctaaacattatatgttacwgtcaaatcctctgctagaaataatacataatttcaaatttatttcagtttttatacaataaacctctatagaaatttgctaaatataattaaatattttcaaacaactattctctattttcaaacaactattctctagcaagttctattctctagaacttttttattttttatttttatttttttaatttaattgagacgtagtcttgctctgtctcccagactggagtgcagtggagcgatctcggctcactgcaagctccgcctcctggcttcatgccaatctcctgcctcagcctccggagtagctgggactacaggcgcccaccaccacgcccggctaa

SEQ ID NO: 593752 - DNA, 587 bp, Homo sapiens
gtgtgaacctgggagggtgagcttgcagtgagccgagatggcgtgactgcactccagactcagcgacaaagtgagactccatcaaaaaaaaaaaaagcaccaaagtaaattctttcatcacatgyaaatacacacacacacatgcacaaacacctgcattcaccggcacatgcacacataactggaatgtgcaaagagcaggcatgtacaagaatatgatttcataaggaattcccatcagcatttacaatgagaaagccaggagcccaaaaccagtattattacttccaaattctaattattttaaactatacaatgatacttattcccaaaattacatcttaattttatgaacacaaaatgatgcgttaaaaaatctgttttgtttattacacaagtttacccttgatttgatcagaacactgaaataatttcagaagtaatttccatagtgatcattaaacaatatgaaaatgaagttattgcatctcatattttttgtctttattcaattataatttatttcatcatatctttgcatgttaagtaattactgatcaagagcctgctaagtaccaagagttgta

SEQ ID NO: 593753 - DNA, 587 bp, Homo sapiens
gtgtgaacctgggagggtgagcttgcagtgagccgagatggcgtgactgcactccagactcagcgacaaagtgagactccatcaaaaaaaaaaaaagcaccaaagtaaattctttcatcacatgcaaatacacacacacacatgcacaaacacctgcattcaccggcacatgcacacataactggaatgtgcaaagagcaggcatgtacaagaatatgatttcataaggaattcccatcagcatttacaatgagaaagccaggagcccaaaaccagtattattacttccaaattctaattattttaaactatacaatgatacttattcccaaaattacatcttaattttatgaacacaaaatgatgcrttaaaaaatctgttttgtttattacacaagtttacccttgatttgatcagaacactgaaataatttcagaagtaatttccatagtgatcattaaacaatatgaaaatgaagttattgcatctcatattttttgtctttattcaattataatttatttcatcatatctttgcatgttaagtaattactgatcaagagcctgctaagtaccaagagttgta

SEQ ID NO: 593754 - DNA, 587 bp, Homo sapiens
gtgtgaacctgggagggtgagcttgcagtgagccgagatggcgtgactgcactccagactcagcgacaaagtgagactccatcaaaaaaaaaaaaagcaccaaagtaaattctttcatcacatgcaaatacacacacacacatgcacaaacacctgcattcaccggcacatgcacacataactggaatgtgcaaagagcaggcatgtacaagaatatgatttcataaggaattcccatcagcatttacaatgagaaagccaggagcccaaaaccagtattattacttccaaattctaattattttaaactatacaatgatacttattcccaaaattacatcttaattttatgaacacaaaatgatgcgttaaaaaatctgttttgtttattacacaagtttacccttgatttgatcagaacactgaaataattkcagaagtaatttccatagtgatcattaaacaatatgaaaatgaagttattgcatctcatattttttgtctttattcaattataatttatttcatcatatctttgcatgttaagtaattactgatcaagagcctgctaagtaccaagagttgta

SEQ ID NO: 593755 - DNA, 593 bp, Homo sapiens
catgttaagtaattactgatcaagagcctgctaagtaccaagagttgtatgctaaatctgtgcatgcaatgacaaaaaatgtgtagcctttcttacagtgtagtggaagatacacacatacatacaggcacagagaaagagacatgtttattaaacaaaacatgcaacacatacgtaaatacacttaaatgcctgtacacaaatacawttaggtggactacaccatggaacccaagaaaggacattgtgaaaatgctatatttaagctgagaataaaaaaaaataagtggaactcagtcagacacatatttaaaagttggggagagagctagtctacttgctatctcaacaaaaatgtaaaattataatacaagtttcaagagctggaaaccatttcaggcaactatagtgatctctttccaaatgaatgaagacattattaaagaaaatagtgctcataaatgctgtcagaataacattagaaaccttagctttatgtcaagtataaatcaatcctttcaacacttatatctttcaaaaatctccaaggcaacaaaaatccatcaaaagtaatagtgccagtgaatgcctgg

SEQ ID NO: 593756 - DNA, 595 bp, Homo sapiens
agtttatgttatgcaaatataactcaacacttgataatagagaaattttaakgttttatattaattttaatatttcaaaagaaaaaataaatacccaattaaagaaaatgtgtatttcatctttttaatctttgttgaaaaattatacttcatataatctttaaattttaaaaatttgccaataattactttctatgaaaataatttgtgttggccaaattatgtttgtaatagccactatttgagaaattaattttaaaatataaaaataagtgccttcaggagactcaacatgtaattatattcccaccacttgttatgtcctacttaatgtgcaaataaaattgtctatatgttgggaaactaactttaatatttgtctacccaaaaaccctctaaagtttccatttctttcttggaaatccaggtgcagaagaatggagataggagtaatgaaaagacatataattttatggaataagaaaaaagaggtaaagataggttgtttgatttttattaacattctatgctcaattataagatttaaaaacctgaaaaatcaggggaaagaacacaaaacgctcatatcttaagc

SEQ ID NO: 593757 - DNA, 537 bp, Homo sapiens
gatttaagaagtatggtggactaaaaatggtgacagatttatggcaatgcttaggtgtgaaaaggagaattaatcctgagaggaggaagtctggggaatttcttttaagactgcaaggtagataggattttgcagatcttgcataaaaatktccataaactttccattcgtgaaagaaccaaagacttggcaggatcttcatggagaacagctattatgtgcacacaaggaaaccgacacacgtttggtctgtcaaataaggccagtactcttatatgtaagtctagaattaaacctcaaagctacctatacactttcagaggatcacgcctcagaagggcaccacgcttgattgaaagctgtcatgttatcctgaattcttaataattttatatttgaccttgtgttttgtgaatgaagtctatggagcatgtttcttgcaaccccattcacatacagcatttgtgatgccccatgaacacagatttcctatggactcatgaatgtgggagttcaagtaaggctcaaaatgagttt

SEQ ID NO: 593758 - DNA, 571 bp, Homo sapiens
ttttcctggtataatttttgtccacagacctaaatcttgctcatctttcaaggcatacattacatattgcctttaatttctcataaggttaagttaggtgacttctccttgtaattgcaaatcattctctggatatttctcttgttgcttytataatgttttataatagtctatttactggtttatcttccccaccagaatgaattttctaaccactggttacatggtactattttttgttgtttttgttctgttgagcctgctaatccatatgcattaaacaaatgtgtgctaaatatagtaatctgtgaaaatttcttgtgtctcatagcaaagtaaaaacaatatattcttgatgaactaagataatataaagatacgagctctggagtaggttagcttgtggcagaagtctgctctgctatttacaaagtgtgttaacttggcaaaatatataaaactttgttatctttattatcatcttcaatatgaaagttattctatttacccacaatttttataagactaaggaatagtacaaataaaatggctatccagtgtaacaaactta

SEQ ID NO: 593759 - DNA, 571 bp, Homo sapiens
ttttcctggtataatttttgtccacagacctaaatcttgctcatctttcaaggcatacattacatattgcctttaatttctcataaggttaagttaggtgacttctccttgtaattgcaaatcattctctggatatttctcttgttgcttttataatgttttataatagtctatttactggtttatcttccccaccagaatgaattttctaaccactggttacatggtactattttttgttgtttttgttctgttgagcctgctaatccatatgcattaaacaaatgtgtgctaaatatagtaatctgtgaaaatttcttgtgtctcatagcaaagtaaaaacaatatattcttgatgaactaagataatataaagatacgagctctggagtaggttagcttgtggcagaagtctgctctgctatttacaaagtgtgttaacttggmaaaatatataaaactttgttatctttattatcatcttcaatatgaaagttattctatttacccacaatttttataagactaaggaatagtacaaataaaatggctatccagtgtaacaaactta

SEQ ID NO: 593760 - DNA, 455 bp, Homo sapiens
aaaactataaaatagagtaatcataataaaaaaattgaatgygaaagtagcaaaaatttagttatcctaatgtacgactcaatgctggtctattgcttaatgagtattaaaaataaacaacaaaaaaaggtgaactagagataacatatcacaaaattttataaaattcagttgataaaaaccaagtttttaatggcacatacaatattttatcaagttttggagatgctaattttaactgcttcttttattgatttattaaatagaattacgatttctggtatgcttgtctatttaatacatcaagtatatttgtgagtcccaccaagtagattcaacacctgcacgtacttcctagcagtgcactttttcaaagtcaaagcagacaattgcaaatacaactaattatctcataaatacaaaatagcataggtcaatcaattaaaatcaggtta

SEQ ID NO: 593761 - DNA, 552 bp, Homo sapiens
gatgactctagaaagagatcactgaagtatcaataatactctgtattatgagactcatggataaatgagaaatacacattttgtatacttttttcctttttgaggctaaaaaatgtgtttatcctataattcaaaaaagatttttctttgccaatatttattattttagatatacttttaatgttaccttcttttcagagttttttaatttttcaacctaataattattaagtatactgcattaagtattaaatgagaatgtgtaatactgcctcctgtagcctgctaacaaaatagtctattactttttcccaaatcaagatataaktttcaacaatataatcagaaggaatagaatgcaattaaataataaatgtaataaattaatattgtaaaattacattattaataattattttgggagaaaatttttgttatttgtttaatctgtcaaattattagaaaaacaaaagcacatcacacactggggcttgttgtggggttgggggtggggagggatagcattaggagatacacctaatgtaaatgaca

SEQ ID NO: 593762 - DNA, 564 bp, Homo sapiens
gattcaattatctatgaccatggtactgagactgctgccaaactgaattttaattcctctattaacttcttactttaatttcattctactattttcttcaattttatttcaaatctattcaaaccttgtgttttttttctttttctttatatataaaaagtgacaaaatttttctcacactttttatttatttcattccttgttgtcagaagatatgtgcttatcatctgagtttctcaaacataattacatttcacttattctgtaattttttatggtttcaagttatacatgtatttgyagaatgaattttcttttctaaatttcagaccaattttatggcgatttaaaattcttctcaaatctatattcagattttaatttcaaacatagccctctcctattgagcatatattctattttaccatgctgcctggctctctgttgttaagcatatacttattaataataatgcccagaatgtaatgcaactacgtttatttcttttgctacttatgtctaaaatgacatacatgagcaactgctttcataatagaactataa

SEQ ID NO: 593763 - DNA, 542 bp, Homo sapiens
ccattaattattgaaagttgagaagaacacttttattactttgaaatgagcagtgatctgtcctatcattatataaagtgccttcatttgattattttaaaaaattaaacctgagatgatgaagcagataaaaatataagatgtagtagaatggaacactctggccctttttaaattcaatgatagtgacattttktttttttatgtgtacgttattaaaatgtactcattaagaactgtgcacaaaaacaaattttgtatataaagttcttactctactaatgaaactagagaatgactgcagcctcatctcaaataatatcattttgtcatgtagatcacatcagaaaaacatagatacaaaaggccaatcatattccatggcatattcaccttaattttctattcacttgaaactacccgacatcttgtcacagattattttcctttgcaatatgctctaagttgaacatacaattaattttgatataaattatacaaaactagaaaatattgtaaattgttaacatatggttcttaga

SEQ ID NO: 593764 - DNA, 542 bp, Homo sapiens
ccattaattattgaaagttgagaagaacacttttattactttgaaatgagcagtgatctgtcctatcattatataaagtgccttcatttgattattttaaaaaattaaacctgagatgatgaagcagataaaaatataagatgtagtagaatggaacactctggccctttttaaattcaatgatagtgacattttgtttttttatgtrtacgttattaaaatgtactcattaagaactgtgcacaaaaacaaattttgtatataaagttcttactctactaatgaaactagagaatgactgcagcctcatctcaaataatatcattttgtcatgtagatcacatcagaaaaacatagatacaaaaggccaatcatattccatggcatattcaccttaattttctattcacttgaaactacccgacatcttgtcacagattattttcctttgcaatatgctctaagttgaacatacaattaattttgatataaattatacaaaactagaaaatattgtaaattgttaacatatggttcttaga

SEQ ID NO: 593765 - DNA, 569 bp, Homo sapiens
actgtatcatttagagaaccctggcaagaaaaaaactctgtacatattcagtacaaatgaaattcttccaaatatttttgatcagtaattggttgaattcacagataaggaacacatggatagagggcccactgtgtacaggaggatgtgcatgcgttatatgtaaacatgattccattttatatatgggagtggagcatcagcggattttggtatccgtgggtggatcctcgaaccaactcccttcagataccaaggaatgaatgtacatgtrtatcaacaaatgtcaaaactgtcacatattaagtgctaatggatagcaattatttttattatttcattttgtaaaggtgaaacattttcgaggctttcatataaagtctgtataaactcatagtgaattcaccttgaagacttaattaagattctactattaattcttgttaggtcttccaaaattgtccattgcaaagccatttgtttattctgggctcagttactcatctagctagttatttccatctttaggactctatatttttctccttcttttaaacttttgatgttct

SEQ ID NO: 593766 - DNA, 440 bp, Homo sapiens
acttgtcctattttacatttaatkttatcattaatgccatctgagattacaattttgaagagatctacagtagctacttctcagtacagtcctataataagggatccattttacaaatgaggcacaaaatgaatgactttttttccaaataacacagccaaactatacacaactaggttagtaacatcagtcatttagtctaacacagtggtcaagtgtctgggctctggagtcaaacataagtgaattaaaatccaggttttgctgctcactagttgtgtgatcatgtacaaattagtacatcataaatcaaatttgacatcataagtcaaatggggataatattaggatcttccctaggggttgtaatattggacctttgtcttttggagtatgtccaatatctacctggttcctagttggaatctaaatgtttggag

SEQ ID NO: 593767 - DNA, 527 bp, Homo sapiens
gcaaactacgagcacagcaagcttcactgcctggcccctcgctccaacaccccacaatttgagatgtcgacctgtaatagacagaaaagaatgaggcagggaggaccagagcaaatcagcaatacagagtcaaacatsttccctatatcatatgaaggaaatacatgtttatcactgaatggtgtcatctttgatctccaaacaaaaagcattaatgactcatcatcaaaacattccctattactaaggatggcttttcactaatccacccataatctgctatccaatatgaacaaaaatataagatgaaatttctggctggggaccagaacaaagcccacagatgtacaagggaccaagggtcttcttggttctgtgctaacacccacagatctttcttgccaatggaaatcatttagtattgggttacaaatatactatagtatttagtcacagaggtccttcaaaataacattatgattaaataaaagatctaatgttatttcttgttttttgttttttgtttt

SEQ ID NO: 593768 - DNA, 551 bp, Homo sapiens
cgaaactaaaaccaaataacatgcaatgatgagggtatcaaagggacataggagccaactgaaagagctccccatggccatagcatcaacaacccgagcaacaagattgagtagtactgaattataccccagagtataacataaatgcccatacrtctatactgatatcaataaatgattgaatgaatgaatacgggaggagatgagacaaagctcccatgcagaagaattctaaataatttaggtactccatcctcacggaggtggagcatatgccccaatctttaggtgggggctgcatatagtgacttctttcgagaccacagtatgaaaaagaggactgtggtactagtttgctagagctgtggcttaaacaacagaaatttattttcttacaattctgactagaagctcaagatcaaggggttggcagagttggtttcttccggtttcttctctccttggcttacagatggttgtgttttctctgtgtctttgcatggtcttccctctgtacctgtctgtgtcttaatcttttcttcttataagga

SEQ ID NO: 593769 - DNA, 516 bp, Homo sapiens
caaaccctggcaaactagaagacaaaaagaaaaaaatttaaactagcaaatcaattattttacaatcatatataaacatatgataactatttataattaaacaatttatgaaaaaagamatcttggccaacatgaaattcacttttttttttttttttttttttttttgagacagagttaagctcttgttgcccaggctggagtacagtggcatgatctcagctcacagcaacctttgcctcctgggttcaagcaattctcctgcctcagcctcctgagtagctggaattacaggcgcctgccaccacactcagctaatttttttgtttttaataaagatggagtttcgccatattggccaagctggtctccaaactcctgacctcaggtgatccacccgcctcagcctcccaaagtgctgggattacaggtgtgagccaccacgtccagctgaaatttactttttaaattagtaaacaaaaaatattttagctctcatagcaccaccattcccaa

SEQ ID NO: 593770 - DNA, 573 bp, Homo sapiens
aggcaggaggatcacttgagcttaggaatttgagaccagcctgggcaacatagtgagattccatctctacaagaaagaaaaaattagctgggcatcactgcatatgcctgtagtcctaactacttgggaggctgaggtgggaggatcacttgagcctgggaggttgaggctgtagtgaaccatgactgtgccactacacccttgcctgggtgacatagtgagaccctgtattacaaaaaaaaaaaaaaggtgactaggtcgtgagggctctgccctcatggatggatttatgcagtcataatggaagtgggttagttactgcagtaatggcatcctgatgaaagaatgagcttggcccccttcctgtctctgtcttacatgctctcttcccttccaccttccaccataagatgacrtagcaagaagaccctcaactagatgtagcctatcaaccttgctctttcttgcatccacaacaatgagccaaataaatttctgttcattataaattacccagtctggtattcttatataccagtataaaacagactaagatactcatataatggagaa

SEQ ID NO: 593771 - DNA, 261 bp, Homo sapiens
gtttttaaaagatacttgtttgtttgtagcttgaaggcctacagtggctcatggcaatggttgaggttgctaagatttggtggaagaaggcaaaatgaaatggccacttatatggtatatggtatatggatcacttgtttctgttgagttacagaytcagctggctatttctcccaatgttagttatttggagaaaaaaaacgtgatggtaattttggggtaacaaatacaatatttgatgaaagcaaatttattgagggt

SEQ ID NO: 593772 - DNA, 239 bp, Homo sapiens
ctcagggaaagcctgtctacatcaatgcagactttctctacaaatataaatctccccaacaaacacagcttttcagctattcttgtagaagaagctatctccagtcttccgagtagccatcttgaaatatgtcaaaaagctggccaggcgcatgcctgtaatcccagcactttgggaggctgaagtgggtagatcacctgaagtcaggagttgsagaccagcctgaccaacatggtgaa

SEQ ID NO: 593773 - DNA, 546 bp, Homo sapiens
ttgacaaatgtctcctggggaaaactctccaccagttgacagccaaagttatggaaatattggawttgccaattgagattttatgtaatccaaaacaaatacttttctttgtttttaagcatctacttccatctacttatctacttatttttacttttatttgtaacttaattccatcaaggagagagagtgcattttctgttatgctaaagttttgaagaatgtattgattttttatgacatgatatatggatgatatgtagatattacatctttgcattatcaaatttcagggcgataataaaataaatacttataatatttatattgtcactgtatattagttattttctttcttcactacaggagtttttcaacctataggctatttttcaattctaggttatacagtagattttgaaatgttatgattaaatatctacttctcaagcattcatctttgcaaatgaaacaatcccaagctcttataatgtacatcatataaaggccagattagtcaatatgtggttcagaaatagtcatgta

SEQ ID NO: 593774 - DNA, 546 bp, Homo sapiens
ttgacaaatgtctcctggggaaaactctccaccagttgacagccaaagttatggaaatattggaattgccaattgagattttatgtaatccaaaacaaatacttttctttgtttttaagcatctacttccatctacttatctacttatttttacttttatttgtaacttaattccatcaaggagagagagtgcattttctgttatgctaaakttttgaagaatgtattgattttttatgacatgatatatggatgatatgtagatattacatctttgcattatcaaatttcagggcgataataaaataaatacttataatatttatattgtcactgtatattagttattttctttcttcactacaggagtttttcaacctataggctatttttcaattctaggttatacagtagattttgaaatgttatgattaaatatctacttctcaagcattcatctttgcaaatgaaacaatcccaagctcttataatgtacatcatataaaggccagattagtcaatatgtggttcagaaatagtcatgta

SEQ ID NO: 593775 - DNA, 384 bp, Homo sapiens
aacttctttgtgttgtgtgtattcaactgacagagttgaaccttcctttagacagagcagatttgaaacwctctttttgtggaatttccaagtggagacttcaagcgctttgaggtcaaaggcagaaaagttattatctttgtataaaaaccagacagaatcattctcagaaactgctctgtgatgtgtgcgttcaactcacagagtttaacttttcttttcattcagcagtttggaaacactctgtttgtaaagtctgcacgtggatattttgacctctttgaggccttcgttggaaacgggtttttttcatgtaattctagacagaagaaatctcagtaacttccttgtgttgtgtgtattcaactgccagagttgaacctt

SEQ ID NO: 593776 - DNA, 384 bp, Homo sapiens
aacttctttgtgttgtgtgtattcaactgacagagttgaaccttcctttagacagagcagatttgaaacactctttttgtggaatttscaagtggagacttcaagcgctttgaggtcaaaggcagaaaagttattatctttgtataaaaaccagacagaatcattctcagaaactgctctgtgatgtgtgcgttcaactcacagagtttaacttttcttttcattcagcagtttggaaacactctgtttgtaaagtctgcacgtggatattttgacctctttgaggccttcgttggaaacgggtttttttcatgtaattctagacagaagaaatctcagtaacttccttgtgttgtgtgtattcaactgccagagttgaacctt

SEQ ID NO: 593777 - DNA, 320 bp, Homo sapiens
cctctttgaggccttcgttggaaacgggtttttttcatgtaattctagacagaagaaatctcagtaacttccttgtgttgtgtgtattcaactgmcagagttgaaccttcctttagacagagcacattcgaaacactctttttgtgcaatttgcaagtggagacttcaagcgctttgaggccaaaggcagaagaggaaatatcttcgtataaaaaccagacagaataattctcagaaactgctctgtgatgtgtgcgttcaactcacagagtttaacttttcttttcattcagcagtttggaaacactctgtttgtaaag

SEQ ID NO: 593778 - DNA, 320 bp, Homo sapiens
cctctttgaggccttcgttggaaacgggtttttttcatgtaattctagacagaagaaatctcagtaacttccttgtgttgtgtgtattcaactgccagagttgaaccttcctttagacagagcasattcgaaacactctttttgtgcaatttgcaagtggagacttcaagcgctttgaggccaaaggcagaagaggaaatatcttcgtataaaaaccagacagaataattctcagaaactgctctgtgatgtgtgcgttcaactcacagagtttaacttttcttttcattcagcagtttggaaacactctgtttgtaaag

SEQ ID NO: 593779 - DNA, 463 bp, Homo sapiens
aactgctctgtgatgtgtgcgttcaactcacagagtttaacttttcttttcattcagcagtttggaaacactctgtttgtaaagtctgcacgtggatattttgacctctttgaggccttcgttggaaacgggtttttttcatgtaattctagacagaagaaatctcagtaacttccttgtgttgtgtgtattcaactgccagagttgaaccttcctttagacagagcacattcgaaacactctttttstgcaatttgcaagtggagacttcaagcgctttgaggccaaaggcagaagaggaaatatcttcgtataaaaaccagacagaataattctcagaaactgctctgtgatgtgtgcgttcaactcacagagtttaacttttcttttcattcagcagtttggaaacactctgtttgtaaagtctgcacgtggatattttgacctctttgaggccttcgtt

SEQ ID NO: 593780 - DNA, 320 bp, Homo sapiens
cctctttgaggccttcgttggaaacgggtttttttcatgtaattctagacagaagaaatctcagtaacttccttgtgttgtgtgtattcaactgccagagttgaaccttcctttagacagagcacattcgaaacactctttttgtgcaatttgcaagtggagacttcaagcgctttgaggccaaaggcagaaraggaaatatcttcgtataaaaaccagacagaataattctcagaaactgctctgtgatgtgtgcgttcaactcacagagtttaacttttcttttcattcagcagtttggaaacactctgtttgtaaag

SEQ ID NO: 593781 - DNA, 400 bp, Homo sapiens
tcagtaacttccttgtgttgtgtgtattcaactgccagagttgaaccttcctttagacagagcacattcgaaacactctttttgtgcaatttgcaagtggagacttcaagcgctttgaggccaaaggcagaagaggaaatatcttcgtataaaaaccmgacagaataattctcagaaactgctctgtgatgtgtgcgttcaactcacagagtttaacttttcttttcattcagcagtttggaaacactctgtttgtaaagtctgcacgtggatattttgacctctttgaggccttcgttggaaacgggtttttttcatgtaaggctagacagaggaattcccagtaacttccttgtgttgtgtgcattcaactcacagagttgaatgattctttacacag

SEQ ID NO: 593782 - DNA, 320 bp, Homo sapiens
cctctttgaggccttcgttggaaacgggtttttttcatgtaattctagacagaagaaatctcagtaacttccttgtgttgtgtgtattcaactgccagagttgaaccttcctttagacagagcacattcgaaacactctttttgtgcaatttgcaagtggagacttcaagcgctttgaggccaaaggcagaagaggaaatatcttcgtataaaaaccagacagaatmattctcagaaactgctctgtgatgtgtgcgttcaactcacagagtttaacttttcttttcattcagcagtttggaaacactctgtttgtaaag

SEQ ID NO: 593783 - DNA, 388 bp, Homo sapiens
ttgtgttgtgtgtattcaactgccagagttgaaccttcctttagacagagcacattcgaaacactctttttgtgcaatttgcaagtggagacttcaagcgctttgaggccaaaggcagaagaggaaatatcttcgtataaaaaccagacagaataattctcagaaactgctctgtgatgtgtgcgttcaactcacagagtttaacttttcttttcattcagcagtttggaaacactctgtttgtaaagtctgcamgtggatattttgacctctttgaggccttcgttggaaacgggtttttttcatgtaaggctagacagaggaattcccagtaacttccttgtgttgtgtgcattcaactcacagagttgaatgattctttacacag

SEQ ID NO: 593784 - DNA, 355 bp, Homo sapiens
gaataattctcagaaactgctctgtgatgtgtgcgttcaactcacagagtttaacttttcttttcattcagcagtttggaaacactctgtttgtaaagtctgcacgtggatatyttgacctctttgaggccttcgttggaaacgggtttttttcatgtaaggctagacagaggaattcccagtaacttccttgtgttgtgtgcattcaactcacagagttgaatgattctttacacagagctgatttggacactcttttggtggaatttgtaactggagaaatcagcagctttgaggtcaatggtagaaaaggaaatatcttcgtataaaaactagacagaatgattctcagaaa

SEQ ID NO: 593785 - DNA, 355 bp, Homo sapiens
gaataattctcagaaactgctctgtgatgtgtgcgttcaactcacagagtttaacttttcttttcattcagcagtttggaaacactctgtttgtaaagtctgcacgtggatattttgrcctctttgaggccttcgttggaaacgggtttttttcatgtaaggctagacagaggaattcccagtaacttccttgtgttgtgtgcattcaactcacagagttgaatgattctttacacagagctgatttggacactcttttggtggaatttgtaactggagaaatcagcagctttgaggtcaatggtagaaaaggaaatatcttcgtataaaaactagacagaatgattctcagaaa

SEQ ID NO: 593786 - DNA, 400 bp, Homo sapiens
tcagtaacttccttgtgttgtgtgtattcaactgccagagttgaaccttcctttagacagagcacattcgaaacactctttttgtgcaatttgcaagtggagacttcaagcgctttgaggccaaaggcagaagaggaaatatcttcgtataaaaaccagacagaataattctcagaaactgctctgtgatgtgtgcgttcaactcacagagtttaacttttcttttcattcagcagtttggaaacactctgtttgtaaagtctgcacgtggatattttgacctctttgaggccttcgttggaaacgggtttttttcatgtaaggmtagacagaggaattcccagtaacttccttgtgttgtgtgcattcaactcacagagttgaatgattctttacacag

SEQ ID NO: 593787 - DNA, 355 bp, Homo sapiens
gaataattctcagaaactgctctgtgatgtgtgcgttcaactcacagagtttaacttttcttttcattcagcagtttggaaacactctgtttgtaaagtctgcacgtggatattttgacctctttgaggccttcgttggaaacgggtttttttcatgtaaggctagacagaggaattcccagtaacttccttgtgttgtgtgcattcaactcacagagttgaatgattctttacacagagctgatttggacactcttttggtggaatttgtaastggagaaatcagcagctttgaggtcaatggtagaaaaggaaatatcttcgtataaaaactagacagaatgattctcagaaa

SEQ ID NO: 593788 - DNA, 250 bp, Homo sapiens
aactgttttgtgatgtgtgygttcaactcacagagtttaacctttcttttcatagagcagttaggaaacacactgtttgtgaagcctgccagtggatattcggacctctttgaggccttcgttggaaacgggatttcttcatattatgctagacagaagatttctcagtaacttctttgtgttgtgtgtatgcaactcacagagttcaaccttcctttacacagagtagatttgaagcactctttttgtg

SEQ ID NO: 593789 - DNA, 250 bp, Homo sapiens
aactgttttgtgatgtgtgtgttcaactcacagagtttaacctttcttttcayagagcagttaggaaacacactgtttgtgaagcctgccagtggatattcggacctctttgaggccttcgttggaaacgggatttcttcatattatgctagacagaagatttctcagtaacttctttgtgttgtgtgtatgcaactcacagagttcaaccttcctttacacagagtagatttgaagcactctttttgtg

SEQ ID NO: 593790 - DNA, 250 bp, Homo sapiens
aactgttttgtgatgtgtgtgttcaactcacagagtttaacctttcttttcatagagcagttaggaaacacwctgtttgtgaagcctgccagtggatattcggacctctttgaggccttcgttggaaacgggatttcttcatattatgctagacagaagatttctcagtaacttctttgtgttgtgtgtatgcaactcacagagttcaaccttcctttacacagagtagatttgaagcactctttttgtg

SEQ ID NO: 593791 - DNA, 341 bp, Homo sapiens
aaacacactgtttgtgaagcctgccagtggatattcggacctctttgaggccttcgttggaaacgggatttcttcatattwtgctagacagaagatttctcagtaacttctttgtgttgtgtgtatgcaactcacagagttcaaccttcctttacacagagtagatttgaagcactctttttgtggaatttgcaagtggagatttcaagcgcttcaatgccaatggtagaaaaggaaatatcttcgtataaaaagaagacaaactcgttcccagacactgcgtagtgatgtgtgtgtttaactcacagagtttaacctttcttttcatacagcattctgga

SEQ ID NO: 593792 - DNA, 401 bp, Homo sapiens
acactgtttgtgaagcctgccagtggatattcggacctctttgaggccttcgttggaaacgggatttcttcatattatgctagacagaagatttctcagtaacttctttgtgttgtgtgtatgcaactcacagagttcaaccttcctttasacagagtagatttgaagcactctttttgtggaatttgcaagtggagatttcaagcgcttcaatgccaatggtagaaaaggaaatatcttcgtataaaaagaagacaaactcgttcccagacactgcgtagtgatgtgtgtgtttaactcacagagtttaacctttcttttcatacagcattctggaaaccctctgtttgtaaagtctgcaagtggatatttttacctcttagatgtcttcgttggaaacg

SEQ ID NO: 593793 - DNA, 401 bp, Homo sapiens
acactgtttgtgaagcctgccagtggatattcggacctctttgaggccttcgttggaaacgggatttcttcatattatgctagacagaagatttctcagtaacttctttgtgttgtgtgtatgcaactcacagagttcaaccttcctttacacagagyagatttgaagcactctttttgtggaatttgcaagtggagatttcaagcgcttcaatgccaatggtagaaaaggaaatatcttcgtataaaaagaagacaaactcgttcccagacactgcgtagtgatgtgtgtgtttaactcacagagtttaacctttcttttcatacagcattctggaaaccctctgtttgtaaagtctgcaagtggatatttttacctcttagatgtcttcgttggaaacg

SEQ ID NO: 593794 - DNA, 341 bp, Homo sapiens
aaacacactgtttgtgaagcctgccagtggatattcggacctctttgaggccttcgttggaaacgggatttcttcatattatgctagacagaagatttctcagtaacttctttgtgttgtgtgtatgcaactcacagagttcaaccttcctttacacagagtagatttgaarcactctttttgtggaatttgcaagtggagatttcaagcgcttcaatgccaatggtagaaaaggaaatatcttcgtataaaaagaagacaaactcgttcccagacactgcgtagtgatgtgtgtgtttaactcacagagtttaacctttcttttcatacagcattctgga

SEQ ID NO: 593795 - DNA, 341 bp, Homo sapiens
aaacacactgtttgtgaagcctgccagtggatattcggacctctttgaggccttcgttggaaacgggatttcttcatattatgctagacagaagatttctcagtaacttctttgtgttgtgtgtatgcaactcacagagttcaaccttcctttacacagagtagatttgaagcactctttttgtggaatttgcaagtggaratttcaagcgcttcaatgccaatggtagaaaaggaaatatcttcgtataaaaagaagacaaactcgttcccagacactgcgtagtgatgtgtgtgtttaactcacagagtttaacctttcttttcatacagcattctgga

SEQ ID NO: 593796 - DNA, 535 bp, Homo sapiens
cctttacacagagtagatttgaagcactctttttgtggaatttgcaagtggagatttcaagcgcttcaatgccaatggtagaaaaggaaatatcttcgtataaaaasaagacaaactcgttcccagacactgcgtagtgatgtgtgtgtttaactcacagagtttaacctttcttttcatacagcattctggaaaccctctgtttgtaaagtctgcaagtggatatttttacctcttagatgtcttcgttggaaacgggatttcttcatataatgctagagggaagaattcttagtaacttctttgtgttgtgtgtattcaactgacagagttgaaccttcctttagacagagcagatttggaactctctttttgtggaatttgcaagtggagatttcaagcgctttgaggccaaaagcagaaaaggaaatattttcctatgaaaactagacagaatcattctcagaaactgctctgtgatgtgtgcgttcaactcacagagtttaacttttcttttcattcagcagtttggaaa

SEQ ID NO: 593797 - DNA, 397 bp, Homo sapiens
tggagatttcaagcgcttcaatgccaatggtagaaaaggaaatatcttcgtataaaaagaagacaaactcgttcccagacactgcgtagtgatgtgtgtgtttaactcacagagtttaacctttcttttcatacagcattctggaaaccctstgtttgtaaagtctgcaagtggatatttttacctcttagatgtcttcgttggaaacgggatttcttcatataatgctagagggaagaattcttagtaacttctttgtgttgtgtgtattcaactgacagagttgaaccttcctttagacagagcagatttggaactctctttttgtggaatttgcaagtggagatttcaagcgctttgaggccaaaagcagaaaaggaaatattttcctatgaaa

SEQ ID NO: 593798 - DNA, 397 bp, Homo sapiens
tggagatttcaagcgcttcaatgccaatggtagaaaaggaaatatcttcgtataaaaagaagacaaactcgttcccagacactgcgtagtgatgtgtgtgtttaactcacagagtttaacctttcttttcatacagcattctggaaaccctctgtttgtaaagtctgcaagtggatatttktacctcttagatgtcttcgttggaaacgggatttcttcatataatgctagagggaagaattcttagtaacttctttgtgttgtgtgtattcaactgacagagttgaaccttcctttagacagagcagatttggaactctctttttgtggaatttgcaagtggagatttcaagcgctttgaggccaaaagcagaaaaggaaatattttcctatgaaa

SEQ ID NO: 593799 - DNA, 397 bp, Homo sapiens
tggagatttcaagcgcttcaatgccaatggtagaaaaggaaatatcttcgtataaaaagaagacaaactcgttcccagacactgcgtagtgatgtgtgtgtttaactcacagagtttaacctttcttttcatacagcattctggaaaccctctgtttgtaaagtctgcaagtggatattttkacctcttagatgtcttcgttggaaacgggatttcttcatataatgctagagggaagaattcttagtaacttctttgtgttgtgtgtattcaactgacagagttgaaccttcctttagacagagcagatttggaactctctttttgtggaatttgcaagtggagatttcaagcgctttgaggccaaaagcagaaaaggaaatattttcctatgaaa

SEQ ID NO: 593800 - DNA, 452 bp, Homo sapiens
aggaaatatcttcgtataaaaagaagacaaactcgttcccagacactgcgtagtgatgtgtgtgtttaactcacagagtttaacctttcttttcatacagcattctggaaaccctctgtttgtaaagtctgcaagtggatatttttacctcttagatgtcttcgttgsaaacgggatttcttcatataatgctagagggaagaattcttagtaacttctttgtgttgtgtgtattcaactgacagagttgaaccttcctttagacagagcagatttggaactctctttttgtggaatttgcaagtggagatttcaagcgctttgaggccaaaagcagaaaaggaaatattttcctatgaaaactagacagaatcattctcagaaactgctctgtgatgtgtgcgttcaactcacagagtttaacttttcttttcattcagcagtttggaaac

SEQ ID NO: 593801 - DNA, 317 bp, Homo sapiens
tggagatttcaagcgcttcaatgccaatggtagaaaaggaaatatcttcgtataaaaagaagacaaactcgttcccagacactgcgtagtgatgtgtgtgtttaactcacagagtttaacctttcttttcatacagcattctggaaaccctctgtttgtaaagtctgcaagtggatatttttacctcttagatgtcttcgttggaaacgggatttcytcatataatgctagagggaagaattcttagtaacttctttgtgttgtgtgtattcaactgacagagttgaaccttcctttagacagagcagatttggaac

SEQ ID NO: 593802 - DNA, 540 bp, Homo sapiens
aaggaaatatcttcgtataaaaagaagacaaactcgttcccagacactgcgtagtgatgtgtgtgtttaactcacagagtttaacctttcttttcatacagcattctggaaaccctctgtttgtaaagtctgcaagtggatatttttacctcttagatgtcttcgttggaaacgggatttcttcatataatgctagagggaagaattcttagtaacttctttstgttgtgtgtattcaactgacagagttgaaccttcctttagacagagcagatttggaactctctttttgtggaatttgcaagtggagatttcaagcgctttgaggccaaaagcagaaaaggaaatattttcctatgaaaactagacagaatcattctcagaaactgctctgtgatgtgtgcgttcaactcacagagtttaacttttcttttcattcagcagtttggaaacactctgtttgtaaagtctgcacgtggatattttgacctctttgaggccttcgttggaaacgggtttttttcatgtaaggctagacag

SEQ ID NO: 593803 - DNA, 353 bp, Homo sapiens
ctctttttgtggaatttgcaagtggagatttcaagcgctttgaggccaaaagcagaaaaggaaatattttcctatgaaaactmgacagaatcattctcagaaactgctctgtgatgtgtgcgttcaactcacagagtttaacttttcttttcattcagcagtttggaaacactctgtttgtaaagtctgcacgtggatattttgacctctttgaggccttcgttggaaacgggtttttttcatgtaaggctagacagaagaaatctcagtaacttccttgtgttgtgcgtattcaactgacagagttgaaccttcctttagacagagcagattcgaaacactctttttgtgca

SEQ ID NO: 593804 - DNA, 469 bp, Homo sapiens
cgtagtgatgtgtgtgtttaactcacagagtttaacctttcttttcatacagcattctggaaaccctctgtttgtaaagtctgcaagtggatatttttacctcttagatgtcttcgttggaaacgggatttcttcatataatgctagagggaagaattcttagtaacttctttgtgttgtgtgtattcaactgacagagttgaaccttcctttagacagagcagatttggaactctctttttgtggaatttgcaagtggagatttcaagcgctttgaggccaaaagcagaaaaggaaatattttcctatgaaaactagacagaatcattctcagaaactgctctgtgatgtgtgygttcaactcacagagtttaacttttcttttcattcagcagtttggaaacactctgtttgtaaagtctgcacgtggatattttgacctctttgaggccttcgttggaaacgggtt

SEQ ID NO: 593805 - DNA, 540 bp, Homo sapiens
aaggaaatatcttcgtataaaaagaagacaaactcgttcccagacactgcgtagtgatgtgtgtgtttaactcacagagtttaacctttcttttcatacagcattctggaaaccctctgtttgtaaagtctgcaagtggatatttttacctcttagatgtcttcgttggaaacgggatttcttcatataatgctagagggaagaattcttagtaacttctttgtgttgtgtgtattcaactgacagagttgaaccttcctttagacagagcagatttggaactctctttttgtggaatttgcaagtggagatttcaagcgctttgaggccaaaagcagaaaaggaaatattttcctatgaaaactagacagaatcattctcagaaactgctctgtgatgtgtgcgttcaactcacagagtttaacttttctttycattcagcagtttggaaacactctgtttgtaaagtctgcacgtggatattttgacctctttgaggccttcgttggaaacgggtttttttcatgtaaggctagacag

SEQ ID NO: 593806 - DNA, 196 bp, Homo sapiens
attttgacctctttgaggccttcgttggaaacgggtttttttcatgtaaggctagacagaagaaatctcagtaacttccttgtgttgtgygtattcaactgacagagttgaaccttcctttagacagagcagattcgaaacactctttttgtgcaatttgcaagtggagacttggatagcttcgaggatttcgatg

SEQ ID NO: 593807 - DNA, 563 bp, Homo sapiens
aataatcaattctcaagaagatgtaaacatcctactaattagggtatgcaggtaacaacagagcctccaaatacatgagataaaacwagaaagaaatcaaaggtgaactagaaaaatccaaaattatatttgcagacttcaacacttttgtcttagtaatgtaaacactaggcacaaactcagtaatcatgtggaagataagaacaacaatatcaccaacaagacatccaatcttcaatggcagatactctttcctttcaagtgaaaaaaaacagtatggcatattctctaacaaacccagaatttctaatatttgtgttcttccttccttctttccatcttcctttctcttctcttcccttcccttgccttcttccttcctttcttctttccctcttccttttttcttttttcttttcctttctttcttttctttcttttttctccttccttccttctttccttctttctttctttcctcttattcttccttccctcctccctgtcttcctttctccctcccttttcttccttcttttctcatattctttctttctgtctaa

SEQ ID NO: 593808 - DNA, 621 bp, Homo sapiens
caggtctcaaaggtacattctggtttcctggcatgatttcccccttttgtgggtagccttgaaactagtgatctcagttcagacagacccatgtctgaatttggtctggcttcagggtccaactcagcactcttactttagctcttacggataacaataaccaagagactgaatatttcactttttccttatttgtttacatttttatgcatccagtgaaccaactccctaggagttgaatttatttctaaattgtgttggtaacttttattgttaataattgcatgcagcacagctgcaactctacatcatgggtgactaggttgccaatcaggaatcaaagatkaatctaggcggggcacggtggctcacgcctgtaatcccagcactttgggaggccaaggcaggcggatcaccaggtcaggagatcgagaccatcctggctaacatggtgaaaccccgtctctactaaaaatacaaaaaattagccaggcgtggtggtgggcacctgtagtcccagctactcaggaggctgaggcaggagaatggcgtgaacccaggaggcggagattgcagtgagctgagatcgtaccattgcactgcagcctgggcgacagagtg

SEQ ID NO: 593809 - DNA, 474 bp, Homo sapiens
tacacagaatacaatttatttaacataaaaaactactccaatattttctgcatttttaatatgctcacccaaagaaagcattaatttgcatctttgatgttaaacagatagcctaatcaagtcactatcaagatcaagactaaaagttacagcttttttcttttgatgcctttcagatatatctatttatatataaaaatatatatacacacacacatacatacacacacacatmtatatgtagttatgtgtgtgtgtatatatagttacagttttggccaggtgcaatggctgacacctgtaatctcagcactttgggagaccaaggctgaaggcttgcttgaggccaggagtttgagaccagcctgggcaacgaagcaagaccctatctctacaatttttttttttaaacaaaattagccagggatgatggcatgcacttgtagtcccagatacttgggaggctgaggcgga

SEQ ID NO: 593810 - DNA, 474 bp, Homo sapiens
tacacagaatacaatttatttaacataaaaaactactccaatattttctgcatttttaatatgctcacccaaagaaagcattaatttgcatctttgatgttaaacagatagcctaatcaagtcactatcaagatcaagactaaaagttacagcttttttcttttgatgcctttcagatatatctatttatatataaaaatatatatacacacacacatacatacacacacacatctatatgtagttatgtgtgtgtgtatatatagttacagttttggccaggtgcaatggctgacacctgtaatctcagcactttgggagaccaaggctgaaggcttgcttgaggccaggagtttgagaccagcctgggcaacgaagcaagaccctatctctacaatttttttttttwaacaaaattagccagggatgatggcatgcacttgtagtcccagatacttgggaggctgaggcgga

SEQ ID NO: 593811 - DNA, 556 bp, Homo sapiens
ttaaaaattgcttatatccaaaatacaggcaataacaaacgccagtgaagatgtagagaaaagggaaccctggtacactgttgggaatgtaaattagtacaactactatggagaacagtttggaggttcctcaawaaaaaccaaaaatagagtaccctttgttctgttcaactggcctatgtgtctgtttttatgccagtaccatgctgttttggttactagagctcagtagtataatttgatgttaggtattgtgattcctccagttttcttctttttgctcaggagagatttggctattttgggtcttttatggttccatataaatttaaggattattttttctatttctgtaaagaatgccattggtattttaatagggatcacattgaatctgtagattgccttgggcagtatggacattgtaacaatatggagtcttccaatccatgaacatggaatatctttccactttccatttttttggtgtcctcttcagtttctttcatcagtgttttattgttttcgttatagagatctttcacttatttggtat

SEQ ID NO: 593812 - DNA, 582 bp, Homo sapiens
ctgatagcttgaaccagggcagtggcagcaaaaggagagagaagcaactggattctgcatgcattttgaaaggagagccaacacaaattactgctagasttggtacgctatggagaaaaagagaggagtcaaggtttagagccacagaaatgtacagtttccatgagagctcatttctggcaaatggctttactcaggaatcaaatgcagaccagatggacagttaggtgagcagagaattatgacaaagtaattcatctcactgacaacagctttcacttaagagcactgagtgtaggccaggccttgtgttaagcatgagcttacatcctccgtttcttcttccaacagcccaatggtaaacataccattatccccataaataaggaaattgaggctcagagcaaagtgatttgcccagcactgcgcagctactcggtgctggaactatgacttcaaccagacctgtctgacattccctcaaccactgcgctacacagattcctactcaaaatgctttttaaccacactcaggaacaattatggattgttctttttcctctagggctttttcaactactt

SEQ ID NO: 593813 - DNA, 563 bp, Homo sapiens
ttaaaaattgctaagagaggggccgaggcatggtggctcacgcctgtaatcccagcactttgggaggccaaggcaggcggatcacctgaggtcaggagttcaagatcagcctggccaacatggtaaaaccccatgtctactaaaaatacaaaaattagctgggtgtgttggtgtgttcctgtaatcccagctacttgggagactgaggcaggagaatcacttgaacctgggaggtggtggttgcagtgagccaagatcatgccactgcactccagcctggctgaaagagtgagactccatctcaaaaaaaaaaaaatcggtaagagtagattttaagtgttctcaccacaaacaagtatacaaagtaatgcatatgttaattagccagatttagtcaatccacaatgtatacatatttcaaaacattatcacattgcayacaataaacatattgaattttcatttgtcagttaaaaatataaataaattttaaaatgctaaaggaaggaagaaagggagggaaaaaagagaaagaaaaggcatgttgcctgcaccacagggca

SEQ ID NO: 593814 - DNA, 413 bp, Homo sapiens
actcaggcttctacctcctggaaggtgctgacckccatcagccagctgaattagcaccattttatctacagcaagatcaagagagagtctgtggcaggaagtacagagcctggggactgcgaagaaacagaaaactataataatactgaagccctcagaaccagagaaggggacttccagggtgcaacagaacaggtgtttgggagttggcaggttataggcactgttttccctttccaaaaatgggagaaaggtaagtgcctcgagagccctgtggaggggcctggtgtctcggggctccctgtttgttacccctgctctgccctacatcttcccagatggaattctggccacaagttatcaggttgcagatgaatagtgaatactttttttgaatttcatcattcttcccc

SEQ ID NO: 593815 - DNA, 521 bp, Homo sapiens
gacgtcttgtggatattgggtacctctgatgcgaagagaagggcactttcccctgtgatatgtatccaaaaatccataagcccagaataattgtaagagagcatcagacaaacataaactgagggacattctacaaaatatctgataagtacccgtcaaaagtgtgaagatcgtgaaaagcaaggaaagactgakgatctatcacagattggaggagactgaatagagatgacaactaattgtatgtgagatcctggattatatcctgcaacagaaaaaggacagtagtagaaaaagtagtagaaactgaacatagtctctaatttagttcatagtgttgtgccaatgttaacttcttagtttcaataaaaaaaaaaagttaagggaagatggatgaaagttatatgcaaacttcctgtactatcttaactcttctacagatcaaaattatttcaaaataaaaagtatttaaaggtctggcacagtggcttacacctataatcccagaaattttggaggct

SEQ ID NO: 593816 - DNA, 521 bp, Homo sapiens
gacgtcttgtggatattgggtacctctgatgcgaagagaagggcactttcccctgtgatatgtatccaaaaatccataagcccagaataattgtaagagagcatcagacaaacataaactgagggacattctacaaaatatctgataagtacccgtcaaaagtgtgaagatcgtgaaaagcaaggaaagactgaggatctatcacagattggaggagactgaatagagatgacaactaattgtatgtgagatcctggattatatcctgcaacagaaaaaggacagtagtagaaaaagtagtagaaactgaayatagtctctaatttagttcatagtgttgtgccaatgttaacttcttagtttcaataaaaaaaaaaagttaagggaagatggatgaaagttatatgcaaacttcctgtactatcttaactcttctacagatcaaaattatttcaaaataaaaagtatttaaaggtctggcacagtggcttacacctataatcccagaaattttggaggct

SEQ ID NO: 593817 - DNA, 551 bp, Homo sapiens
aatacatttgaggtatatgacataagtaaaaatgaaatataacttagtgtcaagaatagggaagaataattaatatacaattattcttcaatgagtagctatgttttataaaaagttttaaaatatttttagccagagtactctttcttcagatgaaatgttatttaaaagttcaaaagtttacaaaataagtaaaagtggaactattttggttaaagtgagtagyggaagtctggagtaccacctgctgtggagagctttctgggcagccgaaggcacagctagaaaaccactgctggataaaattataagtacaaataatagtcactgaaaatgagatgctactagtaagtataaaacatacgaaatttaaactagtaaaacatcaaagccatttttatttactgaagaacacaaacaaagtaaatataaagtatttttaataaataataatttacaacaaaagtataaaagacacctcaggccaggtggctcacgcctgtaattccagcattttgggaggctgaggcgggtggatcacctgaggtcag

SEQ ID NO: 593818 - DNA, 518 bp, Homo sapiens
actgcttatggaactgaaaatacaagtatctgtacatctagcaaacataatttaaatacagatttgttgaaatgtggcaaatagttaaattttttctgatttcaatctgtactaatttatttgtgacaaatgaactttggcttttctcattctgatcaagcaatattttagttccattgtaagtaccaagcattacctttttaaacaagaaattataatcctaccacattgcagaaagtaattattaatwtaaatcctccaacaataaacaacattattatattcatgatgtttaatcttctccccacatctcacttctctgaggggtctcaactttcttttctatttctgtcttctattttttctttgccaaagatatacttacctgtttcctttgtcttgcttccaaatttctccatttttattcccttcagatttgctgctggaaaactgtactcatggcttccaacctttgctctcactgcccagtctgacatattagagtaaattcccacttc

SEQ ID NO: 593819 - DNA, 631 bp, Homo sapiens
tttcctttctttttcttcacatttttcagcacaatttaacagtcagatataatttgggcagtatgatataaaactgagttttggaaaataggtgatataatcaacagacacattttattttattattttgttatttggtatacttcatttgatttgttcaattagcctgcttttttgtaatgatccatrttaactttgcattgaaggggccagatttcttattaactgaaaaaacgtaattgacaaaactacttttagctttgttaataccttctaataccataaaacaaataaaaagtgtttttaatcacattaaaaaataatgtataataatattgacattttataaaaaactgaatttgcaaattatgacacttttataattaacttttagctgaatgaatcactagaatattttctatatatgaaagactgtttttatgtaagagtattttaactttcttcaccaggctataaataacttgcaaccccttataatttttattgcttttgagaatacaatattgttttacagagtcctggtagacaatctccaaagctaaagcaaatattcaatacactatttaaataaatctcaggaatttctattttctcacattctttctgtaat

SEQ ID NO: 593820 - DNA, 631 bp, Homo sapiens
tttcctttctttttcttcacatttttcagcacaatttaacagtcagatataatttgggcagtatgatataaaactgagttttggaaaataggtgatataatcaacagacacattttattttattattttgttatttggtatacttcatttgatttgttcaattagcctgcttttttgtaatgatccatattaactttgcattgaaggggccagatttcttattaactgaaaaaacrtaattgacaaaactacttttagctttgttaataccttctaataccataaaacaaataaaaagtgtttttaatcacattaaaaaataatgtataataatattgacattttataaaaaactgaatttgcaaattatgacacttttataattaacttttagctgaatgaatcactagaatattttctatatatgaaagactgtttttatgtaagagtattttaactttcttcaccaggctataaataacttgcaaccccttataatttttattgcttttgagaatacaatattgttttacagagtcctggtagacaatctccaaagctaaagcaaatattcaatacactatttaaataaatctcaggaatttctattttctcacattctttctgtaat

SEQ ID NO: 593821 - DNA, 566 bp, Homo sapiens
agcgagcagttggatatatgggcctagatgggagatgcagaaatgtgcaaacaaacaaaagctatccaaacaccattcaaaaaatacttttctaagtaactatggcatcaaaaagaggaaacaactaataattatgatatcactaagaggaaaaatacttcagggagctaaaacggtatacagtgaagtatgtataaatattaaactttcattaaaacaaaataaggaattggccagatgtggtggctcatgcctgtaatccaagtactttgggaggccaaggtgggtgtatcacctgaggtcaggagtttgaaaccagcctggccaacatggcaaaaccccgcctctactaaaaatgaaaaaaataattagccaggcatggtggcacatacctgtaatcccagctacttgggaagctgaggcaggagaattgcttgaacctgggaggcagaggttgcrgtgagctgagattgtgccattgcactccaggctgggcaacaaaagtgaaacttcatctcagcaacaacaacaaaaaaaaggaattaagaaaaaggaaataaacatgc

SEQ ID NO: 593822 - DNA, 601 bp, Homo sapiens
aacaaaataaggaattggccagatgtggtggctcatgcctgtaatccaagtactttgggaggccaaggtgggtgtatcacctgaggtcaggagtttgaaaccagcctggccaacatggcaaaaccccgcctctactaaaaatgaaaaaaataattagccaggcatggtggcacatacctgtaatcccagctacttgggaagctgaggcaggagaattgcttgaacctgggaggcagaggttgcagtgagctgagattgtgccattgcactycaggctgggcaacaaaagtgaaacttcatctcagcaacaacaacaaaaaaaaggaattaagaaaaaggaaataaacatgccatgcaattcaagaagtatggtgatgactttgcagatatacgcatatattcaaatccattaaattgtatacattaaataactgtagtttttttttttcatgtcaattatacctcagtaaagtggttaaaaaaaagtagaaagaatatcacaacaaactcaggaacaaaagaattaaaatgataaatcaaaatgatgttttctaaaacagaacaaaatcagaaattatgacacaataataagatcaattgt

SEQ ID NO: 593823 - DNA, 601 bp, Homo sapiens
aacaaaataaggaattggccagatgtggtggctcatgcctgtaatccaagtactttgggaggccaaggtgggtgtatcacctgaggtcaggagtttgaaaccagcctggccaacatggcaaaaccccgcctctactaaaaatgaaaaaaataattagccaggcatggtggcacatacctgtaatcccagctacttgggaagctgaggcaggagaattgcttgaacctgggaggcagaggttgcagtgagctgagattgtgccattgcactccaggctgggcaacaaaagtgaaacttcatctcagcaacaacaacaaaaaaaaggaattaagaaaaaggaaataaacatgccatgcaattcaagaagtatggtgatgactttgyagatatacgcatatattcaaatccattaaattgtatacattaaataactgtagtttttttttttcatgtcaattatacctcagtaaagtggttaaaaaaaagtagaaagaatatcacaacaaactcaggaacaaaagaattaaaatgataaatcaaaatgatgttttctaaaacagaacaaaatcagaaattatgacacaataataagatcaattgt

SEQ ID NO: 593824 - DNA, 422 bp, Homo sapiens
gatggagagcaatggcacggtctgggctcactgcaacctctgcctcccgggttcaagtgattctcttgcctcagcctcccgagtagctgggattacaggcatgtgccaccatgcctggctaattttttgtatttttaktagagatggggtttctccatgtttttcaggctggtctcgaactcccgacctcaggtgatccacctgcctcggccttccaaaatgctgagattacaggcgtgagccactgcacctggcctgcagttctactattaacattaagtaaaatatcagacatagagaagttggtttataggattttattctaggttcctttgtttattacaattatttgcactttaaattcctatatataatttcacaaaaatctctatttaatttttaaatttaattatgagtacaaa

SEQ ID NO: 593825 - DNA, 422 bp, Homo sapiens
gatggagagcaatggcacggtctgggctcactgcaacctctgcctcccgggttcaagtgattctcttgcctcagcctcccgagtagctgggattacaggcatgtgccaccatgcctggctaattttttgtatttttattagagatggggtttctccatgtttttcaggctggtctcgaactcccgacctcaggtgatccacctgcctcggccttccaaaatgctgagattacaggcgtgagccactgcacctggcctgcagttctactattaacattaagtaaaatatcagacatagagaagttggtttataggaytttattctaggttcctttgtttattacaattatttgcactttaaattcctatatataatttcacaaaaatctctatttaatttttaaatttaattatgagtacaaa

SEQ ID NO: 593826 - DNA, 557 bp, Homo sapiens
ttgcagtgatctgagatcacatcactgctctccagcctgggcaacagaatgagacagaaagaaagagagagagaaagagagggagagagagaaagaaacacaaaggaaggaagaaagagagagagagagagagaaagaaagaaagaaaggtagagagagagagagaaagaaagaaagaaaagaaaagagaaaggaaaggaaaaggaaaggaaaggaaagagggagggaggraggaaggaaggaaggaaggaaggaaggaaggaaggaaggaaggaaggagaaatgtatgtcttagcccaacaagagagagaaagagagaattcaccctttctccacctttttattctatttgggtccacatggaatggataattctcacccacattagtgagggtggatcttctttactcagtctaccaattcaaatgctaatctcctctagaaatacagactgaaccagaaataacatttttccagctatctgagcctctgtcaacccaatcatgttgacaaataaaattaaacatcacaaatcataagtagagtgaccatatcat

SEQ ID NO: 593827 - DNA, 563 bp, Homo sapiens
ttatacacatactttttaattttcttgtacattttatctcttgttgtgagtcctttaagtataattctctcagcttctttagtacatcctcaagcatctttgaaaaagatgacgtcataggaaacatccactagaaatgaaaatccaagtcttagccagctaagcagataagarcttataaaaatgctacatcatttcattccaactgaatagaattgcagcatagaatagatttgtcttttaatcattctaagtaacatattatggagatgatatagactaaacacaagtagtgctaaaataaattctataagtagttctggcaatgtaatagttatttttctagccagcctagctgtgtacataatgggggtggctatggcttctgctgaggctcttcacactcagaactgcagcttatggtgggaaaaaggaaggccaaaaagtagagagcagagaggatacactgagtgtaaaaaaggaaggtgcaggtagctatttaagatccaaggtattttattgtataaactaaaataagaagaaaatagtcttagaaaagaatt

SEQ ID NO: 593828 - DNA, 591 bp, Homo sapiens
  misc_feature 578: n = A,T,C or G
aggcctcagaactcgggtgggcggggaccgcctctccccaacgaaggagttcccctcgagcgcccagcgttcgcgggagggacccacacagcctttcctccagcccagcccagcgccccgccgctctctccaccccacaagcggccggttacctaggcaaagcctcagtgcctggaaacacgttccgccgctcckgcttgcggccgccggggccgggagcacagagccttggggttgtaaattaggaagaaataactacctctgtcaaagcccctttctttctcgtgggcagacgaaaggaacacccccgtgttcccctcccggtggtgaagtgtgtggaggaaaccgtgaaacgcaccattgtgaccggggctcctctgcggagtttccaaccctggggagcgggggcggaggttgggcgggggcaagaggagcgagggagagactgacagaaagggaaagactgagattctcagaaagaccgagggagactagacaaaccgcggggaagaatttctgtgagcgcacggtcccaggcaaaggggtggatgggtgccggggggtggggggcggcggancgtggaggttgct

SEQ ID NO: 593829 - DNA, 591 bp, Homo sapiens
  misc_feature 578: n = A,T,C or G
aggcctcagaactcgggtgggcggggaccgcctctccccaacgaaggagttcccctcgagcgcccagcgttcgcgggagggacccacacagcctttcctccagcccagcccagcgccccgccgctctctccaccccacaagcggccggttacctaggcaaagcctcagtgcctggaaacacgttccgccgctcctgcttgcggccgccggggccgggagcacagagccttggggttgtaaattaggaagaaataactacctctgtcaaagcccctttctttctcgtgggcagacgaaaggaacacccccgtgttcccctcccggtggtgaagtgtgtggaggaaaccgtgaaacgcaccattgtgaccggggctcctctgcggagtttccaaccctggggagcgggggcggaggttgggcgggggcaagaggagcgagggagagactgacagaaagggaaagactgagattctcagaaagaccgagggagactagacaaaccgcggggaagaatttctgtgagcgcacggtcccaggsaaaggggtggatgggtgccggggggtggggggcggcggancgtggaggttgct

SEQ ID NO: 593830 - DNA, 584 bp, Homo sapiens
agtccacaatctgaatttaatgctacagctgacttaatgaaaaataaacttctttttttwaaaaaaaaaaaaatatattgactctgttcctggctgaagggagatctttcacagtctgtaaatggaggtgttttgctttcttttgcatgcatccctattaaatttcagatttggtttgggtttctcctccttctccttttaaacttctatacttcaatatattggctatttttctccaggttgcatcatcttccaaggtaataatatgctttctagctgttcctctttaagctgtcaacaacaacaacaacaacaacaaaatatatatatatacacacacacatatatatatatgactaacaaagggcctggtgacataacttgattggtagcaaaaaatagtgtaaaggttgaccccttttcgctcttcttgtttggccaactaaaaagctatgtaactgttttgtttggcccttaactcttcattttatcagaaggatatgacaaagaaacttaacaaacactgcgtgaaaatcaggacatactaaggatgcaggatttacccaacctatgtgcctagaata

SEQ ID NO: 593831 - DNA, 520 bp, Homo sapiens
atacaagtatgtatagatactgggattagcttcagagcctgcataattactaatgagaaaacatacttagtgtcctcattagttgatcatttcaagtatttttcagcatactaggatgttttctggtaatcagtgccacttaacggagtaacagacttgcaaatacgagaggtgctgctcagataaaaccaggcaccagcaaatggcatttaaatgtgttcacaagatagcctatgaaacaatgtggcttaagacacgttagaactacaaggtaaacagaatgaagctgcaaaaagagtggtttcatgaagcatctcagaagaccctctcaaattgttaccaattcaccagatgatttcacgccagttcctgcccctctgtgggccagtttcctgatccaaatggtaaaragattaagctaaattcattcccattatctctccaggcttctcattccctgatattctgaccataatattaataactgctatagttccactatgagtacaggtcagcattt

SEQ ID NO: 593832 - DNA, 606 bp, Homo sapiens
ttacaattgttatatgcttttgctgaattgacctctttatcattatattatgatcttatttgtctctttttatagtttttgttttgaaacctattttgtctaagtattagctatccttgatcttttcatggtttttatttgcatagaatatctttttccatccttttatttttcagtctatgtctgtctttatagataaagtgtgtttcttgtaggcatcaaatttttgggtatttttttaatccattcagtcactctatgtcttttgattggagagtttagtccatttatattcaatgctgataagtaaggacttactccttccattttaaaatttgttttctggttggtttttggtcttctcttccttctttccatccttcctgtcttccttttcatgaagatgattttctcaggtggtatgttttaatttcttgctttttattttttgtgtatctcttgtatggtttttgacttgaggttaccatagggctagcaaataatatcttataacccattattttaaaaycatgataacttaacactgattgcatgaacaaacaaacaagcaagcaagcaaagaggaaactaataaaaggtctacat

SEQ ID NO: 593833 - DNA, 554 bp, Homo sapiens
tggaacacctacagaatgggagaaaatgtttgcaatcgatccatcttacaaagatctacaaggaacttaaatttacaagacaagagaccccatttaaaaagtgagcaacggatataaacagacactccccaaaacagacatacatgtacctaatacacatatgaaaaataagctccatatcactgttcattagagaaatacaaatcaaaaccacaatgagataccatctcttgactgtcagaatggccattattaaacgtcaaaaccaatagatgccagcaaggttgcggaaaaaaaaaggaatgcttttacactgtttttgggagtgtaaatgagttcarccattgtggaagacagtgtggtgattcctcaaatacctagaggcagaaataccatttgacccagcaatcccattactgtgtatataacaaaggaatataaatcattctattgtaaagatacatgaacacatatgttcattgcagcactgttcacaatagcaaagatgtggaatcaacccaaatgatagactggataaagaaaatgtggtacat

SEQ ID NO: 593834 - DNA, 273 bp, Homo sapiens
tcactatgttgtccaggctggtctcaaactcatggcctcaagcggtcctcctgccttggcctcccaaagtgctcggatttcaggtatgagccactgctcccggcccctttcttcaaagaaggtgacgttcacaggtgccagsagttaggacttgaacatatctttttggggaacataattcaatccactacacctgagttatcatttctttctttctttttttttttttttttgagatggagttcgctctgtcacccaggctggagtgcaatg

SEQ ID NO: 593835 - DNA, 542 bp, Homo sapiens
taccttttctcctcatcctcatcaacatctgttatttttttctttttaataatagccattctgacttgtgtaaaataatctcattgtggttttaatgtgcatgtctctgatgattagtgatgttgagcgtttttgtttttttcatatgcttattggccatttgcacgtcttcttttgaaaaatgtccattcatgtcctttgcccactttttaatagggtaatttgtttttttattgtggttgagttgtttgcattctttgtaaattctggatatcagtcccctgttggattcatattttgcaaatattttcttccattctacagggagttttttcactcttgattatttcttttgctgtgcaaagmctttttagtttaattaagccctatttgtctattttgtttctattgcttatatgtttgaggtcttggtcaagaattctttgctagactaatgtccaggaaaattttccctgggttttcttccagtatttttacaatttcaggtctttcatctgaagtttttgctcaaactttgattt

SEQ ID NO: 593836 - DNA, 442 bp, Homo sapiens
ccctatttgtctattttgtttctattgcttatatgtttgaggtcttggtcaagaattctttgctagactaatgtccaggaaaattttccctgggttttcttccagtatttttacaatttcaggtctttcatctgaagtttttgctcaaactttgatttttgtatatcgtgagagataggggttcagcttccttcttctgcatatagaaattcaattttcccagcaccatttattgaaaagggtgtcctttactcagtgcaactatttttataccaataccatgctgttttgtttactgtattttcatagtataatttgaggtccagtaatgtgttgtctccagctttgytttttttagttaagatttatttggctattcaggctcttttttagttttgtatgaattttaggatttttttttctaatttttgaaaaatgacct

SEQ ID NO: 593837 - DNA, 648 bp, Homo sapiens
atcactgtgaaagagaataataaatttttgttttgagtcattcgaagtctctaagtttcaggtagtttgttacacatggggatttcataagaacagatacaatattttctatgtacatattctaatttccactgyagctcataagcttcttcagaacatgatctatattatagatatctttgtatccacagtagtgtgtagcaagttttatacattttgttatgtatattactcaatatttattgagtgaataaacagattatttcttatactgttaattatcccacagaaactgtacttggtttttaacaaagcaaatcaagtaaatccccttttagcagatctgcttagtagaaattctttgtttccttcatctgagaatgtctttattttaaccttcattcctgaaggatattttcactggacatagaattctaggatgaaaattctttattttcagcatctaaaaaaatattccactttcctctggcccacatggttgctgaggaaaaatccacattcattagaatctcatgcacctacatactatgcatcaatttttatttttctgtctgtttttaaaagtattctccttggtcagtagtttgagcagttttattatgatgtgttttagcatggatttctttc

SEQ ID NO: 593838 - DNA, 505 bp, Homo sapiens
atattggcctataatatttgtttgatgcctatgatatttgtttgatgtgtctttgtctggttttgttatcagggtaatactagcctgtcggaatgagtttggaattattcccccctcatctatttttgggaatagtttaagtaagattggtattagttcttttttaaatgttaggtagaattcagcagtaaagccattgggtcatggactttctttgcttggagaatttttattatggcttatatctcattatttgttattggtctgtacaagttttggatttcttcatggttcaattcaaacttcatatgtatgtgtctaggcatttatccatttcctccatttcttttakattttccaatttattagcatacagttgctcttagtagccactaatgatcctttaaatttctatggtaacagttaaaatgtctccttcttcatctcagattttatttatttggatttctttctttttttcttagtctggataaaggtttgtcaa

SEQ ID NO: 593839 - DNA, 496 bp, Homo sapiens
atgaatgtgatcatttaaaagaaagtctctttcagtatgagagagagaaagcagaargagtagtaagtatcaaggaagataaatattttcaaacttctagaaagaaaatttaaacatttggttctggatacatgttgaacttagttgaatataaaaatctagataaaaagtgtgtttaccatactgtataattccatttacatgaagcatccagaaaagataaatgtatagggacaaaaagtagattaatgtttgcaaggggctggggctggaagctggtagtgactgctaatgggcatgaggaatcttacagtgatggaaatgctctaaagttggattgtagagatggctgcacaactcagtaaatgtactaaaaatcttttaactttaagtcaaaacagatacattctatagtatgtaaattatatttcaacaaagctgttttaataaaaaaggaaaaatgtttactatatcggcttagaaacatgcctcattt

SEQ ID NO: 593840 - DNA, 496 bp, Homo sapiens
atgaatgtgatcatttaaaagaaagtctctttcagtatgagagagagaaagcagaaggagtagtaagtatcaaggaagataaatattttcaaacttytagaaagaaaatttaaacatttggttctggatacatgttgaacttagttgaatataaaaatctagataaaaagtgtgtttaccatactgtataattccatttacatgaagcatccagaaaagataaatgtatagggacaaaaagtagattaatgtttgcaaggggctggggctggaagctggtagtgactgctaatgggcatgaggaatcttacagtgatggaaatgctctaaagttggattgtagagatggctgcacaactcagtaaatgtactaaaaatcttttaactttaagtcaaaacagatacattctatagtatgtaaattatatttcaacaaagctgttttaataaaaaaggaaaaatgtttactatatcggcttagaaacatgcctcattt

SEQ ID NO: 593841 - DNA, 383 bp, Homo sapiens
gctagtacatttactacttcaaccatttttcattttttgaattgtgaacattcaaaatcttctggctttttaaaaatatacaataaatcatagttaaccatattcaccctacaatgccacagaacaccagaactcattcctcttatctaactgtaattckgtatcccttaaccatcctcccctcccctacctctgtgagcttttttgttgttgttaagagacagggccttgctagtctagtctgggctctgggcaactgtagtcacccagactagagacagtggcttgatcatagctcactgcagcctcaaactcttgggctcatgtgatcctcccacctcagcctcctgagcagctaggattatgggcatgcaccattgcat

SEQ ID NO: 593842 - DNA, 383 bp, Homo sapiens
gctagtacatttactacttcaaccatttttcattttttgaattgtgaacattcaaaatcttctggctttttaaaaatatacaataaatcatagttaaccatattcaccctacaatgccacagaacaccagaactcattcctcttatctaactgtaattctgtatccmttaaccatcctcccctcccctacctctgtgagcttttttgttgttgttaagagacagggccttgctagtctagtctgggctctgggcaactgtagtcacccagactagagacagtggcttgatcatagctcactgcagcctcaaactcttgggctcatgtgatcctcccacctcagcctcctgagcagctaggattatgggcatgcaccattgcat

SEQ ID NO: 593843 - DNA, 383 bp, Homo sapiens
gctagtacatttactacttcaaccatttttcattttttgaattgtgaacattcaaaatcttctggctttttaaaaatatacaataaatcatagttaaccatattcaccctacaatgccacagaacaccagaactcattcctcttatctaactgtaattctgtatcccttaaccatcctcccctcccctacctctgtgagcttttttgttgttgttaagagacagggccttgctagtcyagtctgggctctgggcaactgtagtcacccagactagagacagtggcttgatcatagctcactgcagcctcaaactcttgggctcatgtgatcctcccacctcagcctcctgagcagctaggattatgggcatgcaccattgcat

SEQ ID NO: 593844 - DNA, 488 bp, Homo sapiens
accatttttcattttttgaattgtgaacattcaaaatcttctggctttttaaaaatatacaataaatcatagttaaccatattcaccctacaatgccacagaacaccagaactcattcctcttatctaactgtaattctgtatcccttaaccatcctcccctcccctacctctgtgagcttttttgttgttgttaagagacagggccttgctagtctagtctgggctctgggcawctgtagtcacccagactagagacagtggcttgatcatagctcactgcagcctcaaactcttgggctcatgtgatcctcccacctcagcctcctgagcagctaggattatgggcatgcaccattgcatctgtctgatttttgactttgtagagctatctacctatgttgtccagggtgctctggaactttgtcctcaagtgattctcctgccttggtctttcaaagtgctaggaaattacaggcaatagccatg

SEQ ID NO: 593845 - DNA, 578 bp, Homo sapiens
tgcctttacagaactgaacgcaatgagagactagtattgtgtccctttgtgaagtctttaaattataacagtttcaaagtatatgaagattttgaccaaatcagaacaaaggccattcatgatataaaccactttgagacagaaagagctactggttgggtctatagggccgctagtctaggcccccgataatttatgcaccaggagaaatgtctttgaggaacagataattgccttctgcatggctctcctagacatgttggtggaagctgcaacaggagtggttattattaatcccttttagagaactatactagtctcacctctgaaccacccatcaatattgtgctcaattagcactttrtttcaattgacaatgaaattatatactgaaaacagcatgaatccatgacctgaccagaagcattctctagccagtgaatgatttttctatccttgcctctttttcaatttaacaaaagaggataacactgaattcagactacagttgtgcagaccctcattgttttaagtcatcagaaagaacataattaaaaattaatttaaaaactaggaat

SEQ ID NO: 593846 - DNA, 536 bp, Homo sapiens
tttgtatttttaattatctttctcacgtaggagaacataaacatcctgagggcaaaatctttattcagtttttattttactcataacacttagaayatcaagtggcaattgatgtgtttgctagtcaggatattattctggtgaatactgttcattctacgtaacaagaaaccactgatgtatcagtggtttatgaaaggtttagtttaactgatgctacctatccaaaacaggcaaagcagtgggacttccccttcctgcgagtcaggtaaaatatttgatacatgttttcatagccacagagatggggggaaacagaacatggcaaagaatgactggactctaaaaagttttatattctggattagtcagaatttcaacagaaaacagttggtaaatacaactaagaataatttgaggaatgcttccatacgaaggaaggagcatgaaagaattgtaagcaataaatctggaactggcattcagtgaggataaaaacaaaccctggaaaaagaaggagtagaagatcagaccac

SEQ ID NO: 593847 - DNA, 536 bp, Homo sapiens
tttgtatttttaattatctttctcacgtaggagaacataaacatcctgagggcaaaatctttattcagtttttattttactcataacacttagaatatcragtggcaattgatgtgtttgctagtcaggatattattctggtgaatactgttcattctacgtaacaagaaaccactgatgtatcagtggtttatgaaaggtttagtttaactgatgctacctatccaaaacaggcaaagcagtgggacttccccttcctgcgagtcaggtaaaatatttgatacatgttttcatagccacagagatggggggaaacagaacatggcaaagaatgactggactctaaaaagttttatattctggattagtcagaatttcaacagaaaacagttggtaaatacaactaagaataatttgaggaatgcttccatacgaaggaaggagcatgaaagaattgtaagcaataaatctggaactggcattcagtgaggataaaaacaaaccctggaaaaagaaggagtagaagatcagaccac

SEQ ID NO: 593848 - DNA, 536 bp, Homo sapiens
tttgtatttttaattatctttctcacgtaggagaacataaacatcctgagggcaaaatctttattcagtttttattttactcataacacttagaatatcaagtggcaattgatgtgtttgctagtcaggatattattctggtgaatactgttcattctaygtaacaagaaaccactgatgtatcagtggtttatgaaaggtttagtttaactgatgctacctatccaaaacaggcaaagcagtgggacttccccttcctgcgagtcaggtaaaatatttgatacatgttttcatagccacagagatggggggaaacagaacatggcaaagaatgactggactctaaaaagttttatattctggattagtcagaatttcaacagaaaacagttggtaaatacaactaagaataatttgaggaatgcttccatacgaaggaaggagcatgaaagaattgtaagcaataaatctggaactggcattcagtgaggataaaaacaaaccctggaaaaagaaggagtagaagatcagaccac

SEQ ID NO: 593849 - DNA, 536 bp, Homo sapiens
tttgtatttttaattatctttctcacgtaggagaacataaacatcctgagggcaaaatctttattcagtttttattttactcataacacttagaatatcaagtggcaattgatgtgtttgctagtcaggatattattctggtgaatactgttcattctacgtaacaagaaaccactgatgtatcagtrgtttatgaaaggtttagtttaactgatgctacctatccaaaacaggcaaagcagtgggacttccccttcctgcgagtcaggtaaaatatttgatacatgttttcatagccacagagatggggggaaacagaacatggcaaagaatgactggactctaaaaagttttatattctggattagtcagaatttcaacagaaaacagttggtaaatacaactaagaataatttgaggaatgcttccatacgaaggaaggagcatgaaagaattgtaagcaataaatctggaactggcattcagtgaggataaaaacaaaccctggaaaaagaaggagtagaagatcagaccac

SEQ ID NO: 593850 - DNA, 363 bp, Homo sapiens
tgttttgtgtgctttttttctactgcatgcrtagatagaaaataggttcaagtgcctcatttgaaaatcttttacttaattccaccaattgaaacgatgacatcatgtgtttcagagtttacctttcttggtaaacatcaccaacaaaaggttaatgtttatgaaggacatcttaaatcttaatttgatgcatacaataatttaaacttttataaacttttactaaattaaataaaaactgctttgaggttaaaagtgataattctagaggtaatgattaaaggcacctgcccctcctcctgatgcatctaccttctgtatcctctgttaaaaatcaaacgaaaattaatctcaggttcaaag

SEQ ID NO: 593851 - DNA, 363 bp, Homo sapiens
tgttttgtgtgctttttttctactgcatgcgtagatagaaaataggttcaagtgcctcatttgaaaatcttttacttaattccaccaattgaaacgatgacatcatgtgtttcagagtttacctttcttggtaaacatcaccaacaaaaggttaatgtttatgaaggacatcttaaatcttaatttgatgcatacaataatttaaayttttataaacttttactaaattaaataaaaactgctttgaggttaaaagtgataattctagaggtaatgattaaaggcacctgcccctcctcctgatgcatctaccttctgtatcctctgttaaaaatcaaacgaaaattaatctcaggttcaaag

SEQ ID NO: 593852 - DNA, 363 bp, Homo sapiens
tgttttgtgtgctttttttctactgcatgcgtagatagaaaataggttcaagtgcctcatttgaaaatcttttacttaattccaccaattgaaacgatgacatcatgtgtttcagagtttacctttcttggtaaacatcaccaacaaaaggttaatgtttatgaaggacatcttaaatcttaatttgatgcatacaataatttaaacttttataaacttttactaaattaaataaaarctgctttgaggttaaaagtgataattctagaggtaatgattaaaggcacctgcccctcctcctgatgcatctaccttctgtatcctctgttaaaaatcaaacgaaaattaatctcaggttcaaag

SEQ ID NO: 593853 - DNA, 363 bp, Homo sapiens
tgttttgtgtgctttttttctactgcatgcgtagatagaaaataggttcaagtgcctcatttgaaaatcttttacttaattccaccaattgaaacgatgacatcatgtgtttcagagtttacctttcttggtaaacatcaccaacaaaaggttaatgtttatgaaggacatcttaaatcttaatttgatgcatacaataatttaaacttttataaacttttactaaattaaataaaaactgctttgaggttaaaagtgataatkctagaggtaatgattaaaggcacctgcccctcctcctgatgcatctaccttctgtatcctctgttaaaaatcaaacgaaaattaatctcaggttcaaag

SEQ ID NO: 593854 - DNA, 368 bp, Homo sapiens
ctcaatgaagaatgatttatgttttccaaaaacaaaagaaaactcaaaaaactctggaattttatctcacgagagcaaataaattsaatcattcagcccctaaatgcctcaaaagtctgtagaatagagcagcttcaaaagaacaagtgggaagtaatgaggaagagtaagagacaaagcttcacaaaggctgtgttaaagaagaactcttactcctagtgaattctgaggtgatatcacagactcaatttatatgcaaacctgaatttaagtgtactaaaaatataaaattcactttggagctaatgaagtaacttttcgtccaaaaaaaatatattactttaagtatttctcctgtagtaaaagta

SEQ ID NO: 593855 - DNA, 534 bp, Homo sapiens
gcatttatacttcgtcatcactactctagaagattatcatcatgttatgtaaaataaaatgttaattctagacataaggggaaaaagaaattaaaactataggggtgaaaaaatattgcataatttattactgttgacctgatcatatgactgattaagggcactgaatttaacttgtatgtgaagtagaccccatattagctgcagttaatcaatagaccaggtattctagcagaattaaatttgatgctcctgtgttatctttaaatgatacagctcttctgaaaacccatactcatagtgcatgattatccattaagacaaggtgatggaatgtgtgaatacagctgaggagacaccacaaggcaaacgctcaatggttcccattaatattggggaaatcaacattataatacagaaaaccataggcattatttaatatttggttttggaaggtatttttagtgacagtgcatacagttgtacctaataattgcaaaattasagatgtaaaaataaaacaaaggcacactg

SEQ ID NO: 593856 - DNA, 490 bp, Homo sapiens
gtcaaggcaaggaggtaaactctaaagcaacacaattgcatgcactcctaaatccaaaggaaatccgatcccattgctgggagatattataaactacgacaataataatagctctgcctaacaatgaacattccctaagcgctctctttgtgccaagcactgtcttgaatgcttgttctctgtcttattcaatctcacagttactgcctctgcaagaaaggtggcgctgtcatgatttcaacagaggacaaaactgaggatcaggaggcccgaataagtaattgcccaaggttacgtagtgcagaagtaggtatgctggaatttgaactcggatcgatcygatttcaaagccctgaatagttctaccacatcaagggcaggaatgatgcgaagccacttacgtattatggtacttgtcagtgtttgtgtacctaaagacaatgctcattttatgtctactgtgtgcccaatgtgtgtcagtcaccatggt

SEQ ID NO: 593857 - DNA, 462 bp, Homo sapiens
atggagtcccttgccaagctagatggaatgcaggttttttggttgccctggtagagccacagctgattgctcactacagatcctgcagtttatcccaagggtttgtttcttcagctactctgaggcttcaagcaaagaagaaatggagtaggatggtccagatttcaggaccaccacttggcccacatacctgctacacagacaatttgcaagaagagataactaaaggagtgaggattcccagaagaggagtgaaatcaatggcatagaaaacatgagcagatagatgggtttaccttaatcagcgaaaggagaaacctctttcttgttatttccaagataggartaacagatgtaagacatgaagataacttcatatatatatatatatatatatatgtatatatatatatatatatatcttacatcatatatatgaagtaacttcatatatataacata

SEQ ID NO: 593858 - DNA, 462 bp, Homo sapiens
atggagtcccttgccaagctagatggaatgcaggttttttggttgccctggtagagccacagctgattgctcactacagatcctgcagtttatcccaagggtttgtttcttcagctactctgaggcttcaagcaaagaagaaatggagtaggatggtccagatttcaggaccaccacttggcccacatacctgctacacagacaatttgcaagaagagataactaaaggagtgaggattcccagaagaggagtgaaatcaatggcatagaaaacatgagcagatagatgggtttaccttaatcagcgaaaggagaaacctctttcttgttatttccaagataggaataacagatgtaagacatgaagataacttcatatatatatatatatatatatatgtrtatatatatatatatatatcttacatcatatatatgaagtaacttcatatatataacata

SEQ ID NO: 593859 - DNA, 602 bp, Homo sapiens
actcatttctcctctgtgaatcatagattccttttttataaaacaagaggattaaacaatataatcccagagattctttccagctttaaaaagttcaagcgtatgattaatagggtaatattaaaaataaatgttgtgctattaattccaagataacacgagtcatttttatayttttgtctcattaactagtgccgcccaactccctcatcctcacagggcaaagtttgtaaatttgaagttcatggcctgaactcagcctgcagatgtgttttgtgtggccaatagagtgtattagaactttgagagttagtggccaacatttaaaagactggatatttccaatcaacatccacatttccagatttttttttttttaaatcataagatctagcaactctggacttgattcttgcatggcaatggctagctgaggctgaataaagctatttctttagatgaggcctagttctcctttaaccagacttcatagctcacaaatttgaactatacctggccatcttcatttatttatatgacttctgtccctacctgcctggctcctcaaggtagctgaatttgctcctcctgtcctagaattc

SEQ ID NO: 593860 - DNA, 602 bp, Homo sapiens
actcatttctcctctgtgaatcatagattccttttttataaaacaagaggattaaacaatataatcccagagattctttccagctttaaaaagttcaagcgtatgattaatagggtaatattaaaaataaatgttgtgctattaattccaagataacacgagtcatttttatatttttgtctcattaactagtgcygcccaactccctcatcctcacagggcaaagtttgtaaatttgaagttcatggcctgaactcagcctgcagatgtgttttgtgtggccaatagagtgtattagaactttgagagttagtggccaacatttaaaagactggatatttccaatcaacatccacatttccagatttttttttttttaaatcataagatctagcaactctggacttgattcttgcatggcaatggctagctgaggctgaataaagctatttctttagatgaggcctagttctcctttaaccagacttcatagctcacaaatttgaactatacctggccatcttcatttatttatatgacttctgtccctacctgcctggctcctcaaggtagctgaatttgctcctcctgtcctagaattc

SEQ ID NO: 593861 - DNA, 604 bp, Homo sapiens
cccttctttcctcattatcttagccagtttcatttaggttttctgcttctttaagcttaatgaatctcaactgatacaccagctcttccaagccagaaaggtttcctttcgatgacggtgcatgggagtagtgagtcatgttgaagaatggatcagacacatcttatgtcccacctcagagtctcttggccttacctgccttttgaatcccagattgcttattctaccccagctgctgcagcagtctgattctrtgataactcacagtgttaaacttcctaaggccaaccaacatcactcctgaaatcaatagtggctcacaacacttttggactcatacaaagaccaagctgcgggcacgagacctggcttcctgagcagctgctataggagccaggtgatgcaacttaggattgtgggggagttaaatctctggaaggtaaagtttgagcaatggaatttaggagatgtgaaggagctggcagacacatttccattcctccatgcaatagactgaaccaaggagcatgctcccggaacagcccatgtggaaatatctcatatagtagactgatgcccctgctgaaatgcaacaccttacgtc

SEQ ID NO: 593862 - DNA, 574 bp, Homo sapiens
gtctcccagttgcccccatctccatatgggatgcacagcccctcgaggagcaccccaccctcagcatagctctcagcagtggacagataatcactgcagaaggagatgaagatactgattgcaggccccaatgtccactaaatcatagacttgctgtcatcactaaatgagaagttggtgcaggtgaactgtcttccagcagtattttagactaacacccaaacaccgtttctcttcatttatcaaaggccaccaaagacctgctttgggcatgatgttttggtgtgacacttctgagccaaaatttagcttaatctctacactcaacttgtacagatcaagcccaatccctttgagacagagtcttgctatgttgtccaggctggacttgaactcctggrctcaagggatcctccagcttcagcttctcaggtaactgggtgatagggtttcgatttgtgtctctgaccaaatctcatgtcaaatagtaatccccaacgttgggggtggggcctggtaggaggtgattggatcatggaggcagatttcccccttgctgttcttgtcatagtgg

SEQ ID NO: 593863 - DNA, 554 bp, Homo sapiens
atcctggctaacacggtgaaagcccatctctactaaaaatacaaaaaattagccgggcatggtggcacacgcctgtagtcccagctactcgggaagctgaggcaggaatatcacttgaacccaggaggcagaggttgtagtgagccragatcacaccactgcaccccagcctgggcgacagagcgagattctgtctcagaaaaacaaacaacaacaacaacaaaaattagccaggcgtggtggcaggtgcctataatcccagttacacgggaggctgaggcaggagaattgcttgaaccccagaggcagaagttgccgtgagacaagattgtgccactgcactcccgacagagcgagagagactccgtctcaaaaaaaaaaagaaaaagaaaaaaaggaaagaaaaagaaaaaaaaaagtaaaaatgaggcagaagggtccaactgaaccatccctttctctgtggacatcaatatgccttggatatgggcatacaaagggaagtgtttggcgggttcaccaggatgatatgcggaaagtaacttcatgtttgg

SEQ ID NO: 593864 - DNA, 554 bp, Homo sapiens
atcctggctaacacggtgaaagcccatctctactaaaaatacaaaaaattagccgggcatggtggcacacgcctgtagtcccagctactcgggaagctgaggcaggaatatcacttgaacccaggaggcagaggttgtagtgagccgagatcacaccactgcaccccagcctgggcgacagagcgagattctgtctcagaaaaacaaacaacaacaacaacaaaaattagccaggcgtggtggcaggtgcctataatcccagttacrcgggaggctgaggcaggagaattgcttgaaccccagaggcagaagttgccgtgagacaagattgtgccactgcactcccgacagagcgagagagactccgtctcaaaaaaaaaaagaaaaagaaaaaaaggaaagaaaaagaaaaaaaaaagtaaaaatgaggcagaagggtccaactgaaccatccctttctctgtggacatcaatatgccttggatatgggcatacaaagggaagtgtttggcgggttcaccaggatgatatgcggaaagtaacttcatgtttgg

SEQ ID NO: 593865 - DNA, 491 bp, Homo sapiens
tgtaccataattagcccatcatgctcctttaagttagctctcatgtctgtttatcatgtctctatcagattttgagcatcctttcactttctgacacaacatgttcaggggtcatcttgtattctcccagctcctgttgtgcaacaaaccattttccaaggaccattggtttcttttattagagaatggtatttagaaaccaagatctgggcagttggtgtgctcactgctactattaatactttgtcatggcttctagactctcagtrgacagagctagaaaatatatgtatgtacatgtaaatgtacacacatttctatttgtctgtctgtctctatgttatatatcatgagtttgtgccaataataaaaagaaactttcaatttcaatccagcaccacagatttcattttagcttcctcattctcaatatatttacttatctcaaaattacaatgcataaaaagtagttttagaattgctaacacgta

SEQ ID NO: 593866 - DNA, 577 bp, Homo sapiens
ggggagctgacatcctcaatgattaytgtattgaggtttatttctcccttttgatctaataatattttctttatatatttagatgctccagtattggttgcatatatatttacaattatattatcttgctgaattgattggtctctttattattatataatgttctttgtctctttctattgtttttggttaaagtctgttttactgatattatatcaggcaatatatagaagtatagctactcctgctcacttttggtttccattcccaaaagggaatatcttttttcacccctttactttcagtctatgggtgtctttccaggtaaggtgagtttcttgtatacagcatatagtagggttttgcattttaatttttaattttttgtttgtttgtttttagagacaagatcttgctttgctgcccaggctggagtgcggtggcatgaccatagctcactccagcctcaaactcctgaactcaaatgatcctcccacctcaacctcctcactagctaagagtgttcgcatgtgccaccatgcccagctttttaaaaatttctttgtagagatggggc

SEQ ID NO: 593867 - DNA, 548 bp, Homo sapiens
ggtttcctctctcactgagaaaaccaaagccattgtgaggaactttcacagrcctgcaccactgtctgctcacctgccatatctgctgccctttgttctgtgaccaatatgaaatgtcgctccactccctagccctggagcccaccttcttcaaatattcaagcatatcaccctagtaattttcttctcctctgaatttcactttccttctctctaccacatgtttctcatgggcttacaaatatgttatttttcttttcttggaaaaactccctctttagcttatttccactccgagctatggctcccatttctttgctttcctgtataaaaaagaaaaaaaactgctaaaaaagagttgtctagactcgctgtatgcaaataatcttctcccattctctcttaaacccatccctgcagattgccagcccagtttcatcaacttcaccggaaactttcaagattatgaatgaccaccatgttatggaatacaatgtcaattcttagtactcatgatacttaaaattttagcagccttcgaagcaacc

SEQ ID NO: 593868 - DNA, 600 bp, Homo sapiens
  misc_feature 562: n = A,T,C or G
gatttatatctatatttcataaaatacacagttgaaaaaataaatcagtatacctatgtcattctacatatatttacacatttctaatagctgaattgaatatcacttgaaattctaattaattaaaattaaattcaattaaaaattcagtttagttgcattagctatgttttacacactcaatagccacctatggctggtggctctcgtattggacagtgctggtagaaccatcttgtgggatggtttataagtttctgggtttctcatgtatgtaaagaaaagataacctaaaattaaatattcacaaccaagttaaaggaagaagttagagttgtttgcattgcacctggcacyctgttggtcagaaggaagttgagaattttaatgtgggaaatgttggaatgtagaaaataagcacatctgcgaggaatctctttctgctgcttctgcactcttcttcctctcaccctgtgtgcattctctgcatcatgagaacatggctttatttatgttctggaaatggttttagtgtttcctttctgaatagggaggaatcttngggttacaacacagaatatgtttgtaacaacctggcac

SEQ ID NO: 593869 - DNA, 589 bp, Homo sapiens
  misc_feature 107: n = A,T,C or G
tcttcttcctctcaccctgtgtgcattctctgcatcatgagaacatggctttatttatgttctggaaatggttttagtgtttcctttctgaatagggaggaatcttngggttacaacacagaatatgtttgtaacaacctggcacaaattttcttcaagttattcttctccaaatttgttaaagaacttctcaaataattatcttttcagtggaaatggatgtcttacattgcttcctttcttcctattagaaatgtgagaaattcacttaattgccagagagaggcacagagactgagagcttgtattttttactcttttagattcattaaactgaagtaggtctcaaaaaagctttttggacttgagatgacatgcattcaatacttaatatttaccatcagataaatttgataaggaggacaaattttaagaaaacactagcaatctctagcatggggagttyggagcacgtaacactcatttcttaagtaggaaaaaatgaaaacctaattagcatcaaaagcaagttttgttttttaaagactttatacagttgtttagggttcaatctggaaggaaagaaata

SEQ ID NO: 593870 - DNA, 700 bp, Homo sapiens
gtaaccttgtctgtagaatttgcttttattttgaacttttaaaaatattgtaatttcttagttttcaaaawtaggcgatttgtatatttattaggactattctctgaccaatcaagtaaagtgtcatttataacagagtagttagatattttgctttaactcatgaagaaaggaataaatttaacaaacaaaacactttgtcgatgtaactataaataatgtttctaatattggaagctacttttcattcatgtggttcttagaaaataccttaaaataaaaaaagaaagaatctattggtaaagtttaactaaattttgtgtttcattttgtagttcatagcagttgccatttgtttattttactaaaatgatgctgtggcatttccaatttaagtctcagaatattttcatatgacataaattatgctgtaatataagtaatattcctttaccattaccacaaaataatctaattatagcaattatttattggtagctgtgaaaattttatcacaaaatggtaattgctgttaaagtttaatggctcattatataaatataatttatattatacattccaagataaatgtactatacaatcacatttctacccaaatatttgaaagataaggaaacaatatatcacaataaggaaaactgaaaatgaaaggtcactaaacaatacaatgagaaaatat

SEQ ID NO: 593871 - DNA, 530 bp, Homo sapiens
taatttctgcatatcataataatgctatagtgatatctacttacagattaccagctttgtgaaatgaacttctatcccaaagctattctgttttttattccttgttagcttatttatttagtttatttatttatttagtttattccttacggagcttgttaactccactatgcaaaatgctatttctgaatgtgccagttagtaccttgaataatggtccaagtccctctcttatttcagtgcacgtttttgcctcttgctttaaagagccattaagtgggtctttctttggaccaaaaagagttcaagaatgactaagcttcctgtgtgttttcatctatttggagagaactatatgtctttatttcatttctgcacagttgcaattacattaagacacttaccaagcatcagaaatcataatgtaaaggtcttgattgttgtcttttttattgaaagtggcctagatgggactagactgcaaaaygttaaggaaaaggagggcataggaaagctttgggtcttacaaa

SEQ ID NO: 593872 - DNA, 555 bp, Homo sapiens
attatccaacttgcagatctttgccaattatataaaatggtctcgatagcttgacttgctattatcttattaaaagtgaggtagaacattttgcatatgtttatgagacacttgtatttccttttaaactctatgttcatatcctttgcccattttttggtttatttttgtcagaccaatagattcttgattgtgaaaccaagtcctgccagtgaaacatttcataaaaacatttgtttgaaactaggttttcaacatgattttacctcagggagcagagtccaataaaaaacagtactgtgagcctgttgattgctatggaggggagaaaaaataggataagaatgttcaggagttgataatccatctggacagacaaaataaacttatgttaaatgrtgttcattgttctgaattgttgtaatcaataagtgcaaattataataacaagtcgattggcctttcccctaaacaatgtatcatgtaatcattcgctatcattataaggagtttccccttcttccttcctccctcccttccctctctccctccctc

SEQ ID NO: 593873 - DNA, 377 bp, Homo sapiens
tgaattctgtctggacatccaggcattttcatacatcctctgaaatctaggcagaggctcccgagcctcaactcttgccctctgtacacacacaggcttaacaccacatggaagccttggtattccagcttgcaccctctggagcagtggcctgagatgtatctggggcccttttagccatggctggagctggagtggctaggatgcagtgytccatgttctgagactgcacagagcagcagggccctgcctggcccatgaaaccattttttgctcctaggcctccaggccagtgatgggaggggctgccacgaaggtctctgaaatgccttggaggtgttttccccactgtcttggctattaacattcagctccct

SEQ ID NO: 593874 - DNA, 282 bp, Homo sapiens
cttaatgactaatgagcaccaaaattcacaatttcacagaaattaagacgatgcaaatcaaaaccatgatatactatttttcatttayccgactgtcaaaaataaaacactgaataactgaatactcctaatgctctatggaaaccgtcacacatgtgcacattaagagacatacaggagatgctcatatctataaagctatacaattgcaaaacactgcaaatacccaaatattcactagctgaggagtagataaacagaatgtagattattcatgtaatg

SEQ ID NO: 593875 - DNA, 619 bp, Homo sapiens
ttgaagttcagtgttttagtaggataatttttcagttaattaaaaaaaaatttgttagggacttagaaatattgtatttctttttctaaccagaaacaactcctctgtgacctagttgggatttcaccctcctctgagcatgatgtgttgaaggaagctgttcttaagaaactaggaggagacaatacccagttggaggctgctgaatggtaggcacccaccactcaacttagagcaaaatatactggatcaatgattgctaatttctactcaraaaaagttaaatattttacatttgtctttgattaattcgttgctctaatgtgggtagagagattaccatgtgccatgttcatgtgggcataaagagtagataaagagaggagctcaatggcaattagaatttgagaaatgcttatctcgaaacactttaccactcagttcccaagcatagtggggtatttttgctttcctgtaggagatttggagtagtcatagaatattacatgaaaacattctttcatatgaccgctgtggcatcctgctggtatacctaatgttggagaactaacctataaattaatctcataaagatctttgtaagaacatgggattacaa

SEQ ID NO: 593876 - DNA, 549 bp, Homo sapiens
atgaaggacactgctatgaaggaatacccaagactgggtaatttataaagaaaagaggtttaattttctcatagttctgcatggctagggaggtctcgggaaacttacagtcatggtgaaaggcacctcttcacagaatggcaggagagagaatgagtgcccagtaaggaggaaagccctttttataaccatcagatctcatgagaactcactcactctcacgagaacagcgtgcgggaaatcccctcatgattccattatttccacctggttcctcccacaacacacaggaattatggaaactacaatttaagatgagatttgggtgggaaacagccaatccatattaggcccataaaacatcttgtacaaaatgggacacagtgacgaattgctaataatgattagcacttctcagcacrttgaagtagagtaaggaggttacactccagatgcttttttaagctgttgtagacatctgagcccagtgcctaaaatacatttcaaagcagtgctattaaagacttgattttaagcatagcaagtaga

SEQ ID NO: 593877 - DNA, 623 bp, Homo sapiens
tctagtttcatgttaattgacagtgtgtgctacatcaccagctaacaaattcataaaccctgggaatcccactcccagcctgagagctcatgaagctgaattgatattgcgctcctctttgttacattggagatgattctgggctgttgccaggcacaactaaccagacccttggctccaataatctgagcctgattcacagtgaacctggcacarggtaaaacaaacccccatagaaacctcataaccttgacaaagaaaaaaatcatgcttgccttaatagcaaactattgataaaagatttattctccttgagagaaataattaaaaggaggtagaagtcaaatgggagctgggaaagtaactgaaataggtgctgtaaaacctggggaagaccaacagaaaagatgagagaatagcaactcccaggggcatggattgttcatactttgcaatgttagaaaatgtttggctgccacggtggttctgtttagttctggactatgaatctggtgaaaattgtgcaaatggttcatcatgtaagatgcttaataaagatggtgatgctttgcacctcttatttatctgtccatatggtaattattgatgtttttcggatttct

SEQ ID NO: 593878 - DNA, 585 bp, Homo sapiens
cactgcactccagcctgggcgacagagcgagactccgtctcaaaaaaaaaaaaaaaataaaaaaatacactcgcatggatttaaaggtatctaaacttgtgtctactttttcagcccaggggaagattctctaacagtctattcagtaacagtatatttaagtagtttctctttttggatgagsaggttccttgcctttgtttaactggacagagaaggtttatcaggaagctggggcaaaggaagtgaagcaggcactaagaagtgaaaacccctgagaagtcacagaaattctaaggagggcttaggacttctacaggtagtggaatttgaggagatgaagaggcaggctggcttttgagcataactcacatctttgaaaggttgagaacccagctgacacctgtttgagacatttttaactcattaatactgaggaagggtcaagttaaggacaaggtaaaagtcaacaatgcacttacaggtcagcaaattctctgttcgctatagtttagtgaatgcaatgcctatgttttcacattggccactaccaaataataaacaccacacttctgaaaggtgttc

SEQ ID NO: 593879 - DNA, 638 bp, Homo sapiens
gtaaaagatgcagagatagagaataaaaccatggttaccaggggcagggctgcagagaagaaaagaataaagcccgaaggaggatgatacaaatacctggaggaaaagttccaggcaaaaggaacagccagcaaaaaaagataagagaacgacagaaaagcaggcacaagattgaagggtcatcactgacargtccatgtgccttacatcttccagataaaaagataattagagaatactagataacacacatgagacaaatcccctctctggccttagccaggaaatctcacaagacagacagatttgcagtcaggtctctgatcctgagaaatacatgtattttaggtatgctggttacattaggttgagtttagggccctgtcgccaaattcatgggcatccacagcctcagaatatggcctcacttgaatgtttgcagatagaattaattaaggacctcaatatgaaatcaacctggatttagggtgaaccctaagtccaatgactagtgccctaataagaagaggatgcaacacagtgagacacacagaagaaggtgatatgaaactgatgcacaaattggatggatgtgtctcaaagtcaagcctccaaaaggcaccaaccctactcacaca

SEQ ID NO: 593880 - DNA, 662 bp, Homo sapiens
tgccattgctatcatattgtacatatgctaaaattgtgactactaagtattatatgtaaaatttgtttccatttgtaagacaattgttagttgtgggtgcctccggtgttcatgaggtgaactgcaaactagcagagacaagtcattttggtcacaatcggcggcagttgttaacatatttttgagtccttgtaattgttgtatcagtgatgactgatttacctaagtctactgcatgctctcattgagtggctttgtaacttcaggtgtcacctgaaaacaagtaagtatattaattaatattcagcctgagagatctttctctccctctgctttgcaaatctggcccatgaagagatatttattactctgcttcgttagtaawatatcataaaatgttatagtttttcttttccaaattagtccaaactatcacattataagtgcattttggaaagtaccagggcactctctgatgggactaaatttggggcatgattcccagcatgggcctgaattcattttaagaagtctctgaatgatttttcataatactactttttcagatgagacaaacaagtctcttaattccctaaaattattttcttaatttacttatgataacaaaatgggatttttgtcagcacgtctgaaaaatactg

SEQ ID NO: 593881 - DNA, 571 bp, Homo sapiens
ttaaatcattcattcaaaaaatgaaatgaaaaattgcaatcaggaaaattctctcagtatcatgagacatattgtgaaccaatatctgcctctttttttcatgtccaacagtttctttgtgggaatccaaatgagagaaaagagcatgttggtaccagacaccttgaaagataattattgggctattttggatactcttacttagttaagctctgtttataacattttaggaattatccaataaaaataaataccccccacttagcaaaatacagattggacatattggaaagattatcccgtatttagtgctaggagatgtgtggatggcatattcctcctctcttcttgaagccatttccctctgctttgttcagtccgayctctgcccaagtcacattcccctaacccctattgctgtcataccatgctttccctctctttttggccatctctcttcaggccagttttccctctaaccttcaagatgccaaatattctttgctgccttctcctagcttgaactatttgctagggagttctcctccctatggtaaaaataaggacatct

SEQ ID NO: 593882 - DNA, 558 bp, Homo sapiens
tggtaccatatacgtttaaatgtgatataagaaacttaaaacagtatattttcattttccttcccacatcctttgcactactgttgccatatatttcattttcatgtgtattgtaaatcccacagtgtattgtcatttttgtttaaacagtcagttatcttttctaaaaaatttaaatgggaacaaatgtccttctaatgtctacttatttgcaatttctggccctcttcttttctacagatttgagtttccacatagaatgattttccttcagcctgaaagacttggtttgacatatattggattagtacaggcctgctggtgacacattttcttagcttttgtctgtctaaaaatgtctttatttcaccttctcattttgaaggaatttttgctggatataaaattycaggtggcaaggtttggttgcttttttgttttttcaacactttaaatatgtctttatagtatctggcttgtactgctacggagagaagccagaagaccttttggtctctgttgtcctgtatgtaatatgtctttttcctctgaaagctt

SEQ ID NO: 593883 - DNA, 598 bp, Homo sapiens
catgtttgttccctattactaatcgtgcggccttggggttttcttagtctgtatttttggtacactggttttacataagctcattaccctcacaccactcgacaaattcagttagcaggtcatcactcckgcatcctcagaacatcctgctgtgctgcgtggcatgaatagcactgaaagatcatccatttcaaatgagtgtgaatctgttcattgattaccttccaccacgaggagctccctaccaccacctggaagaatgcctcccaggtctcacctcccacttatgtggagctgagtgagcttcgaagtccactgactactgtcctccctctggcccacaacgtaaaggtggtgagcatccccagctaagaccctgcaggaaaggggagaccacccccaccccacaggagagctcactggcttcagtgagttccagtccctgctctgccaccaaccaattgaatggccttgagcaagtcactcaacccacacaatcttcatgggaataactgcagagtgcctttcgaagcatcctacagggagaatgtctggaaatggtttagcataaaaccaggcataggggaataataatagc

SEQ ID NO: 593884 - DNA, 483 bp, Homo sapiens
ccctacagtgtataggccatcygccacatcagagaataatctgctccaaatagaaatagtgcccagagtgagaaaccctgctctagaaaccctacagtgtgcaggccagccgccacatcagagaataatctgctccaaaatagaaatagtgcccagagtgagaaactctgctctggaaaccctacagtgtacaggctcccgaaacccttctctaggaaccctacagtttacaggccagccgccacatcagagaataatgtgctccaaatagaaatagtgcccagagtgagaaacccttctctagaaaccccacagtgtacaggccagccgccacatcagagaataatctgctccaaatagaaatagtgcccagagtgagaaaccctgctgtagaaaccctacagtgtacaggccagccgccacgtcagagaacaatctgctccaaaatagaaatagtgcccagagtgagaaaccctgctctag

SEQ ID NO: 593885 - DNA, 483 bp, Homo sapiens
ccctacagtgtataggccatccgccacatcagagaataatctgctccaaatagaaatagtgcccagagtgagaaaccctgctctagaaaccctacagtgtgcaggccagccgccacatcagagaataatctgctccaaaatagaaatagtgcccagagtgagaaactctgctctggaaaccctacagtgtacaggctcccgaaacccttctctaggaaccctacagtttacaggccagccgccacatcagagaataatgtgctccaaatagaaatagtgcccasagtgagaaacccttctctagaaaccccacagtgtacaggccagccgccacatcagagaataatctgctccaaatagaaatagtgcccagagtgagaaaccctgctgtagaaaccctacagtgtacaggccagccgccacgtcagagaacaatctgctccaaaatagaaatagtgcccagagtgagaaaccctgctctag

SEQ ID NO: 593886 - DNA, 441 bp, Homo sapiens
  misc_feature 1, 2, 3, 4, 5, 6: n = A,T,C or G
nnnnnnacaccaagctcctgcaatctcagcactttactgtggatgcctttgagaatatgatgactgctgtggatcccttgtaaaaatacatatagggccaggcgtggtagctcatgcctctcatcccagcactttgggaggccgaggtgggcggatcaccggaggtcaggagttcaagaccaacctggccaacgtggtgaaaccccatctctactaaaaatacaaaaattagccgggcatggtggtgcacacttgtaatcccagctacttgggaggctgaggcagaagagtggaacctgggaggcggtggaggttgcagtgagccgagatcgcacattgcactccagtcggggcaacaagarcaaaactccatttcaaaaaaaaaaaacatacagggctgggcgcagtggctcatacttgtaatcccagcattttgggagg

SEQ ID NO: 593887 - DNA, 586 bp, Homo sapiens
taaaaacatgattggcaattatattgcgaagtttgaaaaagtaaaattggaatttaaaaattttgtcaaatgggttatgagaaaacagtaaactcacacaggaacttaactgttttccaggtgtaggtttttatgaggcaagagcccagagactaggcagcttaagtaacttactcaaaggactgcttgtagaatccccttccctggctatgaacttagtgattaacctacactaaggcaggtttcatgttatgttgatttcctasatttggagcctggtgaaaagaaatggactaatgccacaaaaactcaagtatcaattaccctccttggggtgtctactaactgctggtaaatgctcggagtgtgaaaacactgtattctcacaacatccataaaacacccttatgacttaaagacaggcagtaaagctcactccttttgcaggtgaggaaacgaagcctcagagatccttaataactgacttaagaccatgcaggtggagagcaggagagacaagattcaaaccctggcgtctctctccagagcctgtgcttttaactcctgaaagttcacaggagatttc

SEQ ID NO: 593888 - DNA, 473 bp, Homo sapiens
tgaggtttattcactgtgggctccaggaagtgattttctcttcagcctcaagattaacagcttcaattcttttcaaagatatgacaaggaattttaaatatctggatctaggggctggacattgggactcacgcctgtgatcccagcactttgggaggttgaagtgggcagatcacttcaggtcaggagtttgagaacagcttggccaacatggtgaaaacctgtctctactaaaaatacagaaattatccaggcatggtaatgtgcacctgtaatcccagctaattccatagggtgtggctgtaaaagctactcaggaggctgaggcaagagaattgcttgaaccttggagatggaggttgcagtgagctgagattgcaccattacmctccagcctgggcaacagcatgaaactgtctctaactaactaactggatctaagaacactaaatctgagtgtttggcagcacaag

SEQ ID NO: 593889 - DNA, 610 bp, Homo sapiens
tttcctatggctgtcatgctcccttccaggaatcatggaatctgctcttcacggcacatgagtgaatggtggaagctagcctaccacctccctgggggaaggggatttcctgtgaggtcacccgagttgttactgacaagtggaggtgcctctgtgtggggctgtggctgccttgagatctgtcttggccatgtggctacaataaaaagtaccatacctttgacagctaaacaagacaatagaagacagaccgtgtcccgaacaccttcagggcagggtgtgtgactccaaagctcaccttccaagtattaggactgtgtgaccctgagagtggagtgtgtgtcaaatgtagatttgacggaaaataattagaattttaaccaaaatctacaktcttagcctttacatccacacatcaccatctacttttctgtcacaaacatattgaattaacttcatacgcagcagcttgttaaaatataagacccaatcaagatcattcacagatcttataattccaagtttcaagaataaaaccaacatgtccaactgagctaaatatattcttcatttcagcataaaaaatagaagtcatagatattgagagagt

SEQ ID NO: 593890 - DNA, 575 bp, Homo sapiens
acacacaaagcagttggaactcagcaagatgaccgaataggaacagctcccgtctgcagctcccagtgagaccatcacagaaggcgggtgatttctgcatttccctctgaggtacatggatcatttcactgggactggttagaaagtaggtgcagcccacggagggtaagcagaagaagggtggggcattgcctcaccrgggaagtgcaaggggctgggtaaccccctctcctagccaagggaagccgtgaaggactacgccgttgagggatggtgctatccagcccagatagcatgcttttcccacagtttctgcatccaacaaaccaggaaattccctcagatgcctacaccaccagggccctgggtttcaaggaaaaaactcggcagctgttcagacagataccgagctagctgcaagaggttttttttggaccccagcgtctcctggaaccccaacgagacagaactgttcactcccctggaaaggggctgaagcagggagccaagtggtcttgctcagtgggtcccacccccatggagtccagcaagctaagattcactggctgggaatt

SEQ ID NO: 593891 - DNA, 575 bp, Homo sapiens
acacacaaagcagttggaactcagcaagatgaccgaataggaacagctcccgtctgcagctcccagtgagaccatcacagaaggcgggtgatttctgcatttccctctgaggtacatggatcatttcactgggactggttagaaagtaggtgcagcccacggagggtaagcagaagaagggtggggcattgcctcaccggggaagtgcaaggggctgggtaaccccctctcctagccaagggaagccgtgaaggactacgccgttgagggatggtgctatccagcccagatagcatgcttttcccacagtttctgcatccaacaaaccaggaaattccctcagatgcctacaccaccagggccctgggtttcaagsaaaaaactcggcagctgttcagacagataccgagctagctgcaagaggttttttttggaccccagcgtctcctggaaccccaacgagacagaactgttcactcccctggaaaggggctgaagcagggagccaagtggtcttgctcagtgggtcccacccccatggagtccagcaagctaagattcactggctgggaatt

SEQ ID NO: 593892 - DNA, 492 bp, Homo sapiens
  misc_feature 492: n = A,T,C or G
ggattttcttctaggaaaaaggtttcattttgttttgtccctctgtcctgatcatttctaagttatctggatttaaaaaattttaacattgagagaaagagaaaggtggggtttacttacattatgaacactctctcattcacgaactatatcagaaccagaagacacagagagggatgggggttttccttctttatttcagtcagtacttgggcaatttgaaggaggcacaaaagagaacaggggatcttaagcaagtttggtaagtccatctcacaacaccccacactcagagtcatactgaatacamagattcatcactcgctctctcaggtatcaacttggagggctgacgtgacctgctctatgagagggaaagtgagacacatcttcctgcatggtccctacctgggaagatattgaaagaggaaaagtcaccgggcacgatggctcacgctggtaatctcagcactttgggaggcagagacgggn

SEQ ID NO: 593893 - DNA, 483 bp, Homo sapiens
tagtttgtggtatttcattatggcagtctgagctgactaacacaaatgaggaggctctttagctacaatctagggttaaaaagagtcccaagtgattctttggatcactcaggtttgagaaatttgacatcacacttcaaattagcaatacctaggaaccactgatcacaaaaatcagacctasagaggaaaataattttatggttgtcagagcagtacatcacagagaaagcgtagcttaagtaatattccccagctgtacataaggaataattattttcatcgaaatttatgtatttttgccaaagtagcaagtttatgtgtgtgtatctgtggactttaaagtcccccagaaaatgaaattacctttctcaattatgagtacaagtgcaaagaactcttcctttaacttcattgtttcatcttcaaaatttatcttttacatgctccatttaacacaaatgtgcttaatcagtgtgtcac

SEQ ID NO: 593894 - DNA, 485 bp, Homo sapiens
tagtttgtggtatttcattatggcagtctgagctgactaacacaaatgaggaggctctttagctacaatctagggttaaaaagagtcccaagtgattctttggatcactcaggtttgagaaatttgacatcacacttcaaattagcaatacctaggaaccactgatcacaaaaatcagacctagagaggaaaataattttatggttgtcagagcagtacatcacagagaaagcgtagcttaagtaatattccccagctgtacataaggaataattattttcatcgaaatttatgtatttttgccaaagtagcaagtttatgtgtgtgtatctgtggactttaaagtcccccagaaaatgaaattacctttctcaattatgagtacaagtgcaaagaactmttcctttaacttcattgtttcatcttcaaaatttatcttttacatgctccatttaacacaaatgtgcttaatcagtgtgtcactt

SEQ ID NO: 593895 - DNA, 483 bp, Homo sapiens
tagtttgtggtatttcattatggcagtctgagctgactaacacaaatgaggaggctctttagctacaatctagggttaaaaagagtcccaagtgattctttggatcactcaggtttgagaaatttgacatcacacttcaaattagcaatacctaggaaccactgatcacaaaaatcagacctagagaggaaaataattttatggttgtcagagcagtacatcacagagaaagcgtagcttaagtaatattccccagctgtacataaggaataattattttcatcgaaatttatgtatttttgccaaagtagcaagtttatgtgtgtgtatctgtggactttaaagtcccccagaaaatgaaattacctttctcaattatgagtacaagtgcaaagaactcttcctttamcttcattgtttcatcttcaaaatttatcttttacatgctccatttaacacaaatgtgcttaatcagtgtgtcac

SEQ ID NO: 593896 - DNA, 610 bp, Homo sapiens
gatcaattggatgtccatagcaaatagtaagtttaacaccttatataaaaattacctcaatgtggattacaaatataaatgtaaaatgtaaagcaattagactcttaggaaaaaaataggggaaaggcttttgagtctagggctagacagagtttctatgcttgacaccaaaattacaaaccagaaaaagataagttaataaattggatttcataaaaattaagaactttggctgcaaaagaccgcattaagagaataaaagtgtatgctgcagactgggaaaacacattcgcaagccaaatatctgacaaaagacaagtatctagaatataccatgaactctccagactcaacaacaaaaggcaaacaatccaattagaaaataggcaacaagcagaaaagtcaggtgacctaaaggacatccagacggcaaataagcccacgaatatttactctacatcaatagacatcagaggaatgcaaattaaaaccacagagaaataccgcacatgatatttcagccaatcagaatagctgaaataaaaataaataatgacaacatcacatgctggctagaaygtggagaaaattggttgctcttatactgctg

SEQ ID NO: 593897 - DNA, 563 bp, Homo sapiens
agctttgtcgcccaggctggagtgcagtggcgtgatcttggctcactgcaacctccacctcccaggttgaaggattctcctgcctcagcctcctgagtatctgkgattacaggcaccaccacgtccagctaatttttgcatttttaacagagacagggtttcaccatttggccaggctggtctcagattcctgacttgaagtgatccacctgcctcatcctcccaaagtgctgggaatataggcataaggcactgcacgtcggccttatcttaggtatttttttaataagagttttacatacttacagtgtacaatacaatgtctcagtatatatgtccatcataaaatgattactactggtaatcagtttttttctatgaaaactgatatataattggattattatatataatatatatttatataattggatagaattctaaaaggatcatgcctgccttacacgaatatctggttatgttttaaaaacatcatgagatttcaacagtcctatcacttcttgttgaagagaataatttctcatcaatttggcttcactgct

SEQ ID NO: 593898 - DNA, 469 bp, Homo sapiens
ggtcaatgtggttaatagtgattttcatatattctatgtctttactgaattacctaatttttctataaattgcttagaggagattaaaatctctatcatcgtggaatcctgtatcacttcctttctgtcagtttgtcccttatataatttgaggatttcttatgtacacacaaatttatggttgtgatatcatcctaactgacttcattatcattatgaatgctgacccatttrtatttggtaatgctacttttgttatagtccactctatccaatactaataaatccattctagcttccttatgcttactgtttccgtaatatgtatttttaaaaaatgtatttacatccaatccttatggctttttaaatttaaaatgaaactttttacaggtatcatataattggttatggctttttatatccagtgcgaccgtcttagtcttttaattgaaacactgtgtgtata

SEQ ID NO: 593899 - DNA, 622 bp, Homo sapiens
gcactccagcctgggtgacagagtgagattccatctctctctctctctctttccctctctgtctctctctctatatatatgctttctaaaattctttttgtaaaaacatctttaacatggttgcatgcatattaccctacacatagtargtgctcaaaaaacttctggtgaatgaaggaaggttaaatgaatgaatatgtgctaaataaccccttgatttttcaatatgtaataagcaagagtgagaatgagaatgttacgggatttttttaacaagacatttccaaaactgggttcattacagtttcttaaatattttgcagcctggattttgtcatcttttatgaaatgccagaacttcatgtttcagtgtttatgaccagacgttgttgcttagcctcccaccgtgcgcccagagtgctattctactctgatccccttacctgatggacagtgtaacaggaggtgggtagggacaacaaataggaatagaaaagttcacaagggcggactttaaattagacttaatctctctctctttttcctatttgtcttttctctctttctctttcaggaattcagaagttgagcggtaaatgtcacagacatgagtaaacaggcg

SEQ ID NO: 593900 - DNA, 468 bp, Homo sapiens
atggcaaaaccccatctctactaaaaatacaaaatgagccgagtatggtgctgtgtgcctgtaatcccagctatttgggaggctgaggtaggagaattgcttgaacccgggaggtggaagctacagtgagccgagatcgcaccactacactccagcctgggtgagacagagcgagactccatgtcatataataataataataataataataataataataataataataataawaaattttaacttttacatttttaagaaaggggacgaaacaaaatggtgatatttaacaggcataaacagtcatctaagtcacagtctaccatatcaaggtaccttaaattatttctgaaaaatttcagtaactagaacatggttcccaaccattttggcatcagggactagcttcgtagaagacaatttttccacggaccagggagtgagagggtttcaggatgattccagtgc

SEQ ID NO: 593901 - DNA, 468 bp, Homo sapiens
atggcaaaaccccatctctactaaaaatacaaaatgagccgagtatggtgctgtgtgcctgtaatcccagctatttgggaggctgaggtaggagaattgcttgaacccgggaggtggaagctacagtgagccgagatcgcaccactacactccagcctgggtgagacagagcgagactccatgtcatataataataataataataataataataataataataataataataataaattttaacttttacatttttaagaaaggggacgaaacaaaatggtgatatttaacaggcataaacagtcatctaagtcacagtctaccatatcaaggtaccttaaattatttctgaaaaatttcagtaactagaacatggttcccaaccattttggcatcagggactagyttcgtagaagacaatttttccacggaccagggagtgagagggtttcaggatgattccagtgc

SEQ ID NO: 593902 - DNA, 520 bp, Homo sapiens
atttttttctgtgtaaagaagtttaaaatgtaaagtggaatgtatatgctatttaagttttcagattcaaataaatttctactctttctttattgagactgtgatacttttaatacaaatgtgctgtgtttgtgaacttatcatggctgtgaaacatatacaattgcttaataaaccatgtccttcatctgtcccaggaacaatgttccagttatmtaatctttttaattatataattatataattgccaaaacataattgtcataaatccaattgttcattggacaaccacaggtgttgactaattctatgtcttgtagtgaacatccaaaaacataccccaaaagaggttcaggaaataaggaactgatgtacagagaaaaacatagatcaatctgtatttgaagatctcactgaggttaaaaggtaaaataaaataaataaacaaagctatagtaggaatgacagagtaggaattgaaagcatcagattttgtccttatctttccagtaaaagccag

SEQ ID NO: 593903 - DNA, 495 bp, Homo sapiens
gagcctgggtctgggccacattgcctccaagaacaggatgactcctacctggctggcctctagaccaagtgaactagaaacaggagaagcgcccctgcatccagtgagcagtgtttctggagggcgttggtagggaggaaggtggaggttccaactcacactttcctccaggacctgaccatcacagaagctcctaccaatgtagcttccatatttcactgcctaattctggattattgatgamagcaaaacaaacattatttattaagcaactgtttacaactgagacccagggaagtgacataatctaagattacgtaactaattagtggcggaggtaacaccctgttatatcatctccttattttaaaacaattgcaaagcattgcaaacatttcaaataagcacatctctggcattttatgacctttttatgcttaattcaaaagaatgtacttgctttaaataaacattaaggacatgaaatacattgat

SEQ ID NO: 593904 - DNA, 495 bp, Homo sapiens
gagcctgggtctgggccacattgcctccaagaacaggatgactcctacctggctggcctctagaccaagtgaactagaaacaggagaagcgcccctgcatccagtgagcagtgtttctggagggcgttggtagggaggaaggtggaggttccaactcacactttcctccaggacctgaccatcacagaagctcctaccaatgtagcttccatatttcactgcctaattctggattattgatgaaagcaaaacaaacattatttattaagcaactgtttacaactgagacccagggaagtgacataatctaagattacgtaactaattagtggcggagstaacaccctgttatatcatctccttattttaaaacaattgcaaagcattgcaaacatttcaaataagcacatctctggcattttatgacctttttatgcttaattcaaaagaatgtacttgctttaaataaacattaaggacatgaaatacattgat

SEQ ID NO: 593905 - DNA, 611 bp, Homo sapiens
taaacaaattaaagaagcaagagaaagtcaaccccaaagctagcagaagattaaaaaaaaaaaaacaaggtcagagcagagctgaatgaaggagatagagacacatacacacacacacaaaatttaaaagatcaataaatttatgagttggcttttgttaaaaaacgaatatgatactgaggccactagctaggctataaacgaagaaaagagaggagatccaaaaaacacactcagaaaaaaaaggagatattaccattgaccccacagaaatacaaataaccttaagagactactatgaacacctctatacacacaaactagaaaacctagaaaagatggaatccttcccaagactgaatcagggagaaatcaattccctgaacaaaccagtaatgagcttcaaaattgaatgaacaataaatagcctaccaaccaaaaaacccccaggaccctacagattcacagctaaattctgccagatgtatgaaattgaaagcggaccccttttttacrtaatatacaaaaataaactcaagatggatgaaagacttaaatgtaaaatccaagactttaaagtccttggaagacaacctaggcaataccattct

SEQ ID NO: 593906 - DNA, 601 bp, Homo sapiens
tttttccttttgttaatgacttggcttatgatgctgaaaatgtctccatctttcagaatctggtttccttatctctgagatgttataccaacatccacttccctaatacaggtctgactttctcctagactgcccccaagcctacataaaaaacatacatgtataagccactctttggctttcaaaatgccaaaatctcaayggaatcattttatcctctacatttttaaatatactaagcaactaagcaccatttatccagccctgggctcaagagaaatactttttcaatgtttgagagtcagcgtaacattgagaaaaaaactaagggtataaaattgtctttttttacctcttaatatctgtgtgaccttgggtacttcatgtcagttctatgtatttgatattcatcatctgcaaaataataacagtgacaacaataataattaacaatgaattattttaaaaatgagagaatgatacacagctttttaaaacaataagaaccaattaaatgctaacttatgattactatttatacagattcagttagttcaccccgttagaacacagacagaattccaaaggtttaactgagtaa

SEQ ID NO: 593907 - DNA, 601 bp, Homo sapiens
tttttccttttgttaatgacttggcttatgatgctgaaaatgtctccatctttcagaatctggtttccttatctctgagatgttataccaacatccacttccctaatacaggtctgactttctcctagactgcccccaagcctacataaaaaacatacatgtataagccactctttggctttcaaaatgccaaaatctcaacggaatcattttatcctctacatttttaaatatactaagcaactaagcaccatttatccagccctgggctcaagagaaatactttttcaatgtttgagagtcagcgtaacattgagaaaaaaactaagggtataaaattgtctttttttacctcttaatatctgtgtgaccttgggtacttcatgtcagttctatgtatttgatattcatcatctgcaaaataataacagtgacaacaataataattaacaatgaattattttaaaaatgagagaatgatacacagctttttaaaacaataaraaccaattaaatgctaacttatgattactatttatacagattcagttagttcaccccgttagaacacagacagaattccaaaggtttaactgagtaa

SEQ ID NO: 593908 - DNA, 601 bp, Homo sapiens
tttttccttttgttaatgacttggcttatgatgctgaaaatgtctccatctttcagaatctggtttccttatctctgagatgttataccaacatccacttccctaatacaggtctgactttctcctagactgcccccaagcctacataaaaaacatacatgtataagccactctttggctttcaaaatgccaaaatctcaacggaatcattttatcctctacatttttaaatatactaagcaactaagcaccatttatccagccctgggctcaagagaaatactttttcaatgtttgagagtcagcgtaacattgagaaaaaaactaagggtataaaattgtctttttttacctcttaatatctgtgtgaccttgggtacttcatgtcagttctatgtatttgatattcatcatctgcaaaataataacagtgacaacaataataattaacaatgaattattttaaaaatgagagaatgatacacagctttttaaaacaataagaaccaattaaatgctaacttatgattactatttwtacagattcagttagttcaccccgttagaacacagacagaattccaaaggtttaactgagtaa

SEQ ID NO: 593909 - DNA, 601 bp, Homo sapiens
tttttccttttgttaatgacttggcttatgatgctgaaaatgtctccatctttcagaatctggtttccttatctctgagatgttataccaacatccacttccctaatacaggtctgactttctcctagactgcccccaagcctacataaaaaacatacatgtataagccactctttggctttcaaaatgccaaaatctcaacggaatcattttatcctctacatttttaaatatactaagcaactaagcaccatttatccagccctgggctcaagagaaatactttttcaatgtttgagagtcagcgtaacattgagaaaaaaactaagggtataaaattgtctttttttacctcttaatatctgtgtgaccttgggtacttcatgtcagttctatgtatttgatattcatcatctgcaaaataataacagtgacaacaataataattaacaatgaattattttaaaaatgagagaatgatacacagctttttaaaacaataagaaccaattaaatgctaacttatgattactatttatacagattcagttagttcamcccgttagaacacagacagaattccaaaggtttaactgagtaa

SEQ ID NO: 593910 - DNA, 458 bp, Homo sapiens
catacccaaaccataatctaagtatgttcgtttttcatagaaaacctgtgccacagaagctggaatgtccatttcagtgtgaatgtgaatttattttctgtaggctgagctatacaggaagtgaaatcagaaattgccttagtgagactggaaactaaaggagggaagacagttggcagttcagttattatgttatgaaagtctgggacagccaccttcttagatttgtttcatataaaaatggataataaaataatgagtatagctgacttttattacacagttactttatgttaagcattgtactaagtattttttgcacattaacattttttagtcttttcaacaatggtatgaagtagatgrtattattattctcgttttacagatcaagacacagacaggtgaagtgccttcctcagtattcacagttaataaaaggcagccccacagtgaga

SEQ ID NO: 593911 - DNA, 458 bp, Homo sapiens
catacccaaaccataatctaagtatgttcgtttttcatagaaaacctgtgccacagaagctggaatgtccatttcagtgtgaatgtgaatttattttctgtaggctgagctatacaggaagtgaaatcagaaattgccttagtgagactggaaactaaaggagggaagacagttggcagttcagttattatgttatgaaagtctgggacagccaccttcttagatttgtttcatataaaaatggataataaaataatgagtatagctgacttttattacacagttactttatgttaagcattgtactaagtattttttgcacattaacattttttagtcttttcaacaatggtatgaagtagatgatattattattctygttttacagatcaagacacagacaggtgaagtgccttcctcagtattcacagttaataaaaggcagccccacagtgaga

SEQ ID NO: 593912 - DNA, 602 bp, Homo sapiens
gaagagtgagaagtccgagtatagaagcaactccttgatgtccttccacttcatacagccctctaccatcatggagaaagacatgttggaacagatgtaacttaggttggaggaaaagcacattctctgaacttagaaatattttctacattttacttcttaccttttgctgaaaaatagtgtgttattttgttgctgtttttatagttatggttgtatgtaacccaactagtgagaatgyctccctgatagatgcttgttacttcacttcagctaaatttaaaataagcctgtttattaaggcaaaaaaaaaagaaattggcaacattgatcacataaggtaagttcttaagacttagtatagttactgggacaactgattcaacaacatatataaccaggttcgctattgagtgatgatactatgaaatgcagtaatatgaaaaaaaaagaaatgaattagaagccagagaggtaaccagatacaacaatggtatctggtaaaccatagctgacaggagcatttatactgattcatttttaaaaaaggaatgaacttactaatacattcatacagagtgatgaacaagtagagttttaga

SEQ ID NO: 593913 - DNA, 602 bp, Homo sapiens
gaagagtgagaagtccgagtatagaagcaactccttgatgtccttccacttcatacagccctctaccatcatggagaaagacatgttggaacagatgtaacttaggttggaggaaaagcacattctctgaacttagaaatattttctacattttacttcttaccttttgctgaaaaatagtgtgttattttgttgctgtttttatagttatggttgtatgtaacccaactagtgagaatgtctccctgatagatgcttgttacttcacktcagctaaatttaaaataagcctgtttattaaggcaaaaaaaaaagaaattggcaacattgatcacataaggtaagttcttaagacttagtatagttactgggacaactgattcaacaacatatataaccaggttcgctattgagtgatgatactatgaaatgcagtaatatgaaaaaaaaagaaatgaattagaagccagagaggtaaccagatacaacaatggtatctggtaaaccatagctgacaggagcatttatactgattcatttttaaaaaaggaatgaacttactaatacattcatacagagtgatgaacaagtagagttttaga

SEQ ID NO: 593914 - DNA, 575 bp, Homo sapiens
acttcctggctctccagcaagcttgcagacagcagattatgggacttctccgcctccatgtgagccaatccctatgatagatctcatttacatataaaatctcttgttggttctgtttctctagagaatcctgactgatatggtatcattaccccaacttctacagataaaactaagacatctcgccacgtgacacacttgtgacccctgcggatgcttcctaatgacagagctggccatgcaatgtcgagctacatgtgctgactcccagcaattcctcctctgtgcctcactgcccctcccctacatgcagccctgtgtgccttccagcccaaatttcatccattgattctaaaatgacacattaaacatcaaccaacaagggcagtaatcctcagggtaatgcttttaagtaggagtgggtcttctgagaccaattcttttagttaaacttctcaatttctctaaccccaaaatttataacattgctaagaccctttcygcaatgcaggctctggctgttttgttatataaactagaagcagagacttttctttgaatcaattaatgatgat

SEQ ID NO: 593915 - DNA, 561 bp, Homo sapiens
acctgcttcattgctaatgtattggtagaggactcaggacttccttttggatactaaactcttttgtatatgctatttggtaaaaattatctctttagcctcagacactagtgtatatttcaatcaccgaagaatactagaaaaatgctgactttgggcccataggaccaatgtgagtcctgaaagatgtcactgttgtttggggacttcactttaagtagccaagttgatggccagtttctcatacttggaccagatactttttaaacatgctaattcccaggccccaagccagacattctgattgaattgggcaattrggcagagtggaaactagatgtctgtgttttctttgttctttttgttttttttttttttttctgaaatggagttttgctcttgttgcccaggctggagtgcaatggtgcaatctcagctcactgcaacctctgcctcccgggttcaagcaattctcctgcctcagcctactgagtagctgggattacaggtgtgtgccaccacacccagctaattttttgtacttttagtagagatgaggtt

SEQ ID NO: 593916 - DNA, 588 bp, Homo sapiens
aaaaaaaaaaaaaaaaaaagataaaaattcaagaaatagttaaaaggacctgttagtttatataatatccagatttagtacacagccatttatttttgcattcatgagttaactaaaatttaaacaaaatattttaggtgaattttaaacctcactcccattctatgctatttctcccctctccacagctaaccaataccataaagtctttatatgtgttatatttgcatgtttctttgtattttattcaagtgtaatatcatgcatatattttcagaaatcatgatctactttgtcactatcacccagaaggagaaakagaacattgccaacacttccggaggccttctctttagtatcgccctcctgttgtctcaaataatgccttggatattttattcccaaatccttcacagaaggatcttaaactctcacttctgtttacttgtttccccagtataagatatcttataatgatataatggagtcacatattatatatgtgtgtatatatgtgtgtgtatacacatatataatatatataatcatatataatctatatatggattttatttttgagtaacttta

SEQ ID NO: 593917 - DNA, 348 bp, Homo sapiens
ccctaagaagtgtggtttgcggtagtaggaggacacagtttgttaaataggggagtagaatatgtacttagagctagagagtaataactcctatagcagttttgtaaatgagtggaaaaaggaataagtcaggcagaagtaatctcactaggaagtgattaaaacattctaaaagataggcctacgttataaatatagatttccaggtgtctgaagattctcattcrggggactgactatgtgtgtttttaacaagtggaatgctaatttgtttactcctcctgcttttaggaagttagtcagatagtcagaaaactacataagcatcccagaagtattgtaaatgag

SEQ ID NO: 593918 - DNA, 484 bp, Homo sapiens
tgctgggaggaactttgataggtccagaagcttttaaaacgaatttttatattaaagggctaggaatagagaactaggaagaaaacaaaagagagcattttttttttaattyagacacattacttagcaaaatagtaccgaatttttctatagaggtccatatatcacagtaaccagaagcattttcattaaaaaattctccatagacataaaacagctaaatataattacagttgtagaataatgccatctcaatcatttccccatttatttgaaatttgatttaacagcaaaactcaaagggggcgtgagggtgaatagctagcaaaagaaatttctctgcgggaggcaatcatcaaaaaaacttgtagttaccagttgttccgccctacttctcatattctcatttggctttttgcccagatttgcataaatcactagtaatggccaaaacaattcatgaatatagaaaaaaataacaaat

SEQ ID NO: 593919 - DNA, 628 bp, Homo sapiens
gctatgaatgcttctctaataatttttttcttatttttagaagatttatagccctttttgtagataacgtgactttatcattgactttggtggtgtgtagttatactgcaatctggatgtggaaatatttatttattttgattggttggtatctacgagacttcttgaatctacatatttatgtgtatcatcaattgtggtaaacaatcagcaaatatctcttcaagtgttgtgcctttcctttctctcatctggaaacccagtttgaatttcatrtatttttattctaccatttggaattcgttatttctctttaatattttaaatttcatttctctttgctatattcagaattagcttttttctatatatactggtttactaattatttttgactttgtcaaacttcctctttaatacttcaactgagttcctgaattctattatagtttgtcttcatttctagaaggttaattttttttccaaatctgtagactttttgaaatcatttatttcttatacatattttgatgtactctcttatttctttggacatatcaaacatttaatattttctttcacaaaattttaatatctacacaagtctgattctgccattatgtttgat

SEQ ID NO: 593920 - DNA, 562 bp, Homo sapiens
ctgcactccagcttgggcaagagagcgagactccttctcaaaaaaaaaaaaaaaaaaaaaaaattacctgagagcagtggcacaggaggctgaggtgggaggatcggttgagcccaggcagtggaggctgcagtgagccataattgcaccactgcactaccctagcctgggtgagagaggaagaccctgtctcaaaaaaaaaaaaaaaaaaaaaaaarggataagaagtggaaaataccagtgcatcctggctagaactgtcgtaagggcttctgtaactgtgtagaggtgacaggacttcaggtatgtatgatcaaggctccagctgcatatccctgtgacttccttagcagtgtctttcccatgggtcagctttgtctgtattcataggtggccacatgcctgcttggggtcctggtgactccaggtgtttcctacagagcagggttctgcggcagcagttccaagcaacagccctgagatcgctgctgatggggcaattcaggttcacatgcccatccctagagcgatgactgcgtgggaagagggtggccccctaggc

SEQ ID NO: 593921 - DNA, 547 bp, Homo sapiens
agatctcgccactgcactccagcttgggcaagagagcgagactccttctcaaaaaaaaaaaaaaaaaaaaaaaattacctgagagcagtggcacaggaggctgaggtgggaggatcggttgagcccaggcagtggaggctgcagtgagccataattgcaccactgcactaccctagcctgggtgagagaggaagaccctgtctcaaaaaaaaaaaaaaaaaaaaaaaaaggataagaagtggaaaataccagtgcatcctggctagaactgtcgtaagggcttctgtaactgtgtagaggtgacaggacttcaggtatgtatgatsaaggctccagctgcatatccctgtgacttccttagcagtgtctttcccatgggtcagctttgtctgtattcataggtggccacatgcctgcttggggtcctggtgactccaggtgtttcctacagagcagggttctgcggcagcagttccaagcaacagccctgagatcgctgctgatggggcaattcaggttcacatgcccatccctagagcgatgactg

SEQ ID NO: 593922 - DNA, 547 bp, Homo sapiens
agatctcgccactgcactccagcttgggcaagagagcgagactccttctcaaaaaaaaaaaaaaaaaaaaaaaattacctgagagcagtggcacaggaggctgaggtgggaggatcggttgagcccaggcagtggaggctgcagtgagccataattgcaccactgcactaccctagcctgggtgagagaggaagaccctgtctcaaaaaaaaaaaaaaaaaaaaaaaaaggataagaagtggaaaataccagtgcatcctggctagaactgtcgtaagggcttctgtaactgtgtagaggtgacaggacttcaggtatgtatgatcaaggctccagctgcatatccctgtgacttccttagcagtgtctttcccatgggtcagctttgtctgtattcataggtggccacatgcctgcttgrggtcctggtgactccaggtgtttcctacagagcagggttctgcggcagcagttccaagcaacagccctgagatcgctgctgatggggcaattcaggttcacatgcccatccctagagcgatgactg

SEQ ID NO: 593923 - DNA, 441 bp, Homo sapiens
gcggggtggggctggagctcctgtctcttggccagctgaatggaggcccagyggcaacacaggtcctgcctggggatcaggtctgctctgcaccccaccttgctgcctggagccgcccacctgacaacctctcatccctgctctgtagatccggtcccatccccactgcccaccccacccccccagcactccacccagttcaacgttccacgaacccccagaaccagccctcatcaacaggcagcaagaagggccccccgcccatcgccccacaacgccagccgggtgaactgtagcgttggcaggtcctgaggcagctggcaagacgcctgcagctgaaagatacaaggccagggacaggacagtcccatccccaggaggcagggagtatacaggctggggaagtttgcccttgcgtggggtggtgatggaggaggctca

SEQ ID NO: 593924 - DNA, 543 bp, Homo sapiens
tcttgctcgaagtccagggcgacgtagcacagcttctccttaatgtcacgcacgatttcccgctcggccgtggtggtgaagctgtagccgcgctcggtgaggatcttcatgaggtagtcagtcaggtcccggccagccaggtccagacgcaggatggcatgggggagggcatacccctcgtagatgggcacagtgtgggtgaccccgtcaccggagtccatcacgatgccagtggtacggccagaggcgtacagggatagcacagcctggatagcaacgtacatggctggggtgttgaaggtctcaaacatgatctgtaaggcagagatrcaccatgtcacactggggaagccactggggacagccaggccagacgggggacatgcagaaagtgcaaagaacacggctaagtgtgctggggtcttgggatggggagtctgttcagacctactgtgcgcctacttaatacacactccaaggccgctttacaccagcctcatggccttgtcacacgagccagtgttagtacctacacccacaaca

SEQ ID NO: 593925 - DNA, 490 bp, Homo sapiens
ttgtgcatccctgcttgttgactttgcctactgtttattcatatatttgttaagtaatcctgcatcttttgcagatggatttggttttggaaaacagccagagccaggttggagaaggtgggtggaaagtcaaggtcaggaagggtggactgtgggtcgggatggctctcaggggcccatcacctagacccaggtgagcagagttgaccrgtgggtggggtcattggggctggcatgttggtgaggaaggccgccctgctctgattctctggtgctgcctgcgtgtgtagagctgggcaccgtgggccaggcttgctggtgagatggagaaaggggcctaaggagaaccattgatcaggtccctcttgcaatccagctggagggtctgagtgggagggaggggcccagccttgagcaggtcatcaatttggagagggaagtctcaaggcacccagtgatgggggcccccaccaaagccagggcaaagctt

SEQ ID NO: 593926 - DNA, 490 bp, Homo sapiens
ttgtgcatccctgcttgttgactttgcctactgtttattcatatatttgttaagtaatcctgcatcttttgcagatggatttggttttggaaaacagccagagccaggttggagaaggtgggtggaaagtcaaggtcaggaagggtggactgtgggtcgggatggctctcaggggcccatcacctagacccaggtgagcagagttgaccggtgggtggggtcattggggctggcatgttggtgaggaaggccgccctgctctgattctctggtgctgcctgcgtgtgtagagctgggcaccgtgggccaggcttgctggtgagatggagaaaggggcctaaggagaaccattgatcaggtccctcttgcaatccagctggarggtctgagtgggagggaggggcccagccttgagcaggtcatcaatttggagagggaagtctcaaggcacccagtgatgggggcccccaccaaagccagggcaaagctt

SEQ ID NO: 593927 - DNA, 610 bp, Homo sapiens
tggccgggaacaaggggaagttgtgactttgagctggtctcggtcactcggggcaaccatggctggagagactgggatccccaagggcctgggctcagccaggaatctctatcctcaccctgagggcatcccagggtccccatcatccaccactggcccctgtgtccaggcaggaggggtcaactgtacccagagccgtgggagsgccctggcttccagtttccctccttcctgtggctgcaatgcagctgtggccccaacatctgtctcctccgaggggcaagggcaggtggaagcaggcagagggggtcccgcacacaggaatcagacaggttttagaactcaaagggcctcgagggtcctggtggagcagaaagagcatggcctgtggagcccggaaggcctgacctgctgttactgagcagggttggacaggaagaaaagtcctggccactctcagcctcagcttcctcatctgtaaaacccagtgtccacctccatatcatagtgagacagtgaggatggaatgaccatctctgagagtcctgggtgcggtgcctgcacagagaggtgtcacggagccgcctctcatcacaccagggccagagtg

SEQ ID NO: 593928 - DNA, 610 bp, Homo sapiens
tggccgggaacaaggggaagttgtgactttgagctggtctcggtcactcggggcaaccatggctggagagactgggatccccaagggcctgggctcagccaggaatctctatcctcaccctgagggcatcccagggtccccatcatccaccactggcccctgtgtccaggcaggaggggtcaactgtacccagagccgtgggagcsccctggcttccagtttccctccttcctgtggctgcaatgcagctgtggccccaacatctgtctcctccgaggggcaagggcaggtggaagcaggcagagggggtcccgcacacaggaatcagacaggttttagaactcaaagggcctcgagggtcctggtggagcagaaagagcatggcctgtggagcccggaaggcctgacctgctgttactgagcagggttggacaggaagaaaagtcctggccactctcagcctcagcttcctcatctgtaaaacccagtgtccacctccatatcatagtgagacagtgaggatggaatgaccatctctgagagtcctgggtgcggtgcctgcacagagaggtgtcacggagccgcctctcatcacaccagggccagagtg

SEQ ID NO: 593929 - DNA, 424 bp, Homo sapiens
cagggttcctgacactttgcytggagatgtctgggaagctgccctttcctttcctgaggcttaaaccagggaagtttctctcagcacctttcagcacccccatctgggcctccaggaaatctgtgcagtcacctctgagccaggttctgtgcacagatgggggacaccaaagagggtcagggacagaaccctgagcttcgcttatccctcttgctttcaatctttcagtccactaggctgtgagctccctccaggggagccctgtgggatgggtcctgcatctcagcccctacacgtggcagcactcaatacacagctgatggctctgggaatggatgactacactttctctaaagcacagatttctgcacagctctccctcactgccagtgtgccctcttcatcatagctgagccctgaattc

SEQ ID NO: 593930 - DNA, 577 bp, Homo sapiens
aagttatagacagacatattgaagttataaaaaaaatactgtggagttggcagagtgaaaagctaacagaccaatactaaaaaatagagaacaaaataaactgacccaaacatttaaggacaattgtgacagagaaggaaagggcatgacaaatcagtggggattaattcaagtattcaataaattgtatacaataatatgatctccatataaaaatgaaaattatgctgccacctcatagcatacaaaaaatccagatagattataaaactattggtaaaatgaaaattttgaaacttttgtaagtattcatagtagtatgttttcatgtcatctagaaattgaagcatttctcaaygacacaaaaatacaagccattaagaaagaaaacttgatcagactaaaatttaaaacgtattattagtatggcaaaatactctataaggtaaggttaaaaaaatgccacactggggaaaatatattttcaatgtatataaccaacaaaattgaatactcagaatttacagaaatttatttcatttaaaaaagattcaacagcctaaatggagaaacgtac

SEQ ID NO: 593931 - DNA, 617 bp, Homo sapiens
gtttcatttatcttgtatttttgtttgtttgtttcaatttcatttagttctgctctgatcttggtaatttcctttcttctgacgggtttgggttttatttgttcttgcttatctagttccttgaggtatgatcttagattgtctgtttgtactctttcagactttttgatgtaggtgtttagggctatsaactttcctcttagcagcacctttgtcttatcccagtagttatgatagattttgtcactgttgtcattcagttcaaataattttttaatttccatcttgatttcattttgacccaatgatcattcaggagcagattctttaatttccatttatttgcatggttttaaggttccttttcgagacgatttccagatttattccactgttgtctgagagggtgcttgatataatttaaattttcttaaatttattgagactcattttgtggcctatcatatggtctatcttgaaggaagtaccatatgctgttgaacagaatgcatattctgcgattgtttggaagaatgttctgtatatatctgttacatccatttgtcccaggctacagtttaaatccattgtttctttgttgagtttcggttttgata

SEQ ID NO: 593932 - DNA, 500 bp, Homo sapiens
gtagcttggggatgttcctgagtttaagcattccttacagtagcttaactcaatgattagtttctcaaaagtatattttatgaraaacattttctgaaatatgaaaaatagaagataaacatgccaatgaagtgagcgaggccctataaataagaataccttaagaagattttactcttttgtttttatattagcatgtcatttcagttaaaaaaaaaaaaaggtggactgacttttaggctgttctcctctctccttcaagctacctgctctctttgaagtattgaactgaagcatgtgtccataggtatttgtcacttgatactgacatttcagcactcatttgatagattaatggagaaaactggtagtgctgatttctttcttcccatgacttttggcataaacatacttttcgagacatttcctatagttcttggattaattttaagaatcttactactaaggcagtttgggaagaaatagcttattcaaagata

SEQ ID NO: 593933 - DNA, 333 bp, Homo sapiens
ttgtcatttaaagcaaacttggactttactttgactttgtacctagggacctatttgcactgtctggtctttcttttgagtcatataacagtcatatcacatgaaaagttagggatatcattcggcctctctcctctctaaacagatgataagatctacttaaactttggttaaaaaaaatggagtagaaggccaggagtagtggctcacgcctgtaatcctaacactttgggaggccgagaagggtggaccacctgaggtcaagagttagagaccagcctggccaatatggtgaaaccccrtctctactaaaaatgcaaaaattagctgggc

SEQ ID NO: 593934 - DNA, 530 bp, Homo sapiens
attttaacctgccctattctcatctcatttttgtcggttccacaataaccttgaacaccagcagcttcacagccatggtagtgaaaccaagcagcccagtagctactagaaacagttaactggatttggatctcctcacaatgcttgtccccacatatrtaatctgtctggcagctccttgggaaatctccattagcaaggcttttctttatttcacctcatccagtgttcaacaggaaaagtcttgtctccagaacatttgttgaaactaattgcctaacatggcaactgcctgaggccaagataacaattgaggcaaacaagaggttgggcaaaaaggaagatgagaatgagatgttcctagtgggcttggaaaagcttcaatgtattactggggatctagaaggccccatgcatgtgcaaagctgtgcatgtgcccaggaaaacctagaaaggtcctaatctctaagcagaaagtaaaggctgaggcacagctttaaactgcttgaatgctaaaggcatgccctaat

SEQ ID NO: 593935 - DNA, 445 bp, Homo sapiens
tctagaaaccattaagaacattggtgattcatgggaggagattaaaatatcaacattaataggagtttggaagaagttgattccaaccctcagtggatgactttgtgaggttcaagacttcagcggaggaaataactgcagatgtgatggaaatagcaagagaactagaattagaagtgcagcctgatgatgcgactgagttgctgtaacctcatgacaaaacttgaatggatgaggagttgcttcctatagatgaacaaagaaagtggtttcttgagagggaatctactcacgatgaagatgctgtagacattgttgagatgacaacaaacaaatattcaataaatgtagttgayaaagcaatggcaagggttgagaggactgacttcagtcttgacagaagtactgtgggtaaatgctatccaacagtgttaaatgctacaga

SEQ ID NO: 593936 - DNA, 226 bp, Homo sapiens
ttacccctcctaccagcaatgattggaatgtctcactttactccccagctcatagagagcaagttttgttttcgtttttgcgatcactrtagagttgcagtgtttccagttttaaattaattttatttcctttactgtaaaataattttttctcccttgtcacattgagctttttttttttttttttttgagacagagtttcactcttgtcacccaggctggagtg

SEQ ID NO: 593937 - DNA, 565 bp, Homo sapiens
aaatagaggagtggtttcagatttgggcttcaagtcaaatccatgggtgattaatattatgcaaygtagaaatcaacatcctgaatattccaataacattgaaaactcttctactcagaggagagacacataaacaaaatatcgagcttgatttggttataaagtgtattagtccacagcattaactacccaatacaatatgcccattgtcaatcattaagcatgaagaaggactcagctatctatgttcagtttcaatattacaacctaactgctcatttgtctacatagcttttgcttgagcaggaaactcagctatttagattcagtatactttaaaatattatcaccattaggcctgactctgtatgtagaatctccgaattcccttaatacaaatactttgcattaagctatgtatgtagtctcctactaaaagcatatatatggcacaacgtagagataacatagtgatcttattagataatatttccaggatgtagaatattttataacattattattattattattactattattattattattattattattgaga

SEQ ID NO: 593938 - DNA, 611 bp, Homo sapiens
cagtaagttgactttagtctctttaaaatctaacaactaataagtttaaaaagtattgtgttttgagctgcattgtatgaayacatttgagtaggaaacatattattcaaaaaaaaaaaacacagtaaaacatttaatttggcaaaaattgtcttttaggccagctaataaaatcaatgtgaaagagaaggcagaacacttttcagaatggacttcggagggtattacaagccagaaatgaaatatgggccataatatatttcttcaggagtgaaaaaagagaactaaaagtttctagagcaagaactctttgcattttcttcttggtgaataccctttagggatggtgattctgagagctgaaatcttaaacctcaggactttatcttatgtggcagtggacttacaaatttttgaatttaaagaatttagtactcactttttgtctttttatatgccagttggggaagaaaaaaggtaatgagaaaaaacttttagaacttaggtttaagtctgtgtttaactgagcagatttgcatcaggctgaggactggaaataatagcagagtatttgtaattttattctagtaatcataaatacaaccagaaag

SEQ ID NO: 593939 - DNA, 428 bp, Homo sapiens
ttaatattcataaaataacttgccaaaattttgattgggattgtgttgaatctatatatcaagttgagaagaactgaaatcttgacagtattgagtctttctatccatgtacrtggaatggctctccatttacatcttttatttttttcatcagtaatttggagttttcctcctatacatcttgtacatttttcttagatgtatacctaagtatataattgtttggtgttaatgtaaatagtattgtgtttttaatttcaaatttgtattgttcattgctggtatttaagaaaggatttgacttttctttgtttttattctttaaaattttaggtttttttttttcaacatgtctaactaggcacatcagtcaccagttctcctcagaagaaccaaagttataggtgaataattatggccagagtgga

SEQ ID NO: 593940 - DNA, 619 bp, Homo sapiens
taaacatagagaaatttgttgtatcgaatgactatcagtccagagctagagtgactatggtaggcaatataatggctctccagagatgttcatgtcctacttccagaaatctatgaacatgttatgttgcatggcaaaggggaattaaggctgcagatgaaattagggttgctaatcagctgaccttaacatagggagataacctagattttccagaaagaaatgcagccctgctgacaccttgattttaactcagcaaaacccattttgaacctctgacctccagaactgtaagayagtaattgtttttgtttgtttaaagccaccatttgtaatttatagatagcagcataaaaaatgcaattgatcttagccaaaaggcccagaagtcatagcaatagaaaatgaatatagtggacttcagggtttgttaattcagcaactcaaaagtcatcaagagcgtaaaaaaaatgacatgtagactaaaggaatgaagttgagattctagaattaaacccatagatctatggccaattaatttttgtgtttttgtttgcttgttttttgcttttttgagacagagtctcactctgttgcctaggctggagtacagtggcac

SEQ ID NO: 593941 - DNA, 621 bp, Homo sapiens
caaaccccacctctgccatgaatcaatactttttttttttttttgagacacggtctcactcttgttcaggctggagtgtagtggcacaatcatgacttgctgttgcagcctcaacctcccaggctcaagtgatcctcccacctcagcctcctgagtagctgggactataggcacgtaccactgtacctggctaatttttttgtagagatgggatctcaccatgttgcctaggctgaccttgaactcctggctcaagcaatcctcctgcctcggcctcccaaagtgttgggattacaggtgcaagccatcatgcccagccacaaataagtaactatatgatcttgaggaggtcgatgagtccctacacatcaggaaagtggggtatggcaggacccatctcataaggttgwtgaaaacaaatactgccaggcacccaggaagtgctcaataaagtccagctgttaccaatgttagatcagcatcatgacccttcagcctttacaaccaggacaatggggaagtcactttgcctctgggctgcccatgtcctgttaatttgctgccggaggcctgagctgcccactctctgttgctgatcttcctgggactccaggccaacac

SEQ ID NO: 593942 - DNA, 540 bp, Homo sapiens
gggtccagtttcaattttctgcatatggccagccagttctccaagcaccatttattaaatagggaatcctttttccattgcttgtttttgttaggtttrtgtaagatcagatggcaattactccaaaacttatcacataattggaagtaaaatactcctcagcaaatgcaaaataactgagatcataaccaacagtctctcagatcagagcacaatcaaattagaactcaagactaagaaattcactcaaaagacacaactacatggaaattgaatgacgtgttcttgagtgactcaggggtaaataatgaaagcgaggcagaaatcaagaagttctttgaaactactgagaacaaagagaaaatgtaccagaatctctgggacataggtaaagctgtgttaagagggaaatttatagcactaaatgcccacgttaaaaagctgaaaaacatctcaaattaacaacctaacaacacaactaaaagaaccaaagaaccaggagcaaactaaccccaaagctagcagaagacaagaaataac

SEQ ID NO: 593943 - DNA, 540 bp, Homo sapiens
gggtccagtttcaattttctgcatatggccagccagttctccaagcaccatttattaaatagggaatcctttttccattgcttgtttttgttaggtttatgtaagatcagatggcaattactccaaaacttatcacataattggaagtaaaatactcctcagcaaatgcaaaataactgagatcataaccaacagtctctcagatcagagcacaatcaaattagaactcaagactaagaaattcactcaaaagacacaactacatggaaattgaatgacgtgttcttgagtgactcaggggtaaataatgaaagcgaggcagaaatcaagaagttctttgaaactactragaacaaagagaaaatgtaccagaatctctgggacataggtaaagctgtgttaagagggaaatttatagcactaaatgcccacgttaaaaagctgaaaaacatctcaaattaacaacctaacaacacaactaaaagaaccaaagaaccaggagcaaactaaccccaaagctagcagaagacaagaaataac

SEQ ID NO: 593944 - DNA, 557 bp, Homo sapiens
tggcttgggtgctgttaaaagcattcagttttaaaagggaaacagagcataaaagtttggaaaatttgtagcccgacaataagacagaaaagaaaaccccattttctgaggagaaattcaagctggctgcagaaatttgcataagtaatgargagccaaatgataatcccaaagaccatagggaaaaggcctccagggcatgtcagagttcttcacagcagccccctcctatcacaggtccataggcctaggaggaaaaaatggtttcatgggccaggcccagagtccccaagctgtgtgcagcatagagacttggtgccctgcatcccagccactccagccatggctgaaaggggccaacatagagcttgggccatcatttcagatggtgcaagccccaagctttggcaactttcacatggtattgagcacagaagtcaagaattgaggtttgggaacctatgtctagatttcagaacatgtgtgaaaacgtctggatgcccaggcagaagtttgcaacaagggcagagctctcatagagaacctctgctagggca

SEQ ID NO: 593945 - DNA, 522 bp, Homo sapiens
gcctgtaatcccagctactcaggaggctgagacagcagaatcacttgaacccaggaagcagaggttgcagtgagccaagatcgtgccattgcactccagcctgggagacaagaacaaaactccgtctcaaaaataaataaataaataaaatgaaattaaaattaaaaaaaaaagttgttggatgctgctgtaggcaacacaaaattcaagactcagtttgccttgaattcttcaggaatatgctgaataatctatatattgaaggtttagaacagtgtaatgatgcatttgattagattttgactaattyaactattcacttattttcaattgactcatctcagttaatacgaagcatgagaggaaggagggggaaggagaaggagagggagggaacagggtgagagagagagagagaaggaaaataaatcttgaatcttgatataacatggatttttctacttagggcctcagtgaaccagaaactggaaagctgtgctctttttaaatttatggttttaa

SEQ ID NO: 593946 - DNA, 564 bp, Homo sapiens
caaacataggattttggatagattattttgtcatttccttattctctaggatcatactaattataatttaagcttcttcatgtttgtttacttttatatttttaatgtgatgtttctggttttgaggggcatggcattggatcattagaaattattgcaaaacttcaggaagcaaataatttttttctttctttctacccttagaatatatttacctttaagtagatttaagagagagttttatttatctctagtaaatcaactttatcttcttaatctaagtytatattttttatctatttgattcatcaatttcttttaaaaaatttttatgtgtacatagtaggtgtatatgtttatggagtacatgagatattttgatacaggcacaatttttttgtgcccattaaccatgcccaccttccccacccctactatccttcccagcctccagtaaccattcttctactctctatgtccatgagttcaattgttttgagtttcagatcccacaaataagtgagaacatgcaaagtttgtccttctgtgcctagcttgtttcac

SEQ ID NO: 593947 - DNA, 468 bp, Homo sapiens
gtgtcttagggccagctgaatgtagggctatctatattwtatgtccaagattaccctatgatttattttaattgcaataaggtataacttctaggatatcaagagacagcttcatggtttccttctgcttttatttcctaatacataaaatgccaacatattctcctttctgctgaaatctttcacctaaggtggtatttctgatcttcataactgcccttgatcctgagtatgtaccttgccggggacagaaaacacataaggatattatctgatgtcctaaaacaagccactgccaggtcaacccttcagcaacagagaagagcaggtgttctgacccttattcttccttctgtcagaactgaaataagtggcttgtaagtagcatccaattatattttatttttgtctttatttgagatacaaagagacatgtgtctccccagttctttaggggaaataaagcaa

SEQ ID NO: 593948 - DNA, 529 bp, Homo sapiens
tgtttttcttgatgtaaaacaacttatgaagtgaaaattttatactaggtaaaaggagaaaaaggaaaaacagcagactgtatatgtgtcttagggccagctgaatgtagggctatctatattatatgtccaagattaccctatgatttattttaattgcaataaggtataacttctaggatatcaagagacagcttcatggtttccttctgcttttatttcctaatacataaaatgccaacatattctcctttctgctgaaatctttcacctaaggtggtatttctgatcttcataactgcccttgatcctgagtatgtaccttgcyggggacagaaaacacataaggatattatctgatgtcctaaaacaagccactgccaggtcaacccttcagcaacagagaagagcaggtgttctgacccttattcttccttctgtcagaactgaaataagtggcttgtaagtagcatccaattatattttatttttgtctttatttgagatacaaagagacatgtgtctcccc

SEQ ID NO: 593949 - DNA, 438 bp, Homo sapiens
attaaaaatgagcttacaaatctgatatacttgatacatcaaaaatatgatgtatttggtactataataagggactctttttctattctctcaatgattaccccaggatctctatgttatgttactttttgtaaatcttatttatwtaaacattcatattgaatgtatgccggaccctgccatctcaccgtcactggtgtacaagcatgtaaaccaatcctgctgctttgttgacagtgtgcatgtgtaagtgtggatctcacagccactgcactgatgaagcactgttgctggaatccatcattagagtattgttgctagcagactaggaacactttgctccctcatggatagcaggtgtatacatttgaggagtcagagaacaaagtaatgggcctatgggcctagtcccagtcctgcagagcactcccaggagtg

SEQ ID NO: 593950 - DNA, 526 bp, Homo sapiens
gtcaaaaaagaaacctcaaaacttttgaagtaaatgagaattaaacagaactcataaaaatttgtagtttgtagtaaaagccgtgcttcgaggaagatttacagcattgaatggatatttgaaaataaaataagatgtgaaataaaaaatctaaattccatcttaggaagctagaaaaagaagagaaaattaaatccaagataagcagaagaaaagaactaataaagattgaaacaaaagtaaatgaaattgaaaacagtaaatcaatactgaaacctactaaagcaaaagctagtactttgaaaatattaataaaattgatgaccctctagctaaagaataaaagaaagaaaacytaaattactaatatgacataagaaagatagggcatcactacagatcccacgaatggtaaaacaataataaaggaatattacgaactaccctatgctcacaaatttgataacctggacaaaatgcatcaattccttgaaagaaacaacctgtcactcacacaagaagaagt

SEQ ID NO: 593951 - DNA, 598 bp, Homo sapiens
atatattattaacatattattaatatataattatatataatattaatattatatatattatataataggtaattatatattatataatacatatgatataatatgttatatataatatataacatgttatattatataacattataacatattatataacatatattataacaattataaatatataattgttataaacatataattgtttacaattataaatatataagtaagtagtaaacattgattcacccaaacatgtaargcaagtgtgaatgggcatgaaagaaatagatagaaatataggaatagtaggggatttcaatatcccactttcaacaatgaacagagaaacaagattaaaaataaatttattgacaaaaataaatgctgctgttacatgaaaataaattttttttgagacagaatctcgcttttccacccagactagagtgcagtggctcaccacaacctccacctcccaggttcaagcgattcccctgcctcagccttccaagtagctgggattacaggtgtgtgccaccacaccctgctaattttttgtatgtttagtagagacagagtttcaccatgttgg

SEQ ID NO: 593952 - DNA, 619 bp, Homo sapiens
ggttagtttaattatcatgtgaatgtttgaaactctctgatataggaaatctcccaggattacctgtctactaaacagatttccttctctttccaaatacattattgatcaatttggccattgatttagatccactgggacgtctcttttctttgagtttgaagtttatcaggatgtccttgataattctgataaacatcatttccacctccagagactgctctgctgcagacagttcacagaattggcatcggttttccagtgccagcttttgcccttcttcccagccaacctctcgcacatgacaaagatctcgtttgttgccaaccaaaaacactgctgattccacagctctgaaatagagatacacaatttttagcaagattgttttaacaactcttttttttaaaaaaaaaaaaaaaacagatttataaccaarggattataaatcaaaaaagaaaaaatattgtgtgtatgttacttatggtcatgtgtgtatacagttacacatagccccaattacttaaaatcattttagataaaatgtagtaaatggcacagaagcaacaagtctcttaaagcacaggaattgaagtaacatggacctattattgaattc

SEQ ID NO: 593953 - DNA, 568 bp, Homo sapiens
gtaccatttatttattttggcttttctagtctgaacttctggtgtgatttctaagaaatcattgccaagacgaatgtcaggagtttttcccgtgttttcttctaaaagttwtatggtttcaagtcttatgttcaggtcttttatccattttgagtttattttggtgtatggcataacataaaggtccaattttattctttagcatgtgaaaattcagttttcccattaacatttattgaggagactattatttgctcattgtgtgtttttggtgctcttgtcaaaaattagttgagcatatatatgtttagatttatttctaggatttctattctgttcccctgatctgtgtgtctatttttatagcagtattatactttatgattaccatagctttggaatataattttaaatcaagaagtatgattcttctaaatttgctttttttccttcacaattgccatggctatttgaagtcttttgtggtttcatacatattttacaattgttttatctatttctgtgaagaatgccatttggatttgggtaggaattgctttgaatccat

SEQ ID NO: 593954 - DNA, 414 bp, Homo sapiens
atgagaatctaactaatgcctgatgatctgaggtgggacagtttcatccccaaaacccccaatccttcctgtctgtagaaaaattgtcttgcaagaaaactggcccctgctgccaaaaaggtttggaacagctgttctaaatgatatatttttttgtaactttgagatatcaaattcactctttctgctacaaagttttacacattttgacaaatgcccagtgtcatggtgtataccattagagtatcawacagaattgtttcactgtcattaaaaaaaaaaagcctcctatgctttacttattcaattgtcccccattgctgaactcctggaaaaaacttttctattactatctctacagttatccctttcccataatgttacataaatataattatacattatgaagccatt

SEQ ID NO: 593955 - DNA, 505 bp, Homo sapiens
agtgagcacaggccatccccttccccaggcctcacccctgtgccttccttttcacatgtgtaagaggaggttgtttggtgcagaggttggatctctaacagcctcatttttaaaaggtggacatttattttaccaccagagaaaagggaaggaattaaccaatactggaatatgtcttagacccagattcagtcttgcgtttgggggagtgtctgattcctgttgagagaaataagtttttatgtatataaagtttttggtaaatgcttacatctgggtgggtaataatcattagctgctaaattattattgtcgcyctcttcattaagaattaccatatgttacgcccactgctgctcactagtcagtgctgtttcctgtattatgttattttttctgaaaacttgcatatcagaagattatattaataatatcttgatatgttttgtattaaaactttgaaactcacactttcacatacctgtgcctcagagctgaggttcgc

SEQ ID NO: 593956 - DNA, 345 bp, Homo sapiens
ctgcattgcccactgactacctggcagaartaacttctctgcatgctgcaaaccctgcctggtccctgcctgattcccaacatacaatggcccaggacacctataatcttgaaaaaagcaaggctgcctatagacacctaatggggtagtgatagggaaccactgtcaaacctgcatttggtggggctggggactgactgcactggataagcttgagattccattgggtgggctgagaggcactgacactaaagtttgaagaacttacataacttgccccaggttatggtgctaataagtgggagggaatggaaagaagtccaggcctcctcaaagtctgtattt

SEQ ID NO: 593957 - DNA, 331 bp, Homo sapiens
cagggcttggccaagcccggcgccaaggacttcccgcctacccccaccacaagcccctcgccaggtgagaggcacygacagagtcccagacagatgccccagacaggatgcccagcacgaccccccccttcccctgctgggggcacccaggacgcggggctccccttccccttttggccagccgcagagtccagcgggtatcccagccagggacgtcgtgggagaatcaggaagtcgaagccacacatccgagaaggggcagctggcgtctcggaggccgtcacgagctgtaactccgcgcccgccggagttgccgctcagttaccaactt

SEQ ID NO: 593958 - DNA, 331 bp, Homo sapiens
cagggcttggccaagcccggcgccaaggacttcccgcctacccccaccacaagcccctcgccaggtgagaggcaccgrcagagtcccagacagatgccccagacaggatgcccagcacgaccccccccttcccctgctgggggcacccaggacgcggggctccccttccccttttggccagccgcagagtccagcgggtatcccagccagggacgtcgtgggagaatcaggaagtcgaagccacacatccgagaaggggcagctggcgtctcggaggccgtcacgagctgtaactccgcgcccgccggagttgccgctcagttaccaactt

SEQ ID NO: 593959 - DNA, 331 bp, Homo sapiens
cagggcttggccaagcccggcgccaaggacttcccgcctacccccaccacaagcccctcgccaggtgagaggcaccgacagagtcccagacagatgccccagacaggatgcccagcacgaccccccccttcccctgctgggggcmcccaggacgcggggctccccttccccttttggccagccgcagagtccagcgggtatcccagccagggacgtcgtgggagaatcaggaagtcgaagccacacatccgagaaggggcagctggcgtctcggaggccgtcacgagctgtaactccgcgcccgccggagttgccgctcagttaccaactt

SEQ ID NO: 593960 - DNA, 331 bp, Homo sapiens
cagggcttggccaagcccggcgccaaggacttcccgcctacccccaccacaagcccctcgccaggtgagaggcaccgacagagtcccagacagatgccccagacaggatgcccagcacgaccccccccttcccctgctgggggcacccaggacgcggggctccccytccccttttggccagccgcagagtccagcgggtatcccagccagggacgtcgtgggagaatcaggaagtcgaagccacacatccgagaaggggcagctggcgtctcggaggccgtcacgagctgtaactccgcgcccgccggagttgccgctcagttaccaactt

SEQ ID NO: 593961 - DNA, 608 bp, Homo sapiens
cagcatcatatatgaaggaaagatacagttgttgtcagacaaacacatgctaagagaattcatcattaccaagccaccactacaagaactgctaaaagaagctctacatcttgaaacaaatcctggaaacacatcaaaacagaatctctttaaagcacaaatcacacaggacatataaaacaaaaatacaagttaaaaagcaaaaataaacagaaaacaaagtacgcaagcaacaaagagcatgaggaatgcaatggtacctcacatttcaatactaacattgaatgcaaataccctaagtgctccacttaaaagatacagaaccatagaatggataagaactcaccaaccaactatctgctgccctcaggagactcaccaacacataaggactcacataaacttaaagtggtgggaaaaggtatttctcaccactggtgaccacaaatggacaccaaaagtgttcaggggtagctattcttatatcagacaaaacaaactttaaagcaacagcagttaaaagagacaaaaagggatattatataatggtaaaagtccttgtccracaggaaaatatcacattctaaacatatatgcacctaacactg

SEQ ID NO: 593962 - DNA, 505 bp, Homo sapiens
atgcagaaatgcaaaagacccttgagcaatagttacctaacacagtcaaacaacaatagatacgtagcatgagtgagaattaaattctcattattgtatacctctgagatttggggcttatttattaccataatataatctagactattctaaatagtatatccacatctgttgattttataggaatctagatatgaaattcagaaattccttaaacttccagaactatagggaaaaattgcacatatataaaaagtacatacaaacacattyttctttggctagaaagcttgtgacacatttatgagattttaaagagtctataacccaaacaattctaaaataggccaaaaaatgtattttacagctccaatgtatagatattttgactttccattaatgtctaagcagaaagaaagtatttttttaaacacaaaaggaaatatacatatatgtgccaggaagacggaaagtccagatggaaaattggtatttttcctattaa

SEQ ID NO: 593963 - DNA, 601 bp, Homo sapiens
ttctcattattgtatacctctgagatttggggcttatttattaccataatataatctagactattctaaatagtatatccacatctgttgattttataggaatctagatatgaaattcagaaattccttaaacttccagaactatagggaaaaattgcacatatataaaaagtacatacaaacacattcttctttggctagaaagcttgtgacacatttatgagattttaaagagtctataacccaaacaattctaaaataggccaaaaaatgtattttacagctccaatgtatagatattttgactttccattaatgtctaagcagaaagaaagtatttttttaaacacaaaaggaaatatacatatatgtgccaggaagacggaaagtccagatggaaaattggtatttttcctattaataaaattattattttctgattataatatttgatatgatataagaatattttcttatatccaagaacccccccaaaagtttagatgttatgtttggaatatgaatgtttcttcaacttcttacataatatttgcttggactgtatttttctcttkgtaaaatatttgagatcacgcacact

SEQ ID NO: 593964 - DNA, 601 bp, Homo sapiens
ttctcattattgtatacctctgagatttggggcttatttattaccataatataatctagactattctaaatagtatatccacatctgttgattttataggaatctagatatgaaattcagaaattccttaaacttccagaactatagggaaaaattgcacatatataaaaagtacatacaaacacattcttctttggctagaaagcttgtgacacatttatgagattttaaagagtctataacccaaacaattctaaaataggccaaaaaatgtattttacagctccaatgtatagatattttgactttccattaatgtctaagcagaaagaaagtatttttttaaacacaaaaggaaatatacatatatgtgccaggaagacggaaagtccagatggaaaattggtatttttcctattaataaaattattattttctgattataatatttgatatgatataagaatattttcttatatccaagaacccccccaaaagtttagatgttatgtttggaatatgaatgtttcttcaacttcttacataatatttgcttggactgtatttttctcttgstaaaatatttgagatcacgcacact

SEQ ID NO: 593965 - DNA, 651 bp, Homo sapiens
tagctagatttaccaagaaataaagagagaagattcaaataagcayaatcagaaatgataaagatgtcattacaactgatacaacaaaaatataaaagatcatcagagactactatgagcatctctatgtacacaaactagaaagtctagagaaaatggataaattcctggaaagatacagcctcccaagattgaatcaggaagacgtagacatcctgaacagaccaataatgagtagtgaaagtaaattggtaataaaaaaatcttaataataaaaaaaaagcctaggaccaggtagtttcagagacaaattctaccagatacacaatgaagtagtgatactaaacttgctaaaactgttcccaaaaattgaggagagaaaatcttccctaactcattttataaagccagcattgccttgatactaatgccaggcaaagacactacaaaaaaaggaaaactacagaccaatatctttggtgaacatagatgtgaaaatcctcaacaaaatactagtaaacagaaaccaacaacacatcaaaaagataatatactgttactaagtggattttgttatagggatgaaagtttggttttacatatgcatattaataaatatgattcaccacataaacagaattcaaaacaaaa

SEQ ID NO: 593966 - DNA, 651 bp, Homo sapiens
tagctagatttaccaagaaataaagagagaagattcaaataagcacaatcagaaatgataaagatgtcattacaactgatacaacaaaaatataaaagatcatcagagactactatgagcatctctatgtacacaaactagaaagtctagagaaaatggataaattcctggaaagatacagcctcccaagattgaatcaggaagacgtagacatcctgaacagaccaataatgagtagtgaaagtaaattggtaataaaaaaatcttaataataawaaaaaagcctaggaccaggtagtttcagagacaaattctaccagatacacaatgaagtagtgatactaaacttgctaaaactgttcccaaaaattgaggagagaaaatcttccctaactcattttataaagccagcattgccttgatactaatgccaggcaaagacactacaaaaaaaggaaaactacagaccaatatctttggtgaacatagatgtgaaaatcctcaacaaaatactagtaaacagaaaccaacaacacatcaaaaagataatatactgttactaagtggattttgttatagggatgaaagtttggttttacatatgcatattaataaatatgattcaccacataaacagaattcaaaacaaaa

SEQ ID NO: 593967 - DNA, 560 bp, Homo sapiens
tgcaggtttgttgcatcagtaaatgtgtgccagggtttgctgcacagatcatctcatcaygtcggtattatggctattaactattagttattcttgatgttctccctttgcttcctgacaggccccagtgtatgttcttcctcgccatgtatctctgtgttctcgtcatctgttcctgcattagtttgctgacaataatggcttccacctccatccatgtccccgcaaaggacatgatcacattcactttcatggctgtgtagtattccatggcatatgtgtaccacattttatttattcagcctatcattgatgatcatgtggattgattccatgtctttgctattgtgaatagtgccgcattgaacatacacagacatgtatctgcattatataataacttacattcctttgtgtatataccctgtaacaggatcgctgggccaaatggtatttctagatatttgaggaatcaccacactgtcttccgtgatagtcaaattaattcacactcccaccaacaggttaaaagcctacattttcctctgcaacatcatcag

SEQ ID NO: 593968 - DNA, 560 bp, Homo sapiens
tgcaggtttgttgcatcagtaaatgtgtgccagggtttgctgcacagatcatctcatcacgtcggtattatggctattaactattagttattcttgatgttctccctttgcttcctgacaggccccagtgtatgttcttcctcgccatgtatctctgtgttctcgtcatctgttcctgcattagtttgctgacaataatggcttccacctccatccatgtccccgcaaaggacatgatcacattcactttcatggctgtgtagtattccatggcatatgtgtaccacattttatttattcagcctatcattgatgatcatgtggattgattccatgtctttgctattgtgaatagtgccgcattgaacatacacagacatgtatctgcattatataataacttacattccyttgtgtatataccctgtaacaggatcgctgggccaaatggtatttctagatatttgaggaatcaccacactgtcttccgtgatagtcaaattaattcacactcccaccaacaggttaaaagcctacattttcctctgcaacatcatcag

SEQ ID NO: 593969 - DNA, 560 bp, Homo sapiens
tgcaggtttgttgcatcagtaaatgtgtgccagggtttgctgcacagatcatctcatcacgtcggtattatggctattaactattagttattcttgatgttctccctttgcttcctgacaggccccagtgtatgttcttcctcgccatgtatctctgtgttctcgtcatctgttcctgcattagtttgctgacaataatggcttccacctccatccatgtccccgcaaaggacatgatcacattcactttcatggctgtgtagtattccatggcatatgtgtaccacattttatttattcagcctatcattgatgatcatgtggattgattccatgtctttgctattgtgaatagtgccgcattgaacatacacagacatgtatctgcattatataataacttacattcctttgtgtatataccctgtaacaggatcgctgggccaaatgktatttctagatatttgaggaatcaccacactgtcttccgtgatagtcaaattaattcacactcccaccaacaggttaaaagcctacattttcctctgcaacatcatcag

SEQ ID NO: 593970 - DNA, 472 bp, Homo sapiens
aatttgtacacaagggctttccctcttcaggctttgaactccaaatatatacaaaacggtccagggatgcccatcaagagaaacagcctaaaggttagtggtgcgttggtaaacctcttgagatatattaaagaagcaaaaaaaaaaaaaaaaaaaaaaaattttytaaagggctgaatcttcaacactggccacaaatgactgtaggtcaagccatgattaggaatcacaggggaaaacaggccagtgttgaatgataggcagcagaaagacatcaatagaatatgaagcttacacctttcaaatgctcagctaaaaaaatattacaacaaatgctttacagtattaaaatgtgattgttttaatagtaacacttagaaactaataaaccaagcagatttgcaaaacaataaaataaaatgttgtaagtgtatagaaaagagcattatcaaaatttaatagagggactaat

SEQ ID NO: 593971 - DNA, 520 bp, Homo sapiens
agatatattaaagaagcaaaaaaaaaaaaaaaaaaaaaaaattttttaaagggctgaatcttcaacactggccacaaatgactgtaggtcaagccatgattaggaatcacaggggaaaacaggccagtgttgaatgataggcagcagaaagacatcaatagaatatgaagcttacacctttcaaatgctcagctaraaaaatattacaacaaatgctttacagtattaaaatgtgattgttttaatagtaacacttagaaactaataaaccaagcagatttgcaaaacaataaaataaaatgttgtaagtgtatagaaaagagcattatcaaaatttaatagagggactaatcagtgaattaaatagcactcaaaagaaaattaggtaaatcaatataacagatctcaaagagtaccaaaaaataatatattacaaaagaataaaatttccattattacattcacatttgcagttattaaaatataatacctttttcacaacatctatatgtaatatagt

SEQ ID NO: 593972 - DNA, 520 bp, Homo sapiens
agatatattaaagaagcaaaaaaaaaaaaaaaaaaaaaaaattttttaaagggctgaatcttcaacactggccacaaatgactgtaggtcaagccatgattaggaatcacaggggaaaacaggccagtgttgaatgataggcagcagaaagacatcaatagaatatgaagcttacacctttcaaatgctcagctaaaaaaatattacaacaaatgctttacagtattaaaatgtgattgtyttaatagtaacacttagaaactaataaaccaagcagatttgcaaaacaataaaataaaatgttgtaagtgtatagaaaagagcattatcaaaatttaatagagggactaatcagtgaattaaatagcactcaaaagaaaattaggtaaatcaatataacagatctcaaagagtaccaaaaaataatatattacaaaagaataaaatttccattattacattcacatttgcagttattaaaatataatacctttttcacaacatctatatgtaatatagt

SEQ ID NO: 593973 - DNA, 519 bp, Homo sapiens
tttcttttcattctcaataagaaagatgtttctgccttatcttatacttttcaatcacagttctagaatcagcaatttttccaaggcaatcagatttcttttacgataaatattttgggactaagatcagggcttttggtaattattactggagttttcttttgtctaggcactcttaatagcagggctaggaagtagtatctgtgtgtgaatatagatatatgcatgtatctgtatcctctrtatctatctttgtatactaaaaccacaagttgctattgatacctccaattctaatttaataccatagatgtgttaggatgtagagaacaacactccaaagtgcagtgctgtggcatgttgagtacttttgtattaaaagaagtttaaaaaccttagaagtagcctttagaaccaaaaactttgtttttgtaaaccacaaatacatttattcctctagaaagagtatgccatctcttcaattttaaaatattattatcaattgtctttggagattgc

SEQ ID NO: 593974 - DNA, 519 bp, Homo sapiens
tttcttttcattctcaataagaaagatgtttctgccttatcttatacttttcaatcacagttctagaatcagcaatttttccaaggcaatcagatttcttttacgataaatattttgggactaagatcagggcttttggtaattattactggagttttcttttgtctaggcactcttaatagcagggctaggaagtagtatctgtgtgtgaatatagatatatgcatgtatctgtatcctctatatctatctttgtatactaaaaccacaagttgctattgawacctccaattctaatttaataccatagatgtgttaggatgtagagaacaacactccaaagtgcagtgctgtggcatgttgagtacttttgtattaaaagaagtttaaaaaccttagaagtagcctttagaaccaaaaactttgtttttgtaaaccacaaatacatttattcctctagaaagagtatgccatctcttcaattttaaaatattattatcaattgtctttggagattgc

SEQ ID NO: 593975 - DNA, 606 bp, Homo sapiens
tttctgcctcctaggccgggattatgaaaagaataaagtctgcaaggaattctcccatctgggaaaggaggacttcacatctctgtaagtgtgcagcagccactcactctgttggtgatttgatcttgaacaaaactgagtgtgaggtaactttgaytcagcatggaggttaatccttaatccttgccaagagtaagaggacagagccccaggcccaaggtaggcacaggagtcaagcaaattaaggacatccagagattccagatgacctctgattaccacagtctaagaatttgtcaccagtaagtttatgaatgagttcaaagataatacgtaaagcatagctttctaaggtcattaaaatgcaattgtacattctaggaatctgggaaaccaaggcaatgaggtacagagcaagtacatttggggaggcttaagaaggacaacaccagattggtttgatggaagccctaagttcaatttctactgctttccaagataaatttgcctagaacaaaaactgctttttaaattaaacctcatttttttcattagccaaataaagaagtaaatgtgtacaatatttcatttaaacattgaacaggt

SEQ ID NO: 593976 - DNA, 521 bp, Homo sapiens
gtgttacaattccttactgtattcagtattaacaggctgtgcagttttgtggcctagaagcaataggctataccatatagcctaggtgtatagtaggctataccatctaggtttgtgtaaatacacgtgatgaaatttgcataatgatgcaatcgcctaatgctgcattttgcaaaatgtatcccccattattaacacatgaccgtgtttgttcttttgtgactgacttattgtacttagcataatggattcaaggttcatctatgttgtagcatgtgtcaraattttcttccctttttaaattttttattttaactttattttatttttcattgtaacaaagaacccacagcataaaatttacattttaaccttgtttaagcgtactgttcagtagtgttaagtaaattcacattgttgtgaaacatatctccagaattattcatcttgtagaactaaaactctattctcattaaacaaccatttccctttccctcctccccacagaccctagtaaccac

SEQ ID NO: 593977 - DNA, 590 bp, Homo sapiens
ttgctgtgttgaccaggctgatcttgaactccttggctcaagtgatcctccctcctcagcctctcaaaatgctgggatcacaggcatgagccaccgtgcctggctgagaacttctaaaatacttttaatggtaaaacatatttgttgagccctggaacaaaagatttttcatgcagacctatccagcatattcatcatgagtacttgccattcttaggcactggaaacaacaagttttgtaagataatgtaatcacggttttaaaaggaccaggactttgtagattctggatactagtcmttctccttaaaggaaaactctgaaattcattctatatccctctgtgaaaaactgaaactgactttgtaaattatgagagtaagaaaaaactgctgtagttgactccatcttgcttctaatttccaagctgtatttggtcactcctgagcataggccacactctctttgggaggaatttagtttatagtttaaatttaaagcaaggatgatgatagcccttcccaaagctaaaccacctttgtaaaactaatgaaagcccacaaggttaagattatgagaggggcctgaat

SEQ ID NO: 593978 - DNA, 541 bp, Homo sapiens
ggactccctcctgactgctttcataggctgctgttgagtgtctgtggcttttccaggcrcatggtgtaagctgtcggtggatctagcattctgcagtctggtgcaccatggccctcttctcacagctccactaggcagtgccccagtaaggactcagtgtggggcctccaaccccacatttcccttccacactgctctagcagaggttctccatgagggccctgcccctgcagcaaacttttgccttggcatccaggtatttccatacatcttctgaaatctaggcagaggtttccaaatctcaatttttgatttctgtgtacctacaagctcaacaccacatggaagctgccaatgcttggggcttccaccctccgaagcaacatcctgagctgtaccttggccccttttagttatggctagagtggctgggatgcagggcaccaagtccctagactgaacacacagcacatggagcctaggcctggcccacgaaaccattttctcctaggcttctgggcctgtgatgggaggggctgcc

SEQ ID NO: 593979 - DNA, 541 bp, Homo sapiens
ggactccctcctgactgctttcataggctgctgttgagtgtctgtggcttttccaggcacatggtgtaagctgtcggtggatctagcattctgcagtctggtgsaccatggccctcttctcacagctccactaggcagtgccccagtaaggactcagtgtggggcctccaaccccacatttcccttccacactgctctagcagaggttctccatgagggccctgcccctgcagcaaacttttgccttggcatccaggtatttccatacatcttctgaaatctaggcagaggtttccaaatctcaatttttgatttctgtgtacctacaagctcaacaccacatggaagctgccaatgcttggggcttccaccctccgaagcaacatcctgagctgtaccttggccccttttagttatggctagagtggctgggatgcagggcaccaagtccctagactgaacacacagcacatggagcctaggcctggcccacgaaaccattttctcctaggcttctgggcctgtgatgggaggggctgcc

SEQ ID NO: 593980 - DNA, 526 bp, Homo sapiens
tctgcttacaatccattggctaggactagtcacatggccccacacagagcacaaagagggtttaaggcaagtaggacatatattggtaagccacagtaataacaaccataaccattttggagaacaactttatgtttttaaaatatcacttagataacataaaagccattgaaaatatccatacactttgatccagcaattacactyctggaaatgtttactgaaatattcctaagtaattataaataaatgggtagaaatgtttcacccctggacataacactcaccaaaatggagtgaactgttctttgaccctaaggcagctaaatgtcccaacaccattctccttaaaaaaataaagttataaatacctgtaaaacaaaagaaagcaaataagcccagatggaaagatagtgttttgcttttaattactggggcattggtcagctttcttatgtactccagctgtgaaattcaattttgaaaatcctttgaaatgaagtaatttatgtttatattaatgatt

SEQ ID NO: 593981 - DNA, 526 bp, Homo sapiens
tctgcttacaatccattggctaggactagtcacatggccccacacagagcacaaagagggtttaaggcaagtaggacatatattggtaagccacagtaataacaaccataaccattttggagaacaactttatgtttttaaaatatcacttagataacataaaagccattgaaaatatccatacactttgatccagcaattacacttctggaaatgtttactgaaatattcctaagtaattataaataaatgggtagaaatgtttcacccctggacataacactcaccaaaatggagtgaactgttctttgaccctaaggcagctaaatgtcccaacaccattctccttaaaaaaataaagttataaatacctgtaaaacaaaagaaagcaaataagcccagatggaaagatagtgttttgcttttaattactggggcattggtcagctttcttaygtactccagctgtgaaattcaattttgaaaatcctttgaaatgaagtaatttatgtttatattaatgatt

SEQ ID NO: 593982 - DNA, 584 bp, Homo sapiens
tagagatttttttacctacctggttagctgtattcttaggcattttattgttttgggggctattgtgaatgagattgtattgatttggttctcagcttggacgttgtcagtgtataggaatgctaccaattttcatatactgattttgtactctgaaactttgctgaagttgtttattagacctaggagttcttgggcaaaaactatgaggtttctaggtatagaatcctattgtctgcaaacatagatagtttgacttcttctctccctatttggatgccttttatttatttcttttgcctgattgttctgactaggtcttccaccactatattgaaaaggaayagtgagaatgggcattcttgtcttgttctgattttcaaggggaatgctcccagctttttcccattctgtatgatattggcttcaggtttctcattgatggctcttattattttgagatatgctcccccattgcctacattgttgagagcttttaacaacaagggatgttaaattttatcaaaagccttttctacatctattgaggtgatcatgtggttttttagtctttttatgtgatg

SEQ ID NO: 593983 - DNA, 616 bp, Homo sapiens
tgaatttttctaaaagtacccctagaggattctagtacaagtgagtagaggacaaccttttgagatatttataaataaggggcaccctggaggagaaacagatttgtggaaaagatcctaagttttagctgcrgacaagaatgttctgctgatgtgaatctgaataagtttgtccccatgtgtttctaagctaacactaaggaagaatgaacactgagaagttccgagccaggacattgaaagactctcaaaccattacaatgggaatagctctgggattcaggaactatgcgggctcagacaaagaagtccaccccaaaaagttgtattttccaaaccttaggaaggtaggcagtagatgaattaaacataagaaaataaggcaaatgcctgaggttatatgagcactgtcaatattcatctgcgatccagacactttaatatttgctatatgtgctttatagtattttatgttcattaaactcctagcacgatttcatgcttacagagaatgatggttttatgggggtgaggagaggaaagggacacacagaggtgaaagtacacactggcaaccagccttatgaagattgcctagcaaataagacaagtagct

SEQ ID NO: 593984 - DNA, 616 bp, Homo sapiens
tgaatttttctaaaagtacccctagaggattctagtacaagtgagtagaggacaaccttttgagatatttataaataaggggcaccctggaggagaaacagatttgtggaaaagatcctaagttttagctgcagacaagaatgttctgctgatgtgaatctgaataagtttgtccccatgtgtttctaagctaacactaaggaagaatgaacactgagaagttccgagccaggacattgaaagactctcaaaccattacaatgggaatagctctgggattcaggaactatgcgggctcagacaaagaagtccaccccaaaaagttgtattttccaaaccttaggaaggtaggcagtagatgaattaaacataagaaaataaggcaaatgcctgaggttatatgagcactgtcaatattcatctgcsatccagacactttaatatttgctatatgtgctttatagtattttatgttcattaaactcctagcacgatttcatgcttacagagaatgatggttttatgggggtgaggagaggaaagggacacacagaggtgaaagtacacactggcaaccagccttatgaagattgcctagcaaataagacaagtagct

SEQ ID NO: 593985 - DNA, 589 bp, Homo sapiens
gttgcagtgggctgagattgtgccactgcactccagcctgggcgacagagagagattctgtctcaaaaaaaaaaaagaaaaaaaaatgaaaagggggaaaataattctaggcagaagacagcatagtatgagtcaaatcacagggatttgagaagggcactgcagattaagaacctgctaaacaacctacagaaaaagctaacagaatataaacatggatgggttgagctttcagagccaaaatgtgagtgtgttaaacaagtacaatcttcttactaagaggaasgcagaggcatagaactctggtttagtgaagggtgcagggagggaaatggacaggacaaacaattgtcttttgtaagttcaggatgatagtatcccttgccttccccagctgtgttcacctggagtccctgaccacctgtaagctctactgtgccctgatcctaagtcagctcagttaactcagttccagagcaggatgctctaggcctaggaaggtgatgtgtgaaatgagattggcacagagactaggttcagggcatccagggctgatgactgacagccttcacttaccacctactctgct

SEQ ID NO: 593986 - DNA, 589 bp, Homo sapiens
gttgcagtgggctgagattgtgccactgcactccagcctgggcgacagagagagattctgtctcaaaaaaaaaaaagaaaaaaaaatgaaaagggggaaaataattctaggcagaagacagcatagtatgagtcaaatcacagggatttgagaagggcactgcagattaagaacctgctaaacaacctacagaaaaagctaacagaatataaacatggatgggttgagctttcagagccaaaatgtgagtgtgttaaacaagtacaatcttcttactaagaggaacscagaggcatagaactctggtttagtgaagggtgcagggagggaaatggacaggacaaacaattgtcttttgtaagttcaggatgatagtatcccttgccttccccagctgtgttcacctggagtccctgaccacctgtaagctctactgtgccctgatcctaagtcagctcagttaactcagttccagagcaggatgctctaggcctaggaaggtgatgtgtgaaatgagattggcacagagactaggttcagggcatccagggctgatgactgacagccttcacttaccacctactctgct

SEQ ID NO: 593987 - DNA, 658 bp, Homo sapiens
tatatgttgggtcaatgagagtgcacacaatttgaaaaaattaatggatatatttgaagttccttttgcataaatttcatcatatttaaaaatcaagaycaggctttgggtagggggtttaaaaatagaatgagagtatctcaagccaggatttagcaaagggaaaatgttaggagaatgtgaagacacaaatacctcattaatacagctgaggggaacttggtctccctagaaatagtatatatactttgggactggaggagagtgaataagaaaacagaaaattgccattcacaattctgggtcaagcttggacctagatatttagatctcatgaaatgtgaaaatgatgattcaaccagctgccaatcccggcctctagatgaactgctgctgtgacgtttataaacaagtatcttttgtgaacattgtggcgcctggagccagaatttgcatttgttaaatcatcatgcacaaatcatcatgttaaatcatcatgcacaaataagaaatgggtattagaaagcactctattattttgatacagtatctgtacacatttagcttcctctttatttatcattatttcaaaagaaatataattacttgccagtggatagagttcactatacatttatcactagtgttgttattctag

SEQ ID NO: 593988 - DNA, 443 bp, Homo sapiens
tctctaactcctggtctcaagggatactcttgccctagcctcgcaaagtgctcggattacaggtgtgagccactgcatcccgcccgcattttcttattgtctctytaaactgcttaaaataaaataagccataggaattgagtatgtgagctctcagaaatgaaatgaatgtgtataaaatatggttttgtttctaaattatctaactgaacttggttattgctgcacctaataatcttctattaagaaaactaggatacgggagaaagaacactggcctgggagataagtctcctgggttctactgtgagcagctctacccacaaagccggtgacctggtcaagtcacccacctgctaaggcccagtctcttcccctagcaactgaggcagcaggagagaatccctgcagactgttcctgcattactacgattctcccaggg

SEQ ID NO: 593989 - DNA, 536 bp, Homo sapiens
agcctggccaacatggtgaaaccttgtctctactatttttacaaaagttagtcggacgtacagacgggtgcctgtagtcccagctacttgggaggctgaggcaggagaatttgtttgaacccagaggtgaaagttgcagggagccgaggttgtgccactgcactccagcctgggagacagagcaagactctgtctccaaaacaaacaaacaaacaaaaaaaccctgtagcttgggatcagccttctcttctattgtttttctttaaaaaataaaaattaaaaatagatgtagatgctatgttgctgaggctggcctcaaactcctggcctcaggtgatcctcccrccatgacctccaaaaccgcagggattgtaggtgtgagcactgcacccagccttatgtttttttctacataaaaaacagcacaggattatcttccagagctaataaatatgttcaaataaccacaaccccattaaggaaaaatatcactgggcagcaaataatcaatccagaccaatatgatcacaattcct

SEQ ID NO: 593990 - DNA, 536 bp, Homo sapiens
agcctggccaacatggtgaaaccttgtctctactatttttacaaaagttagtcggacgtacagacgggtgcctgtagtcccagctacttgggaggctgaggcaggagaatttgtttgaacccagaggtgaaagttgcagggagccgaggttgtgccactgcactccagcctgggagacagagcaagactctgtctccaaaacaaacaaacaaacaaaaaaaccctgtagcttgggatcagccttctcttctattgtttttctttaaaaaataaaaattaaaaatagatgtagatgctatgttgctgaggctggcctcaaactcctggcctcaggtgatcctcccaccatgacctccaaaacygcagggattgtaggtgtgagcactgcacccagccttatgtttttttctacataaaaaacagcacaggattatcttccagagctaataaatatgttcaaataaccacaaccccattaaggaaaaatatcactgggcagcaaataatcaatccagaccaatatgatcacaattcct

SEQ ID NO: 593991 - DNA, 443 bp, Homo sapiens
tctctaactcctggtctcaagggatactcttgccctagcctcgcaaagtgctcggattacaggtgtgagccactgcatcccgcccgcattttcttattgtctctctaaactgcttaaaataaaataagccataggaattgagtatgtgagctctcagaaatgaaatgaatgtgtataaaatatggttttgtttctaaattatctaactgaacttggttattgctgcacctaataatcttctattaagaaaactaggatacgggagaaagaacactggcctgggagataagtctcctgggttctactrtgagcagctctacccacaaagccggtgacctggtcaagtcacccacctgctaaggcccagtctcttcccctagcaactgaggcagcaggagagaatccctgcagactgttcctgcattactacgattctcccaggg

SEQ ID NO: 593992 - DNA, 467 bp, Homo sapiens
aatatcaaataaaaatttatttttacaagaatttaggggaactactacatagctataaatgtaatatatatgttaactaagtatcatagataaaatccatgctcccttcagcagcacgtgtaataatagatacaaagattgaaaggtaaaagatttaggatgaaaagaatcctctcttaaaaaggaaaacaaaattatatgtatgtgtatataacagttataatacccatcacacagctttgtagaaacagcatctattcaaaaataccagtatttccaaaatatttaaaataatatttaatgtaaaaataatatttaaataaataaatatatttaataaatatttmaataaataaaataatatttaaataattctatacccatgtttttcaaaataaaccaataaaatagatagtatatattagacgtgttagtatatatatctgagacatgttaaaaatcacaac

SEQ ID NO: 593993 - DNA, 443 bp, Homo sapiens
tctctaactcctggtctcaagggatactcttgccctagcctcgcaaagtgctcggattacaggtgtgagccactgcatcccgcccgcattttcttattgtctctctaaactgcttaaaataaaataagccataggaattgagtatgtgagctctcagaaatgaaatgaatgtgtataaaatatggttttgtttctaaattatctaactgaacttggttattgctgcacctaataatcttctattaagaaaactaggatacgggagaaagaacactggcctgggagataagtctcctgggttctactgtgagcagctctacccacaaagccrgtgacctggtcaagtcacccacctgctaaggcccagtctcttcccctagcaactgaggcagcaggagagaatccctgcagactgttcctgcattactacgattctcccaggg

SEQ ID NO: 593994 - DNA, 422 bp, Homo sapiens
tgaattctcacaattcagtcacaaacctaaacagcaaataaaaatttctatcaccagaattatgtwtttttctggtggggaactaccaatagctataaatagaagagattattatggaagtatcatagataaaaagagtgctcgcttcaggagcacatataataatacagaaacaaatttaaagataataaaatatttaggataaaagaattgtctcttaaaaatgaaaagaaaattatctttatgtatatataacaactataactctcatcaaaaaactacaggaacagcatgttttcaaaagtacaacaatttccaaactatttgaaataaatctatgaataattcaatggccgacattttccaaacaaaccaataaaatgcagagtgtgcatgaagctatctgttacaatctgtggcac

SEQ ID NO: 593995 - DNA, 419 bp, Homo sapiens
gaattctcacaattcagtcacaaacctaaacagcaaataaaaatttctatcaccagaattatgtatttttctggtrgggaactaccaatagctataaatagaagagattattatggaagtatcatagataaaaagagtgctcgcttcaggagcacatataataatacagaaacaaatttaaagataataaaatatttaggataaaagaattgtctcttaaaaatgaaaagaaaattatctttatgtatatataacaactataactctcatcaaaaaactacaggaacagcatgttttcaaaagtacaacaatttccaaactatttgaaataaatctatgaataattcaatggccgacattttccaaacaaaccaataaaatgcagagtgtgcatgaagctatctgttacaatctgtggc

SEQ ID NO: 593996 - DNA, 422 bp, Homo sapiens
tgaattctcacaattcagtcacaaacctaaacagcaaataaaaatttctatcaccagaattatgtatttttctggtggggaactaccaatagctataaatagaagagattattatggaagtatcatagataaaaagagtgctcgcttcaggagcacatrtaataatacagaaacaaatttaaagataataaaatatttaggataaaagaattgtctcttaaaaatgaaaagaaaattatctttatgtatatataacaactataactctcatcaaaaaactacaggaacagcatgttttcaaaagtacaacaatttccaaactatttgaaataaatctatgaataattcaatggccgacattttccaaacaaaccaataaaatgcagagtgtgcatgaagctatctgttacaatctgtggcac

SEQ ID NO: 593997 - DNA, 422 bp, Homo sapiens
tgaattctcacaattcagtcacaaacctaaacagcaaataaaaatttctatcaccagaattatgtatttttctggtggggaactaccaatagctataaatagaagagattattatggaagtatcatagataaaaagagtgctcgcttcaggagcacatataataatacagaaacaaatttaaagataataaaatatttaggataaaagaattgtctcttaaaaatgaaaagaaaattakctttatgtatatataacaactataactctcatcaaaaaactacaggaacagcatgttttcaaaagtacaacaatttccaaactatttgaaataaatctatgaataattcaatggccgacattttccaaacaaaccaataaaatgcagagtgtgcatgaagctatctgttacaatctgtggcac

SEQ ID NO: 593998 - DNA, 384 bp, Homo sapiens
tatgtatttttctggtggggaactaccaatagctataaatagaagagattattatggaagtatcatagataaaaagagtgctcgcttcaggagcacatataataatacagaaacaaatttaaagataataaaatatttaggataaaagaattgtctcttaaaaatgaaaagaaaattatctttatgtatatataacaactataactctcatcaaaaaactacaggaacagcatgttttcaaaagtacaacaatttccaaactatttgaaataaatctatgaataattcaatggccracattttccaaacaaaccaataaaatgcagagtgtgcatgaagctatctgttacaatctgtggcactgatatttcacaaaagaattct

SEQ ID NO: 593999 - DNA, 368 bp, Homo sapiens
acctaaacagcaaataaaaatttctatcaccagaattatgtatttttctggtggggaactaccaatagctataaatagaagagattattatggaagtatcatagataaaaagagtgctcgcttcaggagcacatataataatacagaaacaaatttaaagataataaaatatttaggataaaagaattgtctcttaaaaatgaaaagaaaattatctttatgtatatataacaactataactctcatcaaaaaactacaggaacagcatgttttcaaaagtacaacaatttccaaactatttgaaataaatctatgaataattcaatggccgacattttccawacaaaccaataaaatgcagagtgtg

SEQ ID NO: 594000 - DNA, 615 bp, Homo sapiens
ctgcccaaacaggtgtgggctgtgacctcgtgttgaggggtcacacctgctatccccctagacagagcatagccataaaacggcacccagccaggtgagcagggaagagaaacctccccaggccccagggctctgaccagtcccctggcctcacttggacagtaagaatgagcgtagccccgggaagacagcagccaggaggcctgaagcccctaaacccccaattccttgcaacccaggctgggtaggcagggcaagaagtgccagcctcttgtcagagaggagtggttgggaggcctggctcgttractgcgggactttgggccagtcacttcccctccctaagtgtgtggggataataatagcactaaacccacaggattgttgtaaagatgacacgaacggcgatcctgatgcccttagcttggcacaagtaagtttgaaaccaaaagctcagccctgggaggcccaggatcacttgggtggagatcccacttccaagacccccaagggaagcccacccctgggtatttgtatagaagtcctccctaggagattcacgctaagtagggaagagggatttagaaacttcagacagatttttcacaacaaggg

SEQ ID NO: 594001 - DNA, 578 bp, Homo sapiens
agtctggcctgaggagcgtgatgggatcatagaggaacccatgtgtggtagattaaagttcacaaagccaggttaggattcaaattcttttgcttgcaagttgtataaccttgggcaagtcacttgatctttctgaattcattttccwcatctaatttacaacttatccagattttttgtaaacaacaacaaactctaaaattgcttacacatggaagccattaccaaatgtgctctcccttcccattggaaagctatagactgttgatgaagacctaataaatcattcattcgtcatgtaataggtgattaattcatgactcaaagaagttgtatacttgcccagtggcatgtgaggagacatacccaacttctctctgaagttggagagagctagatgacagtcctctttctgctacttgcaacgtgtattttttgagcaaattagatagtctcttaagtctcagttttctcctctggaaaatgaatatagtcataatccgacttcataggtttgttaggaggattcaatgagatattatagccttatataatgttagcataatatttggcaaata

SEQ ID NO: 594002 - DNA, 629 bp, Homo sapiens
atttgaccgttcttattaccatcgcaccgcccaaagcacatgcacacaattacacaaggctagctgatcaaatttgccctgccaatcacattcagcagaattttgaagcttgtgacctgggtgcaatatgttttgcctgatcactggttaawaagaaaatttgagttagatgcctgctttaaaaaatcatgagattttaacataagaagaatctgcatttccttcttcttttaaaaaccaaacgatgtcttcaccctgcacccaaattcctgcacaacaacaacggactagagcccagcagcaacatcacctggagaccctgtaaccaggcagggtatgctccccatttgccacctgctgagcccttcttccctgccctaactgtgaccatagttagttacatctgcaatcctgacatctgaaacttcccctgagagaaatcctagtagagattatttttccatgcctttacttttacaatgatatcttatcttttccaatgatattctttgacactggcaccttggcaaactgcccagattggccattaattgggatcagaaaaaaaaatctctaaaacacagatttttaacaagagtttttgtggcacagcagctgttggggtagag

SEQ ID NO: 594003 - DNA, 629 bp, Homo sapiens
atttgaccgttcttattaccatcgcaccgcccaaagcacatgcacacaattacacaaggctagctgatcaaatttgccctgccaatcacattcagcagaattttgaagcttgtgacctgggtgcaatatgttttgcctgatcactggttaaaaagaaaatttgagttagatgcctgctttaaaaaatcatgagattttaacataagaagaatctgcatttccttcttcttttaaaaaccaaacgatgtcttcaccctgcacccaaattcctgcacaacaacaamggactagagcccagcagcaacatcacctggagaccctgtaaccaggcagggtatgctccccatttgccacctgctgagcccttcttccctgccctaactgtgaccatagttagttacatctgcaatcctgacatctgaaacttcccctgagagaaatcctagtagagattatttttccatgcctttacttttacaatgatatcttatcttttccaatgatattctttgacactggcaccttggcaaactgcccagattggccattaattgggatcagaaaaaaaaatctctaaaacacagatttttaacaagagtttttgtggcacagcagctgttggggtagag

SEQ ID NO: 594004 - DNA, 563 bp, Homo sapiens
ataatttcctgcttgaacaaattcacatgtgaatgaatgagtgagctttgggtagtatagctgactcactaaaggtcatatggctattaagtgacagagatagaactcaaacccaggtcatcaaaattccagaactcaaattcttaatcaccatccttcattgtttgtctgtggagcttcaaatatacctactcttattcatcattgcatttgtgctgagagaaatggggctccaatgaataggggcatgaagatcacaactaaccatgtgaaaacacccagggctgacattcaactggtgtgctattgaatggccatattggtgttgaaatattaaaatggtactgtagtgactggtgaggagccattgttatgaattccttgagggtgcagaygctttctggttcccctccatgagacttccccaagacctagaatgtccaccaggacctctacttgatccagtaactaaaagggtttacaccaagcacaccagcagtcttctaggagcacttccatttatgccgatggatcatacccactgatcatcattttctctgctc

SEQ ID NO: 594005 - DNA, 585 bp, Homo sapiens
ctgagagaaatggggctccaatgaataggggcatgaagatcacaactaaccatgtgaaaacacccagggctgacattcaactggtgtgctattgaatggccatattggtgttgaaatattaaaatggtactgtagtgactggtgaggagccattgttatgaattccttgagggtgcagatgctttctggttcccctccatgagacttccccaagacctagaatgtccaccaggacctctacttgatccagtaactaaaagggtttacaccaagcacaccagcagtcttctaggagcacttccatttatgccgatggatcatacccactgatcatcattttctctgctcctggaaaaactctgaagacagacattgcaaaarccaactctcaacttgttctattctttctcaagatatacaacctaagcactatcagctcagctgcagcatgataaaggaggaagtcctctttccttttatctcatcaaatgcttattataaatttcaacttaataagaaaaagaaaagggcaggcaatagtggcaggtaattgtgactagtaattgaactggcaaacctgaaatg

SEQ ID NO: 594006 - DNA, 499 bp, Homo sapiens
agtctgagacattttattatggtagcctgagcagactaatacaaaggcagatgcctgactcttcctaggtcttaataaagcaaaacagtaccttcccacttgagctcaacacaacagtgccttgttgctatatcctagttacctaccctcaccattcagacttgatactttaaaactctttcctatagccctcatatcaaaacccacattataccaaaaatgaaatgaatcaaggcacctcactaggtctcttcaatcttttatatataactaatcacttttccccacttcctccctcctttcatatcamccccaactgtactccttgaaccccttcatgacaaatttagggtgatatgtttaagacagttaactccaaggagaatatacaaagatgattcaaacatagcccatgagttcataagcaacagtgaaaacatttattttgcacatctagagtcactgggattcatttctctcattaatatcactgacaaga

SEQ ID NO: 594007 - DNA, 499 bp, Homo sapiens
agtctgagacattttattatggtagcctgagcagactaatacaaaggcagatgcctgactcttcctaggtcttaataaagcaaaacagtaccttcccacttgagctcaacacaacagtgccttgttgctatatcctagttacctaccctcaccattcagacttgatactttaaaactctttcctatagccctcatatcaaaacccacattataccaaaaatgaaatgaatcaaggcacctcactaggtctcttcaatcttttatatataactaatcacttttccccacttcctccctcctttcatatcacccccaactgtactccttgaaccccttcatgmcaaatttagggtgatatgtttaagacagttaactccaaggagaatatacaaagatgattcaaacatagcccatgagttcataagcaacagtgaaaacatttattttgcacatctagagtcactgggattcatttctctcattaatatcactgacaaga

SEQ ID NO: 594008 - DNA, 453 bp, Homo sapiens
tatgtatccactacacataaagatctctgcgaggtgtggtgatcagcactaaaatgtgtaaggcatttctctcttctctgtcctcaaggggtttatgacacagttaaggaagaatggctttcacacacaggatgagacaatacactattaaaattcagatgttgtgtaagcaatatcttaatccattatttgtttactttggaatatggtgtgagataaggagagtcaaggaattgctgcatatttttgatttgggaactgagcagatgtagagcaaagtgaggtcagatagaatgtgcagatcagctctgcytaagacacttggcaagttacctaaacactgagcctgtaccctgacctaaaaatgacccggaaaataacatcctttggacatactatgggtcagtaatggagaaaatgatttaaagttcctagatatagcacttgattcaa

SEQ ID NO: 594009 - DNA, 453 bp, Homo sapiens
tatgtatccactacacataaagatctctgcgaggtgtggtgatcagcactaaaatgtgtaaggcatttctctcttctctgtcctcaaggggtttatgacacagttaaggaagaatggctttcacacacaggatgagacaatacactattaaaattcagatgttgtgtaagcaatatcttaatccattatttgtttactttggaatatggtgtgagataaggagagtcaaggaattgctgcatatttttgatttgggaactgagcagatgtagagcaaagtgaggtcagatagaatgtgcagatcagctctgcctaagacacttggcaagttacctaaacactgagcctgtaccctgacytaaaaatgacccggaaaataacatcctttggacatactatgggtcagtaatggagaaaatgatttaaagttcctagatatagcacttgattcaa

SEQ ID NO: 594010 - DNA, 574 bp, Homo sapiens
cattgatctccatgacctgaaaacacctagacttgtttttaacctgagcacatgcatgcatttctgtaagctctttaattcaaagactagttgacatgaaagcattttcttagacatttcctcttaaacttctttttacaatctagcctatgatggcccaagggattacacttaattacagcctctgcctgttgctgagcatttggttctcttaaataattctagataatactgaactcaggaaactaagaaaagaatctacccaatgaraaatactcattaaataattgtgaaaaatatgtaaaattttttaggttatatataaaatatattaacaaatatctatccagacctgaatattatgtttgaatgggtattatacgatatttatttactgagtatattttatgaagattcttctttggacatatatttctatagttcttcagtttataaaacctaccatcacaggaattcatactattttcacagtcagaagtggttttctataaataataaaagtacgtatgtagcttttgaggtaaaaaagaaaagaaataagaaaaaattctta

SEQ ID NO: 594011 - DNA, 650 bp, Homo sapiens
gacctctttctatatagacagctgtggaagaaaatattgaaactcaggaatttgttaaagttaattgaaagcaacagaaccaaaatttcaaacttaagttatttgaaattagagttcagattattcatacgtaatcagataatgctttgatgtcttgacctatgtgtttttgtttctaatatttattgctatttcatggctcttccccatttaggccctagcttaagtgttttatgttcaagatctcaggaaagaataaaaaggatgactcagaagaacacaaaatgatcaatttttggcttttggcttttaagatagcataatcgtgtaatgacaaaagatgagtgctttatgaaagaatactttctgacctttggtccttctccctaaaccccaccacattcataaccaagggctgctaaaacaggagaattagtggggaaaaagaatgtggatatgggtgggcttcaagaaggacccctgaacccttggctgagccccaaggtggggacaatggaaaacctagaacagcatgttctccactcataagtgggagctgaacaatgagaacccatggacaccgggaggggaacaacacacaccagggcctgtcrggtcccctcggggtgaggggagagagagcgtcagga

SEQ ID NO: 594012 - DNA, 566 bp, Homo sapiens
caaaaactgagctattaacttgtgaagatcaaaagaggggaatcctgaatcccatccacaaccctcacaatggtcaaaccagagtgcaggtatagtgggaaaaaaaaaaaaaggaaaaaagcattaaggctaaccaactgtagaaattaccattgctggatggaatgcacawcttataaacttggacatgtagaaaaaacaatgtaattaattaaactggaaggtggacaaggagagtgatgttgggaagaagcgtaaacataatttaagatagacgtaaggtgatatggagcaaggtcaaaggagaaacctagtgtggtgagagaaaggaaaatagagtgaaatgaggcatggctgaggaaacagacagactagacagggatatagtgattacctctaatcattgaagggctttcaggtgggagatggatgaaatctatttgacttaaggtgtaaaaccagtgccagtaaatgcaaattacagggagggggatttgggctcaatacttaacagccagacctgcccaaagaagcaaggagctgcctcagaagagaataaatcccca

SEQ ID NO: 594013 - DNA, 541 bp, Homo sapiens
tataaaaatataaagaaagtgtgaagtgttccttccytcaaaatatatacttttgacaaaagttatacatcaaaataagaaatatctaatgctggacaagctgaaattagcaaagatgggagattggaattggttaatcaaaaatacccttaggttcatcctatcctaagtgcttggttggtgtaaagaactcaatccacacttaagatttatctcccattctcctattaagtcctggagtgacctcgattaagtcatttcaccttgctgggagttagttttgtcctctgtaaatgagtgggttgggctagaaccagaatggcaactatctgcaggagtgtagttctactcgacatctgcactgatggcagagagagtagaaattcaccatggctcattttgctatggaacctaggctgagcctcagtatcctactcaacacaaaatttcaggtaacaaggcccaatcaacgacagctggcccttaaaatgaaacatatttgacccttatggacaagatcatcgctaagattcattttatt

SEQ ID NO: 594014 - DNA, 541 bp, Homo sapiens
tataaaaatataaagaaagtgtgaagtgttccttccctcaaaatatatacttttgacaaaagttatacatcaaaataagaaatatctaatgctggacaagctgaaattagcaaagatgggagattggaattggttaatcaaaaatacccttaggttcatcctatcctaagtgcttggttggtgtaaagaactcaatccacacttaagatttatctcccattctcctattaagtcctggagtgacctcgattaagtcatttcaccttgctgggagttagttttgtcmtctgtaaatgagtgggttgggctagaaccagaatggcaactatctgcaggagtgtagttctactcgacatctgcactgatggcagagagagtagaaattcaccatggctcattttgctatggaacctaggctgagcctcagtatcctactcaacacaaaatttcaggtaacaaggcccaatcaacgacagctggcccttaaaatgaaacatatttgacccttatggacaagatcatcgctaagattcattttatt

SEQ ID NO: 594015 - DNA, 605 bp, Homo sapiens
aagttatgtcagcagttattttgagcactgagacctttcctcttaacacccaaccaagatgtggtatgtttttaaaggcttgaaagataaaatttattgatttgtatataagaccaaaaatgctcagattaatacatgattacttgtaatgtgttgctactttacaagagaatggtcagatttttgccttcagctattcaatgctaacaaacaaaccaaataccgttctgtgataaggcttgtgtaatgagaagaacttgggaaagtttacaagagccatgacaacatgtaagggctaaaccatgcgaaatattaatataaagatgytccacaagcaaaggaatcctttggtatcacgtaaacatctccattctcaagaattcactatgtatattagcatattagactctgagatgtcctgcaattacacttatacttgtttaactgtgggatgctctgtataagtgagtagataaaatcacatgcagcaaaaataacaaaacacatttcatgggaactttgtattaggaaataatacttaaataaaaaaagaaacatgttttctgaaattaagaaaatcatgaccaatttaacagagttataat

SEQ ID NO: 594016 - DNA, 611 bp, Homo sapiens
cctaggtggcagcctgccccacccctcaggcactccatcccgggaagaaattagagctctgttagccccatagaacatgagtgacctacaattttgatttgcccttttactggtgatgttggcattgatcacaaacagtggtgtctgctagctttctcctctgtaatgttactttttcaccttgtaattaattaatattaatattttgtggggaggtaatttgagactatgtagatatctctgttcttcatcaaactcaatttattcatttacttgatttgatatttacttgtggtttatttcatttaataggttataatttgacaattttttttaacaatttttttctttttagaaatgttttattttgacaattttagacttatagaaaaatagtaagaaamctacaaaacattcttggatactattccccaaatgtgaacattttactgtatttgctttatcctttctcccccttttcctcttctctttctaggtaaatataaatgtaggtgcataatatagactttttctgaatggtttataagttgcaggtatgatgcctctttatttctaaataattttatgtgtgtctcctaaaaacaaggcat

SEQ ID NO: 594017 - DNA, 611 bp, Homo sapiens
cctaggtggcagcctgccccacccctcaggcactccatcccgggaagaaattagagctctgttagccccatagaacatgagtgacctacaattttgatttgcccttttactggtgatgttggcattgatcacaaacagtggtgtctgctagctttctcctctgtaatgttactttttcaccttgtaattaattaatattaatattttgtggggaggtaatttgagactatgtagatatctctgttcttcatcaaactcaatttattcatttacttgatttgatatttacttgtggtttatttcatttaataggttataatttgacaattttttttaacaatttttttctttttagaaatgttttattttgacaattttagacttatagaaaaatagtaagaaaactacaaaacattcttggatactattccccaaatgtgaacattttactrtatttgctttatcctttctcccccttttcctcttctctttctaggtaaatataaatgtaggtgcataatatagactttttctgaatggtttataagttgcaggtatgatgcctctttatttctaaataattttatgtgtgtctcctaaaaacaaggcat

SEQ ID NO: 594018 - DNA, 424 bp, Homo sapiens
atgaagatcatttccaggtcctatgtctgcaatggtatttcctaggttatcgtccaaggttttaatatgttttcattttagatttaagtttttaatcctgcctttgcctcccaaagtgctgggattacaagcgtgagctaccacacccagcraggaagccaagtttaacgtgtgtgctccactcctccaacctggccaaagggcagtcatcatcactggccactactgaccacagcctttagaaactccccttgaacgtgctgggctgaccttcctctgatcacaggcaaggtaaccatacactcaaggccaatgatcccatctgctgtgggctgggtcatgctcccaatgcttacagaacctgggaggcagaggaaaactctgcccatcccatgggacgttacctgtaagctttgaacaccag

SEQ ID NO: 594019 - DNA, 591 bp, Homo sapiens
caaccactcacaccccagggggatgagctctccaagcccaggattctggcaagagaggtgaagaaagtggatgtgcagagtttggctggggaakaggacatgctcctgagcaaaagcccatcctcactcagcgctaacatcagcagcagcccaaaaggtgaggcctgggggccttatgcagttgctttcttgggactcctgtaggctacatatgtttctgtcttctgttctggaacatcaggttggttgggtggaaggaacctatctggaatcagacctatctgtatttgagctatgtaagttttatcaagagattcagcctccctgaatctattttctcatctgtaaaatggagataatgccaggtttacagagttgagagtttgacacatggagagtaaagcacttcacacagtgcctgatgtatggtaaacaggaatggtagctgctgtcttgtccccttatagtgaaagttctgaggttccgcatctttcagggggtctagaggatcaaaactctttatttatttatttatttatttatttatttatttatttattttattttttacttttttgagacaggttctca

SEQ ID NO: 594020 - DNA, 591 bp, Homo sapiens
caaccactcacaccccagggggatgagctctccaagcccaggattctggcaagagaggtgaagaaagtggatgtgcagagtttggctggggaagaggacatgctcctgagcaaaagcccatcctcactcagcgctaacatcagcagcagcccaaaaggtgaggcctgggggccttatgcagttgctttcttgggactcctgtaggctacatatgtttctgtcttctgttctggaacatcaggttggttgggtggaaggaacctatctggaatcagacctatctgtatttgagctwtgtaagttttatcaagagattcagcctccctgaatctattttctcatctgtaaaatggagataatgccaggtttacagagttgagagtttgacacatggagagtaaagcacttcacacagtgcctgatgtatggtaaacaggaatggtagctgctgtcttgtccccttatagtgaaagttctgaggttccgcatctttcagggggtctagaggatcaaaactctttatttatttatttatttatttatttatttatttatttattttattttttacttttttgagacaggttctca

SEQ ID NO: 594021 - DNA, 591 bp, Homo sapiens
caaccactcacaccccagggggatgagctctccaagcccaggattctggcaagagaggtgaagaaagtggatgtgcagagtttggctggggaagaggacatgctcctgagcaaaagcccatcctcactcagcgctaacatcagcagcagcccaaaaggtgaggcctgggggccttatgcagttgctttcttgggactcctgtaggctacatatgtttctgtcttctgttctggaacatcaggttggttgggtggaaggaacctatctggaatcagacctatctgtatttgagctatgtaagttttatcaagagattcagcctccctgaatctattttctcatctgtaaaatggagataatgccaggtttacagagttgagagtttgacacatggagagtaaagcacttcacacagtgcctgatgtatggtaaacaggaatggtagctgctgtcttgtccccttatagtgaaagttctgaggttccscatctttcagggggtctagaggatcaaaactctttatttatttatttatttatttatttatttatttatttattttattttttacttttttgagacaggttctca

SEQ ID NO: 594022 - DNA, 602 bp, Homo sapiens
gcaagtatttttcaggtcctgcttatttcctagcattgagcttagtgatagagaaagttaacatagaaatctgggcctgcccaggtgtggtggctcacacctgtaatcccagcactttagaaggctgaggcagaaggatcgcttgagcccaggagtttgagaccagcctgggccccatctctacaaataattttaaaatggagcgaggtatggtggcattgcctgtggtcccagctacttggaaggctgaggcagaaggatcacctgagcccaggaggccaagtctttagagagttgtgatcactcgactgcaccccagcctgggtgatagagcaagcccctgtctcaaaataataataataatagtaattacattataaaatgattgtttatccacacaagacttggagcttatgacttttgtattttgctttttgcttattttggttttagagaaagttagagggttctaaaatattttctcacctactgatcatttacatgatcactgttctcctgctcagatcctagtgctataccctggccatagtacatagtacagttaacwactaacatacatccactctcttatctcttacagt

SEQ ID NO: 594023 - DNA, 547 bp, Homo sapiens
tatccactgaactatttcctgactatctcctgtatgctggtcagtttcactcacattgtctcatttaatctttgacaaactaaataaaagtgtgaagtaaatattttcccctcccttttttttwaagattagaaaacagaggctcaaaaggacccacgtactcagagtcaccctgtcaatgacagaggtggagtttgaacacaggctgtttaatgccaaagcccaatactggcttctggaagcttctagaaggaggggctggaacctcgcattgaagacgttgaggggcagtgttgcaggaaaatgggagagggaaacataccaggcaaagggaactgcttgggcatggcttcggcagagaacgaggtacagagatttgaggacaggatgatttcttggaacacagagcttggttcagtagaaagagcccaggaaagccaggatgtggccagttgaaagggaggggctttgagccattttgcatttgtggtgagccattttgcattttactctattggcatcaaggagacaagtaatgagaactctg

SEQ ID NO: 594024 - DNA, 547 bp, Homo sapiens
tatccactgaactatttcctgactatctcctgtatgctggtcagtttcactcacattgtctcatttaatctttgacaaactaaataaaagtgtgaagtaaatattttcccctccctttttttttaagattagaaaacagaggctcaaaaggacccacgtactcagagtcaccctgtcaatgacagaggtggagtttgaacacaggctgtttaatgccaaagcccaatactggcttctggaagcttctagaaggaggggctggaacytcgcattgaagacgttgaggggcagtgttgcaggaaaatgggagagggaaacataccaggcaaagggaactgcttgggcatggcttcggcagagaacgaggtacagagatttgaggacaggatgatttcttggaacacagagcttggttcagtagaaagagcccaggaaagccaggatgtggccagttgaaagggaggggctttgagccattttgcatttgtggtgagccattttgcattttactctattggcatcaaggagacaagtaatgagaactctg

SEQ ID NO: 594025 - DNA, 414 bp, Homo sapiens
tctccacagtaagttgtgtactgacctctgctatcatctcattagttctatgaagattgmaaaagacaaatgcttagtatttcattttttcctaaatgattcctaaatgacttcgattgttctaaaagttgccattaagagtaaatggaatataccataagccgtgttttaactctgaaaatgtgttagagcatgcctactgtatccaattatagttttaacattgttctaaagaagtacatctatttctagagggatttctaacaaacaagtagttcaaagagagggagggggcagaaaagactatcaatgatgtatggcttcatagttaacacttgttgcccatctggaatgactctacttatacgattcttaaggatgccattagaattacttgtattccaagggtaacta

SEQ ID NO: 594026 - DNA, 414 bp, Homo sapiens
tctccacagtaagttgtgtactgacctctgctatcatctcattagttctatgaagattgcaaaagacaaatgcttagtatttcattttttcctaaatgattcctaaatgacttcgattgttctaaaagttgccattaagagtaaatggaatataccataagccgtgttttaactctgaaaatgtgttagagcatgcctactgtatccaattatagttttaacattgttctaaagaagtacatctatttctagagggatttctaacaaacaagtagttcaaagagagggaggggrcagaaaagactatcaatgatgtatggcttcatagttaacacttgttgcccatctggaatgactctacttatacgattcttaaggatgccattagaattacttgtattccaagggtaacta

SEQ ID NO: 594027 - DNA, 610 bp, Homo sapiens
gaatcctttttcaatcaaaaatatgaaaaatgttggcaaggatgtggagaaattagaaccctcatacaatgctgatgggaaygtaaaatggtgcaaccactttggaaagcagactggaagctcctcaaaatgttaagcatagtgttaccatatgacccagaaattcaactcatatgtatatacccaagagaaaggaatacatatacaaacacaaaaacttgtaaataaaagttcacagcagcatgattaataatagccaaaacatggaaacaacccaaaggtccatcaactgatgaatggctaaataaattagtggtatgtccatacagtggaaaattactcagcaataagatgaaattaaatactgatacatgttacaacacaatgaaccttaaaaatgttatgctaagtagaagaagccagtcacaaaagaccaccacacattgtgtgatccaattgatacgtggtgtccagaatgggctaatctatggaaacaaaatagattgctgattcttttcagggtcatgaaaatgtcctacaattgatgatggtgatggttatgcaactctgtgaatatattaagagaccatgaattgtacacgttcaatgg

SEQ ID NO: 594028 - DNA, 610 bp, Homo sapiens
gaatcctttttcaatcaaaaatatgaaaaatgttggcaaggatgtggagaaattagaaccctcatacaatgctgatgggaatgtaaaatggtgcaaccactttggaaagcagactggaagctcctcaaaatgttaagcatagtgttaccatatgacccagaaattcaactcatatgtatatacccaagagaaaggaatacatatacaaacacaaaaacttgtaaataaaagttcacagcagcatgattaataatagccaaaacatggaaacaacccaaaggtccatcaackgatgaatggctaaataaattagtggtatgtccatacagtggaaaattactcagcaataagatgaaattaaatactgatacatgttacaacacaatgaaccttaaaaatgttatgctaagtagaagaagccagtcacaaaagaccaccacacattgtgtgatccaattgatacgtggtgtccagaatgggctaatctatggaaacaaaatagattgctgattcttttcagggtcatgaaaatgtcctacaattgatgatggtgatggttatgcaactctgtgaatatattaagagaccatgaattgtacacgttcaatgg

SEQ ID NO: 594029 - DNA, 399 bp, Homo sapiens
ggagtctgggagaccaaggcaggtgttccagacagagacagtgacacagaaggaggggcagagtgacagaggagaaggggcgggcaggtactgggacagggaagcagaggttgtccccagagtgacctgggtaggagattggcttgggyccccccagctgggcctaagcacagctacactgggccctgcatcccagcccctgggaccggtgccaggtggacagtctgacctggaagctgatgtaggacagctgcacagagccattgacggagatggtgtccacacggtggaagggcacgcggtggaagtactgcacgaagaggctcccgttcaccatcacctgccagaggagagcacgtatttcgggggaggtgccccaggccgggatggggaccaccc

SEQ ID NO: 594030 - DNA, 434 bp, Homo sapiens
tggaaattgacggatgaagagaaaggggcagctgaggagtctgggagaccaaggcaggtgttccagacagagacagtgacacagaaggaggggcagagtgacagaggagaaggggcgggcaggtactgggacagggaagcagaggttgtccccagagtgacctgggtaggagattggcttgggtccccccagctgggcctaagcacagctacrctgggccctgcatcccagcccctgggaccggtgccaggtggacagtctgacctggaagctgatgtaggacagctgcacagagccattgacggagatggtgtccacacggtggaagggcacgcggtggaagtactgcacgaagaggctcccgttcaccatcacctgccagaggagagcacgtatttcgggggaggtgccccaggccgggatggggaccaccc

SEQ ID NO: 594031 - DNA, 399 bp, Homo sapiens
ggagtctgggagaccaaggcaggtgttccagacagagacagtgacacagaaggaggggcagagtgacagaggagaaggggcgggcaggtactgggacagggaagcagaggttgtccccagagtgacctgggtaggagattggcttgggtccccccagctgggcctaagcacagctacactgggccctgcatcccagcccctgggaccggtgccaggtgsacagtctgacctggaagctgatgtaggacagctgcacagagccattgacggagatggtgtccacacggtggaagggcacgcggtggaagtactgcacgaagaggctcccgttcaccatcacctgccagaggagagcacgtatttcgggggaggtgccccaggccgggatggggaccaccc

SEQ ID NO: 594032 - DNA, 399 bp, Homo sapiens
ggagtctgggagaccaaggcaggtgttccagacagagacagtgacacagaaggaggggcagagtgacagaggagaaggggcgggcaggtactgggacagggaagcagaggttgtccccagagtgacctgggtaggagattggcttgggtccccccagctgggcctaagcacagctacactgggccctgcatcccagcccctgggaccggtgccaggtggacagtctgacctggaagctgatgtaggacagctgcacagagccattgacggagatggtgtccacacggtggaagggcacgcggtggaagtactgcacgaagaggmtcccgttcaccatcacctgccagaggagagcacgtatttcgggggaggtgccccaggccgggatggggaccaccc

SEQ ID NO: 594033 - DNA, 474 bp, Homo sapiens
gattaaccaagttttaaaaataacaggcacatattacatgaaagaaatcaaggaaatgtctcgggaagaaaaaaatcttagtgttaaaattcctaaatgtcattatagtcattatatattgttcaaaaatagcaatattctgattagttatatgtttgtttgaaaataaaataatttggtaaatttcccacatatttagtctagtacttagtcttaatataaaaagstggatttgccagcagaaaattgtaattacttttttatgaagtaaacacacattatatcactatcattgcatggaagagaaggtgaacaaaaaaagattaaggaataaaaaaaagaatatcactatcatataactacatacattaacaaagagacaaacatttcccactggagattaggagtttagcagaagtctctgaaaatactaaaaactgaaacaaaattaataattgctttttgtttgtttgt

SEQ ID NO: 594034 - DNA, 474 bp, Homo sapiens
gattaaccaagttttaaaaataacaggcacatattacatgaaagaaatcaaggaaatgtctcgggaagaaaaaaatcttagtgttaaaattcctaaatgtcattatagtcattatatattgttcaaaaatagcaatattctgattagttatatgtttgtttgaaaataaaataatttggtaaatttcccacatatttagtctagtacttagtcttaatataaaaaggtggatttgccagcagaaaattgtaattacttttttatgaagtaaacacacattatatcactatcattgcatggaagagaargtgaacaaaaaaagattaaggaataaaaaaaagaatatcactatcatataactacatacattaacaaagagacaaacatttcccactggagattaggagtttagcagaagtctctgaaaatactaaaaactgaaacaaaattaataattgctttttgtttgtttgt

SEQ ID NO: 594035 - DNA, 547 bp, Homo sapiens
ctctcagaccacagtggaataaaattggaaattaattccaaaaggaacactcaaaagcatgcaaatacatggtaattaaataacctactcctgaatgattgttgggtcaacaatgatatcaagagggaaatttaaaaattctttgaactgaacgataatagtgacacaacctatcaaaaactctgggatacagcaaaagtggagctaagaagaaaattcatagcattaaatgcctatatcaaaaagtctgaaagagcacaaataaacaatctaaggtcacacctcacagaattggagaaactagaacagtccaaatccaaacccagcagaagaaaagaaataacaaaatcagaacaaaactaaatgaaattgaaacaaaaaaatacaacagataaatgaaacaaaaagctggttctttgaaaagataaataaaattgataagcattagcaagattaatcaagaaaagaagagagaagctccaaataagctstattagaaatgaaatgggagatattaccactgataccacagaaatacaaaagatta

SEQ ID NO: 594036 - DNA, 567 bp, Homo sapiens
aatctacaaatttaatccaattcccatcaaaataccaccatcattctttacaaaatgatgaaaaataatcccaaaattcatatggaaccaaaaaagagcctacatagccaaargaagactaaccaaaaagaataaatctggtgacatcacattacctaacttcaaactattctgtaacaccatagtcactaaaacagcatgatactggtataaaaataggcacatagaccaatggaacagcatagagaacccagaattaaagccaaatacttacagccagctgatcttcaacaaagtgaggaaaggacaccctattcaacacatagtgctgggataattggctagccacatttaggagaatgaaactggatccttatctctcaccttatacaaaaatcaactcaagatggatcaagaacttaagacctgaagccttaaaaattctagaagataacattggaaaaacccttctagacattggcttaggcaaagacttcatgaccaagaagctcaaaacaaatgcaacaaaaacaaaagataaatagatgggacttaactaaactaaaa

SEQ ID NO: 594037 - DNA, 567 bp, Homo sapiens
aatctacaaatttaatccaattcccatcaaaataccaccatcattctttacaaaatgatgaaaaataatcccaaaattcatatggaaccaaaaaagagcctacatagccaaaagaagactaaccaaaaagaataaatctggtgacatcacattacctaacttcaaactattctgtaacaccatagtcactaaaacagcatgatactggtataaaaataggcacatagaccaatggaacagmatagagaacccagaattaaagccaaatacttacagccagctgatcttcaacaaagtgaggaaaggacaccctattcaacacatagtgctgggataattggctagccacatttaggagaatgaaactggatccttatctctcaccttatacaaaaatcaactcaagatggatcaagaacttaagacctgaagccttaaaaattctagaagataacattggaaaaacccttctagacattggcttaggcaaagacttcatgaccaagaagctcaaaacaaatgcaacaaaaacaaaagataaatagatgggacttaactaaactaaaa

SEQ ID NO: 594038 - DNA, 567 bp, Homo sapiens
aatctacaaatttaatccaattcccatcaaaataccaccatcattctttacaaaatgatgaaaaataatcccaaaattcatatggaaccaaaaaagagcctacatagccaaaagaagactaaccaaaaagaataaatctggtgacatcacattacctaacttcaaactattctgtaacaccatagtcactaaaacagcatgatactggtataaaaataggcacatagaccaatggaacagcatagagaacccagaattaaagccaaatacttacagccagctgatcttcaacaaagtgaggaaaggacaccctattcaacamatagtgctgggataattggctagccacatttaggagaatgaaactggatccttatctctcaccttatacaaaaatcaactcaagatggatcaagaacttaagacctgaagccttaaaaattctagaagataacattggaaaaacccttctagacattggcttaggcaaagacttcatgaccaagaagctcaaaacaaatgcaacaaaaacaaaagataaatagatgggacttaactaaactaaaa

SEQ ID NO: 594039 - DNA, 549 bp, Homo sapiens
accattcttctaagtgaagtagctcaagaatggaaaaccaaacatcatatgttctcatatgtgggaactaagctatgagaatgtaaaggcakaagaatgatacaggggactttggggactcagcggaaatggtgggaagggagtgagaaataaaagactacacattgagtacagtgtacactgctcgggtgagggatgcaccaaaatctcaaaaatcaccactaaagaacttatttatataaccaaacaccacctgttccttaaaaacctattgaaataaaaagtaaatttaaaaaaacctcctagagattcattgattatattttgaaggtttttttgtgtctctatttcagttcagccctgatcttggttatttcttgtctatctgctagacttgggagtttgtttcctcttggttctctagtcattttagttgtaatattaggttgttaacttgagatctttctctctttttgatgtgggcatttaatgctataaattctcctcttaacactgctttagctgagtcctggagattctgttatgttg

SEQ ID NO: 594040 - DNA, 549 bp, Homo sapiens
accattcttctaagtgaagtagctcaagaatggaaaaccaaacatcatatgttctcatatgtgggaactaagctatgagaatgtaaaggcagaagaatgatacagkggactttggggactcagcggaaatggtgggaagggagtgagaaataaaagactacacattgagtacagtgtacactgctcgggtgagggatgcaccaaaatctcaaaaatcaccactaaagaacttatttatataaccaaacaccacctgttccttaaaaacctattgaaataaaaagtaaatttaaaaaaacctcctagagattcattgattatattttgaaggtttttttgtgtctctatttcagttcagccctgatcttggttatttcttgtctatctgctagacttgggagtttgtttcctcttggttctctagtcattttagttgtaatattaggttgttaacttgagatctttctctctttttgatgtgggcatttaatgctataaattctcctcttaacactgctttagctgagtcctggagattctgttatgttg

SEQ ID NO: 594041 - DNA, 549 bp, Homo sapiens
accattcttctaagtgaagtagctcaagaatggaaaaccaaacatcatatgttctcatatgtgggaactaagctatgagaatgtaaaggcagaagaatgatacaggggactttggggactcagsggaaatggtgggaagggagtgagaaataaaagactacacattgagtacagtgtacactgctcgggtgagggatgcaccaaaatctcaaaaatcaccactaaagaacttatttatataaccaaacaccacctgttccttaaaaacctattgaaataaaaagtaaatttaaaaaaacctcctagagattcattgattatattttgaaggtttttttgtgtctctatttcagttcagccctgatcttggttatttcttgtctatctgctagacttgggagtttgtttcctcttggttctctagtcattttagttgtaatattaggttgttaacttgagatctttctctctttttgatgtgggcatttaatgctataaattctcctcttaacactgctttagctgagtcctggagattctgttatgttg

SEQ ID NO: 594042 - DNA, 549 bp, Homo sapiens
accattcttctaagtgaagtagctcaagaatggaaaaccaaacatcatatgttctcatatgtgggaactaagctatgagaatgtaaaggcagaagaatgatacaggggactttggggactcagcggaaatggtgggaagggagtgagaaataaaagactacacattgagtacagtgtacactgctcgggtgagggatgcaccaaaatctcaaaaatcaccactaaagaacttatttatataaccaaacaccacctgttccttaaaaacctattgaaataaaaagtaaatttaaaaaaacctcctagagattcattgattatattttgaaggtttttttgtgtctctatttcagttcagcyctgatcttggttatttcttgtctatctgctagacttgggagtttgtttcctcttggttctctagtcattttagttgtaatattaggttgttaacttgagatctttctctctttttgatgtgggcatttaatgctataaattctcctcttaacactgctttagctgagtcctggagattctgttatgttg

SEQ ID NO: 594043 - DNA, 560 bp, Homo sapiens
gatggagaacgagatgaactgtacaattgccttgagagagttcccaggcagcagtgccaggagagaaacgtagtaaagctctgtggtctccccgagttgaggagataaagctgggcgtggaggtgggtcaaattggataragaacctgcgaagaataccaaaaaaggagagcactcaacagacagaaaattcccaagatcttagaggacacctctcaaatattcaggtgagaactggtcagtgaatgcatgaaaataaactaaccaaagttaatgaaagaataacctgaaaagattaggaagggcacacaatgttgaaaatagtgtctatttccaccagccagaatggaaaacctcataatggaagagcaggtagagtactcagaagagagtgtctcaattgtggagaaaaaattaacacaaaactaacctaaacatcctctggtcctgctttaaaaagcttacaaagcaagaccccaaaagatcaaactgtttccaagtaatttaattatttcccagaacaaagtttaaggatatttataggaatacaaaaatacccca

SEQ ID NO: 594044 - DNA, 532 bp, Homo sapiens
agcatatgttggtgctagaagagagacattaagcttcagcattttttagtccaaaggaaagctggccgggtgcggtggctcatgcctgtaattccagcacttttggaggccgaggcgggcggatcacctgaggtcaggagttcgagaccagcctggccaacagggtgaaaccctgtctctactaaaaataccaaaaattagccaggcgtggtggtgggcgcctgtagtcctagctactgaggaggctgagacaggagaattgcttgaacctgggaggcggaggttgcagtgagccgagatcacaccattgcactccagcctgggcaacaagagcaaaactccgtctcaaaaaaaaaaaaaacaagaaaaaaaaaagaaagcttcatcttggaggaagtaggatttgagctgatttagaaggatgtatgagtggagaaaagaatggaataggaataataataacacacgcaaagtgtcaggggtggaaatacattgttttytgagcctagtgagagtcatgccagaacagaca

SEQ ID NO: 594045 - DNA, 499 bp, Homo sapiens
ctttagttactactaatagaatctatttaggttaatgtaagcagacatggggtttagtagtggatattaggtggattaattctataatagaatttctayagaatacagaaaaagtgaattaaaaggcttgagtttaagcttttagactcactggcccagctgcagaggggtatgctgaaggcatcactatctgctgtggctagacacaaaatgccagcaaatcacctcttttgcaattgctctcaaaccagatgtaagagttctccagtggcaggctgaccttggaactaaccccagagtaagaactccacccaccaaaaagccagttacatacagaaccttcttcttcatgttactcacattccaatcaaaacggttcctgagggctgggtgtggtgtctcaagcctttaaccccagcactctgggaggccgaggcgggtggatcacctgaggtgaggagtttgagaccagcctgggcaacatggtgaaacccggtct

SEQ ID NO: 594046 - DNA, 519 bp, Homo sapiens
tttggtattagggtgataataacttcatagaataatttagggaggattccctctttctctgtcttttggaataatgtcagtagggattggtcccaatttttcttcgaatgtctgttagaattcagatgtgaatccatctggtgctggacttttatctgttggtagctttttaattaacatttcaatcttgctgcttgttattggtctgttgagcatttctatttcttcctggtttaatctaggagggttgtatatttccaggaatttayccatctcttctatgttgtctagtttgtgcacataaaggtattcatagtagccttgaatgaccttttgtatgtctgtggtattggttgtagtatctcccattttatttctaaatgagctctttatcttatcccttcttttcttcattaatctcactaacggtcaatcaattttatttatcttttcaaagaaccagctttttgtttcatgtatcgtttgtattgtctttttctatttcaattgtcacttcgt

SEQ ID NO: 594047 - DNA, 659 bp, Homo sapiens
gttggtagctttttaattaacatttcaatcttgctgcttgttattggtctgttgagcatttctatttcttcctggtttaatctaggagggttgtatatttccaggaatttatccatctcttctatgttgtctagtttgtgcacataaaggtattcatagtagccttgaatgaccttttgtatgtctgtggtattggttgtagtatctcccattttatttctaaatgagctctttatcttatcccttcttttcttcattaatctcactaacggtcaatcaattttatttatcttttcaaagaaccagctttttgtttcatgtatcgtttgtattgtctttttctatttcaattgtcacttcgttctgttctgatcttggttatttattttcttctgctgggtttgggtttgctttgttcttgtttctctagtttcttgaggtgtaatcttagattgtctattttgctctttccgaattattgatgtaggcatttaatgctatgaactttcctattagcactgcttttgctgtatcctagaggttttgatcagttgtgtcactattatttttcagttcaaagaaattttaaatttcaatcctgatttcattgttgacccaatggtcatacaggagcatyttatttaattaccatgtatttg

SEQ ID NO: 594048 - DNA, 576 bp, Homo sapiens
caaaagacacttagacattaaaaaaggaaaagcagtggtaactttacaatagagattccggggagccgccaccttaaccaagtgattgcggtttacttcaccagcaattagacaactcaatgttacatgcctcttgatatgatgcacagaggaaaacaattctttcaaaaaatggataacctgggtttaatcataagagcatgtcagacaagytcaaatggaagagagagtctacaaaataactaccctgtactctccaaaaatgcccatgtcaacaagactgaagaactgtttaaagtaaagcagacacaataatggaaagcagcatgaaatccaggattccttcttgctataaagacaacaaatacacaatgggacaatagtaggacaatgggtgaaatatgaataaagacttcacattagaaaaagtactgaataaacagtaattccctgattgtgagagtttatctgtcgttatttatgaacatatccttgttattagaaaatgcacactgatttatttaactgtaaagaggcatcatatctgtaagtttctttcaaatgactgaaaaacaa

SEQ ID NO: 594049 - DNA, 576 bp, Homo sapiens
caaaagacacttagacattaaaaaaggaaaagcagtggtaactttacaatagagattccggggagccgccaccttaaccaagtgattgcggtttacttcaccagcaattagacaactcaatgttacatgcctcttgatatgatgcacagaggaaaacaattctttcaaaaaatggataacctgggtttaatcataagagcatgtcagacaagctcaaatggaagagagagtctacaaaataactaccctgtactctccaaaaatgcccatgtcaacaagactgaagaactgtttaaagtaaagcmgacacaataatggaaagcagcatgaaatccaggattccttcttgctataaagacaacaaatacacaatgggacaatagtaggacaatgggtgaaatatgaataaagacttcacattagaaaaagtactgaataaacagtaattccctgattgtgagagtttatctgtcgttatttatgaacatatccttgttattagaaaatgcacactgatttatttaactgtaaagaggcatcatatctgtaagtttctttcaaatgactgaaaaacaa

SEQ ID NO: 594050 - DNA, 548 bp, Homo sapiens
gttctccattagacctgttgtagactctaagggactaaatcactaaggtgatgcctgatgcatgtcatttcatcatcccttatatttcttttttgggtttttgtgtgtgtgtgtgtgtatgttttagactgagtctcgctcttgtcacccagcctggagtgcaatggggcgatctcagctcactgcaacctccacctcctgggttcaagcgattctcctgcttcagcctcctgaatagctgggattacaggcaccgaccaccatgcctggttaatttttktattttttgtagagatggggtttcaccatgttgcccaggttgacctcaaactcctgactgcaggtgatccaccccccttggcttcccaaagtgctggaattacaggtgtgagccaccgcacctggcccatcccttatatcttaacaaacacttctctctgcatgttttggataattgcaaatattctcaatcacttctctcccttttcttcccctttatttttgcaagtcttcttgcattttacttgcagtaagatgaaaaatctgac

SEQ ID NO: 594051 - DNA, 548 bp, Homo sapiens
gttctccattagacctgttgtagactctaagggactaaatcactaaggtgatgcctgatgcatgtcatttcatcatcccttatatttcttttttgggtttttgtgtgtgtgtgtgtgtatgttttagactgagtctcgctcttgtcacccagcctggagtgcaatggggcgatctcagctcactgcaacctccacctcctgggttcaagcgattctcctgcttcagcctcctgaatagctgggattacaggcaccgaccaccatgcctggttaatttttttatttttwgtagagatggggtttcaccatgttgcccaggttgacctcaaactcctgactgcaggtgatccaccccccttggcttcccaaagtgctggaattacaggtgtgagccaccgcacctggcccatcccttatatcttaacaaacacttctctctgcatgttttggataattgcaaatattctcaatcacttctctcccttttcttcccctttatttttgcaagtcttcttgcattttacttgcagtaagatgaaaaatctgac

SEQ ID NO: 594052 - DNA, 548 bp, Homo sapiens
gttctccattagacctgttgtagactctaagggactaaatcactaaggtgatgcctgatgcatgtcatttcatcatcccttatatttcttttttgggtttttgtgtgtgtgtgtgtgtatgttttagactgagtctcgctcttgtcacccagcctggagtgcaatggggcgatctcagctcactgcaacctccacctcctgggttcaagcgattctcctgcttcagcctcctgaatagctgggattacaggcaccgaccaccatgcctggttaatttttttattttttgtagagatggggtttcaccatgttgsccaggttgacctcaaactcctgactgcaggtgatccaccccccttggcttcccaaagtgctggaattacaggtgtgagccaccgcacctggcccatcccttatatcttaacaaacacttctctctgcatgttttggataattgcaaatattctcaatcacttctctcccttttcttcccctttatttttgcaagtcttcttgcattttacttgcagtaagatgaaaaatctgac

SEQ ID NO: 594053 - DNA, 599 bp, Homo sapiens
gattgcccctattccttatagctttccaaagggatggaaatgtataggccagaggcaggggttttaggaatctgaatatgatgtctgttaagctcacagtctccaagcatgtgacaaaaggtaaggcagtgctggcttcttgtgcactttgtctagcctaacaatgcctacctaccttcaccttctttctctcccaaaatggctgaccctttgctgtccctgtaaccctatgacctttctccatccccttccctttctgttgtttttgtggcatttccatgtccccaccatcccaaatctgctccaactgcacctgggttctgatttaagtcaaccaggcactaagaactttacatgtttgaactcaattaatcttcacaacaaccctattattattcctgttttacagactcagaaactgttgcacacagaggttaagtaaacttgaccaaagtcacacacctaataaggcagagcccagatttgaacccaagcaacttgactccaaagtacatctttattccactgtgctataggscacttataaatcatatccatggccaaatactgttttctgatatgtatatcaataaaagtat

SEQ ID NO: 594054 - DNA, 632 bp, Homo sapiens
ctgtgacatagaagcaatttttcttaaaagaagcctgtgatttatcattagagctggcgaaaggcctgcaagacctggcttctggctggactagcagcctaaaggtagcttccacttgctttagactgagaccttcttctgctacatactctagcaattgagggggatgccctcagggatataaaactaagttatggaaaaaagccctgtaaccacatgttaattctcagccctgtaaattctcatcatggccccttactggacaagtctttccgcctttgtggtagtgactctgtccttttgatgatagttttaagtatctttccagatggccaacrtaaggttatttaattcagtaaaaaaacattgttttcctcctttcgagactctttctaaggaaattttccagctccacaggatgggacagagccttgatgtatttttctttcctgaacctaattgtggaaagaaaagcaaaaataaaactaaagctggaagcaagaggctaagtccttaaaaagaaaaaaaaaaccataaaactttctgaaggggaaggaagataatcttaagaatgtcttaaacataatgaatatgtatttcctctgcaagccctaaaccagggtgatatatgt

SEQ ID NO: 594055 - DNA, 632 bp, Homo sapiens
ctgtgacatagaagcaatttttcttaaaagaagcctgtgatttatcattagagctggcgaaaggcctgcaagacctggcttctggctggactagcagcctaaaggtagcttccacttgctttagactgagaccttcttctgctacatactctagcaattgagggggatgccctcagggatataaaactaagttatggaaaaaagccctgtaaccacatgttaattctcagccctgtaaattctcatcatggccccttactggacaagtctttccgcctttgtggtagtgactctgtccttttgatgatagttttaagtatctttccagatggccaacgtaaggttatttaattcagtaaaaaaacattgttttcctcctttcgagactctttctaaggaaattttccagctccacaggatgggacagagccttgatgtatttttctttcctgaacctaattgtggaaagaaaagcaaaaataaaactaaagctggaagcaasaggctaagtccttaaaaagaaaaaaaaaaccataaaactttctgaaggggaaggaagataatcttaagaatgtcttaaacataatgaatatgtatttcctctgcaagccctaaaccagggtgatatatgt

SEQ ID NO: 594056 - DNA, 487 bp, Homo sapiens
tgatcttagcttcagcaaagcttaggccaaccatacttagggcttggacaatgctcacaaaatgtttcctaaacaaacccagatcccttgtcttccatgagtaaaggctgcagaaagggcccatagaaactgcaggatactgatrttgggttgctttgagtgcatttgtgtggggttttaatcttagggatttaaaagataatgccatggaagtttcacactggtatgagctcaatgtgggtaacctttcaaattaaatgctaccgagttatggacctgactcttctacatgaaaagacctgccctttgaaagtgtcttttgtcttataaacaaaggtaacagatcttccctgtagtatctgggaagaagccatccctacagtgactcagctgggaaacctggtgtatttactaccccaaatcagaggagagtatcattccctgccaaatcacttcagccattttggtcattggctctttatgcctg

SEQ ID NO: 594057 - DNA, 487 bp, Homo sapiens
tgatcttagcttcagcaaagcttaggccaaccatacttagggcttggacaatgctcacaaaatgtttcctaaacaaacccagatcccttgtcttccatgagtaaaggctgcagaaagggcccatagaaactgcaggatactgatattgggttgctttgagtgcatttgtgtggggttttaatcttagggatttaaaagataatgccatggaagtttcacactggtatgagctcaatgtgggtaacctttcaaattaaatgctaccgagttatggacctgactcttctacatgaaaagrcctgccctttgaaagtgtcttttgtcttataaacaaaggtaacagatcttccctgtagtatctgggaagaagccatccctacagtgactcagctgggaaacctggtgtatttactaccccaaatcagaggagagtatcattccctgccaaatcacttcagccattttggtcattggctctttatgcctg

SEQ ID NO: 594058 - DNA, 530 bp, Homo sapiens
aactctaatgtgacattttaaattttggtagagcgagaaaagtgttggggaaaagacagttgtttggatatcatcaggggatcagaaataatggaagaatagaaaataaaaaacagcatggataaaatgcctatagtctcaacccagtatatttaaaactcagtgctgggaataaaagaaatcacaagatagatactaatctcaattaaacaattaactctcataatggtgtttactaatgccccataatagcagatataccaccagatggcaattttattcagtaaatgtgacttcaaagagttgaattaaagtcttcatgtggatctaccatacggcaattactgcactaaacatgtgtatttctattttgtaaaattaaaatataatttaaatgtctgagagggcttatgttttatagaaacctgtgagtatcttttgaatactgaaaaacattaattgatctgattgtattatgaataataccccttaatgaattttttwaaaaaaatagctagatgcagtgtctc

SEQ ID NO: 594059 - DNA, 601 bp, Homo sapiens
ttatccatttttcttcttttttctcaactgtcactcttctcattttctagaatattcatctgtttctttcttaaatttgaactgttttcttttttcactgtttctatgaatatttttttctatctgtctttaggatttctgtcgttttagcgtatgttttgtaataagtctcatgactggcatcaaatacgcataaattcctatttcacaataaatgagtaaattaatctctctcttccagagttgttccctatactttgctgtttacatgtaaataatatagccctatattacttaaccaaaaagcttatattatcatatttttagtcattttaagtactcattcatatttcaatctcatatttttaaattgaaatatgattttatcaggccattttgactttttgctcataagaatatatggcataagccccttatttactcagtggcatttaackgtaaagttttatctatggcaatttaacctaacaaatgagaaatcttttctcattgttctagcatgccagaaataactctcatatttaatttttatttcctttttaaccgtctttaaaataaacatataaataactgtgtaaca

SEQ ID NO: 594060 - DNA, 496 bp, Homo sapiens
cattatgaaccttcaaaaacatgcccagcaaggagtcatgatggctgtgcatacccacgaacagggttgattagaaacaactgtttcatttacacaacactgggtcatatgacaaataaataacagcaacctgcctatttttaaaattttgacatcttgcttctcatgaatttttttaatttttgattttttaaattcattgccttaactattatttagcctgattactgagtttttggcaccacttttaaaaaaataactcatttattttgaaatgattttcattgtatatatttatggggtacaacatgactttttcatatatgtatacataatggaacaattaatcaaagtaaataacatatcttcacctcataaacatcttttctgtggttagaacatttaaaatctactttcttagcacttttcaagtatgtagcacattattattaactatagtcactcygctgtataacaaaataaatgtccagaactt

SEQ ID NO: 594061 - DNA, 601 bp, Homo sapiens
gcccaggttcttcagcccattccctctccttacaatgcaaatgttcccttatgttattttaggatggcttggttggtccctattcagagcaaactgagtaaagttgtttgcttaaaatgtatgctggacatgtcagaagtagtcaggttttgtcatgcactcgttttatgacagatccaggccacagacacgaagcttggcaagtatcttataaattatagctgtgctgaagcctacagcaatagctcttaactcaggctcacctaccaaatattcttgcaaaaacaaaaatgatacagtgaaataacacaggaatgtaaaacgcaatttcttcaacatctaagtaccaagcatccaataggagtctcagattttttaataatctgttttattttctttcccaacaaacctaaaactgtaacatagaaaaccatgttatattacgtaatgcttttctttaaagtttaacagccttaattttatagtcctagcacagtttttatttcacaaaattttatccccaaaagattggacactaaatcattctttgtttcataatgagtaaygatttcataatcttgagattctaaatgaaaatgtt

SEQ ID NO: 594062 - DNA, 530 bp, Homo sapiens
ttaatgtttacaatatccagcaagtaataaaatcttactagaataaaaacaggaaaatgtgatcagtagccagaacaatcaaccaatagaaacaaactcagaagtgacaaagatggtttaagtaacaaaaaagaattttttaatgattaaaaaaatgcttaataatgtaaagaaaaaaatgcacatgagaacagaagcaaaagatatttaaaaagatgcaaatggaacttctaaagatgaaaaatgtaatatayaaaaaaatttacaagatagatttaacatcagattagacaatagggagaaaataaaacactacccaaaccaaaacttagagaaaaaagactttaacaaatcaatggagcttaggtggcatgtaggacaatatcaagcagtttaaaatacatatagttggagaggaggaagataaaaaaaaattgaaaaaatgactgccagaaaattttatatttatttagatgaacaagaattagaattctatcaacttcagaaacagtacaaaccagaaaaaaaag

SEQ ID NO: 594063 - DNA, 484 bp, Homo sapiens
acttattatttgaagtctttctcaaaagtaacttcctccatggagcctttcttatttctccttgacaaaaataatcatttcttcctctgaacgtccatgatacattgcaagaaacattcactacacatgatttgagtttaatatatgttgcttatgtagttatgtcctattcatgattaactataagcaaaggttgtaccttgtttactatgatatcatctatatcatacaagataaatggaattaacatttactgagaacctactatgtatctttatgaaacaaataatctgaaaaacgctaattttcatcataactcaaagaaacaattattactatgccttttttacacatgattaactttcccrtttagaaaaaaaagttcaactcgtgtataattttacatcaacacactctgaggctgaagcaaatctgactgattatcaatgtgaaaataaaatataaaaactgttcttatagttat

SEQ ID NO: 594064 - DNA, 526 bp, Homo sapiens
tgcaacaaaagatgcatgcacagccttgccaggtatcygctgttaaagtgagagcattcattggaaaagaatgggaccctgcaacttggaatggggatgtgtgggaggaccctgatgaagctggggacactgagcctgtaaactctgatgaaccttttttgccagaagaaacagtttccccatccccagtagtggcaacatcccctccccaacccatactaccatcagcctttctccatctttgccagaggagataaactctgttctgcctgaggcaacagtgatggcctcccctgaggcagttgccaggaaagataatgttaattctcctcaggagccacccccaacacccctgttttcttctagacctataattagactaaagtcctggagagcccctagaggtgaagttgagagtgtgactcatgaggaggtgtgctacacttaaaaagaactgcttgagttttctaatttatataaagagaaatcttgagaataggcattagaataaatattaagggtgtgg

SEQ ID NO: 594065 - DNA, 575 bp, Homo sapiens
caaatatactgtatgttatatgaattatattctctattctagtaagcaagagaaaaggaaatgttattaagaaaataataaggaaaaattattccacttaactattcattaagtggaagagggtcatcctatagatcttcattcctgtcttcctcatattgagtaggctgaggaggaggagcgggagaagaggtttgtcytattatctcaggggtagcagaggtgaaagaaaatccacatataagtggatctttgcagttcaaacccatttttcaagggccaactgtatatgttttcctatatagctctctccatatatccacatataaatttctatatatcttccacatataaatagatttcattttattttattattttcttatttatttattttttattattatactttaagttttagggtacatgtgcacagtgtgcaggttagttacatatgtatacatgtgccatgtttgtgtgctgcacccattaactcgtcatttaacattaggtatatctcctaatgctatccctcccccctccccccaccccacaacaggcctggtgtgtgatgt

SEQ ID NO: 594066 - DNA, 546 bp, Homo sapiens
aattctcaggtctcagcctcctgagtagctgggattacaagcacccatcaccatgcctggctaatttttgtatttttagtagagacaggattttgccatgttggccaggctggtttcgaactccttgacctcaggtgatccacctgccttagcctcccaaagtgctgggattacaggcgtgagccactatgcccagcctaaacatcagatttctgcatgaattgtcattgagtcatgactctcagtgcagcgtggaagaagtgacaggtccagacaggcttcccttactgaacacctaacactgagaaggctctgggctaagtgttgatgcatgtagggaaaagttacggaacactgggcagtgaatgagcacagaaataatgttccttctgcttaatatgatacatttactgcatacttattgtctcagtttctgtgctcagtgccttagctacwtcatatcatgtactccttacaacaattgtatgaggaaggtattaatattaatccatattacacatggtggaggagactcagccagaagtg

SEQ ID NO: 594067 - DNA, 440 bp, Homo sapiens
ttctattctgtaacctaccttttcaattaacaatgtaattgggataatttccatgactgcatagtattccactgtatgtatgtatcatatgttatttgacatttgcttagatagctgggctttgcttttgctaatataaacactgcagtactrtacacacagccacatgtctaattacttccttgggataaactaatagctaaagagtatgacatttagactgacactgactgccaagaatgccttccagaaagatcttcccacagttctcgcatgcaaattcccaattctccactctcaacactagatattttcaagcattttaactttaccaagtcaatagacattaccgtttaatccacacagctgattattgggattaaatgatgtttttcatatcctttctttgcagtttttcttttatgaactaatgtagtatt

SEQ ID NO: 594068 - DNA, 561 bp, Homo sapiens
tgtttcattttgtaagtaattgccaaacaacttgaaatcattttaagcctttgcatactctgtgcttatctgtgaccatagatggtcattctggaggcattatagaatgtygtagttgagggaccgtggggactattgagccacttctcactttacagggaagccaggaggtaggtttggagagggaaatccagggtcggcagagtccgggcccctccccacatctggaagcttttccagggcctcaggcggcccaatttcttgcctctgctccccaggggacagccttatgaagctgtgatggttgattaatctgaatccataaatggcactggccaataaattgcaggccattcttaaaaagtttataagcatgccattttatacatgacatttgtaatgaggaaaagagaacttaaaacaaacccaaagcatgtcattacccagcagtttcctggtcctggggcacatggcacagctggctccagccgtttccagaagtttggggcggctcacttcacccgctctatttaggggtctgggaggccaagcagataatta

SEQ ID NO: 594069 - DNA, 561 bp, Homo sapiens
tgtttcattttgtaagtaattgccaaacaacttgaaatcattttaagcctttgcatactctgtgcttatctgtgaccatagatggtcattctggaggcattatagaatgttgtagttgagggaccgtggggactattgagccacttctcactttacagggaagccaggaggtaggtttggagagggaaatccagggtcggcagagtccgggcccctccccacatctggaagcttttccagggmctcaggcggcccaatttcttgcctctgctccccaggggacagccttatgaagctgtgatggttgattaatctgaatccataaatggcactggccaataaattgcaggccattcttaaaaagtttataagcatgccattttatacatgacatttgtaatgaggaaaagagaacttaaaacaaacccaaagcatgtcattacccagcagtttcctggtcctggggcacatggcacagctggctccagccgtttccagaagtttggggcggctcacttcacccgctctatttaggggtctgggaggccaagcagataatta

SEQ ID NO: 594070 - DNA, 329 bp, Homo sapiens
ttctcaaaatgtttacattctgtgtaaggagacaagacatgcaaatgaaaacagttaaatgattttgcaaggcagtctgggattaagaggagaatggatcagacaatagaaayggtatggggttaagacagaagaaaataaggttgcaattgggattgaatgcttgataattagacattctacaagataacttgagttttatacacaatcagcaccacccaccatactggttttggctactggctacaatcccctctcttaggcaatttaagaaacgtccatctcctttcaaaatgtaaatgcacacacaaaaattcaagttttaaaga

SEQ ID NO: 594071 - DNA, 569 bp, Homo sapiens
ggctcccctaaaagtgaagactttctttatttgggggtagggtgggaacacacacacacacacacacacacacacacacacacacacacaaagatggaagtataactaataaatcaatccttgattctccaccctagccccaggacagaatttccctgtgggtctggtcattcttcctggcttctactgagctgcatcttagtggttcatttaggccatgacaccgtctgctggttccctggagagagtcagagggagaattagtgctyatgatatttcatcctaatatatggatacaacatcaatcacctgtaactagaactcaaccctagagctagtcagaagagaagtctatgttcaaagactttatttcccttaggatgacacatttgttaaatcaaaatactttatggccatggcatattgacaagagcaaggttacccttaattcatggtacattttaatagtgtttactgtctaaaccctaaatattagagttttgtttctattttcaagaggagaaaaagaacattgaacatgggaaaaattctcaatacatgaactgact

SEQ ID NO: 594072 - DNA, 569 bp, Homo sapiens
ggctcccctaaaagtgaagactttctttatttgggggtagggtgggaacacacacacacacacacacacacacacacacacacacacacaaagatggaagtataactaataaatcaatccttgattctccaccctagccccaggacagaatttccctgtgggtctggtcattcttcctggcttctactgagctgcatcttagtggttcatttaggccatgacaccgtctgctggttccctggagagagtcagagggagaattagtgcttatgatatttcatcctaatatatggatacaacatcaatcacctgtaactagaactcaaccctagagctagtcagaagagaagtctatgttcaaagactttatttcccttaggatgacacatttgttaaatcaaaatactttatggccatggcatattgacaagagcaaggttacccttaattcatggtacattttaatagtgtttactstctaaaccctaaatattagagttttgtttctattttcaagaggagaaaaagaacattgaacatgggaaaaattctcaatacatgaactgact

SEQ ID NO: 594073 - DNA, 584 bp, Homo sapiens
ttttctcctttccctgtctcactgtcctcagtcactcacttctgtttctgggtatgattttgcaaatcaactccaaagtcagataccctggcaatccaggttatctctcgtttcttgttactggggtccttctaccctataaaaaagccaattagctagaacctcaaaccatactccacttactatttctcctgtgttgcccacatcttggctaaaggaattactaagacaccacttgacttataaaactctgggagtgtggaagatcccaatcaaccaatcttgctctgcctccataacccwaccttagttttcatatccggcaattgtttcttcccagtccttgtaataaggctagaagtcttactccatgcatacattgaactagagagacttggaactaggggtgatacctggcacatgttaaggggaaggtaagggtgaagtgcaagtatacatagaaaatgatgggaaaccccactctccactcccacccaaactcctgtcccctgtattgttctcggaaaaaacagggccaaggggagaattcctgactcataattggaggctcatccagggaaaaa

SEQ ID NO: 594074 - DNA, 487 bp, Homo sapiens
  misc_feature 262, 358, 405, 406, 458, 465, 466, 467, 468, 469, 470, 471,472, 473, 474, 475, 476, 477, 478, 479, 480, 481, 482, 483,484, 485, 486, 487: n = A,T,C or G
actgtatacaatggactatgcttcatgcttctctgttcatctccagggtatctgtttggtgccagatcagtgtttcaggaaattagtagttactgagtttttctcatagtagttccaaaagtcagtttcgtgctacatgggtgactttaaagatgacatatgttaatttatataacattatccgagatgaaaatgtaaaagctgtgccttcaatgaaaggcatcaaaagtctgaaaaccagaagtttacttataaaatgtanatcttttaaaactggacttatctcccatggccccatggagtaatgagtgttgtaacttcaaagctaagtttytaaaacttgacacttgtgatattntgggccaggtagttctttgtgatgggagactgccctctgcactgtanngatgttagaagcatccctggcctctacccactagatgccatttagcatcctncatcaannnnnnnnnnnnnnnnnnnnnnn

SEQ ID NO: 594075 - DNA, 566 bp, Homo sapiens
tttcaactctgctgcaataatatagcattttaatacacaaagtgtttaaccaatactaaaacccttttaaatagtatgtggttttctaatatgccctagcaaagctggaactctagcatgagtgttcccaaagcttaacaaaacacaagcaatttgaattcaggattccatgatgtcattaacaaagatgtgactttgaaayggaaacagaatagtggggaagatttctgagaggagacttcaactgtaaaagtcattttaaatgaattctatttgtttcgttaataatcatgggatttgcattgatgttacattgcctttactttaaagcagtctccatggatctgctgacagcttcatgagctgattgtgacaacagtctatgtccaatgaaaagaaatgggcaagtagggagtacgtatttttataagtgaacataaagagaacaatgaatatgcaagttccctttctacctttgaaatatatatgcttagctttttgaaagaaaatttggtcattcagagccaattcaaggtatttaacgtccatctttgatagccatttag

SEQ ID NO: 594076 - DNA, 317 bp, Homo sapiens
tctttccaaacataatttcattcaatttttttattatctctgtcagttgggtgtctccattccccagmtgaggaaaccttaggaatgaagtggatttgttacccactcaaggtcacacaggaaggaagtgtggggctgggattcgtgtttcttacctccctgtctaaacacgtaaacgacaaattaggtgacccatgaagggacacctgagtggagtctcaaaggactctctgtgactgcaagttgtttatttactgaactcatggcttatttccactacagtgattttaatagggatttatgtctttgtgggaaga

SEQ ID NO: 594077 - DNA, 317 bp, Homo sapiens
tctttccaaacataatttcattcaatttttttattatctctgtcagttgggtgtctccattccccagctgaggaaaccttaggaatgaagtggatttgttacccactcaaggtcacacaggaaggaagtgtggggctgggattcgtgtttcttacctccctgtctaaacacgtaaaygacaaattaggtgacccatgaagggacacctgagtggagtctcaaaggactctctgtgactgcaagttgtttatttactgaactcatggcttatttccactacagtgattttaatagggatttatgtctttgtgggaaga

SEQ ID NO: 594078 - DNA, 629 bp, Homo sapiens
tttaaaattttttggtaatatgtcaatctttaattttttttatttgctgttaagtttaggaagrctttgtggctttgtgttctctgagtttgcacaaatatttaatcctatttttgagcagttcttaatgagtttctttggtaaattggattgatttttaaatccatgtgaatagcttaaaaaacgaattcaattcactaaagaaacacataaatatgtgacctggtctgatttgtacgtcacatatctaagcatacgatctgcaaatcagaccatactcagcattctggggtagataagaattgctctatatgttatgaccttattgcatatttgactttttattagtggatgttgaaacacaattaaggtaatattgtttagatacagatcattttaacatctttcatttgtttctgagaaaaaatgtgatatatccctgaaaggatttcctgtaaagcagctctaaccctctgcagtttagagtggttatctcagtgagtgacagaccattctctcttgcaaagtctcttgctttatctactgggattaccttgggaggaggtaaataattcctattgttcacaaacattacggtgtttctattggcatgatcttttcattctttc

SEQ ID NO: 594079 - DNA, 631 bp, Homo sapiens
gactctacacttgatgaggtatgtaagggtctagaagaatatatggaatcagaaatgttgctgtaacaatttctgggaaatatagtctgtcatcgtccccaaaaatatcaacggaaggactgatgctcctcaacccatgaatgctgaggtgatagcaaagggatgaagaatagtctttctgtcataatcttgatcacgcttggtgagcaactgctctttccctggggccatgatacctctcctagtgtctgactcctggccaatcacataaatctctatgtgctttttcagaatgtggtagtgcaatataaaactcagatgtcatgctaccgcttcagtcgctatgagtctcctcaataaatgctatctcagaggtctgtttgtaagcgagttggcaatttgcttttgttgctcaaagttggacttttctgccatataaaaatctaatttttaatgattgccattctaactggtgtgagatggtatctcattgtggtaataggaacacttttacactgttggtgggactgtaaactagttcaaccattgtggaagtcagtgtggtgattcctcagggatctagaactagaaataccatttgacccarccatcccaatactgggtatatacc

SEQ ID NO: 594080 - DNA, 535 bp, Homo sapiens
  misc_feature 471: n = A,T,C or G
atatgtaactaacctgcacaatgtgcacatgtaccctaaaacttaaagtataataaaaaaaataaaattttttttaaaaatctaatttttatttatttatagtcacattattgaactttttattacttgtaaaatgttttcagatgactcttttgggttttctaggtaacagatgatccaattgatgacagttttgctttcttactttttattgtctcatattggccaaaattcacaggaaaaatggtaaataagagtgctgatagaggaagtctttgtcttctcattactgtaagtgacaragctctgtgtttagccattaaagcatgatattgttagtgggtttgagatatactttcattataattttaaagaaacaccttcctagtccttacttgctaacagactttttttagaaagaaaatcacatcaaatcttctttttagcatctgcggagattattttcttctntaagcctttggtgtaaatgttttatattagtagatttccttacattaagtcattttggaataag

SEQ ID NO: 594081 - DNA, 389 bp, Homo sapiens
tcctggtggaatggcttgttgagatagtgctgaaaacgcttggttcgagttctttcccatcattaatggtgtgtagcacaagtgcataatgggcacggttggactcaatctattttatgcatccatgcctgacattacaagggacctagatactattattagaatatgtttcaaaccctctggtatacttttctatctcagtggattttaaacatctccagaattcttgaggggttcactgatgaacttccttggagcaaatgattgtaccttkgaacaagtccaataagttactttgtagattatagactgctgtgcagtggtggctgagcaagagaacttgaaatgggtttaaaggatacaagccagttggccccaaaatttcgttg

SEQ ID NO: 594082 - DNA, 336 bp, Homo sapiens
ccttaactcatgctgttccctgtgtcaggatctgccactacccacttttgtyacttattatttaagacgtaattcacagatagcctcctctgtgaaaactttcagtcccattcccacccatcctctagacagggctttcagagtgtttatatatcttctttctttcttttcttttcttttttttttttttttgagatggagtctcgctctgtctctcggctggagtacagtggcatgatctcagctcactgcaatctccgcctcccaggttcaagcgattctcctacctcagcctcccctagctggaattacaggcacatgccaccacgccaggct

SEQ ID NO: 594083 - DNA, 336 bp, Homo sapiens
ccttaactcatgctgttccctgtgtcaggatctgccactacccacttttgtcacttattatttaagaygtaattcacagatagcctcctctgtgaaaactttcagtcccattcccacccatcctctagacagggctttcagagtgtttatatatcttctttctttcttttcttttcttttttttttttttttgagatggagtctcgctctgtctctcggctggagtacagtggcatgatctcagctcactgcaatctccgcctcccaggttcaagcgattctcctacctcagcctcccctagctggaattacaggcacatgccaccacgccaggct

SEQ ID NO: 594084 - DNA, 582 bp, Homo sapiens
atgactttatgaattttccagacattgataataatgctacaaaagcaaagaaagaggttaagtatgtaagttataaaagagatttaaagagtttctctatttgtggtatattcctttaggattagtttcccaatagagaaaacaatggttaattggataaaatataaaactatgggcaagtaaatctgaacatgtcaagtatcaaatgctaactcaatgagcacactcttgtcttgttatgtaactgcttgaatatctcaaaaatacctgctstagggtaaattcttaatagataactatcctgagttttaaagtatccaatgataaccgataaatctgttacctatagggttacatgatttacttagtgcttctgagacaaatctcatactaacaagtattttatcactaacaatctcaccagtctcccagaatatcccacgcctgcatgggctactgtgggtatgactttgtaggaagttgagtgaattagaagtgatgttagctacccaagaaaggaaagagtcagtctgaggctgaacgagtttggaagcagcaatgaatattcaaaaaggaaaatat

SEQ ID NO: 594085 - DNA, 567 bp, Homo sapiens
cctattctatttcctatgaagagaaccaataacctctacattggtaaacccagtagccgatttccaatcacgtattacttgactagtaggcaacatttgagataattagtcccctactggaagtactttattcagttggcctctggtctatcacattatgctgcttttcctcctccttactggccactccctcttggtctctgttggtgttttttccctcatgcccctgatttctacatattggagtactatagggtttgactttttttttttttttcaatactgtcttgctgtgtcacccagtctggagtgcagkggtgcaatcttggctcactgcagcctctacctcccgggttcaagcaattctcctgtctcagccttttgagtacctgggattacaggtgcgcaccaccatggctgactaatttttgtatttttagtagaaacggggttttgccattttggccaggctagtcttgaactgctggcctgagatgatctgcccacttcggcctcccaaaatgctgggattacaggtgtgagccactgcacctggcccccagctgt

SEQ ID NO: 594086 - DNA, 463 bp, Homo sapiens
agacttccagccaacagccatgtgagcgagccatcttggaagtggatcctccagccccagtcaagccttcagatgactgcagctttggccaacatcttgactgcaacttcctgagagaccctgagcaagaatcacaccatgaagatgttcctagttttctgattctcagaaactgggtgagataatacatgtttgctggtttaagccactaagttttgggataatttgttatgcagcaatagataactaatacagattgtgtgtgtgtgtgtgtgtgtgtgtgtgtgtgtgtgtgtgtgtgtgtgtgtacaagatgaatatggcttctgcaatcatggagattraattctagtggagcataggaaggagtcagctgacaataccaatacagtgtggaaagtgctatgggaaagcacagggtgccatgggagaacatagaaggggctctgggtataactcgaaa

SEQ ID NO: 594087 - DNA, 566 bp, Homo sapiens
cgccaccagattgtgagaggcttcaagatcctctttttttctgactgtactttggccctgagacaagtgattgtaacatagtaggtgcttaaggagagaatcacatagagactttatttggattaggggttaacaaaagtttttctgaaggagtagcgtttaaaagatgaactttgccaagaagacaggcaccatctggatcagtctgcatgttttttttatccctcctttcagagtctggctggcgctaggtatttattacagagatagattggcaaagatatttgacagatggagagatgggctttggatgtgtctgttctcctgtggttgggcctaaacagctttctgtattagttaggattagagacagctgcatgtggaagaaaagacagtggttaaaacacaaggatttttcaaaaaatttaaatttttcttgtaaaagaaatgcagaggtaygtagcccaggaccagcatggtggtttcatggtcatcaaagatccaacaactttctttctacaccatcatccatattgtataactttcatgctcaaggtcacttcatg

SEQ ID NO: 594088 - DNA, 559 bp, Homo sapiens
  misc_feature 423: n = A,T,C or G
gagtgcagtggtgcgatctcggctcactgcaacctccgcctcctgggtttgagtgcttcttgtgcctcagcctcctgaggagctgggactacaggcacgtgacaccatgcccgactaatttttgtattttttgtagagacgaggtttcgccatgttggccaggctggtctcaaactcctggcctcaagcgatccacctgcctctgcctctcaaagtgttggagttacaggcatgagccacygtgcagggcctaagacgtcacttctcataagcagtctgctagcaccttaatctcagcatctactcaacaaaagtttattctggaagccaaaagagccacacacaggatgtataatagttaataaagagttaaatgaattcaaatgatggaactcaagacatttgtaggcatgttggttttcnatagcttaggttaaaactattgatagtttaaattatatagaaacataggttatgtttaacctatgtgtgtgtgtatgtgtctcttatataagaagagatacagcagaaatgtaaatcattagaatttttaaccttc

SEQ ID NO: 594089 - DNA, 464 bp, Homo sapiens
tacacacacattcagagaagactgaggaagcaggaaacatcttttctttttcaatgtgctttttttttgttgtttttttttttttggagatggagtcttactctgccacccaggctggagtgcagtggtgcgatttcggctcactgcaacctccaccgtctgggttcaagcgattcttctgcctcagcctccctactagctgggaaaacaggcacccaccaccatgcctggctaatttttttgtgtgtttttagtagagacggggttttaccatgttggccaggctgatctcgaactcctgacctcaggtgatccgcctgcctcagcctccaaaagtgctgggattaraggcatgagtcacttggctcaggccaaagtgcatatttttaaagtatacattgtggatttcaatttaagtcagagtctaaggtgaggttttgggaagctggaggagggacatgtgg

SEQ ID NO: 594090 - DNA, 497 bp, Homo sapiens
tagatagtgatatggttaggctttgtgtccccrcccaaatctcatcttgaattgtaatcaccataattcccacatgtcaagggagagactaggtggaggtaattgcatcactgggttggtttcccccatgctgttctcatgatagtgaattctcatgagatctaatggttttataagggcctcttcccccttccctgggtatttctccttcctgccgccttgtaaagaaggtgccttgcttccctttcaccttccgccatgattataagtttcctgaagcctccccagccatgtggaactgtgagtcaattaaacctcatatatatatatatatatatatatatatatatatatatatatatatatatcccagtctcaggcagttctttttagcagtgtgaaaatggactaatgcacatggatagatgaatacgtggatggatggatggatggatggatggatggatggatggaataaacacatatacagatagatg

SEQ ID NO: 594091 - DNA, 565 bp, Homo sapiens
ctttctgtaacttcaagatggcataaaagcgtcaagcaatcctccactgatagccttgataggctgtttccatacctctactattgtgaatagtgctgygataaacatgtatctttttcatataatgattactttttctctgggtagatacccagtagtgggactgctaggtcaaatggtagttctatttttagtgctttgagaaatctccatactgttttacatagaggtcatgttaatttacattatgaccaacagcatataagtggtccctatgtacataatggagtattattcagccataaacaagaatgcaatcatgtcttttgcagcaacatggatggaatggaggccattatcttaattgaaatgacgctgacacaaaaagacaaatgccacatattctcatttataattgggaactaaataatgtgtacacatgtacatagaatgtagaataattgacaataaacacttggaagggtgggagggtcagagggtgggagagtgggagtaaagagaaattacttaatgggtacaatatatattattttggtgaatgccc

SEQ ID NO: 594092 - DNA, 565 bp, Homo sapiens
tccattagtgtctaatgtatcactccatttataatttgtatggactccctcttaactttcttaagaatgaatgttctcaacaattttgctacaggtagttatccaggcatgagtgtggcgggagagtgcttcccatcaggaatgtcaggcaaccatcaggtgatggttgggcagtgatcacaatgcctctcttaaaatgataattggcagccagcgccccgccatggagagaccatttcctgataattcacagttgtcacactaaagtgataattgatcgcaggccccagggataggcaatttrccaaacagttgagattggtaatctgcagcttccaataaaatctcaggagttgggagtgagtttgggcattctccttaggagacaaaatggcagaatatgaccttctgggggcattccactggaaaagggaagaaagcctcaggtgggcatgcccacaacttcctaaacacactgcacatgctcacctcccaaggcaagtatgtgcgtggctcacccttaaggaagaatgagggaaaaggggtgcaagatgccagaaacagg

SEQ ID NO: 594093 - DNA, 459 bp, Homo sapiens
caaaacctaaggataatgttactgattttcttcctgttttacttaggtaggtaaagacatrtggacacctttcttttacagtgtttaattttgataaattgctcttttctcagaatcagcattgatggggaaaatatattatccttatgacctttaaaagagctgtatctttactcaccattggtgagctacgaaaacgatttctccagggattcatgctcaaggtatattcatgtatatgcatgtgtctgtgtgtatatacatgtatatgtacatatatttgcatatatatacacatgcatttataattatatagacatgcatatctatgcacatttcaaaccatgtatgtgagtattccttcaagaaaaaaaacagtattaaattaaacttctctgcgttttaggttgttacaatatacactgcaacactctatattgataacacgttttgacttaa

SEQ ID NO: 594094 - DNA, 459 bp, Homo sapiens
caaaacctaaggataatgttactgattttcttcctgttttacttaggtaggtaaagacatatggacacctttcttttacagtgtttaattttgataamttgctcttttctcagaatcagcattgatggggaaaatatattatccttatgacctttaaaagagctgtatctttactcaccattggtgagctacgaaaacgatttctccagggattcatgctcaaggtatattcatgtatatgcatgtgtctgtgtgtatatacatgtatatgtacatatatttgcatatatatacacatgcatttataattatatagacatgcatatctatgcacatttcaaaccatgtatgtgagtattccttcaagaaaaaaaacagtattaaattaaacttctctgcgttttaggttgttacaatatacactgcaacactctatattgataacacgttttgacttaa

SEQ ID NO: 594095 - DNA, 459 bp, Homo sapiens
caaaacctaaggataatgttactgattttcttcctgttttacttaggtaggtaaagacatatggacacctttcttttacagtgtttaattttgataaattgctcttttctcagaatcagcattgatggggaaaatatattatccttatgacctttaaaagagctgtatctttactcaccattggtgagctaygaaaacgatttctccagggattcatgctcaaggtatattcatgtatatgcatgtgtctgtgtgtatatacatgtatatgtacatatatttgcatatatatacacatgcatttataattatatagacatgcatatctatgcacatttcaaaccatgtatgtgagtattccttcaagaaaaaaaacagtattaaattaaacttctctgcgttttaggttgttacaatatacactgcaacactctatattgataacacgttttgacttaa

SEQ ID NO: 594096 - DNA, 459 bp, Homo sapiens
caaaacctaaggataatgttactgattttcttcctgttttacttaggtaggtaaagacatatggacacctttcttttacagtgtttaattttgataaattgctcttttctcagaatcagcattgatggggaaaatatattatccttatgacctttaaaagagctgtatctttactcaccattggtgagctacgaaaacgatttctccagggattcatgctcaaggtatattcatgtatatgcatgtgtctgtgtgtatatacatgtatatgtacatatatttgcatatatatacacatgcatttataattatatagacatgcatatctatgcacatttcaaaccatgtatgtgagtattccttcaagaaaaaaaacagtattaaattaaacttctctgcgttttaggttgttacaatatacactgcaacwctctatattgataacacgttttgacttaa

SEQ ID NO: 594097 - DNA, 555 bp, Homo sapiens
ccaaaaaccgctacaaagtgtccattcgtagattctaccaaaagagtgtttttaaaatgccaaatgaaaagtaaggttgaactctgtgagatgaatccacacatcacaaagcagtttcacaagtagcttgtttttaattttgagatattcggtttttcaccgtagtccgtaaagtgctcccaaatgtctcttggaagattctaccaagaaagtatttccaacctgttgaatcaaaagataggtttaactcagtgagatgaattcacatatcacaaaacagtttcacagatagattccttcaagtttttatckgattatattgggttcttcaacttaggtctctatgggctcccaaatacctctctgcaggttctacaaaacgagtgtttccaagctgctgaatcaaaagaaatgtttaactctgtgagatgtatccacatatcacaaagaggtttcactgatagcttcttcctagtatttatattaagatatttaattttttaacataggcctctgtaggcttccatatgtcccttcacagattcttccaaaaaa

SEQ ID NO: 594098 - DNA, 589 bp, Homo sapiens
gctgaatcaaaggaaagttttatctctgtgagatgaatccacacatccaaaaagcagtttcccaaatagcttctttctgatttgtatctgggggtattttgtttttcacaacatttctgaaattgttctcaaatgtaccttcacagattctataaaatgagtgcttgcaaactgctgaatcaaaagaaaggtttacctttctgatttaaatccagatatcattaagcagtttcacagatagcttctttctagtttttatacttttttttttttttttttttttttaccataggcctctaagggctccaaaatattccttgaaagattctaccataacagtgtttccaattttcagaatccagagaaatttttaattctgtgaaacgaatccacacatcacaaggcagtttcacaggcagcttctttctagtttttttctagaaatatttggtttttcaccataaacctcaatgggcttccaaatgtcccttcgcatatcctaccgaaaragggtttcacatccactgaatcaaaacaaacatttaattctgtgaggtgaatccacacattacacaacagtttcacagac

SEQ ID NO: 594099 - DNA, 607 bp, Homo sapiens
aattcaatctgagaatcaaaaacaactgtttgaaagagtatgtattatactgttgatgatatcacagtgggaaggcaggttccaatcataaataatatatgtaaaaaactgtggaagctttaacaaaaacaacattaatttaggtgtctgtttttgaatgaaaggataaaatacataggctagccagcatagcaggtaggacattttgaaaagggaggtaaatttaaactaaaaccagaaagattatatgacctatatataaaaaggaaatatgtactttttagtttcctctaaaaaagatgtgaccatacaatagcaaagactkggaaccaacccaaatgtccaacaatgatagactggagtaagaaaacatggcacatacacaccatggaatgctatgcagccataaaaagtgatgagttcatgtcctttgtagcgacatggatgaagctggaaaccatcattcccagcaaactatcacaaggacaaaaaaccaaacaccacatattctcactcataggtgggaattgaacaatgagaacacatggacacaggaaggggaacatcacacactgaggactgttgtggggtggggggaggagggagg

SEQ ID NO: 594100 - DNA, 520 bp, Homo sapiens
tgccacaacgcccagctaatttttgtatttttagtagacagggtttcaccatgttggccaggctggtcttgaactcctgacctctggtgatccgcctgcctcagcctcccaaagtgctgggattgcagacttgagccaccacacccagcctaaaataaaatatttcttaatcaaattttacttaagtttatcttctctcaggctcctgaaattcaagctaccctcagtctgagtcaacatacaaccccattttatgtccctcctaagaacatgctgatttcagggtaagccattctctgatctaaaatctgactttttcaccctccatttgctgttcctctcccacctcctttctaatcttgtttgctcttccctagaaaagaaagcccttttctgcctatatttttgcaagccataaagatattatagttatttggtgcttccttttgttgcaatacytttttggaattggttttttacctgcctcttgagaatatgcctttaagggtgtcagtaccac

SEQ ID NO: 594101 - DNA, 603 bp, Homo sapiens
ctacaggtgcctgctaccacgcctgactaatttttgtatttttagtagagacagggtttcaccatgttagccaggatggtttcaatctcctgagctcatgatccgcccgctttggactcccaaaatgctgggattacaggcatgagccaccacgctgggccggataccagtcctttatcacgttttgcaaatattttatccgtcagtagtttatttttctcattctcttaacagtgtctttcacagagcagaaattttctaatacacctagattttcttttatgttatgtttcacakattttatagtttccaccttaacattaggtttagacctcttcgagtttttattaattatttattttgtgaaagttaccagtaagtgtctaagttcttttctttgtataaggatgtcaattgttccatcaactatccttattaattgaaatatcttggattctttgtcaaagatcagttggactatgtttgtatgagtggatctatttctgggctttctattctttcctgctgattgatttattttttaccatggtattattttgccatatcacacactattggtattggtaagataccattttatta

SEQ ID NO: 594102 - DNA, 595 bp, Homo sapiens
tgagctacctaacatgattacaggcagtaaaataagtattttcatgataatactatgataattattttgtgcttattattagaaatcacatagcttctgatcagatctgcaacttcaatgttattttagaagttaaaatgcagacaaatttcaaagaataaatattaatattaaatattaaaataggttttatgtgaatatgagaaaaattgtggcactggtatatttcaatagcaacaacatgagaaaactcaagggtccatatgttacctgtagttgttattatctgtgagttttagctcacagataattaaaaaaaaaaaaaaagacaatatgctgaagtcaatttcagaaccaagagtagaacccaggactcaaattatactgggatattgagcttctaactactataaatcttgactttctcatctagaaaagaaactgattggactaaactgggtagtcgctcctgtgcctgtaactccaaaaataagaaccaaataatagtattcaatggtgttcatgggtactttaaagagccatttatttsttgcattgttatgtttttttctctgcaatttctgtattcattctc

SEQ ID NO: 594103 - DNA, 453 bp, Homo sapiens
taccagttgggctggtcttgaaactcctgcgtggtatatgcaggcatttgtggtggtagtgaaacgctgggtaggtatgtccttgaatccctgggtggggcatatgggtgccagcaatggtggcagtgacctaggacagcctgcttgaggtagagtgttttaacagaaatatattactgcatgtagtatgacatgttaaaatgtgaattctagccaggcgcggtggctcatgcctataatcccagcactttgggaggccgaggcaggcagatcacaaggtcaggagttcaaaaccagcctggccaacatggtgaaaccccgtctctactaaaaaaatacaaaaattagccaggcatgtgacatgcacctgtaatcccasctacttgagaggctgaggctggagaatccttgaacccaggaggtggaggttgcaatgagccaagatcacaccac

SEQ ID NO: 594104 - DNA, 541 bp, Homo sapiens
  misc_feature 235, 236, 237, 238, 239, 240, 241, 242, 243, 244, 245, 246,247, 248, 249, 250, 251, 252, 253, 254, 255, 256, 257, 258,259, 260, 261, 262, 263, 264, 265, 266, 267, 268, 269, 270,271, 272, 273, 274, 275, 276, 277, 278, 279, 280, 281: n = A,T,C or G
  misc_feature 282, 283, 284, 285, 286, 287, 288, 289, 290, 291, 292, 293,294, 295, 296, 297, 298, 299, 300, 301, 302, 303, 304, 305,306, 307, 308, 309, 310, 311, 312, 313, 314, 315, 316, 317,318, 319, 320, 321, 322, 323, 324, 325, 326, 327, 328: n = A,T,C or G
  misc_feature 329, 330, 331, 332, 333, 334: n = A,T,C or G
ccacctgaatgaaagcttgccttctgaaaagggtgctcctcaatmttgggctttagcaaagtttcacaattccctcactggatctcaaagctctcttaaaggcacttatttttgagataaggtctcactacataacccaggttggtcttaaagttttggcctgcagcattctccacctttctataccatgtagcttgtcattacagatgttaacccatgatgtctgattctctcnnnnnnnnnnnnnnnnnnnnnnnnnnnnnnnnnnnnnnnnnnnnnnnnnnnnnnnnnnnnnnnnnnnnnnnnnnnnnnnnnnnnnnnnnnnnnnnnnnnnaagagtgtaattgctttatatctatctatctcatagaatctttgtcttttttatggctgactcatttcattttgcataatgttatcaagatttatctttataattgctttataatttctgcttttgaaaactgagtgatattccagtatttttatatttcaaattatatttactgaatgatttggtaacaaatttgcattgccttta

SEQ ID NO: 594105 - DNA, 541 bp, Homo sapiens
  misc_feature 235, 236, 237, 238, 239, 240, 241, 242, 243, 244, 245, 246,247, 248, 249, 250, 251, 252, 253, 254, 255, 256, 257, 258,259, 260, 261, 262, 263, 264, 265, 266, 267, 268, 269, 270,271, 272, 273, 274, 275, 276, 277, 278, 279, 280, 281: n = A,T,C or G
  misc_feature 282, 283, 284, 285, 286, 287, 288, 289, 290, 291, 292, 293,294, 295, 296, 297, 298, 299, 300, 301, 302, 303, 304, 305,306, 307, 308, 309, 310, 311, 312, 313, 314, 315, 316, 317,318, 319, 320, 321, 322, 323, 324, 325, 326, 327, 328: n = A,T,C or G
  misc_feature 329, 330, 331, 332, 333, 334: n = A,T,C or G
ccacctgaatgaaagcttgccttctgaaaagggtgctcctcaatcttgggctttagcaaagtttcacaattccctcactggatctcaaagctctcttaaaggcacttatttttgagatraggtctcactacataacccaggttggtcttaaagttttggcctgcagcattctccacctttctataccatgtagcttgtcattacagatgttaacccatgatgtctgattctctcnnnnnnnnnnnnnnnnnnnnnnnnnnnnnnnnnnnnnnnnnnnnnnnnnnnnnnnnnnnnnnnnnnnnnnnnnnnnnnnnnnnnnnnnnnnnnnnnnnnnaagagtgtaattgctttatatctatctatctcatagaatctttgtcttttttatggctgactcatttcattttgcataatgttatcaagatttatctttataattgctttataatttctgcttttgaaaactgagtgatattccagtatttttatatttcaaattatatttactgaatgatttggtaacaaatttgcattgccttta

SEQ ID NO: 594106 - DNA, 583 bp, Homo sapiens
aggtttatgagatatatccaggttgtgtgatttagtagttcatttttttctatggctgggtggtattctcttgtatgaatgagatataatttgttcatctatatttctagcgatggatatttaggctgttccctgctttaagctattatgactaaaagctctataaacattcttgtacaaatactttttggtatataattaaattcctttaatagcatttaagtgacacctccttacatttcttagtggtttctccagggataactatatgcatttgtaacatatcacaatctacytagagtttatactgtactattttaataaatgtaaaatatgaaaaccttgctgttgaagagttacaattacttccttctattgtttgtgctattcatatattttacatctacacatatatctcacaatactgtgttataatttttccttagtcataagtcttataaagaaattgagaggaaatagtatttataaatatttggaggtagatactttggggctattactttggggctatttataaatatttgaggcagatactttggggctaacagaaacactgtttctc

SEQ ID NO: 594107 - DNA, 417 bp, Homo sapiens
ccaggtgaatatactttaacrtgcctgaaatccacagcttttttttttgacagagggtctcactttgtcacccaaactggtgtgtagtggcaaaattatggctcacttcagcctcaaactcccaggataaagtactccttttcccttgatctcccaggttgctggaaccacaggtgcacaccaccatggcttgttattttaaaatttttttggatacagcaggtctttatatgtttcccaggctgatctcaaacatttgggctcaggtgatccttctgttttgacctctcgaatttctgggatcacagaggtgagccactaccatgcctggccataaaatgtacacttaaatagattttagagaatcaattttatgttatctgtttttacaaaaattattttagaagaaaaactaaa

SEQ ID NO: 594108 - DNA, 405 bp, Homo sapiens
gtgaatatactttaacatgcctgaaatccacagcttttttttttgacagagggtctcactttgtcacccaaactggtgtgtagtggcaaaattatggctcacttcagcctcaaactcccaggataaagtactccttttcccttgatctcccaggttgctggaaccacaggtgcacaccaccatggcttgttattttaaaatttttttggatacagcakgtctttatatgtttcccaggctgatctcaaacatttgggctcaggtgatccttctgttttgacctctcgaatttctgggatcacagaggtgagccactaccatgcctggccataaaatgtacacttaaatagattttagagaatcaattttatgttatctgtttttacaaaaattattttagaagaa

SEQ ID NO: 594109 - DNA, 405 bp, Homo sapiens
gtgaatatactttaacatgcctgaaatccacagcttttttttttgacagagggtctcactttgtcacccaaactggtgtgtagtggcaaaattatggctcacttcagcctcaaactcccaggataaagtactccttttcccttgatctcccaggttgctggaaccacaggtgcacaccaccatggcttgttattttaaaatttttttggatacagcaggtctttatatgtttcccaggctgatctcaaacatttgggctcargtgatccttctgttttgacctctcgaatttctgggatcacagaggtgagccactaccatgcctggccataaaatgtacacttaaatagattttagagaatcaattttatgttatctgtttttacaaaaattattttagaagaa

SEQ ID NO: 594110 - DNA, 544 bp, Homo sapiens
ccactcggaacgattccattccattccattccattccattccattccattccattccattccatttcgttccattccattctattccgtatcattccattccattccattccattccattccattccattccattccattgtactcgggttgattccattccattgcattccattccattccattccgttgcattccattccattacattcggattgattctattcaactcccttwctctccattacattccattccattcgggttgttccattccattccattcctttccactccattccattgcactcgggttgattccattccattccattccattccattccattccggatgattccattccattgcattccgttccattacattcccctgcactcgcgttgattccattccattccattccattcaattccattccattacaattcgttccattccattctattccgtaccattccattccattccataccattccattccattccattccattccgttccattccgttccattccatt

SEQ ID NO: 594111 - DNA, 544 bp, Homo sapiens
ccactcggaacgattccattccattccattccattccattccattccattccattccattccatttcgttccattccattctattccgtatcattccattccattccattccattccattccattccattccattccattgtactcgggttgattccattccattgcattccattccattccattccgttgcattccattccattacattcggattgattctattcaactcccttactctmcattacattccattccattcgggttgttccattccattccattcctttccactccattccattgcactcgggttgattccattccattccattccattccattccattccggatgattccattccattgcattccgttccattacattcccctgcactcgcgttgattccattccattccattccattcaattccattccattacaattcgttccattccattctattccgtaccattccattccattccataccattccattccattccattccattccgttccattccgttccattccatt

SEQ ID NO: 594112 - DNA, 544 bp, Homo sapiens
ccactcggaacgattccattccattccattccattccattccattccattccattccattccatttcgttccattccattctattccgtatcattccattccattccattccattccattccattccattccattccattgtactcgggttgattccattccattgcattccattccattccattccgttgcattccattccattacattcggattgattctattcaactcccttactctccattacattccattccattcgggttgttccattccattccattccwttccactccattccattgcactcgggttgattccattccattccattccattccattccattccggatgattccattccattgcattccgttccattacattcccctgcactcgcgttgattccattccattccattccattcaattccattccattacaattcgttccattccattctattccgtaccattccattccattccataccattccattccattccattccattccgttccattccgttccattccatt

SEQ ID NO: 594113 - DNA, 546 bp, Homo sapiens
ggttgcaataagccgagatcatgccactgtactccagcctgggtgacagagtgagactctgtcttaaaaaaaaaaacaaagaaagtaagttatgttaatagggattgaatttactttaacttattcattagaaaggaacttaaatattaggaacaagttatttgggacacagttttatagcttctagactgagaaacgttactcttraaagcatattgctttgggaatgatagtaagaggagtaaagaataaaagcatattgcttacccacttttaaaattatttatttatttattagagatggggtctcactgtgttgcccaggctggtctcaaactaccaggcccaagcactactcccacctctgcctcctgagtagctgtgattataggcgcttgccactgtgcctggctttctcaagttgatcagtgaagacagagtttttggttttttttttggtatctttcaaagtatggcattgagaaactcatttgtaatggttgcggaaaaggaatttttaaaaaaggaagctaagaaataataaat

SEQ ID NO: 594114 - DNA, 513 bp, Homo sapiens
ttttttttttttaaatatttttgatctgaggttggttgaatctgtggatgcagaacccatggatatgagggctgactgttggaattgggtagtataaatcctggatactatttttttttttttttcaaaattattttgggtatccaagtcctttgaatttccacatagattttaggataagcttgtcaatgtttacagaaaaagcttgctaggattttgatagggatttcattgaatctgtaggtcaattcgggagaattcccatcttaatgatactgagacttctgatacatgaacatggaacttctctccatttatttarattttctctagctgctctttagcagtattttgtactttacactgtataggctattgtaaatgaaattgttttcttgattttactttcagattgtttattgctagcataaacaattgtaaaaatacaattttttaaaattgtggtaaagtttactaacaataaacttttttttttttttttttggagacata

SEQ ID NO: 594115 - DNA, 513 bp, Homo sapiens
ttttttttttttaaatatttttgatctgaggttggttgaatctgtggatgcagaacccatggatatgagggctgactgttggaattgggtagtataaatcctggatactatttttttttttttttcaaaattattttgggtatccaagtcctttgaatttccacatagattttaggataagcttgtcaatgtttacagaaaaagcttgctaggattttgatagggatttcattgaatctgtaggtcaattcgggagaattcccatcttaatgatactgagacttctgatacatgaacatggaacttctctccatttatttagattttctctagctgctctttagcagtattttgtactttacactgtataggctattgtaaatgaaattgttttcttgattttactttcarattgtttattgctagcataaacaattgtaaaaatacaattttttaaaattgtggtaaagtttactaacaataaacttttttttttttttttttggagacata

SEQ ID NO: 594116 - DNA, 621 bp, Homo sapiens
gtctattgtgaagaacattttccatgatgaattaggaatatctttattcccttttacagtcctgcttaacaaagtttcttattgtaagrccaaagttataaccaagaaggttttgtaaaagaagaacattaagaacaaaaaagttagagaaatcaaataaatcagtaaaaagaagaacctacaacccaatacaaatggataatggaaatttacagtaacaggaaaataactaataaacttttaaggtgttcaaactcattcacagttaaatagttaaaataggatactaatttttgcctaaccaattggcaattgatgtttattgataaccatgatgtagagaaattagactcctatactctactggtaagcatatacatcagtattactttttaggagtaatttggtaatatctttcaaaatgtaccggtaccatgctgttttggttactgtagccttgtagtatagtttgaagtcaggtagcatgatacctccagctttgttcttttggcttaggattgacttggcaatgcagtctcttttttggttccatatgaactttaaagtagtttttccaattctgtgaggaaagtcattggtagcttgatggggatggcattg

SEQ ID NO: 594117 - DNA, 621 bp, Homo sapiens
gtctattgtgaagaacattttccatgatgaattaggaatatctttattcccttttacagtcctgcttaacaaagtttcttattgtaaggccaaagttataaccaagaaggttttgtaaaagaagaacattaagaacaaaaaagttagagaaatcaaataaatcagtaaaaagaagaacctacaacccaatacaaatggataatggaaatttacagtaacaggaaaataactaataaacttttaaggtgttcaaactcattcacagttaaatagttaaaataggatactaatttttgcctaaccaattggcaattgatgtttattgataaccatgatgtagagaaattagactcctatactctactggtaagcatatacatcagtattactttttaggagtaatttggtaatatctttcaaaatgtaccggtaccatgctgttttggttactgtagccttgtagtatagtttgaagtcaggtagcatgatrcctccagctttgttcttttggcttaggattgacttggcaatgcagtctcttttttggttccatatgaactttaaagtagtttttccaattctgtgaggaaagtcattggtagcttgatggggatggcattg

SEQ ID NO: 594118 - DNA, 528 bp, Homo sapiens
gcccttgtgggttcattaacgaattccatgacacatttaaggaagaaaatatactaatcctctacaatctcttccagaagaagaggcaatacttcctaactcattctatgaagccagcattatcctaatacccacaccagacaaaagcatcacaagagaagaaaactacagaccaagattcccatcaacatagatgtaaatatcctcaactaaagattagaaaatagaatttaacgatgtatttaaggagttatgtaccatgaccaaataggatttatcccaggtatgcaggctactttaatatccaaaatcaattaatataatttaccacagtaacaggttaaaaaagaaaaatcacatgatcgcatcaataaatgcaaaagaacatttgacaaaatccaacactcactcatgataaaaattctcattaaactgggaatagagagaaaagccctcaacttgataaggaatttctgcaaaaamaaacagctaatatactgagtggtgggaaatttaaagtttccacta

SEQ ID NO: 594119 - DNA, 562 bp, Homo sapiens
ttactctgtcccaggctggagtgcagtggtgtgttcgtaagttactataccctcaaactcctgggctcaagcactccttccacctcgagccttctgagtagctggaatcwcaggcatgagctaccatgcctggccaacttagtttttctagaaagaatttttccaagctgtaatgagactacctcttttaacatatgacacctaaaccatgttatctccaacataaggataattagtcaacctaagtaatctagtgctttttcatgtgatgcaatggtcttgaagagttttaataaaggcgccttgggtggcagcggtgccccaactcagaggtacgaatgtttttatttatgccttggacttttaatttgtattattttgcccttaaccttgataaaattgctcttctacttttctgttcatctgcacagactgtacactctcactatattctagtctttcttcttggtgccttaggtcctagtatttaagttcatacactggctctaaggcattctgtgggttagtctggacatcagaaaaccctccatcctccaataaa

SEQ ID NO: 594120 - DNA, 572 bp, Homo sapiens
aagacacttgcagattttctattttagtaaaataaagattatgttcaaagaggcatctagattttgcagcaacctttaaaagattaaattctcctaatgagcaccttggcctgtgttgtggattgaattgcatcttcacaaattattgcgctgaagtcctaaccactagtacctcagaaagtgatcttatttagaaatagggtcattgcagatacaaatagatgagatgaggtcatactggagtaagatgggccccaatccaatatcactggtatactcataaaaaggaaaagtttggacacagaarcacagggagaatgtcatgtgaaggtaaaggcagagattaggtgatgcttctacacgtcaagaaacactaaaatccccactgaatcaccagaggcatggaactgatgatttcacagccctcagaaggaaccaaccctgttgagatcttaatcccagatttctagcttatagaattgtgggacaataactatctgctgtttaagtgactcagtatagggtacttcattatggccacctgaaaatatggttgtctttggctgcccata

SEQ ID NO: 594121 - DNA, 614 bp, Homo sapiens
aaaactgccaagtttcctttatctctctttgtagatagacacatatttcttttttgtcaaatcatctgaaagtatatttcaaccatggtgaaacctcacctctgaaaacttcagtatgcatctagcaaaamcaggaacatcttccaacaaacaccgagctatcatctatctaagaaatcaatactacttatgtaatactacacagtatgtagtccatactatataccaaatttccccgcttttccaaaatgttttatatagatgagttttcccccttttcacataggatccaaccgaggttcacacattgtaattgttatgtctctgtagtgtccttagaatgctcctctttccctcagcaggctcactctgtcctttgtgactttgaatgctttaaataggccaggtcagttgtcctgaaggatgtcccatatactagattcttctgtttatttagggtttagtacaaaaatatccagcaagaacactttcaggctcatttgtttctgtttgtattctatgtttttatttttggcataattttatattttgaacatgtagaatatttacatgcttcaaaaatcaaaactggtggcacagcttgattggcctgg

SEQ ID NO: 594122 - DNA, 629 bp, Homo sapiens
tacctttctcatcaggccatatggggacatgctatcaacatgacttaacgactagtgatgttaactgtgctcagttggttaaggtagtacttgctagagtttcccactaaaaaaatattgtttttctttttccatattctattcgttggaagtgattgagtcactatgtacagttcatgctaaaaagggggtggagggttaagctccacttcttgcagggagtgtaacaccttgcttttccacttttcagtatatcttgcaaascactctacatcatattctttgtcctctttactttttatgtctattagagtagttgcttggttggatataccataatttattcaaccagtgccccacggatgaacatttaggcttttcccaatagtattaaattataacattagttataaatattaaattgtaatagatgacttttatcaaattaaataaggtctcttctcttcttggcatgctgagaattcttaatgaggttgtgctgaactttatccaatgcttttctgtatctacggagatattattacttaatcccttttttaatataataaatgacattgattcattcaactttacattcctgatacaaaatgtatttagtcataatgtat

SEQ ID NO: 594123 - DNA, 490 bp, Homo sapiens
tctctctctcactacacctgttttgacatcattgtgatttccagcacttttgtgtcttaccattacctatttctcagcatcaaatagtttcacttaccattttctttaacttaagccctgatttttcttcttttaaacaccctcatacctactcttccatgtctttttgcatgctcctkattggattaatacaatcattcacctttatgatcctgtatctgctctgctgaaggctaactagcatcggtcagtactttgtatcaatttatgttcctagattttgcctcactaacttttaattttaactagtcaacttgaattttaccatactatgctaatagtatatagttagattctaaacctaggagaggcacagtctgtgttttcaatttctcagggaagacttttttctttcttttctttttttatttacagctgagacagaaacaaacttcttcatttttcctctgtaggaaaacatattctcccc

SEQ ID NO: 594124 - DNA, 532 bp, Homo sapiens
  misc_feature 497, 498, 499, 500, 501, 502, 503, 504, 505, 506, 507, 508,509, 510, 511, 512, 513, 514, 515, 516, 517, 518, 519, 520,521, 522, 523, 524, 525, 526, 527, 528, 529, 530, 531, 532: n = A,T,C or G
cctgatttttcttcttttaaacaccctcatacctactcttccatgtctttttgcatgctccttattggattaatacaatcattcacctttatgatcctgtatctgctctgctgaaggctaactagcatcggtcagtactttgtatcaatttatgttcctagattttgcctcactaacttttaattttaactagtcaacttgaattttaccatactatgctaatagtatatagttagattctaaacctaggagaggcacagtctgtgttttcaatttctcagggaagacttttytctttcttttctttttttatttacagctgagacagaaacaaacttcttcatttttcctctgtaggaaaacatattctccccccaccccgtcccccaagatcttcttttactggtagtccagtcctttgaggcatctcgtaattaaggctgccacttctaattttatgcaatttttagtactaaggcttcaaaatatttgcatgnnnnnnnnnnnnnnnnnnnnnnnnnnnnnnnnnnnn

SEQ ID NO: 594125 - DNA, 555 bp, Homo sapiens
tttctacattaatgaatttaaattataaagaaggtgttgagctgccactctccaactccatatatcactgaactaaagaaaaaaaataatcttgactggcaacaagagacatatcagtgaaatgtaaccccaaaattcttgactctaaggattgctaaacagtgaatggtagcaaatctacttagtaagtaataaagaataaaaccactgggcttttataccatataattcagcttcaagggtggtagctagactctatttctttatttattggccacaattattgaacctctacgatgtgtcactgtgtgtgtcagaaaaaaagacggcatgggcacttcctcaggctcctccccaggcctaggacatcttctgcacccgtgatttattttttattttttatttttatttatttatttattttgagatggagtcttgctctgtcgcccaggctggagtgcagtggcgctcggcttgctgcaacstccgcctcctgggtaagcgccattctcctgcctcagcctcccgagtagctgggactacaggcgcctgcca

SEQ ID NO: 594126 - DNA, 517 bp, Homo sapiens
gccagtccagccaaagcccaaggtgccactaggctgcaggccccactgtgtggcagtcagttaggggcagaggcatgccgccaggctaccgcagacaggtacgtgcaaatctgctagtcctctgggtctaagctagaccagagctgtggctggatcctcataactgcagaggtccggagggtgcaggagagaggaacacaatcaatgagctgagggacagcgatatcacagtccccacacctttgacaaaggagacatcactcatagacagcaagtggctgaagctgggtccctgtttgccacccccgggctaatgcaccgggggccttktagtgtgtgctggtggctgggcacagccattaaacaggtgtgcttaaactcttaatgagctcaacatatgctaataagctagaggctcaggtgtatgtaatgggtcagtggttgaggggtatgctaataggtcagagactcaaatccatgccacagagctttctttaccaagtggctggcacccagc

SEQ ID NO: 594127 - DNA, 306 bp, Homo sapiens
ggtggcacatacctgagctacttgtgaggctgaagtgggaggatcacttgagcctgggaggttgaggctgcagcgaaccatgtttgcccmactgtactgcaatctgggcaacagagtgagaccctgtctcataaaaaattattattgtggcatatttgtttcataaatctaaagtattttaaaacattatggaaaccatgatatttcacccccaaatatttcaaaatgcatccctgaaaaaccagggtattttactataacccacaattttattatcataccttatgaaagtaacaattattcctt

SEQ ID NO: 594128 - DNA, 558 bp, Homo sapiens
aaaggtaaattttctgtaatgatatgtcacctatttgttctacgttttataaccaagtctattgaatatatttttttcttgatgctcaaactgtccaaactgctcctcctatagtctttcccatttcatttatcagcaataccatacttatcattgcccagcaaaaaatttggagtcatccttctctcctccgtatctctcaatccccaaatctattccaagagtaaatcctgttggatctacctctatcatatacccagaatctgaccagtttttacagactacactctttgcattcaggggagtcctctgtcatctcctgcctggattgttgcaataacctcccaactggtctccctgcttctaccattgcccccsacctccctgaccagtctgttcacaacatggtagagaaaatgatcccggccaaaaggagttagttcatgctactcctctgctcaaaaccctgcaatgccttctttcctttctcaagaatagaagccagagtccttagaatattcaatattggtattaaattacatgtttctggtaaattgc

SEQ ID NO: 594129 - DNA, 568 bp, Homo sapiens
gtatatacagaagtacacaaacaataagtgcatagcttgaggaatttctcaaaactcaacatacccatgtaaacagcatctggatcaagacacagtattaacactacagaagccccctcctactcccctccagtttctatccctccatccccaacagacaaccatcactgcagcttctaacaccacagattcatgttgcctgcctttcaacttcacattagaggaattttacatatgcacacatttgtgtctgtctcttcccacaacgttatgtttctatgagtcatctatgctattgtgtatagctgtaggacactcattctcattccattatgtgtgtataccacaatttatttacctttctactgttacaggttcttggatagattccagttgggggatctgatgaattacgttgctgtgaacatgcttgtacataccgtttggtgaaaagtgtttatgactttttgacaaacattctctaggaagttytgctcattccctagtcagaattatgtgtgtcctacttgttgttctcaaagtgagcacttactggagcgtcaagctt

SEQ ID NO: 594130 - DNA, 590 bp, Homo sapiens
gccacaaagattatgaacaaagaagtaaaactcactatagacaatgtaattgtttacataaacaattatgtaagctaaggaggcagatagccaacaaataacaataataattaataataattatttaggaatttatataccaaaacattctacagaatctgatttatgaacttgacacactacagaatatgaagtcaatacacaatatgcaaatgatatctacgtaataggaacaaacaactggaaaatcaaatcacaacatagaacatacagtataatccaaacttcaaggcatgatagctagatagataatagataataaatagatgttagatcatagattagacagatagataaatggtattagaggatagaggagaaagaccacagaaagacatatgaacatttcctccacraatagaacaatatctgtttcatcctagtttttgccatggtaataaatgacatctctatctacctggttgttcacgccagaaacctggaagtcattcccaaccttacctctccctcaagcatctcatccaaacaatcaccaagttctgttaattcttccttcaaagacagcttta

SEQ ID NO: 594131 - DNA, 630 bp, Homo sapiens
ctcctttccttgggacgaagatgcaatgtttttgtaaacttttatttaaaattacagacaaaattgatcttagtggggaagccaagcttctctcagcccctgaatctagctaatgaaagtgttaatggtttcaatagacattgtaaaataaatactcataaaagtttgcacagcacaccgttatatggccccataaaatccacaaggcaattatggagttacgagctccctgcccacctctccaagcaccaaggttagcacaagcggaggtgacagaggaccctggcaatagggaggggaaacgttggaggtgcaccatgtgctaacccaggggagaccagacatctcccccagcactcagcttccttgtctgtgaaatgagtatttgatcttaagtccaaattccctttsctactcttaatttctctgtacttcacaccagaggagaatgttggcatgcaaagtacaagcattagcccttctagtcacactcaatgccaacatttattcagtgttcatggtggaccaggcatggtgctaagcaccttatactcaatatcccatttactcctcacatcatgcctatgaaccatgcattatcattatccgcattttacagatgaagaaact

SEQ ID NO: 594132 - DNA, 596 bp, Homo sapiens
atccgccagcatacaccagagtttgttaaaaatgcagaatacctggtctcactccagatgtgttgaagtggaagctgcattttaatagatttatgtgcacattaaagtttgagacatttgggccagtccaggagagcttctmtgagatccttcacaacccaagcccatgtttcctctgctcctcagggcacatcatgcatctgccccatccatgcaccctccgaaatgggattattctgggtacagagcattgatgagtttccactgaagtgttagaacactttcaggaattctcccttatatggatgttcttgccttagcatggtcttcaggaagatcgcttttcagatttggtgcctcaaagacgagcagttaagcttctactgaaatcacaggcttggtgctctcatggaaaactggtgatgctggagagaaatgcagacgtggcaaattttaatgctgccgaaacataatcagcttttgcttctgcagcaattagcataatattaccaataatgttttacatggcaattttgctgtaaacatttgtgctaatttgccatgacctaattattttatgacatataattaggaag

SEQ ID NO: 594133 - DNA, 596 bp, Homo sapiens
atccgccagcatacaccagagtttgttaaaaatgcagaatacctggtctcactccagatgtgttgaagtggaagctgcattttaatagatttatgtgcacattaaagtttgagacatttgggccagtccaggagagcttctctgagatccttcacaacccaagcccatgtttcctctgctcctcagggcacatcatgcatctgccccatccatgcmccctccgaaatgggattattctgggtacagagcattgatgagtttccactgaagtgttagaacactttcaggaattctcccttatatggatgttcttgccttagcatggtcttcaggaagatcgcttttcagatttggtgcctcaaagacgagcagttaagcttctactgaaatcacaggcttggtgctctcatggaaaactggtgatgctggagagaaatgcagacgtggcaaattttaatgctgccgaaacataatcagcttttgcttctgcagcaattagcataatattaccaataatgttttacatggcaattttgctgtaaacatttgtgctaatttgccatgacctaattattttatgacatataattaggaag

SEQ ID NO: 594134 - DNA, 602 bp, Homo sapiens
gctccaggtagaaagcactatataaatattggttatttctaagcaaaagacagttcttggttaactcttaatttttgtcaccatatcctggctccaggagaatgtgtgttcctatatggctgatataaataatactgtgtgtgtgtgtgtgtgtgtgtgtgtgtgtgtgtgtgtgtgtgtgtgtgtgttcaaagaatgcctcttcattatttggatggcagttaactrctttggctaacttatgttggcatcctgaagctgacagcaaatcctcctcccatctcctgtaacttgtggccacaagacccagcatattttataagaaatcagaccagtagtatatttctacgatcttcagtttgttaagctatttatttgagttaagacaccgagttgtcttccaagtacttcttttatgataacagatccaagacagacacagctaatttgggcaacaagtagggacaaagaggaagaacagagcctctgtcatcctaattatcaagttaatgcctggttgctggacaaactctccctctctctaaaatgaaccaccgcaagttggaacctgctgttgcaatgttaatttgactagaagtggc

SEQ ID NO: 594135 - DNA, 602 bp, Homo sapiens
gctccaggtagaaagcactatataaatattggttatttctaagcaaaagacagttcttggttaactcttaatttttgtcaccatatcctggctccaggagaatgtgtgttcctatatggctgatataaataatactgtgtgtgtgtgtgtgtgtgtgtgtgtgtgtgtgtgtgtgtgtgtgtgtgtgttcaaagaatgcctcttcattatttggatggcagttaactactttggctaayttatgttggcatcctgaagctgacagcaaatcctcctcccatctcctgtaacttgtggccacaagacccagcatattttataagaaatcagaccagtagtatatttctacgatcttcagtttgttaagctatttatttgagttaagacaccgagttgtcttccaagtacttcttttatgataacagatccaagacagacacagctaatttgggcaacaagtagggacaaagaggaagaacagagcctctgtcatcctaattatcaagttaatgcctggttgctggacaaactctccctctctctaaaatgaaccaccgcaagttggaacctgctgttgcaatgttaatttgactagaagtggc

SEQ ID NO: 594136 - DNA, 602 bp, Homo sapiens
gctccaggtagaaagcactatataaatattggttatttctaagcaaaagacagttcttggttaactcttaatttttgtcaccatatcctggctccaggagaatgtgtgttcctatatggctgatataaataatactgtgtgtgtgtgtgtgtgtgtgtgtgtgtgtgtgtgtgtgtgtgtgtgtgtgttcaaagaatgcctcttcattatttggatggcagttaactactttggctaacttatgttggcatcctgaagctracagcaaatcctcctcccatctcctgtaacttgtggccacaagacccagcatattttataagaaatcagaccagtagtatatttctacgatcttcagtttgttaagctatttatttgagttaagacaccgagttgtcttccaagtacttcttttatgataacagatccaagacagacacagctaatttgggcaacaagtagggacaaagaggaagaacagagcctctgtcatcctaattatcaagttaatgcctggttgctggacaaactctccctctctctaaaatgaaccaccgcaagttggaacctgctgttgcaatgttaatttgactagaagtggc

SEQ ID NO: 594137 - DNA, 634 bp, Homo sapiens
atatattcctaggacattacgaacactatcacagggtgtacattcactgtgatgttaggagttatatctctctgggatattacaaataatatcacagaatgtacacacatggtatggtgtacagcccctgtgatattaggagtaacattctccctaggatattatgaataatatcacagaatgtacatacatgttgtatacccactgtgacattaggagtagaatccccttaggatattgtgaataatatcctggtacacacactgtgacattagaagtagcatgccctataataatactaataatatcacaggatgtacacacatggcgtacatgcactgtcacattagaactaacattcccctagaatgwtacaattactatcacagggtatacacacatggtgtacactcactgtgacattaggagtaacatccccctaggatattacgagtaataccacagggtggacacaccatatgtggacacccactgtgacattaggggtaacatccgcctatcatattacgaataatatcacagggcgtacacacattgtgtaactcactgtgacgttagcgggagcatttccctatgatattacaaataatattcactggtgcgttacatacat

SEQ ID NO: 594138 - DNA, 629 bp, Homo sapiens
gtataaaatactctggagtagttaattctttgcaagtttttaaacctttcctcatggtcaaaagctaaatcataaatcaagaattaatgtaagagaaagtttgaatactctctcttaattcccagttagattatcaggacaaaacttcaggtaattgcatgcctaaatagtaaggtacaaataaaaacaggaagaaaaaaataatcctctaacagcaaaatcaaaaattaaatattgaaccataactctcttttcctctataagcctaacagttcttttccatatatgtaaggatggcaaatatgcatttttatgtttacaatttaggctgggactgctacagtgactcacctggagtacacccaatgagaatttagtgggcaatatcacagaacaccattgcccataaaattatraaacattattggggtttgcccatcctccaattgtcttgctgaagtctatttttcttcctctataggagaagctatttagagtcaagcatcattaaatcaaaatgcaaaggaaggagaaattgaatgtgggttaattgcattctgaatgcaactgaaccgcagttggtacaaattactggcctataagaatgcattgtgcctaccaggaagaca

SEQ ID NO: 594139 - DNA, 579 bp, Homo sapiens
cctcctaatcatattttcttaaattgtacttttatttaggatttggtgattgagagtttgcgttttctgtttgctagttgattgcttaggtggccaggtggttggtttctcttcatccaattgcatacaatgtatttctaaaaggatttttaaggaaatgtggaatatcatgtagtaatatgccctgttgctcattcctcctaaatctctctcttatctccacctctgcctcctttcccgcarcctgccttggtttaggccctcaccacttctctactgatgacaacagcctctcaaagcccagcccccttggctcctgccttgacgttactaccaatggcctcatcctaaagcaaaaatctcattatgcctctctcctgtttaaaatatttaattggttttaattagcttctcactaccttcatgatgaaattcgaattccttagaatgctctgcaagccctttcatgacaaggtccaggcctgcctctccaaatggcatcacttgtaaatggcatcatttaccctatgctccagcagtaataacactatgcattcacacaggggaggttttgtgggt

SEQ ID NO: 594140 - DNA, 620 bp, Homo sapiens
ggaacagtgactgctgctccttgtagtcccagcgctaacatttggtccagatgtataggaatttcctagaagtattttgcatggaaattagcgaaaatttttcacttggtgcccgaatgatcatttcataaggtgttgttaaaaatgtccactggatggaaggttacactaactttttagctctcaaattcgtggtttttctttatgttattgacaatctctccaatggggttttggttagggggaggcttaaaagtaattgatttatgattcttttaaccaacatgtaagtcaagaggctggccaagagtttgaagagcccgaacctgttagacagtaaaccaattatctttgtgaccttgtgggtgacttcaccacccccactgcatagcacagccctgcctgtttccaaaacacctggccttgcacaaaagaatgaagaaagagccaaggcacagagaatattctccagcagagagtttgggcaagaagtcttaaagatgtctgartagagagacaattagtggaaacaaacatctgtccaaggtctctcccatcatgtcatgaacttgacaagaaaggccagcagtaactcttccaaccgtggtaaccaatggccc

SEQ ID NO: 594141 - DNA, 620 bp, Homo sapiens
ggaacagtgactgctgctccttgtagtcccagcgctaacatttggtccagatgtataggaatttcctagaagtattttgcatggaaattagcgaaaatttttcacttggtgcccgaatgatcatttcataaggtgttgttaaaaatgtccactggatggaaggttacactaactttttagctctcaaattcgtggtttttctttatgttattgacaatctctccaatggggttttggttagggggaggcttaaaagtaattgatttatgattcttttaaccaacatgtaagtcaagaggctggccaagagtttgaagagcccgaacctgttagacagtaaaccaattatctttgtgaccttgtgggtgacttcaccacccccactgcatagcacagccctgcctgtttccaaaacacctggccttgcacaaaagaatgaagaaagagccaaggcacagagaatattctccagcagagagtttgggcaagaagtcttaaagatgtctgagyagagagacaattagtggaaacaaacatctgtccaaggtctctcccatcatgtcatgaacttgacaagaaaggccagcagtaactcttccaaccgtggtaaccaatggccc

SEQ ID NO: 594142 - DNA, 448 bp, Homo sapiens
tattttttgtagagatgaagtttcaccatgttggccaggctggtctcgaactcctgacttcaagcgatctaccctccttggcctcccaaagtgtggggattacmggtgtgagccgtggcaccagcctgaaataggccaatttttaaaatgggagtattcctacattaaaatggccaaataaagactttttctaaaataaactttaaactaattttggataaatatgttttgcctttgagccttaataaaatgcattaatgaatattaagctgtaaaaagtacatgttaactacatagctatagtgtataatattaatattaattagtgccttccagtaaattactagattaaaataaattttaatataagacactgagctttttgttttcttgacaatagaaatgcaagcaatagcaaattgctctaatcctttcaagtacatttaag

SEQ ID NO: 594143 - DNA, 453 bp, Homo sapiens
tattttttgtagagatgaagtttcaccatgttggccaggctggtctcgaactcctgacttcaagcgatctaccctccttggcctcccaaagtgtggggattacaggtgtgagccgtggcaccagcctgaaataggccaatttttaaaatgggagtattcctacattaaaatggccaaataaagactttttctaaaataaactttaaactaattttggataaatatgttttgcctttgagccttaataaaatgcattaatgaatattaagctgtaaaaagtacatgttaactacatagctatagtgtataatattaatattaattagtgccttccagtaaattactagattaaaataaattttaatataagacactgagctttttgttttcttgacaatagaamtgcaagcaatagcaaattgctctaatcctttcaagtacatttaagaaagt

SEQ ID NO: 594144 - DNA, 587 bp, Homo sapiens
tgaaagcatcattttaatgcttgactgtgtcataaacrttgaaaatgtaattgtttctttggtcacaactcctccatcttttagcctttctcactcagagccagctattactttattttttcctccctattcattagtaggaaagcaatcagctggaaaaaaattatctatgaaactctcctttcttttgcttctcttgggtaatctcatctttttccttcccaaaccattgtcttagtcctgtgtccctctattgggcactggaaatcagaccagataaacaatctgcttgtccatggagatttgcctttgaccagcaacctgaaataacagaatgtcaaagaatctgagtaccacccctaaaaaatattatgttgctagcactctccttgatttaacaggaagaaaaaagtaaggtaactaaaaccttaaagtggtatggtaaatcaatgttagaaaacactgcatcataaataaaagccatgccatttatttaaagtggtatgttaaatcaatgttagaaaacacagcatcataaataaaagccatgccatttattaaaagtgtgtaatagtatgtattttaca

SEQ ID NO: 594145 - DNA, 587 bp, Homo sapiens
tgaaagcatcattttaatgcttgactgtgtcataaacgttgaaaatgtaattgtttctttggtcacaactcctccatcttttagcctttctcactcagagccagctattactttattttttcctccctattcattagtaggaaagyaatcagctggaaaaaaattatctatgaaactctcctttcttttgcttctcttgggtaatctcatctttttccttcccaaaccattgtcttagtcctgtgtccctctattgggcactggaaatcagaccagataaacaatctgcttgtccatggagatttgcctttgaccagcaacctgaaataacagaatgtcaaagaatctgagtaccacccctaaaaaatattatgttgctagcactctccttgatttaacaggaagaaaaaagtaaggtaactaaaaccttaaagtggtatggtaaatcaatgttagaaaacactgcatcataaataaaagccatgccatttatttaaagtggtatgttaaatcaatgttagaaaacacagcatcataaataaaagccatgccatttattaaaagtgtgtaatagtatgtattttaca

SEQ ID NO: 594146 - DNA, 587 bp, Homo sapiens
tgaaagcatcattttaatgcttgactgtgtcataaacgttgaaaatgtaattgtttctttggtcacaactcctccatcttttagcctttctcactcagagccagctattactttattttttcctccctattcattagtaggaaagcaatcagctggaaaaaaattatctatgaaactctcctttcttttgcttctcttgggtaatctcatctttttccttcccaaaccattgtcttagtcctgtgtccctctattgggcactggaaatcagaccagataaacaatctgcttgtccatggagatttgcctttgaccagcaacctgaaataacagaatgtcaaagaatctgagtaccacccctaaaaaatattatgttgctagcactctccttgatttaacaggaagaaaaaagtaaggtaactaaaaccttaaagtggtatggtaaatcaatgttagaaaacactgcatcataaataaaagccatgccatttatttaaagtggtatgttaaatcaatgttagaaaacamagcatcataaataaaagccatgccatttattaaaagtgtgtaatagtatgtattttaca

SEQ ID NO: 594147 - DNA, 336 bp, Homo sapiens
ttaattatttaatgtaaaatgtaaaaaatttatttttgtaaggatttggatcagattattttaaatcagttaactattgcagtggatttaaaacactgctgttataatcacgcaaatattactacctaaattatttgttatacttcagtagcccaaaagtggtagcaatttatccataatgctgtcttaatcactcacagattcttagccaatattagcaactaaccgaggttcaggagaacattgtttgctatggtgagcatctatgaaatgaggtcatttgtagyatgagctgcaaagttggtcttcccaagttcaaaattctgactctaccat

SEQ ID NO: 594148 - DNA, 572 bp, Homo sapiens
gttcttcatatttcagaaggtggataaattaggatgtcaaatgccctgttaaagtttatttaaytagtgaagaggatgagaactgatgtcttctgaattcacagctgtttgtattgattactttattaattattttggcatattttggaggtaaacaaatacttaaaataattgaatacattaataaaataaaatattctaattaaataagctaaataaagtaaaatatctaaacttataagttatgtttcattagcagcaccttgatatatatagtcaaccatgccacatttatagtgacttaaataattacccagcaagacaagtaaattattgatcagagtattgtttacaataaatgtgaaaaaagtgactggggtgaaaacttaccatcaataaataagattcaagaaccaattactgtaatatattcataacatcttagagtatcaatattatgaataatattacttataaccatttttaaagtcactagcattttgagtacatgttatcatttatcaacatttccaatacaaatattttatctctttcttccttttagaaaatac

SEQ ID NO: 594149 - DNA, 491 bp, Homo sapiens
caaatgccctgttaaagtttatttaactagtgaagaggatgagaactgatgtcttctgaattcacagctgtttgtattgattactttattaattattttggcatattttggaggtaaacaaatacttaaaataattgaatacattaataaaataaaatattctaattaaataagctaaataaagtaaaatatctaaacttataagttatgtttcattagcagcaccttgatatatatagtcaaccatgccacatttatagtgacttaaataattacccagcaagacaagtaaattattgatcagagtattgtttacaataaatgtgaaaaaagtgactggggtgaaaacttaccatcaataaataagattcaagaacmaattactgtaatatattcataacatcttagagtatcaatattatgaataatattacttataaccatttttaaagtcactagcattttgagtacatgttatcatttatcaacat

SEQ ID NO: 594150 - DNA, 543 bp, Homo sapiens
aagaacagctgtggcagctccaaacatcatattcccacatagcaatacaatcaggaagtggaatggtggggagcaaaggcaaaaaggatcttttcccctagtgctctctcttttatcagggaggaaaatattttctgaaagtctcctccaggtttccattatatcttactgttagtgctaaatcttatatccaaccctagaccaatcaatgacaaaaagaaaaaaactataagcttgccacattttatcatgtttcactgtattgcactttaaagataccgcagatttttttacaaattgaagatttttagtaaatctgtgtcaagcaaatcaatgccattttccccaaagctacgctcactctrtctctctcatgtcacattttggtaattcttgaaatttttaaatctttttcattattattgtatctgttatggtgatcggtgatctttgatgttactattgtaattgggggcaccaagaactatgcccatatgagacagtaaacgtaatccataaatgtggtgtatgttctaactgttc

SEQ ID NO: 594151 - DNA, 566 bp, Homo sapiens
atgtgcaggtttgttacataggtatacatgtgctgtggtggttttaagcaccacatgcattaggtatttgtcctaatgctctccctccccttgcctcccacccctgaaaggtccgggtgtgtgatgttcccctccctgcatccatgtgttctcattgttcaactcccacttatgagtgagaacatgcggtgtttggttttctgttcctgtgttagtttgctgagaatgatggcttccagcttcatccatgtccctgcaaaggacatgaactcattcttttttatagctgcatagtattccatggtgtatatgtgccacattttctttatccactctatcattgatgggyattttggttggttccaagcctttgctattgtaaatagcagcacaaacaattttcaaagaaagaaatacaaactcctctacctcctgacaaaaactaaaagcaaaatcttaaaaaatttaacttcacaaataaagaactgcaaattaaaataacagtgggataacatattcatttataaatctggctaaatatagatagtgaaggtgagggtacaaga

SEQ ID NO: 594152 - DNA, 549 bp, Homo sapiens
agattgtttctgaacaatagctaaggtttgctttcccaatatcgcaggtttgattttctgtcattcatttgtcatcatttaaaaatcttattgttattttttaaagtttccttattgtcattaaaaaaaactgcacctaagtttatttggataagtatagcactaagtctaatcagtgacatttaaktttttaattttatttttacactgacagataaaatcatactattgtacaacatgttggctatcattaataatatatctatggtgtattccagaaaaatgttgagagtgaatataaagtgttctcaccacaaaaataactatgtgagattatgcatatgtcagttagcaggattcagttattccacaatgtatcaaaatatcatgttgtagacataaacatcatgttgtgcaaaagatctctcgaacttatttctcctctgtaactgaaatgtattcttagaccaacatctccccaattgccacctccccacaatcaccacagccactggtaaccaccattctactctctacttctatgaaatc

SEQ ID NO: 594153 - DNA, 549 bp, Homo sapiens
agattgtttctgaacaatagctaaggtttgctttcccaatatcgcaggtttgattttctgtcattcatttgtcatcatttaaaaatcttattgttattttttaaagtttccttattgtcattaaaaaaaactgcacctaagtttatttggataagtatagcactaagtctaatcagtgacatttaattttttaattttatttttacactgacagataaaatcatactattgtacaacatgttggctatcattaataatatatctatggtgtattccagaaaaatgttgagagtgaatataaagtgttctcaccacaaaaataactatgtgagattatgcatatgtcagttagcaggattcagttattccacaatgtatcaaaatatcatgttgtagacataaacatcatgttgtrcaaaagatctctcgaacttatttctcctctgtaactgaaatgtattcttagaccaacatctccccaattgccacctccccacaatcaccacagccactggtaaccaccattctactctctacttctatgaaatc

SEQ ID NO: 594154 - DNA, 549 bp, Homo sapiens
agattgtttctgaacaatagctaaggtttgctttcccaatatcgcaggtttgattttctgtcattcatttgtcatcatttaaaaatcttattgttattttttaaagtttccttattgtcattaaaaaaaactgcacctaagtttatttggataagtatagcactaagtctaatcagtgacatttaattttttaattttatttttacactgacagataaaatcatactattgtacaacatgttggctatcattaataatatatctatggtgtattccagaaaaatgttgagagtgaatataaagtgttctcaccacaaaaataactatgtgagattatgcatatgtcagttagcaggattcagttattccacaatgtatcaaaatatcatgttgtagacataaacatcatgttgtgcaaaagatctctcgaayttatttctcctctgtaactgaaatgtattcttagaccaacatctccccaattgccacctccccacaatcaccacagccactggtaaccaccattctactctctacttctatgaaatc

SEQ ID NO: 594155 - DNA, 560 bp, Homo sapiens
aaccaccattctactctctacttctatgaaatcaacttttttagatttcacatatgagtgagatcatgtattatttatgtcctgtgcctggattatttcacttaacaatgttcaccaggttcattcatgttgtcacgaataccasgatttcatttttttatagctgaatggtatctctcaagtggatgtaccacagtccattcatccactgataagacacttgggttgattccatgtcttggctattgtgaaaatttctgcaacaaacatgggagtgcagatatctgtttgtcatattgatttcatttctttggatacataccgggtagtaggattgctggatcatatggtagttctagttttaatttttaaagaaatctccatactgttttccatagtggttgtagtaatttacattcccaccaacagtgtgcaagggttcccttttctccacatcctcgccaacacttatatttgattttttgataatagccattctaacaggtttgaggtggtatttcattgtggctttaatttgcattgccttgataattagtggt

SEQ ID NO: 594156 - DNA, 562 bp, Homo sapiens
gtaaccaccattctactctctacttctatgaaatcaacttttttagatttcacatatgagtgagatcatgtattatttatgtcctgtgcctggattatttcacttaacaatgttcaccaggttcattcatgttgtcacgaataccacgatttcatttttttatagctgaatggtatctctcaagtggatgtaccacagtccattcatccactrataagacacttgggttgattccatgtcttggctattgtgaaaatttctgcaacaaacatgggagtgcagatatctgtttgtcatattgatttcatttctttggatacataccgggtagtaggattgctggatcatatggtagttctagttttaatttttaaagaaatctccatactgttttccatagtggttgtagtaatttacattcccaccaacagtgtgcaagggttcccttttctccacatcctcgccaacacttatatttgattttttgataatagccattctaacaggtttgaggtggtatttcattgtggctttaatttgcattgccttgataattagtggt

SEQ ID NO: 594157 - DNA, 408 bp, Homo sapiens
atttcattgtggctttaatttgcattgccttgataattagtggtattaagcattttttcatatttctgttgaccatttaaatgtcttcttttgagaaatgtctagtcaggtcgtttgcccttcttttgattggtttatttgttttcttgctgtttgaggtccttatatattttggayattaaccccttatcagatgtatagtttgcaaatattttctccccttctgtagattgcccctttattttgttgattgtttcctctcctgtgcagaagctatttagtttgatataatcccattcgtctatttgcttttattacctgtgctttttgggtcatatccaaaaagttattgtcaagaccatgtcataaaatttttatcctgcattttattctagattcataattttg

SEQ ID NO: 594158 - DNA, 537 bp, Homo sapiens
tgttgaatgaagaaataaagagaatttgtagtctttaaatataaacaatgcatgcaatttaaaattatttgtgtcactggagacagttctcagtaagaaatccatagatacagtagttgaaatgygacatgtagttttaactttgtcttctataattttacataattttataaaaacaggaaaagcaggtaatttgattgtcatactttcttccttagtttatcccaagttagactgcaaagaaaggcagatcatgtgatgaagtgatgaatctggcatcttttaatctgttcctaaatcattactttcagtgtttcattaaactactttgggcatcctctttcctccccataagcagtcccaaaacctgatgatgactatgtggttattttcttgggtgccaaatagtccccatgtttctgaacttcggtattctcaaactctccaaccccagctcattcatactgtattctctttttttttttttttttcagggttacctctcttttttcaaatatatgattgtgcaaaggataa

SEQ ID NO: 594159 - DNA, 537 bp, Homo sapiens
tgttgaatgaagaaataaagagaatttgtagtctttaaatataaacaatgcatgcaatttaaaattatttgtgtcactggagacagttctcagtaagaaatccatagatacagtagttgaaatgcgacatgtagttttaactttgtcttctataattttacataattttataaaaacaggaaaagcaggtaatttgattgtcatactttcttccttagtttatcccaagttagactgcaaagaaaggcagatcatgtgatgaagtgatgaatctggcatcttttaatctgttcctaaatcattactttcagtgtttcattaaactactttgggcatcctctttcctccccataagcagtcccaaaacctgatgatgactatgtggttattttcttgggtgccaratagtccccatgtttctgaacttcggtattctcaaactctccaaccccagctcattcatactgtattctctttttttttttttttttcagggttacctctcttttttcaaatatatgattgtgcaaaggataa

SEQ ID NO: 594160 - DNA, 582 bp, Homo sapiens
cctgtacatggggtcagaaattaaactcttctcactttatccctacccatcctgaagacaaaaggtctcctttggcatctgcataggtcaattcaggcaacaaataaactagactgtcttaatgatatcaactggtrattctatcaaaggagaatcaaacaatgattttcctactctgcatccttttatttttaactccttaggaatagattttggttcctttcatcctatgtgatctcttttcactaaaacacacactcctgttccttctcactcctagtccttgctaggtatttctgacattcttagaccttcaatctctttcctttttacttgcacgcttgtcttcatttcaggttcttgccaaagcatccccctaatgttttaacacaagaataatgctaatgatacacatctaaagttaaggggaagttataggggtggattgatattaaaagtaccattgttttcccctcaggtcagctcctaatgtcaccacttaaaggaaccttttttatttttttcaggtagaagcaacatttttcttctgcacggttatggctactgatctctgtaccttgc

SEQ ID NO: 594161 - DNA, 617 bp, Homo sapiens
ggaaccttgttttgtgagtagctgctctcattattggggacatggacacatctttgtagatacaaaacatgtaatatattactctatcaaaagaatgattgggggacacaaagttctgaaaaaaagaggggcaactagaagtaaaatgatcaaatgctataaaaattagccttgctaacagaactaatgaaaagctttttaactccatcaatccatgatattagtgaatattgactgtaagtgaatgaatacaaactgcttctcaaatgaagggcatatagtctaaaatagctgaaagtcatttctctgaaaggagatcattaatctggagaatgaaacactgatgtttcttcctggcgccggtgctgtggagtactgcactaggatggtaacatggagattgcaatgtatcgatttcaaaagtcatacttttcgccagctatggaaagcaatggggtcagagctctggcttcttacatttgaaatgaaaatgtatgtgtgtgygtgggtgttttgatgtcaattattttatggtgctcttataggccttttagcactaattttatctagttttatgtgaattccaggccaaatctcaataagttgctgagctttct

SEQ ID NO: 594162 - DNA, 542 bp, Homo sapiens
tgagcagctgccgcttaagaccttcctattattcccactgttatgctcaatgacttttaaaaagctattttgggtgcagttcttgggctccatccaatatatatctttttattcttcgctggtgtattgccacttgaatgggctgagagagttatataaaacaagccagatggtagctgcttgaggtttgagataccttgtgctgtaagggggtgtagaagaaaataaagaaacaataaaaacctaaaagcaagtgtaaataaaataatgtttagatgaggggactgtctttcttatatctaattagtaaaacactattgaagttatctataaggaagacaatgttaaatgaacttataaataataccagattagattaccttttaaggagtaaatattatttacatttgtcatctccaggaattggtgtattatcacagaaaagtgcctgctaagtataattaacgtgactatttttgactttcacacagaytgaaaaaaacatgaaattgacattcactaattattcacttgcaaggaaa

SEQ ID NO: 594163 - DNA, 582 bp, Homo sapiens
ctgcatgcactaaaggggaaaaaaggagcaacatttacatcttttgggatcctttccttcatccatcttgcccaggtggggcagtggggaggatgcttggcctaactgacaaatttgggggaagaaattaagcacgcttagtccaggacatttagggttcttactgtccatctgcctacctcctaagaggctgcatgctgctytatcagatgcatagtgagcttacagggaacttgcaggggagcattgctgatctgaattgtaagctcaattcaaggaaccaaattggggatacacatttaagcccataatgcaaaaagctactatcctgatctgtagcagcttgatactttgttctacctcttagttggttcaggactctgatgtgaaaaggtagagatgctattaatcagttccctaaaatctcaagaggttttatataccttttctgccacattattttatttctggacaggccaaactccctttttttttttttttttttttttttttttttttttttgaaagcaggaactctagtaacctgaattacatgtagtagtatcttgacacaaacttatg

SEQ ID NO: 594164 - DNA, 582 bp, Homo sapiens
ctgcatgcactaaaggggaaaaaaggagcaacatttacatcttttgggatcctttccttcatccatcttgcccaggtggggcagtggggaggatgcttggcctaactgacaaatttgggggaagaaattaagcacgcttagtccaggacatttagggttcttactgtccatctgcctacctcctaagaggctgcatgctgctctatcagatgcatagtgagcttacagggaacttgcaggggagcattgctgatctgaattgtaagctcaattcaaggaaccaaattggggatacacatttaagcccataatgcaaaaagctactatcctgatctgtagcagcttgatactttgttytacctcttagttggttcaggactctgatgtgaaaaggtagagatgctattaatcagttccctaaaatctcaagaggttttatataccttttctgccacattattttatttctggacaggccaaactccctttttttttttttttttttttttttttttttttttttgaaagcaggaactctagtaacctgaattacatgtagtagtatcttgacacaaacttatg

SEQ ID NO: 594165 - DNA, 582 bp, Homo sapiens
ctgcatgcactaaaggggaaaaaaggagcaacatttacatcttttgggatcctttccttcatccatcttgcccaggtggggcagtggggaggatgcttggcctaactgacaaatttgggggaagaaattaagcacgcttagtccaggacatttagggttcttactgtccatctgcctacctcctaagaggctgcatgctgctctatcagatgcatagtgagcttacagggaacttgcaggggagcattgctgatctgaattgtaagctcaattcaaggaaccaaattggggatacacatttaagcccataatgcaaaaagctactatcctgatctgtagcagcttgatactttgttctacctcttagttggttcaggactytgatgtgaaaaggtagagatgctattaatcagttccctaaaatctcaagaggttttatataccttttctgccacattattttatttctggacaggccaaactccctttttttttttttttttttttttttttttttttttttgaaagcaggaactctagtaacctgaattacatgtagtagtatcttgacacaaacttatg

SEQ ID NO: 594166 - DNA, 623 bp, Homo sapiens
ctcatttttcattcccatcttgcaactttatgccttcctattgatcttagttytgctgcttagagacaccaatgagaaatgctgagaacattcaataaataaaaaatatccatccccctgtacgtgattcctctttaaaaatttgcgcaagtaaaatagtgttatttctgctccctgttagttcttcagactaaaagtttatgccctgaatgtggaattaacattaggggatggaaaaaaggtattctaaatttcaaatcccaatcctggttctgaggtccgttgttgcctttgagaagctgccttctataattattgattacctcatacatactataattgaagtcacatctacaaagatctcagtttagattgtagcatatgtgatttttccagaaagagacatgcatttatttgcatcacttctattttttaaaattgtttaaatgaaaaaacactcttctacaccacttattttgctagtttggacttaacagaggatcttggtagattggtgcatattttatttaaatggccttttgtttaaaaaatacacaaaaacaacttcagaggagtttttatcaaacaggtgaaccaactcagagattaaaagtatatccctc

SEQ ID NO: 594167 - DNA, 508 bp, Homo sapiens
gattttgtgactctaactcatgtctttggactaccagtctgaagaggcaggacaacatttacagttaatgattgatatataaaatgtgatgagaggaatgagaggaatgagaggaatgaaaggtaatttcaaatgttaaaggctgcattaacaagaaaatgatagtgtcatgaaattgataactgcaaagatgcagaaagaagtattaacaggatatttagccgaattagccctgtaccaggatgatggcttctgctcatggctctacaagcaacacagctgtgtgaatttggatgagtcatttcagttctcccagttcagatttcttctctgaaagagagggagaaaagttttctgacctcagtttaggcaatgatttytgagaaacaattctaaaaggacgatccatgaaaaaaaattataataggacttcatcacaattaagaatttctgcttttcaaaagacacttttaatagaatgaaaagacaagccacagactgggagaaa

SEQ ID NO: 594168 - DNA, 543 bp, Homo sapiens
cttcatatcagaaccttgtactcttaattgctgttactttgtagtatgttttaaaatcaagaagtgtgggacatccaacttcaattttctttttcaagtttgttttcactattaatattccatatgaatttcaggaatttttttctatttctgcaaaaatgctattgagattttgacagggattgcattgaatctatagatcactttggctagtatggacattttaacaatattaagtcttccaattcacaagcwcaggatatctttccatttatttgtatattcttcaattttttttagtaaagttttatagtttccattatacaagtctttcaccttcttcgttaagtttatttctaagtatttatcttttcaatgctatagtatatgggaatgtttccttaatttgctttcagatcagtcatcgttaattatagaaatgcaactgatttttgagtgctgatcttgtattctgaaactgctgaactcctttattaattctaatgacttttgtgtcgaattcttagtgtttggtacatataa

SEQ ID NO: 594169 - DNA, 584 bp, Homo sapiens
atatgaatttcaggaatttttttctatttctgcaaaaatgctattgagattttgacagggattgcattgaatctatagatcactttggctagtatggacattttaacaatattaagtcttccaattcacaagctcaggatatctttccatttatttgtatattcttcaattttttttagtaaagttttatagtttccattatacaagtctttcaccttcttcgttaagtttatttctaagtatttatcttttcaatgctatagtatatgggaatgtttccttaatttgctttcagatcagtcatcgttaattatagaaatgcarctgatttttgagtgctgatcttgtattctgaaactgctgaactcctttattaattctaatgacttttgtgtcgaattcttagtgtttggtacatataagatcatgccgtctgtgaacagaggcgcttttccttcttctattctgatttgtatgctttttagttttttctcttgttatttctctgtctgaaactttcagcactatgttcaattatagtagcaagagtgggcatctttgccttgttcctaatcttagaggaa

SEQ ID NO: 594170 - DNA, 484 bp, Homo sapiens
agccgatctgaaagaacaagtattaagttatgcctaggttgctgatatactagtttcaggctgggtgcggcggctcacrgctgtaatcccagctcttatgggaggccaagacaggcacatcacttgagcccaggagttcaagaccagcctgggcaacgtggtgagactccatctctacaaaaaataataaaaaattagctgggtatggtggtgtgcacccagctacttgacaggatgagatgggatgactcctcgagcccgggaggttgatcacgtcacagcactccagcgtggtgtgacagaaggagatcctgtctcgaaaaaaataaagaaagtgagcaataggactggcatggtgcactcatgcgtataacactttgggagactacggcaggatgatcacttgagcccagaactttgagaccagcctaggcaacacagtgagacctcatctctagaaaaaatttgaaggaaaaaaataggc

SEQ ID NO: 594171 - DNA, 484 bp, Homo sapiens
agccgatctgaaagaacaagtattaagttatgcctaggttgctgatatactagtttcaggctgggtgcggcggctcacgkctgtaatcccagctcttatgggaggccaagacaggcacatcacttgagcccaggagttcaagaccagcctgggcaacgtggtgagactccatctctacaaaaaataataaaaaattagctgggtatggtggtgtgcacccagctacttgacaggatgagatgggatgactcctcgagcccgggaggttgatcacgtcacagcactccagcgtggtgtgacagaaggagatcctgtctcgaaaaaaataaagaaagtgagcaataggactggcatggtgcactcatgcgtataacactttgggagactacggcaggatgatcacttgagcccagaactttgagaccagcctaggcaacacagtgagacctcatctctagaaaaaatttgaaggaaaaaaataggc

SEQ ID NO: 594172 - DNA, 343 bp, Homo sapiens
tggtggcacgtgcctgtaatcccagctactcccgaggctgaggcttgaacccgggaggtggaggttgcagtgagccaagatcatgttgttgcactctagcctgggcaacagagcaagactccatctcaaaaaaaaaaaaaaaaaaggaaggcatttaaatactccagaggtcgggaatggtgactcacgcctgtaatcctagcacttaggaggtctaggcgagcggatcacttgaggacatgagttcgagaccagcctgggcaacatggcaaaaccccatctctactaaaaataaaaaattagctgagcggctgggcrcagtggctcacgcctgtaatcccag

SEQ ID NO: 594173 - DNA, 459 bp, Homo sapiens
aaactaagtgtgctcaagctacccccgcacccactgattctgcactccatgggaaaagttctcacaagcaagtcctttgtccactacccacgtctataggaaatgtttgaacagctatacacaaagaactcacaagtccacaacctcgggggtgttgcgggkggagagggcagtggtaaaggtgatgacagggagggcctgtggggacagtaatattagattagtggtcagaagatgctggagcctgccttgccagtcacacacttttagaggaatgctggacagtacacaccctccccaaccctgaatgtaggccctcgctgacatcacgccagatgaagccctgaggtctttaacatctgtaactctatggcatgtaacataaacaggtgtctgaccagtttccccagatatagaataataataatacctttcatttaaaaaggtaagagggaattc

SEQ ID NO: 594174 - DNA, 607 bp, Homo sapiens
agacagggtctcactctgtcgtccagtctggagtgcagtggtgcaatcttggctcactgcagcctccacctcctgggctcaagccatcctcccacctcagcctcccgagtagatggggccacaggcgcgcatcatgacacctggctaatttttgtattttttgtagagatggggtctcgtcatgttgccaggctgatctcaaactccctagttcaagcaatccacctgcctcaagctcccaaagtgctgggattacaggcgtgagccaccacgcccggcctgccttcacattttaaatctccctggtgatgccctctgcacacaagccccaaaactgttgtcccagggttgatggatattaacacagtgtgaccagggggttctgggggtgagaccctggaggtaatgtctccacaggaatgacaacagggrctgcagaaagtctgggagacacaggggtgctgggttcttggcaccataccccatgccatgtgggtggtgaaggagccaggcagcgccacctcggaaccccagctgtcactgaccacggtcagaagtaaaagccagatgtcaagggcaacatctgagacaggggcctgttctgccc

SEQ ID NO: 594175 - DNA, 611 bp, Homo sapiens
attgttattacattcaaaaattgtttaacacataaaatwcttaggagttcttcaagcatatacgagaaaagagaaaatttatggtaaagaaaagatcccattcaacagacatatggatgcataggggaacatggcttggtcagggaaatgggaatagttccgtgtaattgacacatggagatggtactgtcaacttttcttaaaatttttatataataaaatacacttcatactattggccatattctaatcttttttgataatgctgaaattgctttcatatcctataatgccatggtttcatcttatgcatattgacctaattgtatcaaagaagcagaaagggctgatctagccagtgattaggctggtggacaaatcagtattcatgagatcattgaaacagattctggaggactttttgttgttgtttttcaaacaaatctattaggggaaaaccaatgactatatttattacatgctgatacttacattatacatttagtcatctggacacaatgagcagtagaaaataattagtaataaatagagacagcattgtgggaaaaagacaatgtagtggtagaatatttgtgagactaattatgttt

SEQ ID NO: 594176 - DNA, 611 bp, Homo sapiens
attgttattacattcaaaaattgtttaacacataaaattcttaggagttcttcaagcatatacgagaaaagagaaaatttatggtaaagaaaagatcccattcaacagacatatggatgcataggggaacatggcttggtcagggaaatgggaatagttccgtgtaattgacacatggagatggtactgtcaacttttcttaaaatttttatataataaaatacacttcatactattggccatattctaatcttttttgataatgctgaaattgctttcatatcctataatgccatggtttcatcttatgcatattgacctaattgtatcaaagaagcagaaagggctgatctagccagtgattaggctggtggacaaatcagtattcatgagatcattgraacagattctggaggactttttgttgttgtttttcaaacaaatctattaggggaaaaccaatgactatatttattacatgctgatacttacattatacatttagtcatctggacacaatgagcagtagaaaataattagtaataaatagagacagcattgtgggaaaaagacaatgtagtggtagaatatttgtgagactaattatgttt

SEQ ID NO: 594177 - DNA, 560 bp, Homo sapiens
tgtccaatttcccccatgccaaattcctgtgcctttcagctttaaattcatacgaattatcatcctggaagaacctgctctggagatgttagaccactcagaataccgtgaggataccagataattagcagagataaaaaatatgaatgycaccaactttgcaattttctccaaagctgagttacatataccattcgttatatgtagagtgaaaagtaaataaatgcaggaaaaagaatattaaggtagtacaaattaatcttgtagttgtatcacgtatctgtaataaatgtatgactttccttgaaaactctaccttgaaaactctagtgccaaaccaattgaaactgaaaaaaacaaggagttaatgttttttccaaacatttgggccaaacatatagtcagctgtacttaaatgtcaaggtgtttgttacatttataatgtttaggatgaaaattttatttttctcttcttagtcatgctgagaccgtacaatgttctacatctatattctactgctgctcaagttcagcagggagctattcaaaaggaaatgcac

SEQ ID NO: 594178 - DNA, 511 bp, Homo sapiens
ctgtgtattatgaaaattttccactggggggggacacacaaactccttccagctctctttgagctctggaaatagattactcctttcccgtgggtattgctctggcccttatatctttttctcaaaatgtgtataaatgaatatgcagccaatgacgkgggattcctgctgcctatatctgtacctctctctctctctctctcaagctctctcctgttagacacataggactctctgaattatgattcctctctctcttcagcaagaatgtctgggtcagttggtcctgtgcctgttctgtgtcctcgaaattgcagataataaagaagctggtacaattttatggatctcatttctttctgtgagggatcagagtcctgagccccctgtggtcaaatgtatgtaaaccattgtattatttaatacatttttcaaattgttaatttttttcaaattttaaaaattgttcagtgggacaatgttgctcaattatgtctggaaacaaaagttt

SEQ ID NO: 594179 - DNA, 437 bp, Homo sapiens
gtgtttctatattcttcttaattttctgtctagttgttctatcggtagttgagagagcagtgttgaagtgtccgaatataattgtggattttagaaacatcatttttaatgtttaacgaaaacttcatgtataatatggaagagtatgaaacatttggttttaatgtggttttccttatatatacataatcagttactagctcactttaacttgcttcatagataacaagagaattagataaaataatcagtcattggaagagtataaacgttgtttcagcctgtaagtaatcatgatgacccttgtagaataaaattacatcacctactcttttggcttgaactactaaaaaaaaaaraaaagtgtgccctcccactgtcttcagcccagtctactttttgcatataaactttagaaaaaattaacaaaaccgtat

SEQ ID NO: 594180 - DNA, 437 bp, Homo sapiens
gtgtttctatattcttcttaattttctgtctagttgttctatcggtagttgagagagcagtgttgaagtgtccgaatataattgtggattttagaaacatcatttttaatgtttaacgaaaacttcatgtataatatggaagagtatgaaacatttggttttaatgtggttttccttatatatacataatcagttactagctcactttaacttgcttcatagataacaagagaattagataaaataatcagtcattggaagagtataaacgttgtttcagcctgtaagtaatcatgatgacccttgtagaataaaattacatcacctactcttttggcttgaactactaaaaaaaaaaaaaaagtgtgccctcccactstcttcagcccagtctactttttgcatataaactttagaaaaaattaacaaaaccgtat

SEQ ID NO: 594181 - DNA, 465 bp, Homo sapiens
agaaatttctaaaactgaacaggttatagaaattcaaatctaaacagtgactgactcatgcaacttgaaaagttactacttatgcattaaatatttctatatcaaaagctgacttcaaaaagaaactgttatttcctagggtacctaatccaattaaagaatataaaagtataagtttaccaaataagtcaaaatcatggatctcttagattttatttaacatgaagatatacttgaaagtatatctattcttctgagttaggcagagaaagatatgagcacacttaagggttcaaatgcgcgggatataatttttagtatggaaagatgagttaacagaacaggtaggcaaagaagttaaaatccaagaaactctcctcaaatttcacttyctggttttcagactttaagaagtggcagtaaatggaaacttgattttttgaccactttacatgcacagaagat

SEQ ID NO: 594182 - DNA, 587 bp, Homo sapiens
tgtacattcagagcatcatgttattaccatttcaaatcttcccaagctattacctcttaactctctcagagagatgtgatttttttctgagagggggaaacactatttctgagaggttgaaagcccattaaggtttcatggcaaggaagcagtatggtgggggccttgatgttaaagtccttaaaaatttcactgtactttttttttttttgagacagagtcttgcctgttgtccaggctggagttcaatggcacgatctcagttcactgcaatctccgcctcctgggttcaagtgattctccctgcctcagcctcccaagtagctgggattacaggcactcaccrccattcccagttaattttttgtatttttagtagagacggggtatcaccatgttggccaggctggtcttgaactcctggcctcaggcgatccacccgctgggcctcccaaagtgctgggattataggtgtgagccactgcacctggcccactgtactttttatttaaatataatatatccttccatatcccgcaacttatgcagcagagagacctatttctctattatatccaccaaacttg

SEQ ID NO: 594183 - DNA, 572 bp, Homo sapiens
gtttccaaatcactttatatttaatacaatttaccctccataatgatcaaagaaatacaaattaaaaatagaaaaatttttgccttttgaaatttcaaatatagaagagtaaaataatagtaaccagtatttgtaagaattatggatcttgatgtatttatatcctagttcactcattcttctgaaaatatttatttatttatttatgagacagggtgatgctccattgcacagrctggaacacagtggtgcaatcatggctcactgcatgcttgacccctcagctcaaatgatcctcccaactcagctcccaagtagctgagaccataggtgcgtgccatcacacctgactaatttttcaaatttttttgtagtgatgtgtgtcactatgttgcccagtctggttttgaactcctaggctgaagcaatcctcgtgcctcatctcccaaagtactaggattacaggcatgggacactgcccagccaaatatatattttgtgtaaattataatcattatggatcaggcattatactaggtgtctgcaaaatccatctcaaacatatatttttg

SEQ ID NO: 594184 - DNA, 622 bp, Homo sapiens
tgaatactataactttggttttctaaacctaattggaatgtgttacattaaatccattgaaaacataaaactagaacagtacactctgttaactatcttttcacccatacattgaaatattgactatagcattctaaggaacaatatttggctcagaaaaacaacgtctaaagtccttacattcatatatatatatatatatgcacatttatgcaaaaattttaaasacttcaaatccaagattcagtctattattgtgttagtctgctttgaggttattttgccctatttaatgatgaatttttatagtccataatcttgaaatgatgtgatccatagtattttaaatctatgacaacttttacattttgttaaaatgcacatttctgaatggtgccaaaaaatacccacgaatttacttttcaatagcatttataagaaacgttcctaactatctattcttgaatgttctttgacagttcatgaatctttcatatcattgaccattttctggtttttcccaggcaactaatgttgacagtgctccaacaatagacttcttcttattataaatgcttctactatctggtaaaactcaatagacccactgattcatagaatt

SEQ ID NO: 594185 - DNA, 583 bp, Homo sapiens
ctccatgactctggtacctcatcattaccaatgtgagaattattaacttgatctaatattcttcacaactaatatacctgagagaaataagtctatttaatttttaattttggggggaatatacacattttcttttgacttttagcaatagtgaattggttagacacttttctttaacaatatatgaatcattaatacatcatcaacaatatagtcatctggagtttgtcatattttcttatattcttggcactttttttgttcttaggcatttctggctgttattcaagtctgatcttaatattactgattcagtttttgggaatataaattctgatatttccttctttgatttctgttactcttccatcttcttaactttcctcattcacattccacttagattatgcagtttgaatcttggagtcgggtctgttggggccagttrtttaactactcttattctcagcatttacactagaaatgaaaggatgagaactatgttatagggcttctgcaggattacacaaatagacagtaagatgccagcacagtatcaaacatagttggtcttaagtatata

SEQ ID NO: 594186 - DNA, 538 bp, Homo sapiens
gcactgagataaaacaatgaattaatttctgtaatgtcacataccttgaactctgagggacagaaatatttaatttcctaatgtgaagacatagtttaaggaaattaaaccagcgattttctcactcaagtaatatgttttattttaacccaatgaatatatttatacaatactataatgtctataaatttttcttctataaaaattaatggatctggtaaagtttagtcactaattaatgaaaaggcagagcatcttgatttttgagtgatatttttaatttctgtagcttaaaaaattatgaaacaactcatatttccaacttcatcctcttgctgataccctactgtcttcctattattattggcagtaaacttgtcttgcctgccaagkgagtcacttgagatgggaacatttcttgattagaacctacttgggtcaaagtaatataaagaatatataagaatgaaagaaaaaaaataccatgctttatgaacacacagaaaaacatatgtatataagtgaattgtttaggaaa

SEQ ID NO: 594187 - DNA, 602 bp, Homo sapiens
gcatgtgagaatgaatggatgaatgaatgaccctttcttggccgggcatagaatgaagggggcaattcaaagcattagaagacaagagggaatcttggaacctggtaccccaccctaagaaaaataaaacaagttgaagaattagcgagaatgtgaatctggatagatatcttcaaataaatccttggtggtccctgggggtaaatatttaagcaagctgggctagaaagtggcataatttagaaggaagcaagtggcccttatttatatataacatttttaattatctggctgactgataagactttcagccgacaactaaataacgagaaasagctacacgtctccagggcctttcttctggaaaaacttttctggtcccctcttccctgaactggtgcaggcgtgcaaagaaagctccgtgccacgcccggcagcctccattctttggtagaacgcagcgcagcaatagccgccaagtcccctcctgggtacagtacagctccacagcgcccctgctggtggcttgggaagggcgcgcaagcagagaaagcaagtgtcagagccgggactggcctcccagggcatcgcctacagcttgt

SEQ ID NO: 594188 - DNA, 619 bp, Homo sapiens
gtttatcactttcacggatctttgaaaaatattggcatttgactattgayatgaatttttttgtcttctgaatctgtgtttagtatgttgattctttaactttttggacttatagaatacagttataactattcttgtattcttgtctgccaattctaatacctgtgccaaggctgggttggttttgatggatttattttcctcctcattatgggtcgtattttcctgcttctttgcttacttagtaaattttgactggataccaaaccttgtgaattgtactttcttgctggatatgtttgcatttctagaaacgtttttgagttttattctgatagactattaaattacatggaaattgtttgattcttttggttcttgcttttaagatttattaggtaggatgagagcagtgtttaatctggagttaatcattttccactatgaaagcaagactcttctgaatgctctacctaatgtaccatgaattatgaggctctcctgactggctggtggtaacaggcacaattcccagccctgtgtgagctctgcacactgttccctttattcattttgggacattctttctttggcctggggtagttttctcacatattta

SEQ ID NO: 594189 - DNA, 619 bp, Homo sapiens
gtttatcactttcacggatctttgaaaaatattggcatttgactattgatatgaatttttttgtcttctgaatctgtgtttagtatgttgattctttaactttttggacttatagaatacagttataactattcttgtattcttgtctgccaattctaatacctgtgccaaggctgggttggttttgatggatttattttcctcctcattatgggtcgtattttccygcttctttgcttacttagtaaattttgactggataccaaaccttgtgaattgtactttcttgctggatatgtttgcatttctagaaacgtttttgagttttattctgatagactattaaattacatggaaattgtttgattcttttggttcttgcttttaagatttattaggtaggatgagagcagtgtttaatctggagttaatcattttccactatgaaagcaagactcttctgaatgctctacctaatgtaccatgaattatgaggctctcctgactggctggtggtaacaggcacaattcccagccctgtgtgagctctgcacactgttccctttattcattttgggacattctttctttggcctggggtagttttctcacatattta

SEQ ID NO: 594190 - DNA, 469 bp, Homo sapiens
ccctctttatggccctggtctggggtcagaaaggaagaggactggtatgcattgaattcttcttgggtgcctggcaacttctagcacatgtgtgcatgttgtttcatttaagtcttcacaataatttggccagaggagtattaytacccttgtttttgcatgagagggaactgggctcagagaaattaggggactggctaaactcatacagcagggcaggggatcagaagcccagtgcacctgccctgtctcatagcgtctttttattggggcacactgtggttatatattgagcccaactggcaaaactatgcagtaggtgaagtgaaagttgaactcagcatccttcacctctcccttgtgtgagcctctctggcctctcttctatcaaatcaccccatgttgggcactgtgcattttttttatgcttattatctcatttggttccccaaacagtgctgccagcata

SEQ ID NO: 594191 - DNA, 476 bp, Homo sapiens
caccttgttatgcaatagatcaccagaacttatccttcctgtctaactgaaactttgtaccctttgaccaacatacactgcatgcccccatcctctggcacccaccattctactctctatttctatgagtttgacttttttagattccacgtatgagggagattatgcaatttttgttttccatgccaacttccagggcatggaatggtgtggacggtacacgtgccccaaattggctacagagctgtgggcagaaaacttgaagtcaacttgagggcattttggaatctggctctgaggcacacagcaggcttgatgggtctttaatgacaaccattggagaaacaggataatattcctccctgcctctgtccacttgggattctataataaaacagcatacactgagtggctaaagcaatgatcttcaatttctcatggttctggaggctrgaagtccaagatctgggtgccag

SEQ ID NO: 594192 - DNA, 595 bp, Homo sapiens
gatagatggtgtccgacttgctatgycaaatggggtaagcattatttttcaggagggtagattaggcaactctattaaagaggctgcactgcattctgtaaatggtatgaggctaagaggacatgtcctttgggcaccatccaagccggaatagaagccaattccaccatcgccttcactctggtctttctttctcctgcctattcaataatctccccaagctcttctttttcatagaactcaattattttcctttgatgaacttatacaaatttgaagtacaaattttctatggttttcttaaacaaatctctcttttgctgctctgtaaaatccataaggtttctgttgttatgaccagtgaccaggaaaatgctgggcatgtgaagacctttgggtaggcatctgttgaatgggtgaattgatgaatgaatgaatgaatgaatgatgtaattaattgctaataagacccaagcacacagtatcaatcatctataaagctggcatatcaaagctttgttatatcccaaaagagttaacccagcacacaaggagggaaacacaacattttatttcattttatttcacctgtgcc

SEQ ID NO: 594193 - DNA, 595 bp, Homo sapiens
gatagatggtgtccgacttgctatgtcaaatggggtaagcattatttttcaggagggtagattaggcaactctattaaagaggctgcactgcattctgtaaatggtatgaggctaagaggacatgtcctttgggcaccatccaagccggaatagaagccaattccaccatcgccttcactctggtctttctttctcctgcctattcaataatctccccaagctcttctttttcatagaactcaattattttcctttgatgaacttatacaaatttgaagtacaaattttctatggttttcttaaacaaatctctcttttgctgctctgtaaaatccataaggtytctgttgttatgaccagtgaccaggaaaatgctgggcatgtgaagacctttgggtaggcatctgttgaatgggtgaattgatgaatgaatgaatgaatgaatgatgtaattaattgctaataagacccaagcacacagtatcaatcatctataaagctggcatatcaaagctttgttatatcccaaaagagttaacccagcacacaaggagggaaacacaacattttatttcattttatttcacctgtgcc

SEQ ID NO: 594194 - DNA, 595 bp, Homo sapiens
gatagatggtgtccgacttgctatgtcaaatggggtaagcattatttttcaggagggtagattaggcaactctattaaagaggctgcactgcattctgtaaatggtatgaggctaagaggacatgtcctttgggcaccatccaagccggaatagaagccaattccaccatcgccttcactctggtctttctttctcctgcctattcaataatctccccaagctcttctttttcatagaactcaattattttcctttgatgaacttatacaaatttgaagtacaaattttctatggttttcttaaacaaatctctcttttgctgctctgtaaaatccataaggtttctgttgttatgaccagtgaccaggaaaatkctgggcatgtgaagacctttgggtaggcatctgttgaatgggtgaattgatgaatgaatgaatgaatgaatgatgtaattaattgctaataagacccaagcacacagtatcaatcatctataaagctggcatatcaaagctttgttatatcccaaaagagttaacccagcacacaaggagggaaacacaacattttatttcattttatttcacctgtgcc

SEQ ID NO: 594195 - DNA, 474 bp, Homo sapiens
aggatgatgagtgtgtgagtctcctgtggttgctgttacatgggtctgtagggtgataaaatgagaacattttagtcaaatatttcagtgcccagtttgaggacagtaggttgataraccagccaggaatattccaggctttctctcatccatttgcaagactgaaactggccttgtctgtaccacgtttcaataacaggctgccttattaacatgtactcctgtaggataggaaaaacgctgactcaataacactgcctgaaaaaaaatgcaacaaaatatgtttttcctctttctccctctcttcttattcctcctccctctcctctaattgtataaagtgatatcttattatcttcatttttatttctcattacattttgattttggcatctcctcatactcattgaatgagatttctagggatgttgcaatgcattcccacaagttcagtggcttaaaacaacacacatt

SEQ ID NO: 594196 - DNA, 474 bp, Homo sapiens
aggatgatgagtgtgtgagtctcctgtggttgctgttacatgggtctgtagggtgataaaatgagaacattttagtcaaatatttcagtgcccagtttgaggacagtaggttgatagaccagccaggaatattccaggctttctctcatccatttgcaagactgaaactggccttgtctgtaccaygtttcaataacaggctgccttattaacatgtactcctgtaggataggaaaaacgctgactcaataacactgcctgaaaaaaaatgcaacaaaatatgtttttcctctttctccctctcttcttattcctcctccctctcctctaattgtataaagtgatatcttattatcttcatttttatttctcattacattttgattttggcatctcctcatactcattgaatgagatttctagggatgttgcaatgcattcccacaagttcagtggcttaaaacaacacacatt

SEQ ID NO: 594197 - DNA, 474 bp, Homo sapiens
aggatgatgagtgtgtgagtctcctgtggttgctgttacatgggtctgtagggtgataaaatgagaacattttagtcaaatatttcagtgcccagtttgaggacagtaggttgatagaccagccaggaatattccaggctttctctcatccatttgcaagactgaaactggccttgtctgtaccacgtttcaataacaggctgccttattaacatgtactcctgtaggataggaaaaacgctgactcaataacactgcctgaaaaaaaatgcaacaaaatatgtttttcctctttctccctctcttcttattcctcctccctctcctctaattgtataaagtgatatcttattatcttcatttttatttctcattacattttgattttggcatctcctcrtactcattgaatgagatttctagggatgttgcaatgcattcccacaagttcagtggcttaaaacaacacacatt

SEQ ID NO: 594198 - DNA, 603 bp, Homo sapiens
  misc_feature 217: n = A,T,C or G
tgtctatgtggctgatcattctccagtctcactggaagtctaccaataccatggaacctgaatcccattgttactaatggatgtggctaccctgactccaaatcacactgttagactgcccagtgtgtaacaacacccctacagaaacaaatacactcctgtctttgttcggcacacattccaaaggcttagatgtcaagttttagagtcaacgcanacccagacctctcctgtgagcaaagttaaattctagccaactccaaagcccagacctctccttgagcaacgttaaactctttacctccaggtctgcagaagtgaacagatgtcyacatcctaatcccccatgtgggagacagaataatgcccccaaagatgcccacattctaatccccatgtggtggaaaaaataatgtccccaaagatgtctgcatcctaatccccatgtaatagaatactggccccagagatgtccacatcctaatccccatgtggtagacagaataatggccccaaaggtgtccatgtccaatgaatatgttgatttacatggtaaagcagactttgcagatgagatcaagttaaaaatcttgagatggggag

SEQ ID NO: 594199 - DNA, 603 bp, Homo sapiens
  misc_feature 217: n = A,T,C or G
tgtctatgtggctgatcattctccagtctcactggaagtctaccaataccatggaacctgaatcccattgttactaatggatgtggctaccctgactccaaatcacactgttagactgcccagtgtgtaacaacacccctacagaaacaaatacactcctgtctttgttcggcacacattccaaaggcttagatgtcaagttttagagtcaacgcanacccagacctctcctgtgagcaaagttaaattctagccaactccaaagcccagacctctccttgagcaacgttaaactctttacctccaggtctgcagaagtgaacagatgtccacatcctaatcccccatgtgggagacagaataatgcccccaaagatgcccacattctaatccccatgtggtggaaaaaataatgtccccaaagatgtctgcatcctaatccccatgtaatagaatamtggccccagagatgtccacatcctaatccccatgtggtagacagaataatggccccaaaggtgtccatgtccaatgaatatgttgatttacatggtaaagcagactttgcagatgagatcaagttaaaaatcttgagatggggag

SEQ ID NO: 594200 - DNA, 542 bp, Homo sapiens
gggagccacccttcaactgactacaaggacccacagggttggaatgaaaggaagaaaagtggctgattcagaggccgttcagctgacagctgggcatagagggatgggagggagaaggcaggtgaatagcagtgacttgtcctgaagtcgaaattagaggaagctgtgaggcctgaaaatagggatgagttccattttaggcatttggacatgttgagtttcaggaaactgaaagactgggcacctcttaggttgacagcattgatggaaacaaccatgatttcccatttaagacaaacaaaactcttggtgccgttaacccatgaagaaaactgacataggtggccatcgacctacactcgtctttgaacagctacagtacctagaagccattttagtttttacttttattattattattttttgagacagagtctcrttctgttgtccaggctagaatgcaatggcacaatctcagctcattgcaacctctgcctcccaggctcaagtgatcctcctgcctcagcctcccaagtagctgg

SEQ ID NO: 594201 - DNA, 609 bp, Homo sapiens
ggtgcccagacatgagggtctgcatatgagggtgatgttgtgtgggtccagctttccaggggaagcagaattggggcccaagttcataaagaatcccacccccacaccagtgcccagggtggggatgcaggccaaggggctgaccacgggtgctgggagagttcttccatgctgaattttcagcctttgtttggatagagagttatatgaaaatggcagatgtctgtgtgatggtcccttacctgtgaaggtcagaggtggtgaactcacagaaagaaacccaaaattctgttttaggattggaatggttagtattcctcctcctaacccaaccatgttatggcctggagggcatttttaaacattctgtgccattttctgcactgattggagtctgcatttctcccgaagaatgtcaatattatgcccccaaattagacactyactcatagcagcacctataaagataaagttttgaactcaacactggatagtcatttccaaaccaacattgttatacattatttaaagaaagtctttgcactcccattaggcttcttgggcagccataacaaagtcccacatatgggaatgcttaaacagaagaaa

SEQ ID NO: 594202 - DNA, 609 bp, Homo sapiens
ggtgcccagacatgagggtctgcatatgagggtgatgttgtgtgggtccagctttccaggggaagcagaattggggcccaagttcataaagaatcccacccccacaccagtgcccagggtggggatgcaggccaaggggctgaccacgggtgctgggagagttcttccatgctgaattttcagcctttgtttggatagagagttatatgaaaatggcagatgtctgtgtgatggtcccttacctgtgaaggtcagaggtggtgaactcacagaaagaaacccaaaattctgttttaggattggaatggttagtattcctcctcctaacccaaccatgttatggcctggagggcatttttaaacattctgtgccattttctgcactgattggagtctgcatttctcccgaagaatgtcaatattatgcccccaaattagacacttactcatagcagcaccyataaagataaagttttgaactcaacactggatagtcatttccaaaccaacattgttatacattatttaaagaaagtctttgcactcccattaggcttcttgggcagccataacaaagtcccacatatgggaatgcttaaacagaagaaa

SEQ ID NO: 594203 - DNA, 271 bp, Homo sapiens
agaaaaaatgagcatgtgagatggaaaagaacaaaaagtaaaagatggaagacagagatagagaaaaagagggggatgggagggrgtggtagggaagagatcaaatatctataacactaaatgccttgcatgggttaaaaaatgaatggaacatgaaaacaaattttcaaagatacaattcaaggtgaaattcctgaaatacaatgaaatttgaatctgcagacagaaatagcccaagaattacaaggctgtgtttatattgaataattaa

SEQ ID NO: 594204 - DNA, 629 bp, Homo sapiens
tttactttctttttgtgacaaatttccttatagcaaacttatattttccagatcaaggtgtagcctttttcaatcctattcaaggtaaaaataatcttctcaaaattggctatgcaatgtatataaatttcacttaagttttccaagtaattgtgggcctataaatttctaactggttacatttgggttttatctaaaccattaacttaaatttattgaactagaaaattagaaagtaaaagtagcaaacaaaataaaatgtaaacctaaccaaaaaattccaggtatatatattgatatgtatatgttcagaatatgagggacatgtcatggccatactattaagaaaaacatccaaccagtagtgtacatttacatttaaaggatattttgtaaygacagatatgtatttaataagaaaggaaagtaacggaaattcagaagtattctcattctaatagctacgtttaggtttaactctgcattatctcatatttaatgtttggtatttacaacatatttcttctgagttgatgcagcaaatcaataaaatgaggtcacccaccatactccatgcttttctaagtcatcttccaactgcatttgtggtttccttaagtaatgtttca

SEQ ID NO: 594205 - DNA, 622 bp, Homo sapiens
gtgtgtaagaattgtctagaaagaatacctagaaggatggttatagtctcactttagactccataatacttcagggccttttggaccagatagactatgttatgagatcactggaaatgttaaccacatatagaataatgacatgcactactcggaaacactctaaggactaattagcaactgagttgcttgctgccaatgccaaatggtcatccaaaatttaagttaccaacatttgtttcctttttctcaaaatatggttttaatcaaaacaggactaagcaaatraaccaagaaaatactcaaaaccttcaatatggcaccaacacagctcaaatactttattcctctttccttctaatccctaggccattttccactggcagagaagatagaacagactgaataaacacaatagaaaaataggttttgatctctcaaatcaacaagccacttctatgccctttgagctgacatcacaaatcactttaatataattttctgtagttcctttataaacaatgccttaagtggtgggctaagtggggggaagtgcttaaggaatcagcctttccccagtggtgtttcgcagctatgtgactggtcgtttctacttactgat

SEQ ID NO: 594206 - DNA, 560 bp, Homo sapiens
taccacctgtcaagaaatggcagcctaatagtagacatgtattcttcacacttccaaagcacatggctcattctgtggaagtcagttggtgagagtgtgggggactgaacagaaaaggctggacacccaccccaagggcatgctttaaactcagttaatttcaccacagtctagtgtagctcaattccatcagtgatagagttgaccagaatggagaagccaactcatactcactaaccaagtagtaaatgacatatgtagtctttagctcatcagctaatcggggcagcaaaaaaagcatgtgaaacgacagtgtcaacacatttctttttgtctttattatatctgattcacattaggttctgatcctatttatgcctgaagcatgccttatttttatagctttattgaggcaagatagatyatttctttctttgtctgccctgccttgggagatgattttcaaaaagccaaatccttatatctcttttccttttcattttaatcttcataaagacatgctttcaccacatcatgccagaaaatgagtaatcgtgcta

SEQ ID NO: 594207 - DNA, 607 bp, Homo sapiens
aaagtttgaagtacagaatacctgtttaggacagygcacttaggtgagacaatgagagctcttctagagagaaaaataccttaaaagggtgtcttagccagctcaggttgcaataacaaagtatcatagactgggtggcttaaacaacagaaatttattttctcccagttttggaagctgggaagtttaagatcaaggttctagcggattgcagattctggtggtgccacagctttcttcctggcttgcagattactgactttttcctgcatccttacatggcctttcctctgagggcacaaggagggggaaagagagagagaccgcacatgagcatgagtgagcgcatgtgcgggccaaccccagtgtcttttcttataagaacattaatcctatcagatcacggccccacccttacaacttcgtttaaccttaatcacttccttagaggccacagccacactgggggttagggtttcagcatatggatagggaggtgggggtgtaaacacagaggggatgagacatcaaagaaaaaattaccctggttctgacactttcagatccctgtataaaaaacaggtgttgggatgggaaatattgtctt

SEQ ID NO: 594208 - DNA, 553 bp, Homo sapiens
agctaacagtccaactttcacagactccctttctgttaagggtggttatgaaactccattctgtctaataagaaagagagagaaaagaggaatgctatcaaacagggattctggaaagctattgttttttctgacaaaaaggggcagacattgctggtttgcatcatttgccctttgctcgccctaattattcttgtatatgatggttgaaggttcagcagcctccttgtgtccatgaggatgttaggactcagaaaccaataccccaaagtatggcattttgacatgcttaagtgaagaggcctcaaggtctctctgacctccctgtctccatcaccatgtctcccaagaagttgaagtttttttcttcccttctctgttatgtcatagtctactgcagaaaagaagaccaagatgtgaccacacctgagcagaatagtttacaagtataatgactatctccaaagataatttaaattccaaggagaaatatttacaaattaatctctgttccyggatccattcattttcagtagtaatcccctcaatggaa

SEQ ID NO: 594209 - DNA, 500 bp, Homo sapiens
tggggtcacggatctctcatcattcagcaggctagcttgggcttcctcacacgacagcagcggcagggtcccaagagcctcaagagtggatawgccccagtgagcaagagctttcaggtctctgcttgcatcacatttgctattgacccattggccaaagcaaatcaaatggctatgcccagagtcaatgtgggaggggactgcccaaaggcatggatacagacaggtaaataatttgtggccatttatgcaatctaccaatatccccataatcaaacacagaaccttataaatagtagacatgaaataaatacttattgaactgaatgctatctccccttcatgaaaaatcgagataagaccaataatctctttcctctctacactaagtacaccacatcaaggagacagaagaggctggctgacccctcctcacagagggttacctcaccctgggtgatggagcccatcacttgacagtcacctcataaccatggtct

SEQ ID NO: 594210 - DNA, 587 bp, Homo sapiens
gatatcccaatatttgggctagagaaggagctagcaaaggagactgagaaggggaagctactaacatagaaggaaaaccaggacagtaagcatgatggaaaccaagataaaagtatgcatcaataacttaaaaatggcatactaaaaatgtctaaagatactgcagagagagttttccatcacctgttgactactgctagggctctgggcaaaatgattgatctgtttcttagtctccatttcctctcatctttctctgacattctggcctcaaattcaaagtagtttctctgggttgtgaagcaggttgtaaaatttcttmtatttccttctaccccaacccaagttccagttcgttggagactattttagctggatgtgggtccagtgaaaacatcatagtgtgagtggccagtaggtccaaacttcttaaactgtgtttgccatcctgctgaatggggcctgaataagcaaagaccattgctgagggaggcaatgtaagctaccactgcagcgtcttcaagacaaaaatactgaatatttttgcatgtgtatttattttaccaaaataaaaattttattaattg

SEQ ID NO: 594211 - DNA, 516 bp, Homo sapiens
ctaggtttcccatacgtctgctctgtcattcacggctgcattggcagcccagaagccatggatgtggctgcaggagcgtctcctccagttgggcagcctgcctggctggggtgggatacctgggttctggcccagctctgtggccggatgacacggggcaaggcgtttactgccctgagatcgatttcctgaaacatcaagtgttctttcaccacagtctctaaggcacactgttgcacacaggatccacatgaaaagagaaaaggaagctgggcgtggtgactcaygcactcccagcactttggaaggccaatgcgggagaatttcttgagcctaggagtttgtgagaccagcctgggcaacatcgtgagacctcatctctgtagaaaatttaaaaattagccgggcatggtggcacacgcttgtagtcccggctacttgggaggctgaggtgggaggattgcttgagcctggcaggctgaggctgtagtgagttgtgttcacaccaatgcagtc

SEQ ID NO: 594212 - DNA, 406 bp, Homo sapiens
tcacgctgctaataaagacatactcaagactgggtaatttacaaaggaaagaggtttaattgattcacaggtccacagtgctggggaggcctcacaatcatggtggaaggtaaaggaggagcaaagccacgtcatatatggagacaggcaaaaagagagcatgtgcaggggaactcccatttataaaaccatcagatctcatgagasttatttactatcacaagaacataatgggaaagaaccccccgccccatgattccattacagttgggaattataattcccacttgtatgggagttacaattcaagatgagatttgggtggggacacaaccaaaccatgtcagtgcagtaagtcctagcttgccaaataaaggttctgtttcttaactccaaatgaagattg

SEQ ID NO: 594213 - DNA, 372 bp, Homo sapiens
catccctaaattcacagttgagagcaatgttcagggcaaggttggwggtcccatcctcttcgcatctggttgtccatttatcttccccatttttggtggtactcttcttcttcttttagggtcacagctctgacctggacatggtacctgtgggtaccatttgagaaactggaaagacgtgacaggtataggaaagcagagcagtggtcccatttctcgagtggagaaaagtttaaaattctcaaatccccctagtcacattgaaaccacttttgcacaattataactgaggaaattatgacagtgaaaaaaatcagacctaactaactccatcttgcttctaacttttaagctgtccttgttcattcttgg

SEQ ID NO: 594214 - DNA, 360 bp, Homo sapiens
tgacatgtgctcacaatatgtaaatgagcatgcaaatcactcaagcawctggaagatgaaagtgtataaacaaaataaagtcatccatggctctgtgctttagcgtcaaaggaaaacctttctaagatgcactgaaagttgttaaatatattcaagtttcacatatgagtgatttacagctgtggcaggacagtcttgtcactcagattagttcaaggtaagtaggtttgaaatcagacagactcaaattcttccccgactctgtgacttactagctggtgacattgggcaaatcaactttttttcagcttaatttcatctatacaatggaaaaaagtgagtagatatgaaagtaagagt

SEQ ID NO: 594215 - DNA, 379 bp, Homo sapiens
ctaaattcacagttgagagcaatgttcagggcaaggttggaggtcccatcctcttygcatctggttgtccatttatcttccccatttttggtggtactcttcttcttcttttagggtcacagctctgacctggacatggtacctgtgggtaccatttgagaaactggaaagacgtgacaggtataggaaagcagagcagtggtcccatttctcgagtggagaaaagtttaaaattctcaaatccccctagtcacattgaaaccacttttgcacaattataactgaggaaattatgacagtgaaaaaaatcagacctaactaactccatcttgcttctaacttttaagctgtccttgttcattcttgggtgtaggctgaa

SEQ ID NO: 594216 - DNA, 372 bp, Homo sapiens
catccctaaattcacagttgagagcaatgttcagggcaaggttggaggtcccatcctcttcgcatctggttgtccatttatcttccccatttttggtggtactcttcttcttcttttagggtcacagctctgacctggacatggtacctgtgggtaccayttgagaaactggaaagacgtgacaggtataggaaagcagagcagtggtcccatttctcgagtggagaaaagtttaaaattctcaaatccccctagtcacattgaaaccacttttgcacaattataactgaggaaattatgacagtgaaaaaaatcagacctaactaactccatcttgcttctaacttttaagctgtccttgttcattcttgg

SEQ ID NO: 594217 - DNA, 597 bp, Homo sapiens
tcaaaacatgtatgtaactttctaagctactattactgtatttttgaaagttatatctattgtttcctgcatgacttgcaagaaactatgcattatatttcattytggcagaaatttattaagctgaaaatcaggcactcatattcaacttaaactagaatacaaccctcttgagaatgcgtttctatttgttcctataatttttgtcattgtttgcattttttcactaaaatgtatcaaatttgagagatttcataaataataaagttattttgaatccttgaggacatcttttttgtttgataccttgagtgctttaaggacttttaaaatttagttttctatagacattcatcaagattaattacaaacagttgttaactcccagtgccatcttgtctaggcaacaaagtcacaagcattacaggttgatgaaaaacactaaactctggaattgcttcacttgcccaaagtactaggaactaatattaattatatcagtaagccacgggagcacacttgataatctaacagcacattagagtgatttgatagcaggggatatgtcttatttgtttttataatcccagcattgaa

SEQ ID NO: 594218 - DNA, 597 bp, Homo sapiens
tcaaaacatgtatgtaactttctaagctactattactgtatttttgaaagttatatctattgtttcctgcatgacttgcaagaaactatgcattatatttcattttggcagaaatttattaagctgaaaatcaggcactcatattcaacttaaactagaatacaaccctcttgagaatgcgtttctatttgttcctataatttttgtcattgtttgcattttttcactaaaatgtatcaaatttgagagatttcataaataataaagttattttgaatccttgaggacatcttttttgtttgataccttgagtgctttaaggacttttaaaawttagttttctatagacattcatcaagattaattacaaacagttgttaactcccagtgccatcttgtctaggcaacaaagtcacaagcattacaggttgatgaaaaacactaaactctggaattgcttcacttgcccaaagtactaggaactaatattaattatatcagtaagccacgggagcacacttgataatctaacagcacattagagtgatttgatagcaggggatatgtcttatttgtttttataatcccagcattgaa

SEQ ID NO: 594219 - DNA, 597 bp, Homo sapiens
cataaagtggatataagaacatgtccaacataactggggggatatattcaaaacatgtatgtaactttctaagctactattactgtatttttgaaagttatatctattgtttcctgcatgacttgcaagaaactatgcattatatttcattttggcagaaatttattaagctgaaaatcaggcactcatattcaacttaaactagaatacaaccctcttgagaatgcgtttctatttgttcctataatttttgtcattgtttgcattttttcactaaaatgtatcaaatttgagagatttcataaataataaagttattttgaatccttgaggacatcttttttgtttgataccttgagtgctttaaggacttttaaaatttagttttctatagacattcatcaagattaattacaaacagttgttaactcccagtgccatcttgtctaggcaacaaagtcacaagcattacaggttratgaaaaacactaaactctggaattgcttcacttgcccaaagtactaggaactaatattaattatatcagtaagccacgggagcacacttgataatctaacagcacattagagtgattt

SEQ ID NO: 594220 - DNA, 597 bp, Homo sapiens
cataaagtggatataagaacatgtccaacataactggggggatatattcaaaacatgtatgtaactttctaagctactattactgtatttttgaaagttatatctattgtttcctgcatgacttgcaagaaactatgcattatatttcattttggcagaaatttattaagctgaaaatcaggcactcatattcaacttaaactagaatacaaccctcttgagaatgcgtttctatttgttcctataatttttgtcattgtttgcattttttcactaaaatgtatcaaatttgagagatttcataaataataaagttattttgaatccttgaggacatcttttttgtttgataccttgagtgctttaaggacttttaaaatttagttttctatagacattcatcaagattaattacaaacagttgttaactcccagtgccatcttgtctaggcaacaaagtcacaagcattacaggttgatgaaaaacactaaactctggaattgcttcacttgcccaaagtactaggaacwaatattaattatatcagtaagccacgggagcacacttgataatctaacagcacattagagtgattt

SEQ ID NO: 594221 - DNA, 638 bp, Homo sapiens
atattcaaaacatgtatgtaactttctaagctactattactgtatttttgaaagttatatctattgtttcctgcatgacttgcaagaaactatgcattatatttcattttggcagaaatttattaagctgaaaatcaggcactcatattcaacttaaactagaatacaaccctcttgagaatgcgtttctatttgttcctataatttttgtcattgtttgcattttttcactaaaatgtatcaaatttgagagatttcataaataataaagttattttgaatccttgaggacatcttttttgtttgataccttgagtgctttaaggacttttaaaatttagttttctatagacattcatcaagattaattacaaacagttgttaactcccagtgccatcttgtctaggcaacaaagtcacaagcattacaggttgatgaaaaacactaaactctggaattgcttcacttgcccaaagtactaggaactaatattaattatatcagtaagccaygggagcacacttgataatctaacagcacattagagtgatttgatagcaggggatatgtcttatttgtttttataatcccagcattgaacacagtacctgtcacataggagaaattaaagaaatat

SEQ ID NO: 594222 - DNA, 624 bp, Homo sapiens
acttctactattaggggtcttctktggttccatatgataggattttttttccatttctgtgaaaaatctcattaggattttgataaagattgcattgaatctatagatagctttggttagtgtatggctatttttacaatattaattcttttgatccatgaatagaagatatttttccaattgtttatgttgtcttcaacgtctttcttaaaaattgtagttttcttgggaggccaaggcgggcggatcacaaggtcaggagatcaagaccttcctggctaacacggtgaaaccctatctctattaaaaatacaaaaaaattagccgggcatggcagcatgcacctgtagtccagctactcgggaggctgaagcaggagaatggtgtgaacccaggaggcggagcttgcagcgagctgagatcatgccactgcactccagcctggtcaacagagtgagactccacctcaaaaaaaaaaaattatagttttcagtgtacagattgttcacctctttgattacatttattcctaagtattatagatttgagtctattgtaaatggtattttcttaatttcttttttagaaagttcattgttagtatacagaactctattacttttc

SEQ ID NO: 594223 - DNA, 575 bp, Homo sapiens
tttgccagttttcattttgcagacaaaaataaaatgattcataaccttttcatatgtttttttctctttgggattttccctagaaaggtagtaaatgaacacaatgtatttatttaagtgcaacataagtgaattccatttttatgatattatgattttgtaatgcattgagcctcagatatgactgttcaacacctgattatgcttctaggtcctcagttgtgtgaggccagtgaaataggaccttctgtgcctttttgctctttagagcactgaatgaggactttggcacctaatttggaattttggagcacactatttcatcagtttttgccatgtagatgctccagaaatttgcctcccttctgccagggaaatgactccagcaaagctgttctgtggaggcactctgagagaaagaaggcagaaaatcygaaaagaaatatgaaaagcaatgtaatgtgctgagcattttaaagttgtcaatagaaataaatactttcatatatttatggtaaaagcaccaacttaaataaaaatgtatgttttagaatacattcataagcaccaagtca

SEQ ID NO: 594224 - DNA, 386 bp, Homo sapiens
gctggtaataaggatccctgtcagcaacttgaaagccaagtggaattagaaagagaggaaaattttgctttggcccaggattgtagaatgtttaattgttcaaattctcagtatgtttgcgcacacaaaaataactgcgtatgaaaagttacttggttgakccaacagagattcttcaggaactctgaaactcagataaaagcaaagttaaatatgataaaccccacaaatcatgatgtgttacctttgcatagctcttcacaaaaatgcactctttgatagtatttggaaacagttaatgctcaatagtctatgagaactgaggaaattttctggtggaatgctttaggcataacaagatattccagaatgtgtttttgttttgt

SEQ ID NO: 594225 - DNA, 449 bp, Homo sapiens
tttgctctactatattaattgataaaatagatagactggaggtatctagacccatgctatctaatagcaatataatgtgagcacagatgagagccacatatrtaatttcaaatgttaaatgtcctagtgtctacctttttaaaaagtagcagggaacagttggagttaattctaatatattttatttaactccaaatattctcacatcaacatgtactcaatataaaaattgataaggtatttttatatttttataccaactctttgaaatctagcacttttcaattcacacttgtcatgttttaattgttcaaaagtcatctgtgactattgactactatgttggaaagcacacagatctagaatatatgacaaataccacaattagttttgcaccaacctaatacctatctggatttatagaaatacacaccataatgttcttttaa

SEQ ID NO: 594226 - DNA, 375 bp, Homo sapiens
caaagttcgttttatacaacattccataatacactcattgtataaaatgagatctagctatacagtttggagtactttcccagtatgagatccaaaattactcagtaggaatcctcaaagtctacctacaaaaattttgaggagctgagcacagtggttcgagcctataatccaagcatttgggaggccgaggtggacggattgaggtcaggagtttgagaccagcctagccaacakggtgaaaccctgcctctagtaaaagcaaaaaaatagctgggtgtggtggcacgttcctgtagtcccagctacttgggaggctgaggtaggaggatagcttgaacccagggggcagaggttgcagtaagccaaaatcat

SEQ ID NO: 594227 - DNA, 572 bp, Homo sapiens
ttagagtatggaaataattttgattgagtagtcatagtgagaaggtagcaaatagaattatatataggtacttaaataaaatgtctctaggaaaaacaatgaaggaaaacatgctaaatcccaggtcattttgattatcttctgaaaactgatcctaagactcaaatctaggcaataataaacgatctaaacaacaaagttttccagcagctctgttctcttttagggttgttttttaatgggatattcaataaatataaataagcaatttcatgaaaagtacattaatgagtaaactacctattgtttaagggataaagcaatgagaagaatgaagggctacacttgcctccatggggaacatcaaaatcacctgcctgtggtttttttcaacttacaaaacctgcctgaacatttcgtaccacctgctactatcttttcccagatttggatacatcagtagttaaaaatargaagcgattgaaaatcactcttgtagtgagttactaccctgatgttaatgtgttcaattctcccagtgtgtgcaggtggagagcagtggagaaggtgga

SEQ ID NO: 594228 - DNA, 554 bp, Homo sapiens
tctgtttctaggtagatagatgtttacctatttatctctctctctctaaatatatatatgagaattatgcaaatatacatacttgtatacyacatagataattctctatgtaatatacaaatatactatatatatatatatatatatatatactttatgtaagttatgattctctggagaactctaatataacacccccttactcccaaaaagagcaagtgacattgggtgcttgatgattaaaagcttttctaccattacaaggcaagctgctgtacctgccttagcccttatgtgatggacaggaaaacagacagactcacagaaaccttgaggggagtcaatgagatggaggccaggtgttctggcaaataatagacaaacctcaatgcatgactgaaagtatcagaatttaaaatgatattatcaaatttgggctcatgaatgccataagaaataagatttcagtttcttttataggaggtaattggattaaattgcttaaagtaccaacaagctagactataagtgatcttataagccatacaaacatg

SEQ ID NO: 594229 - DNA, 554 bp, Homo sapiens
tctgtttctaggtagatagatgtttacctatttatctctctctctctaaatatatatatgagaattatgcaaatatacatacttgtataccacatagataattctctatgtaatatacaaatatactatatatatatatatatrtatatatactttatgtaagttatgattctctggagaactctaatataacacccccttactcccaaaaagagcaagtgacattgggtgcttgatgattaaaagcttttctaccattacaaggcaagctgctgtacctgccttagcccttatgtgatggacaggaaaacagacagactcacagaaaccttgaggggagtcaatgagatggaggccaggtgttctggcaaataatagacaaacctcaatgcatgactgaaagtatcagaatttaaaatgatattatcaaatttgggctcatgaatgccataagaaataagatttcagtttcttttataggaggtaattggattaaattgcttaaagtaccaacaagctagactataagtgatcttataagccatacaaacatg

SEQ ID NO: 594230 - DNA, 554 bp, Homo sapiens
tctgtttctaggtagatagatgtttacctatttatctctctctctctaaatatatatatgagaattatgcaaatatacatacttgtataccacatagataattctctatgtaatatacaaatatactatatatatatatatatatatatatactttatgtaagttatgattctctggagaactctaatataacacccccttactcccaaaaagagcaagtgacattgggtgcttgatgattaaaagcttttctaccattacaaggcaagctgctgtacctgccttagcccttatgtgatggayaggaaaacagacagactcacagaaaccttgaggggagtcaatgagatggaggccaggtgttctggcaaataatagacaaacctcaatgcatgactgaaagtatcagaatttaaaatgatattatcaaatttgggctcatgaatgccataagaaataagatttcagtttcttttataggaggtaattggattaaattgcttaaagtaccaacaagctagactataagtgatcttataagccatacaaacatg

SEQ ID NO: 594231 - DNA, 326 bp, Homo sapiens
gttgggattctccagtttaatggctcttttcttttaattcattatgagttgctttagactctccagtggttgtgtctaatagcattgctcatctgattacatttcagtacagttttttcttgaaacatgtttgaaaagctgcactttatgctaactaattttattttaaatcaaaattatatccctatcgataattatgtaaaattttaaatatatatattatgtatatcatatatcatatatatgatatatatatcttamatcaaaaaatgaaaaattaattattataaaagtgcacagaaacaggcattatatttaaaaacaga

SEQ ID NO: 594232 - DNA, 508 bp, Homo sapiens
atctctttttcatagtggctgcactaatttacaatcccaccaacagtgtgtaagtgttctcttttctccatatatttgccaatawatattttctttggtctttttgatagtagccattctaacaggattgaggtgatatctcattgtggtttttatctgcattttcctgattagttatgttgaacattttcttcatatacctgttggtcagttggtcatttgtttgtcttcttttgggaaatgtctattgagatcatttgctcatttaaaaaatttgattattatattttttctgtggagttgtttaagttctttatatattctggatattaactccttgtcagacgtatagtttgctatagtttgcaaatattttcttccattctgtaggttgtctgttaagggtttcttttgctgtgcaaagcattttagtttgttgtaatcccatacgcctatttttgcttttgttgcccgcgcttctggggccttattttaaaaatccttaccc

SEQ ID NO: 594233 - DNA, 421 bp, Homo sapiens
cttgtcagacgtatagtttgctatagtttgcaaatattttcttccattctgtaggtwgtctgttaagggtttcttttgctgtgcaaagcattttagtttgttgtaatcccatacgcctatttttgcttttgttgcccgcgcttctggggccttattttaaaaatccttacccagcccactgttataaagcatttcccttatgctattttatagcagtttcatagtttggcagtttatatttgagtctttaatcccattttgagttgatttttgtatatggtgagacgtaggggctgagtatcattcttctggatgtgaatatctaattaccccagcaccatttattgaataaactatctttttcccaatatatattgtgccacctttgtcaaaaatcagttggctgtaagtgtgtaaattt

SEQ ID NO: 594234 - DNA, 421 bp, Homo sapiens
cttgtcagacgtatagtttgctatagtttgcaaatattttcttccattctgtaggttgtctgttaagggtttcttttgctgtgcaaagcattttagtttgttgtaatcccatacgcctatttttgcttttgttgcccgcrcttctggggccttattttaaaaatccttacccagcccactgttataaagcatttcccttatgctattttatagcagtttcatagtttggcagtttatatttgagtctttaatcccattttgagttgatttttgtatatggtgagacgtaggggctgagtatcattcttctggatgtgaatatctaattaccccagcaccatttattgaataaactatctttttcccaatatatattgtgccacctttgtcaaaaatcagttggctgtaagtgtgtaaattt

SEQ ID NO: 594235 - DNA, 598 bp, Homo sapiens
gagtgagggacatgcttacgtatytgctcacacaatatcaccatgttatagccttttaaaaacagtcactgaatattgtaatactgcattttaacaaaactagcatgtcaagaaacactggtacttgaaagtgtttatttgtgttggatgaaattagactgagggttggatctgctccttatggtagaattaagtcagtacctgcttaggctctcagatgacctttgttgcagactataaccacatctgtggacaaagacttcaagacacaagagaaacaagtctgaaaactatgttaagcatttaaaataaaaataaaatcttaaaaaaatatgagtatattggccggactgattactttgcatcatgtaattagttcacaaatgagtttagtctagagggctacttttaagctaatcagcttagttttagccctctcttttagatatcttcattggtaactatttcacttactaggattataaattctatttattttgcaagcaaatctatagaaatcgaagtgtcagttacagatgtctttttcatctatatttctgataagagagaatgctgaccttgaaggaacagcttagaa

SEQ ID NO: 594236 - DNA, 607 bp, Homo sapiens
ccattcctggaaaatctgttctagcacagctaacaaactccttttgaaacataaattttcctttctttcctccctccctccctccttccctcccttccttcctttttccttttctttccttccttcctgcctcttttctatccttcctttctcctcccttacaccctttcttccttcttttccccctctgtctccctctctttcttttttgctgcagcttgtcacttcactatgtaatataagaacccagcaaatagaattagaaggctttttagagcagctgaygggaaagaataaaaacactgggccccagtattcttgaatgagaattctggctatgtctgttaaaagctgggtaatcttgagcaagtttatctaacctttcttgaacctcaaattcaccttcttaaaagtggggatgataatgactaccttgtaggatcaccatgaggagtaaatcagatactgttatcatgtcacatgcttaggggctaccaaaaaatattaccttcctttacatttctctttttcccttgaaaattataagataacaccaaattcctcactgggcatataccaagcatatttgtttggaatgagtgttatg

SEQ ID NO: 594237 - DNA, 612 bp, Homo sapiens
ctctcacaactttactcaaaattgcaacccactctatttctctgtgttttaaattttctccgtagcttttttcatcatattatataatttatctgttttttcttgtttctctttttcccccagtgaagtacgttgcatgggagttgactttttgtttgtttggtaactgtgggaaataattcactcagcaaacgaggtggaacaaatgggtatctcttagcagagggggtgtgaaaaaggaaaggaatataggacaagaagtcatggaggatataatggacgctgaactcaagaatgtgtatgttttgaatatcctggaataagagagagagcttgcttagaggaggttataaaaaatcttttggaagtagtgtaccgagatggaactggtgagaggtgagcaagtgctccaactaagggttcctamtttgccttccctattttgcaaggactgctgaaggatagaacagaccaatgtgggaaatattaggataaatcctttggggacaaaaacaaaagaagtaaaataaatcttgataccttcactttttttttttcatgagaacgcaacggtagaaacacacaatttcttttatgtcgagtccaaagcat

SEQ ID NO: 594238 - DNA, 625 bp, Homo sapiens
ccagtagtgggattgctggatcatatggtaggtctatttttagtatattaaggaacatccaaactgtcctccataatggttgtattaatttacattatcaccaacagtgtgtgggggtttccttttgactacattctcagcagcaytggtgattgcctgtcttttcaataaaagctattttaattggggtgatatgatatctcgttgtagctttgatttgcattattctgatgttcaatgatgttgagcaccttttcatgtgcctgtttgccatttgtatgtcttcttttgagaaatgtctattcagatcttttgcccatttttaaaattggattattagatttttttcctatagagttgtttgagcttcttatgtattctggttattaattccttgtcagatgggtagtttgcaaatattttctcccattctgtgggttgtctcttcactttgttgattgttttctttgctgtgctaaagtttttttaacttgatgtgatctcatttgtccatttttgctttggttgttgcctgtgcttgttggtatcacccaggaattacttaagaaatttttgcccagaccaatgtcctagagagcttctccaaagttttcttgtagtagtt

SEQ ID NO: 594239 - DNA, 467 bp, Homo sapiens
tgattttttaatgtattgttgaatttggtttgctagtattttgttgaggtttttgcatcaatattcatcagagttattggcctgtagttgtttttttttttttttttttttttttttttaaatgtgtctttgcctggtcttggtatcaraattatactggcctcatagaatgggtttggaagtttgccctcctcctctctttttcagactagtttcagtataattgatattagttcttctttaaatgtttggtagaattcagcagtgaagccattggttcccaggcttttctttacttggagagtttttattatggctttgatcacatcacttgttattggctgtttgggttttaggtttcttgatggttcaatattgacatgttgcatgtgtctagaaatttatccgtttcctctagatttggccatatagttcctcatagtagccactaatgatcttttgaattt

SEQ ID NO: 594240 - DNA, 528 bp, Homo sapiens
caggtggtcaggaagggaagatcacaagcaggctgcaggctcaggggtacaagttttagcttgtccacaggcatttcttaactcagggaagcctaaaccctcatttaaaggtctttaagctgattaggtcatgtccacccagtataatctcctttttgatgaatttaaagtcaactcattatggatcttaattgcacctgcagaatcccttcacaacaacatatagattagtatttgattgaataattggggcaagatgtgtgtgctacaaaatggtcactgcctctttttcctyctctaactctctagggactgccccttttagcctgccctaactggaaaaagaattccctagaagggaatccttggatggtagttgcacctaggcaaattgatacatccaaggccatcacagagttaagtaccttaccacatttaactcaccaaagacagtacctcactcatagttagcattcagtaattgtgattattgcccttattaaagccataaaagtttagttagccaaa

SEQ ID NO: 594241 - DNA, 318 bp, Homo sapiens
aattcttttttttttttttttttttttgagacagtgtcatgtctcactctgttgcccaggctggagtacaatggtgtgatctcagctcactacaacctctgcctcccaagttgaagagattctcgtgcctcagcctcccgagtagctgggactacaggcatgcgccatcacacccagctatttttttttttttttgkatttttactggagacgagttttcactatgttagctaagctggcctcaaacccctgacctcaagtgatccacctgcctcagcctccccaagtgctgggatgacaggtgtgagccattgcacc

SEQ ID NO: 594242 - DNA, 547 bp, Homo sapiens
tgaagccaacaggattccctataaggaaagtaacagaaaggaccaatctgcttttcgttccttgtttctgctttcttcagctttttctgcctaaaaagcccaccctctctgctcagctaatgggagttcctttctgttttgtaaactgggtactgtccaattcatgaattgctaataaaagccaattagacctttaaaactcaatttcttgaaatttgagttttagacataactgtacctacttgcaaattcttgtccccacagaaagtattaatgaacataagacatcataagagacctggccatataatagttacatgtcaaagacttgtatgagtcagttgattttgattcagctcactctacagttggatatccatttagaaaaacaaagtgtgtgaaagttctggtttatcctgaccaccactcagtttgccagtaacatattctgccctagttaagagtactaactttggagagagmcaaacaaacctggactagtcatattagacatatgaacctcagcaaatgtcttagcctccctatg

SEQ ID NO: 594243 - DNA, 376 bp, Homo sapiens
gcctcaacaatatcagggctcagaatcagcttctatgttctagtcacctttgcctcattgtgacaatagggcagtcacatatctaactgttacattttcacagaacagtgtctttcttttgaatggctattatcttttttttttccttttagattcacggggtacatgtgcaggtctgttacatgggtatattgkgtaatcccgggctttgggcttccactgaacccatcacccaagtagtgaatatagtacccaataggtagtttttcagcccttgccctcctccctcccttcctccctccttttggagtctgcaatgtctattgtttccatctttatgtccatgtgtacccattgtttagctcccacttataaa

SEQ ID NO: 594244 - DNA, 558 bp, Homo sapiens
ccactgcttcaagtaggtaggagctatgtgggtttgccctggaagtaacctgttgcttggaatcaagcccaagtctaggacagctaattccagagcctatttctggtagaaacacaggaaatgagtgggaatcagtatctttttttgttggatgttgagatggcttattatacagcattgctatgggctcaatrtttgggtccctcctaaaatgtatacggtgaagtcctctgacatggtttggctgtgtcctcacccacatctcatcttgaaatgtaggtaccataattctcacgtgttgtgggaggacccggggcaagtagttgaataatggggtgggtctttcctgtgctgttctcatgctagtgaataagtctcatgacatctgatggttttataaatgagagttcccctgcacatgctctcatgcctgctgctatgtaagacgtgactttgctcttcatccaccttcagccattattgtgatgcctccccagccatgtggaactgtgagttcattaaacctctttttctttataaattacccagttctgaata

SEQ ID NO: 594245 - DNA, 558 bp, Homo sapiens
cttgtgtccatgacagagtaattggccagactggtcccctacctctgccataaacaacttggagcttgaatagaaaccaggaaacagcagttttcagacactaagcaggcagcacaggtctgtgattctagagagaaggaaacaaaccaggctgggaccccaggcgaccagcaggggtcatttggtttcagtggggccttgcaggtcctggggagctgagggctgcacaattctcagagctccctcagggctgggggatggttatgttgagagcagccaggtggagatcagatcacacatggagctggctcaggacccctggaaatgagactcacatccatgcggccagcgtccgtgtcccctgcctctgagaatggccagggctgggaagccaatggagatgttcccgcctgcactgctgtcacactgggtggygttgtcagggtgactcacgtggacactcagcatctgaggacaaatgagagtagatgttggggtcctgtacacaaaaggcaccacaacaggagaatgagtcctgtcatcacttgacctggctgt

SEQ ID NO: 594246 - DNA, 540 bp, Homo sapiens
caatgtgggccaatgatgataggaatgatctccgtcagtctaatcttcaaaaactaaatgaccctggaagcttggactaaagcacagatccattcattcattcaacaaacattaactgtgccagccattgtgctaggtgcaggggtgaaagatgtggacacaactgaccaggataaccctactgtcatgaatcccaccttctggggaggaagacagaaaatgaaccctaaatatcaaccagtgataatgtctaggaagaagataaaacaggatgatgacaggtagagggtgatgagctggcaggggagggagggccaattttagccaacaaggtcagagaaggtgactccctaacagttgaggtggggaaaaggacccagacgtgggagatgtagggaaagtgtgttcccagcagagagacacattcaacgcacttgagacactcgrgattcggggatggcagaattaattctaagatacagggttcaaaggagtgtcatctttgttgtttaacttgcatgatgaatgatcaaaagcacc

SEQ ID NO: 594247 - DNA, 616 bp, Homo sapiens
ttccagaggtaatcttatgagtgtctataccacctctactctgcccacaactgtcctaatacacacacacatacagagagagagagatgcattattttcttggtctcaggcaattccaacattcttgccagtagttagactgcacggtaagtggattctgtagttgamagctaataggaataaaaagaaaaagacatcgaggtggactctaattggttcttcgaatcaaagatggggagaaacaaaagcttaatgtcatttctagtgagcagaataagtcaaggtgccaatggtagctgtgtagagtatttactttcagtccatcctgcctaacccatcacagtgaacacttaatattcagattccaaagcttccggagaatatacccagaactgttaacttaatggatggaactacagtaacttcaaagagctctaaaatgagatacccggtatgggttttggtacaaagaagagagaaacaattcaatttgataaagaggtgttgggtatcactaattgccaagtcctggacttggcataacaggttagaggaggaattagacctagttccggcactaaggaaggtcataaggacgtgaggagaatttgtccca

SEQ ID NO: 594248 - DNA, 517 bp, Homo sapiens
gggcagccacgcccccacccgccgcagcccctactcactcttcgtataggagagccaytatgtaggtgagggccaccagcaccgtcaggagcaggcccgtggggctggcgtgcctgaaaggacagaggcaggtcaggcctggctggagccagggtctctcagggccacggcccacctgcccaggctggcccttcctgccgtgaccctggccctccggccgacgctgggccacttgggccgaccgagcccaggcagcactgccccttcctgagtctggcttttgtgccaggaccagggtccccatgttctcggtcctgatccatttatcatcattgtctgcctgtctggcctggctgggttccctcagggtggggcctgctcactctttccgggtctccagccgccagcccagagctgggaacgcagccccaggcggaagagtcccagtggctagggctgttcattcccgcacaggaggagattctggggcaaagtgctcccgtctcccagaaaccat

SEQ ID NO: 594249 - DNA, 517 bp, Homo sapiens
gggcagccacgcccccacccgccgcagcccctactcactcttcgtataggagagccactatgtaggtgagggccaccagcaccgtcaggagcaggcccgtggggctggcgtgcctgaaaggacagaggcaggtcaggcctggctggagccagggtctctcagggccacggcccacctgcccaggctggcccttcctgccgtgacccwggccctccggccgacgctgggccacttgggccgaccgagcccaggcagcactgccccttcctgagtctggcttttgtgccaggaccagggtccccatgttctcggtcctgatccatttatcatcattgtctgcctgtctggcctggctgggttccctcagggtggggcctgctcactctttccgggtctccagccgccagcccagagctgggaacgcagccccaggcggaagagtcccagtggctagggctgttcattcccgcacaggaggagattctggggcaaagtgctcccgtctcccagaaaccat

SEQ ID NO: 594250 - DNA, 609 bp, Homo sapiens
catacatatttacaggccagaactgctatagtcatagttgggaacaggggtgaggagggacaaacaggcaggaacatggcccatcttccagaagtgccacctgccactccacattctcaccatgggaggtgtgttcagttcaaacctagaatcattaaagtcagcatcagagttcacttcttttagtgggaacctcacacttctgaaagtagctttcaagaaatgggtaaacaaatcttttaatgaaaattatacactctgcctaattcctcattacctttggcttccagtttctgggtatgagggggttggggaagaagacaaatgtgtttatttgttgactggggctgtatattgtaaaataaagggagaaaggtagttctatttgataggagactgtagtgggaagactgatgcctagtgtcccaattttttattaacatccaagaaaatccagaatgaaattaagtatttacacyggccagagctagtactgacagtcaagctattgcccaattctaggaggaatttttataaactacaagactgggtagattgaaaaacacatttgtggggggtagagccaagatggccgaataggaacagctg

SEQ ID NO: 594251 - DNA, 574 bp, Homo sapiens
gcagggtggggcattgcctaacctgggaagtacaaggggccggggaactcccaccccaagccaagggaagctgtgagggactgtgccrtgagggatggtgctatctggcccagatactatgcttttcccatggtctttgcaaccctcagaccagtagattccctcgggtgcctacaccacctgggccctgagtttcaagcacaaaactgagtggctgtttgggcagacaccgagctatctgcggtttttttttcataccctagtggcgcccggaaccccagtgagacaaaaccattcagtcccctggaaagggggctgaagccatggagccaagtggtcttgcccagcgggtcccacccccacagagtccagcaagctaagatccactggcttgaaattctcactgctagcacagaagtctgaagtcaatctgggacacttgagcttggtgggggcagggggatccaccattactgaggcttgagtaagcagttttcccctcacagtataaacgaagataccaggaagttcagactgggtggaacccaccacagtgcagcaaagccactgtagc

SEQ ID NO: 594252 - DNA, 516 bp, Homo sapiens
tggctttggagtctgcacagttaaacactaggcaattctttgttcttaagactgacttaaggtgtatttaaaaaacggattggatgggcgtagtggctcatgcctgtaatcccagcactttgggaggccaaggcctggatcgcctgaggttgggagwtcgagaccagcctggccaatacagtgaaaccctgtctctactaaaaacacaaaaaattagttgggtgtggtggcaggcacctgtaatctcagctactctcgggagggtgaggcaggagaatcgcttaaacctgggaggcagaggttgcagtgagctgactttgtgccattgcactccagcctgggcaacaagagtgaaactccatctcagaaaaaaaaaaccaaactgataagattgtgttatcgctatagcactaagtgattactatctactgtgtcctttattctgattgtccttttcactcaaaattaaggaaaagacaaatctgtaataagcctgaattgctctgcttactggga

SEQ ID NO: 594253 - DNA, 504 bp, Homo sapiens
gtaacttctactctgcttttagagcttctcctgtattttcagtgttcaaaataatcagcttgaaataatctttatgccaaagaggcatactttgggatggcgtattctggtctcttaaatacacatcactttctttgagtcctcctttcctttcttggtcgagataaacagatggatcctctgttacccacagagcactttgtttcttctctaaccatactgagtgctgtagtctgatgtgcatgagaattaattttctttttgaatatgtctgttttattcaatagtttatgaagtccttgagctcagcagttgtatcaaattcatttttatatccttggtacctgtggtaaattgaataatggtcccctgtagatttgcatcttctaatccttggaacctgtcagtatgttaccttacatggtaaaagggatttcttagatgtggttaattaaggatcctgagatggggctattwtcttattatcatggtggagaaaggcag

SEQ ID NO: 594254 - DNA, 628 bp, Homo sapiens
tggatcacttgatatcaggagttcaagaccagccttgccaacatggtgaaaccccatctctactaaaaatacaaaaaaaaaaaaattagctgcacatggtgatgcatacctgtaattccagctacttgggaggctgagacaggagaatctcttgaacctgggagacagaggtggcagtgagcraagatggcgccaccactcactccagcctgggtgacagagtgagactccatctcaaaaaaaaagaaaaaagaatttggcattcagatgcatgtaaaattgttatgctttgcatttccctgagtatcttgtaatatatttttgactatttgtaatattaacttataacattaacttataatattaattgtcatattgtcttttagatattgtcattttaaacctttttgtagtatagatattaccctttccctatcatccaaatcacaagtttttttctaaaagtaacatgattcttttgactttagttatggtgtctttttccagatatattttaaattttaatatactgtctacttttttattaaaaaaagacaaaattatgtgttatcttacctcctccagaatggctacaataaaaaaatagaaactaacaaatgttgttaag

SEQ ID NO: 594255 - DNA, 640 bp, Homo sapiens
cactttttccaggtttaagatatcactaattgagctactatttccattttattggcagcgtttttattgatctcggtgtgacactgctatgttatagaataggtacatgtttagctttataagaaactgaaagactgtctttccttagtgcttgtggtactttacacacatcaaaagtgttctggttgctccactcctcaacgtgaagtttcctggtggctatagagtgatatttcactctagatttaatttgcaattacctagtggcaaatgtctttaagtactctctaatgtgtgtattggtcattcatgttttttcctgttaagtgcctgtttaaatcattaccccactcaaaatatgtttttttggtctttttaatgttgaggtataatttttctttattaccaatgtactagtgtttttcagatatgtttgtgaatattttctccctcattattccgtgcctatttatttttgacaaagttttatataagcagaattttaatcaggtaaaatttattgayggctgttgctttctgtgtactgcctaaataactttaactaatctcaggtcataaaaatatagtccttattttcttttggaaagctctttagtttggattttaagctaagatcaat

SEQ ID NO: 594256 - DNA, 476 bp, Homo sapiens
tttaaaagacctttagtccattctacttttcttgaagacggaggatcgtaagggatataaaggtttcactgaatactaagagcctgaaaaactgcttggctgatttgactaataaaggctcrtctgttatcagactgtattgagggtgggaaggctaaactgaggaattatgtctgacagaagggaagaaatgactgtggtggccttctcagaccctgtaggaaaggcctgtacctatccagtgaaagtatctacctagactaagaggtattttagttttctgactgggggcatgttgagtaaagctaatttgccagtcctgggtgggcaaatcctcgagcttgatgtgtagggaagggagggggcctgaataatccctgaggagtagtagaatagcagatggaacactgagaagttatttccttgaggatagatttccaccatggaaaggaaatgagaggttctaagaggcgggc

SEQ ID NO: 594257 - DNA, 476 bp, Homo sapiens
tttaaaagacctttagtccattctacttttcttgaagacggaggatcgtaagggatataaaggtttcactgaatactaagagcctgaaaaactgcttggctgatttgactaataaaggctcatctgttatcagactgtattgagggtgggaaggctaaactgaggaattatgtctgacagaagggaagaaatgactgtggtggccttctcagaccctgtaggaaaggcctstacctatccagtgaaagtatctacctagactaagaggtattttagttttctgactgggggcatgttgagtaaagctaatttgccagtcctgggtgggcaaatcctcgagcttgatgtgtagggaagggagggggcctgaataatccctgaggagtagtagaatagcagatggaacactgagaagttatttccttgaggatagatttccaccatggaaaggaaatgagaggttctaagaggcgggc

SEQ ID NO: 594258 - DNA, 523 bp, Homo sapiens
gaaacttgcaaaaccatcttgaggttayagaaagaatagggatttggatcatgtcagactaggttacagaagggagagaagatgtggccttgctagcaaaaacattcttgttatgtaaataaaacctcacaggtagcagctttcagagaaaatagatgctaaatatttctttcagacctttatatgtatcagactctcacttattatttttagattcagaaaatcgaaggactggctgcatcaatgcaagaatatctacagatgcaaatttcccccacaaaagacagctttgcagagtcacttaagttggctggtcctgtttcagccatctcaaaatatgtcaaatatatatattttggggtagaatattgtaatttccttcaatatcattaagaatactaaaaattgcaaatcacacaattttttaaaaatgggtgttaaatattcaagaagtagttagtaactgttttcctcctttcttttttgcttctcactgcttgtacctaaaatggcacaggttcaa

SEQ ID NO: 594259 - DNA, 523 bp, Homo sapiens
gaaacttgcaaaaccatcttgaggttacagaaagaatagggatttggatcatgtcagactaggttacagragggagagaagatgtggccttgctagcaaaaacattcttgttatgtaaataaaacctcacaggtagcagctttcagagaaaatagatgctaaatatttctttcagacctttatatgtatcagactctcacttattatttttagattcagaaaatcgaaggactggctgcatcaatgcaagaatatctacagatgcaaatttcccccacaaaagacagctttgcagagtcacttaagttggctggtcctgtttcagccatctcaaaatatgtcaaatatatatattttggggtagaatattgtaatttccttcaatatcattaagaatactaaaaattgcaaatcacacaattttttaaaaatgggtgttaaatattcaagaagtagttagtaactgttttcctcctttcttttttgcttctcactgcttgtacctaaaatggcacaggttcaa

SEQ ID NO: 594260 - DNA, 631 bp, Homo sapiens
tttctaaattgtgttcagtgaccatattttacttttataattacaaatatatttggaaacattctagaactcaaagcagagacatagtgtagttatctaatgactttggagraaatctgcttcgttttgattcttggcttacctcatattctgagtgatcctgggtgactttcttaattattcagtgtctcagatttctcatctgtaagaatactagtattggtaccccccaaaatcatcatcagaattaagagattaatatatgtaagctgcttagtatcttcaaaaacctttattatttgaaataagcaattgagaattttttaattgttaaaacagatgtaatctatttttcatttcccttgacaaaaccatagtctgagtaactcatcgtcttctcaagtgagccaattaactattcctcaccatctgtttggccagtgatctagtcccttgctcccagtcatatgcaacggactttaagagtatagaggtctaagaatgctggaagggcaccagattgaagagtatttggctatgagaaatcaccagagggggaaaaaatatatacatacgtgtgtgtgtggtgtgtgtgtgtgtgtataaatatttagatggaataaaatatgcc

SEQ ID NO: 594261 - DNA, 527 bp, Homo sapiens
ttgtcttctcatttccttggcagtatctttcacaaagcagaagattttaattttaatgaatttcagcttattgataatttattccatggattttggttttggagttatatctgaaaaggcatcagcatacccattcttctatgttaccttcaagtgtttgtaaaattttatgttttagaattaggtctatgattaattttgygttaatttttgagaagtgtgtaaggtccagttttttttttcctctctctccctctttttttttccttccttccttcctctcgtttctttctctctccttccttccttcttttcttctcttccccctcccctccccttccctcctctccccttctcttcccttctgttttattttcttttgcatatggttgttgatttgtcccaggatcatttgtaaagaagaacaccttttatccattgcattgcctttgttccttgtcaaagattggttaactaaattaacgttagtctatttctgggctcactattacattctattaatatat

SEQ ID NO: 594262 - DNA, 527 bp, Homo sapiens
ttgtcttctcatttccttggcagtatctttcacaaagcagaagattttaattttaatgaatttcagcttattgataatttattccatggattttggttttggagttatatctgaaaaggcatcagcatacccattcttctatgttaccttcaagtgtttgtaaaattttatgttttagaattaggtctatgattaattttgcgttaatttttgagaagtgtgtaaggtccagttttttttttcctctctctccctctttttttttccttccttccttcctctcstttctttctctctccttccttccttcttttcttctcttccccctcccctccccttccctcctctccccttctcttcccttctgttttattttcttttgcatatggttgttgatttgtcccaggatcatttgtaaagaagaacaccttttatccattgcattgcctttgttccttgtcaaagattggttaactaaattaacgttagtctatttctgggctcactattacattctattaatatat

SEQ ID NO: 594263 - DNA, 588 bp, Homo sapiens
tttggtttttaattttaagtaggaataatatgttttattaaatattactaagatttacatttaattgtgccatattcaccaccttaattctcttatccctttattaaatttctggcttcgtatttaagatgttttgatgatattaaaggattttggctctttagggaggatcatctttttttttttcttttatagtttaaaaaagtccagcattagcagacatttgcttgtaattttctcactgtagtragaggaaataagccaaagcccctagataagaagttgctcaaatctagttactcacttcccagttctagcccatggagaaaggaataagcatgatccttgagtctgactttttagatgaaaatggttacataaggtttctaaagcatgctgattatagagcaaacattaaaacattcagtggcaaatctttctgaactttggtagcaattttaataatgaaggtatcgtatttagcctaaaaattaccagtttaagcaactgcataaacacaactggtgtggggggtgtaatttttaacaagtgacctggccaatataatttcagagtctcattcgtatt

SEQ ID NO: 594264 - DNA, 588 bp, Homo sapiens
tttggtttttaattttaagtaggaataatatgttttattaaatattactaagatttacatttaattgtgccatattcaccaccttaattctcttatccctttattaaatttctggcttcgtatttaagatgttttgatgatattaaaggattttggctctttagggaggatcatctttttttttttcttttatagtttaaaaaagtccagcattagcagacatttgcttgtaattttctcactgtagtaagaggaaataagccaaagcccctagataagaagttgctcaaatctagttactcacttcccagttctagcccatggagaaaggaataagcatgatccttgagtctgactttttagatgaaaatggttacataaggtttctaaagcatgctgattatagagcaaacattaaaacattcagtggcaaatctttctgaactttggtagcaattttaataatgaagktatcgtatttagcctaaaaattaccagtttaagcaactgcataaacacaactggtgtggggggtgtaatttttaacaagtgacctggccaatataatttcagagtctcattcgtatt

SEQ ID NO: 594265 - DNA, 588 bp, Homo sapiens
tttggtttttaattttaagtaggaataatatgttttattaaatattactaagatttacatttaattgtgccatattcaccaccttaattctcttatccctttattaaatttctggcttcgtatttaagatgttttgatgatattaaaggattttggctctttagggaggatcatctttttttttttcttttatagtttaaaaaagtccagcattagcagacatttgcttgtaattttctcactgtagtaagaggaaataagccaaagcccctagataagaagttgctcaaatctagttactcacttcccagttctagcccatggagaaaggaataagcatgatccttgagtctgactttttagatgaaaatggttacataaggtttctaaagcatgctgattatagagcaaacattaaaacattcagtggcaaatctttctgaactttggtagcaattttaataatgaaggyatcgtatttagcctaaaaattaccagtttaagcaactgcataaacacaactggtgtggggggtgtaatttttaacaagtgacctggccaatataatttcagagtctcattcgtatt

SEQ ID NO: 594266 - DNA, 377 bp, Homo sapiens
tagtttaatgggctaatcaaataaattctgcattaaatgtatacttttagattttcatggaaaaatctcccaaaatttttcataggccattcttcyaggaattctctttaattcgtgttctacttttgctttcggtggaacagagaaaatgaaacaacccaagaatcagctttcttccacgaggttttttcctcacattaacatctggaatgcttccctaatggtattctgataatatattaaataaagctgttttacatatccaaacaaccagttgacttaaaccgaatactttgccattttagtgaaggaaaaaaatatgaaattggttgctgggttgaaaaagatttccaaacctgtcagttcaaccaaatgat

SEQ ID NO: 594267 - DNA, 366 bp, Homo sapiens
gcttaagaatagtttatctaggaataaaaatttggtkcatactttccctcacagatctgcaatcactgtgccactatttttaattgttacatgttttccttctgcttcttatattccatttgtcattcagccattttccattcattttcttggatttcaatgtcaagcagtttcccccacctaccccgccattgcccttccaagtacgcatagttgttacatttgaggtttttttcttttatctttattaccagaggaaaatttggctcgtggtgatagtcttggatatcaccttcatcccctcggatgtttgtagataatcctccattatatttggaatgaatactgtagatatatgaggttgga

SEQ ID NO: 594268 - DNA, 515 bp, Homo sapiens
tctcttatcacacaaggaaaaggactggtgcttccctcactatgcaacttaaaagtcacagcacaaagactggagtctaacattcagcccggaagatccatttgcagtgctacatagtgcagtggacactgcctctgtctgagtccaaggacatttcccaacaactactgttctaggaagtctgaagtctaatgtgtgtactgtcaagtcattcatctttgaatatatgtaaagacccagtagcattcatgttttgggtcacctaatgcacactgytatattaaatgcttgctgttataactctactcacttcttaacttccacttttagaggaccctttaaaacatatctccattatccctttacatttaatacatttattgaggctttataacttgccagaatctacgctaaatactttcaacaattatcttgttaaaactgcatagtacacctatgcacgggcaggtattatcatcatcctcatgttatagataatgcagtacaggcacaaa

SEQ ID NO: 594269 - DNA, 640 bp, Homo sapiens
agttcgtttttttctcctgaaatctcctttatcactgggtaaaaaaacagctctctgatcactaacttgtaagcaaggaacccagcctacagttcagattcttacggcctataaatcttgtttaatgtagttaaaaatctattctttttttttttttttttttttttgtgggggggagatagagtctcgctctgtcacccaggctggaatgcagtggtgcgatctcggttcactgccccccgggttccagcgattcttctgcctccgccttctgagtagctgggatggaactacaggcacccgccaccacacccggstaattttttgtatttttagtagagatgggattttaccatgttagccaagatggtctcaatctcctgacctcgtgatctgcccacctctgcctcccaaagtgttgggattacaggcttgagacaccgcgcccagccaaatctaatctttttaaagtgatttttacatgagaaattttatgaatttaccttttagtactgcaacacatttactatattacttcctttttctaagaatgttttcatcattacttaatgaacaaaaacacttaagagtagaaaacagagaactggatatgtcccatgttcatatcatatcttttgtg

SEQ ID NO: 594270 - DNA, 635 bp, Homo sapiens
ctggctgtggggctggggcaccaagaaagactccttcggagaccgggcaaaacaagtgagtgaatggggcagaggttgtctgaggatgagggcagcctcatcctcctcctatctctgatctgttttcacaggttccctcctttctccctcagctgagtaagggccactgaggacacaactactgcccaggcttcgtatccctaaaccaaggaggtctttaggttagaataatcaatgtcttaaaaacaaaagcttgtccatttgagctccatgatgctaggatttatacttcagatttagttttccttagccaacttcttcagagctgacatggtagaaagcaatgccttgggaaactttgtttccagtcatcctcagacactgcagacgtcacagctaacagtcatgaattcatcttaactatcaatgaaaaggaatcccaggcagtcctagttctttcctttgtccaacattttattgattcacagattatctcacttgtgctgactctcaggaagcaggctacacactgggattggtatttgtgcctctgtactttcttttaaagacaagcagtcaaagaagagatgctaagtgacwgttcaagagcacaatttttaagtagcagggcttgg

SEQ ID NO: 594271 - DNA, 574 bp, Homo sapiens
tcaaatgtttttctgttgttttcccaacttactggcaactcttattayctgtttattaggctgactaaatatgatccatatctcactggtggtctgtttaatttcctctttttgccttctttttttttgctgtttaatttaaaatcgtttttatggctgtgtcttcaagtttactaatctttaatatcaaattttctgttaattatttctagtgggggttttaaaaatatcacatgttttagttttcatctcttgaagttagagttaggtctattttacatctgtgcttaatatgttcagtctttcctatagtttttgaacaaatggaacatagttttaataactgttttaatgttcttagttctaatattggtgtcagttgggttggttttgtttgatttttctcctcataatcggccatattttctgctttttaaaaggtttggtatttaagctattagacattgtgaattttatcttaggtgatggatgtttttgtattcttataaatatgagctttgttccagatgtaagtaattaaaaacagtttgatccatttaggtcttgttttttt

SEQ ID NO: 594272 - DNA, 574 bp, Homo sapiens
tcaaatgtttttctgttgttttcccaacttactggcaactcttattatctgtttattaggctgactaaatatgatccatatctcactggtggtctgtttaatttcctctttttgccttctttttttttgctgtttaatttaaaatcgtttttatggctgtgtcttcaagtttactaatctttaatatcaaattttctgttaattatttctagtgggggttttaaaaatatcacatgytttagttttcatctcttgaagttagagttaggtctattttacatctgtgcttaatatgttcagtctttcctatagtttttgaacaaatggaacatagttttaataactgttttaatgttcttagttctaatattggtgtcagttgggttggttttgtttgatttttctcctcataatcggccatattttctgctttttaaaaggtttggtatttaagctattagacattgtgaattttatcttaggtgatggatgtttttgtattcttataaatatgagctttgttccagatgtaagtaattaaaaacagtttgatccatttaggtcttgttttttt

SEQ ID NO: 594273 - DNA, 484 bp, Homo sapiens
tgaagctctctcctctctggtactctacctgtgactctrttctgtctaccttggtctccccagattcttaacttcatctctcaattaaaagaaatgaaatctggattcctccatgtaccatgtcctgaaactctcttgcgggcagtaggatggggtacatgtacagctcactttgttttgtgtctcttagggattatttcttcattgtatcatgtataatgtctttaaaaaacattgttttatatagtttgctttttaaaagttggttgaggtagaaagacaatttcatccctagtactccccccttgggtagaaacagaaactggattcatctaaattttgagtgtttaatttttacacatttaatattcatccacatttttggaaatttttttatgtaaataagaaaaagttcagtctgttttagcttagactgtgtaattttgcctgttcaagatctaatttttcacagtgggattttaag

SEQ ID NO: 594274 - DNA, 514 bp, Homo sapiens
atcagttctctgctgtctgtatgaggaagatattctgatgttctatagagctctctcactgtgaagctctctcctctctggtactctacctgtgactctattctgtctaccttkgtctccccagattcttaacttcatctctcaattaaaagaaatgaaatctggattcctccatgtaccatgtcctgaaactctcttgcgggcagtaggatggggtacatgtacagctcactttgttttgtgtctcttagggattatttcttcattgtatcatgtataatgtctttaaaaaacattgttttatatagtttgctttttaaaagttggttgaggtagaaagacaatttcatccctagtactccccccttgggtagaaacagaaactggattcatctaaattttgagtgtttaatttttacacatttaatattcatccacatttttggaaatttttttatgtaaataagaaaaagttcagtctgttttagcttagactgtgtaattttgcctgttc

SEQ ID NO: 594275 - DNA, 514 bp, Homo sapiens
atcagttctctgctgtctgtatgaggaagatattctgatgttctatagagctctctcactgtgaagctctctcctctctggtactctacctgtgactctattctgtctaccttggtctccccagattcttaacttcatctctcaattaaaagaaatgaaatctggattcctccatgtaccatgtcctgaaactctcttgcgggcagtaggatggggtacatgtacagctcactttgttttgtgtctcttagggattatttcttcattgtatcatgtataatgtctttaaaaaacattgttttatatagtttgctttttaaaagttggttgaggtagaaagacaatttcatccctagtactccccccttgggtagaaacagaaactggattcatctaaattttgagtgttwaatttttacacatttaatattcatccacatttttggaaatttttttatgtaaataagaaaaagttcagtctgttttagcttagactgtgtaattttgcctgttc

SEQ ID NO: 594276 - DNA, 617 bp, Homo sapiens
gaacacattaaatatatttatttttaaaaaacttgcaaaagtaggtacataaaacasaatcaattcttatagatgagaagtagcatgatggacttgtagtagttggcctaaatgcagaagtcctctttatttatgaagtaaactgtaaaactgtttagtatttttttaaaaaaatgacaagtaatgcatgcctacatggcctgcagagaaccttaataataattatagattgatgcttaagcagtattagtttttataatgtaaaatgaaattttgacaattcactaaaatatgatattgtaaactcggataaattttggagaagcatatacctgctttttttggtaactttggtgatttatattctgacagttttcttggagaaagtaaatgaacatagaattatgttttatagttagctaaacaaatcaatgctttatattaatcagtgggattgttcttaacttttgattctaaaatttgttacagatgttaattaaggtaattgtagatgtatgtaatgttgagataattgtgccataatacaacagtgttaaagtatgttcttgtaagagagaccaccttgtaaaataatttgaaaaactatttattttatg

SEQ ID NO: 594277 - DNA, 510 bp, Homo sapiens
acttacttatagtcctttaattaatgtatccgttctcagaagtaaaaaatcccattttaaaatataaaaagttaactggaattcatctgggaccaggaatatattaaatgawttctagacaaacataaagcttgcgtagagctgagtgtaaagacacaaaatgcacagaggagccttttccaaacaccgagagccggaaacctcgcccacccacaaagccatgaggctaaccacatgttaaatgtttaagcagtttaccagtttatatgagtaaatgtgctacctttcattaaaatgaaattagatattcttttttgtggggggcagaaggataggcttatcttttttatgtatatgtgagaaagaactgttagaaatgtcacactgcatgggaaatactgttttactgtaattctatttagtgaattagtgaatggtacaaaaagacaaaaaaaaatctacttgatgtgtatctataagcaaatctgcagtactcaacctatatgaaat

SEQ ID NO: 594278 - DNA, 510 bp, Homo sapiens
acttacttatagtcctttaattaatgtatccgttctcagaagtaaaaaatcccattttaaaatataaaaagttaactggaattcatctgggaccaggaatatattaaatgaatkctagacaaacataaagcttgcgtagagctgagtgtaaagacacaaaatgcacagaggagccttttccaaacaccgagagccggaaacctcgcccacccacaaagccatgaggctaaccacatgttaaatgtttaagcagtttaccagtttatatgagtaaatgtgctacctttcattaaaatgaaattagatattcttttttgtggggggcagaaggataggcttatcttttttatgtatatgtgagaaagaactgttagaaatgtcacactgcatgggaaatactgttttactgtaattctatttagtgaattagtgaatggtacaaaaagacaaaaaaaaatctacttgatgtgtatctataagcaaatctgcagtactcaacctatatgaaat

SEQ ID NO: 594279 - DNA, 237 bp, Homo sapiens
atgtcaaactggacggttgttgccttaataatgtcaataatatagataatatcatctaaaatttttagttctcttatacagactgggaattgagttgtatattamgagcttctttcatttaattctcataacatttctgtgatgtagataatattactacttctactttactgatgaaagaaaaaaccctgagagtaagaaaagtgaggtaacttgacttggttactcagctcagac

SEQ ID NO: 594280 - DNA, 566 bp, Homo sapiens
aattccttaggtagaccaagtagggtcttcatgtcaggaccctggcttagcctgcaatttcatctcatccctctctttgtcatgggtcctactcttcatcccaacaacactccttagatattccctaaaaggcagagttgtttgtgcctccatgccaatatctatattgtgtcctcagctttgaatcacctttccttgagcctcttctctctcttactcattcttcaagatttattttaagcatctctagcattggaagccttttatgtgtccctcctctcccagtctgcacttcctacgaaagctctaagacattcacttcagctattatcattcctcctctttacattttcaatatcacacccaggcaccaataactacaagagtcacaacaaaarccacacagcaatgagctttttttcacatcatttactaagctcttctgacacatcgaacactgtgctatgtatagtgcatgttatcctctttcttttgcagtaactttaagagatcagtgtgtataagctttaggagtaaagttatctcagagaagttaagatacacat

SEQ ID NO: 594281 - DNA, 587 bp, Homo sapiens
atgaaatctcatcaaatcagtttgaaaaataacaactcattctttttacttgcagcataataatccgtggtatagatagacatcaatttatactatttccatctttggaggacattcaactttttttcccttaatgacatttttaatagaaatttttattaagacaaatatagattcatctgtggttataaaaactaatacatagaaatatcatatcttcttcatacagttttcccaatgaaaatactttataaaactatagtctagtattatagtcaggatattaatgaaaaaataactcatctatsttattcaaatttcctttgttttacttgtccccatttatgtgtgtacacatgcatgtatgtatttatttcaataaaattttatcatatatgtagttttgtgcatccaccaccaccatgatcaagatacagaactgttccatcatgacagggatccctctcgtccttttataacctcatctacctcccctcatacctattctagtcttaaagcctttgaaactgcgaacctgtttctagtcttttctaaaattttatcttttaaaaactggtatataaatg

SEQ ID NO: 594282 - DNA, 572 bp, Homo sapiens
tattaactatacattttatatatatatgtgtgtgtgtgtgtgtatrtatatatatatatatatatatatatatatatatatatatatatatataaaatattattttctaggcttttggattttttttagaatttttttgtcttgtttcatttctgcatcttggcacttctaataaccatgacattgtgtaaagatttcatatttgaaaattttaaaaataaataaattccaagttttggtcttgtctctgcttctattacttgcattattgttagtatattaagtaccttttttgggtctcagcatccctgtgtgtaaaatgaggaaagaaactctaaggtcattttcagcacaaattctatgaaacctgtaattacttctatttcatggtgtttcatgaagtgcccctgagcttttttttttcttttttttctttttttttttaacaattcaggcttacattcttctcaaccattttaatagctctagtgctcccaagggagggaaaattatagcaaatgaacagattatttgctccccatgatgcagtatcttggaaaatttcaaacgct

SEQ ID NO: 594283 - DNA, 543 bp, Homo sapiens
ggaccttcaggtaatatcatatccctgtacttatttgtataactcactattctgagtgtttacctggccagcaacaacaaccagtgtgctcacataccatgtgagaacatccatgggggtgtgagcgtgtggggcatcaatcagctcatgcccagggtgctctgtcagaaggcaaagggtgtagctccaaactgctacagttttcccaccccagctgggctcaggcctattcgggtctcttaggccctagctctgttcttctcccagccaccatttttctgtatagtgagacccacgtatcttcagttttccaagtatttctgttttcttctagtttacatccattctgacaccttatatttttattttctaatgtctccaggcttgctgtgagggacagcgtaggcagatgtakcaaaatttgccgttttgatccaaattgtaagctgccctttatcctttcctgataaacttggatctcttctatcatttataccttctcttcccactgacatgatggatgagtttgacttcttatcactc

SEQ ID NO: 594284 - DNA, 590 bp, Homo sapiens
cctgctctttttttctttctgtttcattttggacagtttctattgccatgtcttcaagtttactaatctttccttttgcaaggtctaatctgctggtgatcttattaagtgtgtttttaaccacagatgttgtagtttgcacctctagaagttaaactttcatctactttttaatctttctgtgttttcttaacatatttaagcttttctctagcttcttgattatatgcagtatagttataatgatttttattgtctttgtctattaagcctgtcatctatgtcgtttctagattagtttggattgatttatttttctcacaattttgsatcattgagtggttcctgattctgtgcatgcctagtgaatttttttttttttttttttttgagacagagtctcactctgtcacccaagctggaatgcaggggcacgatcttggctcactgcaacctctgcatcccgggttcaagtgattctcctgcctcagcatcccgagtagctgggactacaggtgcgcgccaccatgcccagctaatttttgcatttttagttgagatggggtttcaccatattggccaggatggtc

SEQ ID NO: 594285 - DNA, 592 bp, Homo sapiens
caacagacaaactgtgtgtgtgtgtgcgtgtgtgtgtttgtgggtgtatgtatgtgtgtaacatatgccttaatagtgtatttcattaaaatatcaaaataaggactataataccaaaaamaaaagtgaaaaaggttttatgttgggggaagactttgggagagagaggaaatgggaggacaatggcaggcacttaaattaatttgctacatcttacttctattaataaaaggaaaggaagggaaggaaagagtgagtgactaaaaggatgttattacgcttagtgaaatacaatatatttaaatagaatattatattcatgtcacatgtttatttcatttctgctgagtctccttttccccattgtctatcagaacttggttgggatcccactttcgtggagttcccctttctccctttcactgggatgaggtgtggggaggctgagggacttgcacaaatcacagagcatgagctcactttacagtggtgagatgattccattcagcataattagctctatgtgaaaataagatcaaaatacccctctgtgaatgcattcttagaaaacctcatacacagttaatttcca

SEQ ID NO: 594286 - DNA, 534 bp, Homo sapiens
cacattaaaaaaattataatcaaacagttaaaaatctgaagacaaagagaattttgtcaacagacaaaaaaaaagtccacacacacacaggcacacaaaaagaaaataaaaatgaagtgtcattatatacaagaaatccataatgagataataagcagatttctcagcagaaatcatgcaggtcagaaggcagagggatcttgtattaaaattgtcaagaaagamttgtatgcaacaaaactgtccttcagacaggtttgtgggagaaattagacattcccagataagatctgagagagttaattatcactagaccaaccctatgtgaaatgttaaatgaaataaattaggtcaaaatgaaaagatgataggcagtaactcaaaaatgtatgatgacatataaatctttgataaagatatgggcaaatataaaaacaaggtttatttttttcattttggttggtaacttcaggttttatttcttacagcatttttaaggctaatgaataaatattattataaatctatattaat

SEQ ID NO: 594287 - DNA, 556 bp, Homo sapiens
taatgtgaccattaagtatacagactcttgaggacagattttccacgttcaaatcttggctttgcatttaccagctgtgtggccttggaaaattaattaacctctctgagacccagtttcttcctctttaaaactgggctaataataacatacggcaatttttaagcctagttaataaatgsaaaacattcgtaatactatatgacttgtaattacaatataaatattaactattgttatttgtaaggcaacatttttttttcttttttgagatggagtctcacactgtcacccaggctggagtgcagtggcgtaatctcggctcactgcaacctccacttcctgggttcaggcgattctcctgcctcagcctcctgagtagctgggattacaggcaggtgcaccatacccagctaatttttgtatctttaggagagacagggtttcaccatgttggccaggctggtcttgaactcctgacctcaggtgatcccgcccgccttggcctcccaaagtgctgggattacaggcgtgacgaccatgcctggctgacaac
